United States Patent Application Publication US 2005/0228172 A9 - sequence listing, part 182

SEQ ID NO: 817767 - DNA, 646 bp, Homo sapiens
tttccataaggttctgaattgtccccgaaaggggataatttgcattatttctagatataaggaaatatcacagctacattaaagagcagatggttgtctgattcttgagaaatacatatgtatataatattttgtatctatagtttataaatctttctgcatatttagaactatatgttctaaataaatgtatttctaaagaagtaaatggctataatcatatatgtgtatatatacatatacatgtatgtcatataaataaaatcacacatacacattcttagtaaaaagattatcatctttttcttataagtgcttcgtttttaagtgtttcattctgacatatattataaaagaattttcagttcgttggtcttttttatgtttttacatccaagtattttcatttgctctggctaactcattctcactctattgattttagtttaaaactcttctttcaggaagtccagtatcctaagttaagaataaatttctcttttggggccttstaaaacttggctcttccttgccattgtactcaccgtcgcttaaacacttgacattactaaccacaacacataaacatggggaagagatggtctcccttttttaccagggtgtttctcccatgatgagcatgggt

SEQ ID NO: 817768 - DNA, 486 bp, Homo sapiens
catgttggccaggctggtctcaaactcttgacctcaagtgatctgcctgcctcagcctcccaaaatgctgggattgtayacaggtgtgagccaccatgcccagccttaccctgttataatcttcttagcactgaccactactagatgccataccatatgtccactggttggtttgttcattttatgcttacagtctagcagcctgggctgcaaagacctggagagcaaagagttggccttctgttgtacactgctgtatcatcagcttctaaaatcatgtgtgacacagagcagggggtcaatatatatccactgaatggctataaagtgtctagaaatatttacattagactaattgtaactgattaccttcatgagtggagtaaggatggaaatggtagaagttttaatgtatactcctgtgcaatttgattgatataatcaaatttattgctgcttatgcagcaacaacatcttgggagcaaa

SEQ ID NO: 817769 - DNA, 564 bp, Homo sapiens
atagacatttcagcaacatagacatttcttattaattaatgcaactaatggagctttgaggactggtttttggaatcactgagttagaaaataagtaaaggcatttcttctacattctgcttactcagagaaagcaaatattaaaaattgtatatgtatatagacactttaacataagtagacatgctttttctattattcattttgcaattaaactgtttgctttttgatagtggccaaaaaaacatataaagacttttaaaaaaatacaatatatatggtttatttatgaatgcataaatctatattacaattaaatgaactctgtaatacttacacttaagttgtttgctatgacaatatttaaaaccagtgcttccctaaatgcccacattagaaagtgggaaagatctaaaattgacaccctaacatcacaattaaaagaagtagagaascaagaacaaacaaattcaaaagcttgcagaagacaagaaacaactaatagcagagcagaagtgaaggagatagagacacaaaaatcccttcaaaaaatcaatgaatcca

SEQ ID NO: 817770 - DNA, 616 bp, Homo sapiens
caaaagcaatggcaacaaaagccaaaattgacaaatgggatccaattaaactaaagagcttctgtacggcaaaagaaactaccatcagagtgaacaggcaacctacagaatgggagaaaagttttgcaatctatctatttgataaagggctaatatccagaatctataaggaacttaaacaaatttacaagaaaaaaacaaacaaccccatcaaaaagtgggcaaaggatacgaacagacacttttcaaaagaagacatttatgcggtcaacaaacgtatgataaaaagctcatcatcactggtcactagagaaatgcaaatcaaaaccaccatgagataacatctcaggctagttaaaatggcgatcattaaaaagtcaggaaacaatagatgctggagaggatgtgaagaaataggaacacttttacattgttggtgggagtgtaaactagttcaaccattgtggaagacagtgtggagatttctcaaggatctagaaccagaaataccatttgacccagcaattccatttctgggtacatasctaaaggattataaatcattctactataaagacacacgcacacgtatgtttattgtggcactattcacaaa

SEQ ID NO: 817771 - DNA, 346 bp, Homo sapiens
acacaaattgttgtggaagttcagagataaggaagaaagaaactgcagatgtttgagaaaagtgagtagtctagttcaattagactagagtktagagtctgaactggaggagtgaaagaaaaaaaacaaaccaggaaaagacaggatggggctttgcatgacctcatgtttcagaatagggaagaatgcattccaagccatgtctaaaggaaattatccagaatctggctcaatagtgaacaaagtcaacacagagcaggtggaaatctgggttcttctcccagtttcagtgagagccccactgcctttctctgctctacatttggggcttctgaagttaaatttg

SEQ ID NO: 817772 - DNA, 620 bp, Homo sapiens
tcccccattttgtaggttgcctgtatactctgttgatagtttcttttgctgtgcggaagcactttagtttaattggaattcatttctcaatttttgctttggttgctattgcttttggcgtcttcatcttgaaatctctgcagttcctatatccagaatggtattgcctaggttgtcttccagggattttatagtttgggggcttacatttaggtcttttatctatcttgagttgatttttgtatatgacataaggaatgggtccagcttcaatcttctgcatatagttagccagttatcccagcagcatttattgaatagggagtccttttccgattgcttctttttgtcagctttgttgaagatcagatggttgtaatgtgtggccttatttctgggttctctattctgttccattggtctatgtgtctttttgtaccagtatcatgctattctagttactgtacccctttagtacagtttgaagtcgggtaacatgatgcctctagctttgttctttttgcttaggrttgccttggttattcaggctcttttttggttccatatgaattttaaaatagtttttttttctagttctgtgaagaatgtcattggtagtt

SEQ ID NO: 817773 - DNA, 605 bp, Homo sapiens
tacttaacaaagttgagatgacagaggtaaagggacctttacaggattgtgcaatttagtagttttcaagttttgggttatgaaatctccttctttaaataagatataatgagawatccccaaccactgggactgtggctgaaggttgacagcaggaacatgaaaaccctccttcttgcccttctctcctccccagggtggctcctacagctcctctgaataaaatttatttggaaggcatcttccttcagaggaatggtattctgaaaccactaccaactaggtatcaaggccaattggatgaaagtacttgcttgatgccacctgcccaggtgtgagtcgggctccatcagggaatgcaacctgccctgggtgaagagaaagttttgaagatcctctgtgccttcagctattccttttccatagagaggagtgggccgcttgagttccttagaagcgcattggctgggatacctgggtatgcaactaacccagagggagatcaggaaagagcatggagctctcctggtgtctccagcccttgttctctttcagctgtgtctcctggccttgaggttgaggaagaggagggaggtggtttaggg

SEQ ID NO: 817774 - DNA, 529 bp, Homo sapiens
agtatctcttagtgggttaaaacaatacagtgtttttctcactcttattacatgtcaatcacaggcagttgggtgctctgcttcatgacttcttgactcagagacacaggcagccaagtcctcaacagctggagcatttctctgaaccagctctgaaagttttctgcccaggagtgggatgcacattccttctgcttacatttaactggccagagcatgtcacatgctatgcttgaacgggtaggaagagaatgaatgtgttggtcaatatcactaaagacttctaaaaaaaacctgtatttctgtccatctgccttcttgactccaactacagatgcaccagatgagtaagaagtactctgcagaatttttttttcattgaaattattttgaaaactgygcaagtctgattcttggctaattgcattccagtacatatgcctttaattcaattggcacacatatcccgcagtaccattatgtgtcaaggactacagtgtgtattgtcactttacagtcaaacaagtgc

SEQ ID NO: 817775 - DNA, 596 bp, Homo sapiens
atgtgaaagcattagaggaaaacatccttgggactcacacagagaagaaaatattccaatttctaccagccagtgtggaaagcaccataattcacagggtatcaagcacagcgctcagaaayattctgcttcagaacagggaaaacatatttttgttgctaatgctgtggtctcccctaacacagcaagacctgaaaaaaaagcaaactgtttccaagcaatttagctgtgtgccagagataaatgcaagaatatctgtagaaatacaaaaatatccagcacataataaggtaaaattcttgtgtggcatccagtcaatgatgagagaaatactaagatagaggaaaaaaaatcatcaaaaccaacccaggtgtgacacagatgttagaattctcaggaaaggatgggaacacaattactatgactgggtttcacattttcaagaagcaaaaaattgaacacgttaagaagagacacaactatataaaaagattccaatcgaacttcttgagataaaaaggataatattcaagatgaaagatataccacacagacgtaagagactaaatactgccttggttaatatgaaaacatag

SEQ ID NO: 817776 - DNA, 520 bp, Homo sapiens
aaaagcttctgcacagcaaaagaaatagttagcagagtaaatagacaacccaaaaaatgggagaaaatcctctcaaactatgcatccaacaaatractaatatccagaatctacaaggaactcaaataaatcagcaagagaaaaacaaacaatcccaaagacatgaatagacaattctccaaagaagatatacaaatgtccagaaaacaaatttaaaaatgctcaccatcactaatgattagggaaatgcaaatcaaaaccacaatgcgataccatctcactcctgcaagaatgtccaaaataaaaaaaaatcaaaaaataatagatgttggcattgatgtggtgaacagagaacacttttacattgttggtgagaatgtaaactagtacaaccactatggaaaacagcgtgaagttttcttaaagagctaaaagcagatctactgtttgattcagcaatcccactactgggtatctacccagaggaaaagaagccattatatataaaagatacttgcac

SEQ ID NO: 817777 - DNA, 537 bp, Homo sapiens
actttatgctctgctgacctagaagtcttcatcctggaaaaagaaatgttcccaccagaagacaaaatcatgatttcattaaacaggaagttaagagtgccatccaccacctttgggatctcccttctgagtcaacaggccaagaatttactgtgttggctggcatgactgatccagattaccaaggggacactgaactactactccctagtggaggtagagtatgtctggaatacttagagcatctcttaatattaccatgtcctgtgattaaagtcaatggaaaaccacaaaaagctaatatattcaggccatctaatggcccagacccttcaggaatgaaggtttgggtcatcctaccaggtaaagaaccacaattggctgaggtgcttgctaaagtcaaagggaatacagaatggatagtggaagaaggtagytataaataccagctacaaacacatgaccagttacagaaaaatgactcatgactgcaattgtcacaagcactttctccttactttgttctgagtatgtttt

SEQ ID NO: 817778 - DNA, 570 bp, Homo sapiens
gaggactggttagcagctctgctcckcagtgtgggaagtggttaggctgcagagggggcaccctaatgcatgccttttgaaatcagagcagcttaagcccttgagaggggatgtagggaccctggggtcccaaggggaaagatcttgcagccctgataagaatgggtgcctggcaaggctaagctggaatgggaatctccaggcgtggagagcgtccactcttgctgtggtcagaatcagaacggagaatgcggagcatgagacagaggctttccgtaaacacggctcattctcagagcacttcagggctgggttcccagagggcggacattcctagaaatggtgcagatgcacagcccctccttccagggcaccgcccccgcagcccggcagagcaaccgcagacatttattttccttctccgaataacaccgccgcgctgggtggaaacgaacccgagagcccacacttggccagcggccgcggggagtgggcgccagcagtaggtccctgctggggctgtcgctcagcttctccctgcggacctcggacacagcccccaccaagctg

SEQ ID NO: 817779 - DNA, 570 bp, Homo sapiens
gaggactggttagcagctctgctccgcagtgtgggaagtggttaggctgcagagggggcaccctaatgcatgccttttgaaatcagagcagcttaagcccttgagaggggatgtagggaccctggggtcccaaggggaaagatcttgcagccctgataagaatgggtgcctggcaaggctaagctggaatgggaatctccaggcgtggagagcgtccactcttgctgtggtcagaatcagaacggagaatgcggagcatgagacagaggctttccgtaaacacggctcattctcagagcacttcagggctgggttcccagagggcggacattcctagaaatggtgcagatgcacagcccctccttccagggcaccgcccccgcagcccggcagagcaaccgcagacatttattttccttctccgaataacaccgccgcgctgggtggaaacgaacccgagagcccacacttggccagcggccgcggggagtgggygccagcagtaggtccctgctggggctgtcgctcagcttctccctgcggacctcggacacagcccccaccaagctg

SEQ ID NO: 817780 - DNA, 653 bp, Homo sapiens
acttaaagctttaaaaactgagtgggtattaaaactacaatccacaggagactggtaataacttgcagcctaaatcaaataaggttgattgcctgcaaaaacaaaaagtaacattctctataggatttgaataaagttcagggtatcataatgtaatattcaaagaaggcaagacacaattaaaaattatgcatcataaaaacaatcaggagaatctcactcatatggcaaaagataatcaacagactccaaagtggaaggacacagatgttggtattatttgacaaagactttacaaagctattataaaaaaatggtcaagaagtaatgaaatgaatggaaatattttaaaagtctcagcaaagaaacactagatataaagaagaaccaaaggaaatattagaacttaaaaatacagtaatcaaaatttaaaacactgagtaggtttaaataggatcaataccagaatggagatgatggaataaagaattagtgaacctcaagataaattaatggaaattatccartataaatggcacagaggaaaaagcaaaaaaagcttcccaggaaggtgttggaaaataccaaaaggtcgacttttgtgtcattggagtttcagaaagagaggagaaagaagacaatgcagaaaatca

SEQ ID NO: 817781 - DNA, 417 bp, Homo sapiens
tctctgtctggcttgttttggtttttattgagtrtgtttgcttagagaattctttgtaatatacctgttgaatactttttttgctgcaacacttcctcctttttggcagtatatggctcttaagcccaggtttgccttggctcaagcaaactttgaagcagcgcccttcacagatgggggagtctcaaaggggatatccttgcagtatggaaaaactgcccagtggttaatgcctaggtgatccatgaaacatacctcttagtgctgctgaacagccactctgatttgatgtctcttttggccaagatacagagtagagttccccagtccgtggatgctagtcccacctcctgcctttgtctccgactgtcctcatgaatttcacccgcccccatcccgccccgccacccccggccc

SEQ ID NO: 817782 - DNA, 591 bp, Homo sapiens
cccccgagagcagggcagcctgtaggtgggcagtcgtaggtggkcagtgcagcccccgggagcagggaagcccaaaggtgggcagttgtaggtgggcagagcagtccccgggagcagggcagcccgaaggtgggcagtgcagtcacctggtgactccaagaaaggccagatactagagttcttccagcttcttgggggtctggccaaagtaggctgaagaaaattcataaaagccctcagcaacaaatttctccctaccaactttcaaattctcctttgaccaataacgattccttgctggattacgcagccccgcgggttggtctgttttattgggtgggggtggttttcatgttgccaataattagctgtgggctgatggggagagggagggtggcctatgagttgttcagtgtttggtcttgccatatggaaggtgggtgcatttccctgaaagggtggcttcctgagatgggtgctctgggggcacttcaggccaggaccccaaatgcagaaaactctagatgtagctgtgccacaatttattgaggagttatctcttgatagtagggtcatagatggctttgtttt

SEQ ID NO: 817783 - DNA, 476 bp, Homo sapiens
tgccttccaaagttctgggatccctggtgtgagccatggtacctggccaagaactaattttttttttttttttttttttgagacagagtcttgctctgtggcccaggctggagtgcagtggcgctatctgggctcactacaagctccgcctcctgggttcacaccattctcctgcctcagcctcccgagtagctgggactacaggcgcccgccaccatgcccggctaattttttgtacttttagtagagacagggtttcaccgtgttagccaggatggtctcaatctcctgacttcgtgatccacctgcctcagcctcccaaagtgctggtattacaggtgcragccaccgtgcctggccaagaactaatattttaaatgcacgaaaatttcataaactcagtaaaatcccttggagtcctcagtggctgctttctgatgtcaagtaccacattaggccataactgtgaacccagg

SEQ ID NO: 817784 - DNA, 478 bp, Homo sapiens
ctcttattttgtatcagatattggactaaatggtttacattaaatctctctctctagattcccacaaaaccagtcttaagatatttactataaattgtctgtatttcgcagttgggaaactgtatccatgagaaattaacagagaaatggaaggtctgaatgctgtatcagactctgaaagctatttcagagactatcataagctatgggcaaagatcacagacgcttagagtaggaaaggataataattttacctagttcaaatttagagctatgtaagaatttcttcaacattatttctaaaaaaaagcagggtggtggggtggcaattgaaacaagaaagcctttggaggtaatatattgtgatccaaattgaatgagcttaagcaaaaataaagggaattcattacctcactttactgaagcccatttggaactagttmtaggttctaacctggctagattcaggttctcagcc

SEQ ID NO: 817785 - DNA, 523 bp, Homo sapiens
caaataaataattcatcattctataattgagacagttacctgtacatttgccctgttaataaaattrcagatttttcccttcctgtgtccatgtgactaacctgcacattgtgcacatgtaccctaaaacttaaagtataataataataaaataaaataaaaataaaaaataaaaaaataaaaataaaataaaattgcagatttttttagaaatgcagagcattaacactgttcttgcttttatttccagctccgagttttcaagttggcaaaatcttggccaactctaaatatgctaattaagatcattggcaattctgtgggggctctaggaaacctcaccttggtattggccatcatcgtcttcatttttgctgtggtcggcatgcagctctttggtaagagctacaaagaatgtgtctgcaagatttccaatgattgtgaactcccacgctggcacatgcatgactttttccactccttcctgatcgtgttccgcgtgctgtgtggagagtggatagag

SEQ ID NO: 817786 - DNA, 603 bp, Homo sapiens
ggatcccctttgttttggttgatttctcctttttggagcagaagtacttacccaatgctaatacgcttattgtatcttgtaggwaactaacttcttttttattttacaggctcataggtagaagggattagccttgtctcagatgagactttgaactttggacttttgagttaatgctggaattagttaagatttggggggactgctgggaaggcatgattgtattttgcaatatgagaagagcaagagatttggaggggccatcagcaaaatgacatggtttgcatctgtgtccctaccatatctcatgtcaaattgtaatccccagtgttggaggtggggcctggtgggaggggcctggtgggaatcataatggtggagttcccatgaatgaattagtaccatgcccttggggctgttcttgtgatagtgagtgagtgagtttttgtgagatctggttgtttaaaagtgtgtagcacctcccgctctttctctttttctcctgctgtggccgtgggagatgtgcctacttctccctttgcctttcacaatgattttaagtttcctgaggcctcaccagaagccaaatagatactgccatac

SEQ ID NO: 817787 - DNA, 556 bp, Homo sapiens
agaaaataagagctaattccaccacctgaagtaccctgcctcaccagaggacctgtgtctgtccacatgactttactgctatcataaccaccatttgagaaaaccagtgcactaaacaaaactacaaccaaagaccatcacagagtccaattagttcccctgccacttttaatggtacagatgctggtatccatggctgcgagacctgaagacagattacatcacaggactctttgcagacattctccagcaccagcctggaacccagccaccccactgggtggctaggcccagaatagaaataaaaatcacttcattctggctctcaggaagccctatccctagaggaaggggaagagcacagcatcaaggcatcaccccatggtacaaaagaacttgaacagcagcccttgagttccagatctttccactgaaacagtatacccaaatgagaaggaaccagaaaagtaattytggtcacatagcaaagtaagattctgtaagatacccaaggttcttcaagactcactctagctctccagcaatggatccaaac

SEQ ID NO: 817788 - DNA, 475 bp, Homo sapiens
cactgttgtaagtggttgaatgaatttatacaaaaccagttctcagaaaataaawttgtctgagtttaaaattgcttcctcctggggagactgcaatgtcttaaaagcttaaagtttgagagatttttatgcttgaagtgagaaaagtacagaaacaagctgattcatgcacagatgtctcacatttctttcttcagtctccagcactttccaaaagcatgtcagaggtcttatttgaggcatctttggtgaaaattaataaaattttcaaagaaacccaagcaaacaaaaaaaaaaagaatgaaaaaaaggatttgtagaagagatacttcacagaatccaaagaaacgttgaagaaccaggtctcaggaaaaacagaggctttttcaactctgctattacatagttaaacttgcaattcccagtctctgtgtctttagttcaaacagttagttaaggaagagaatctgattga

SEQ ID NO: 817789 - DNA, 571 bp, Homo sapiens
ccacaaatccttttattatattcatagttttgtctgttccagaataccatgtagttggaatttagagtacacagccttttcaagtttgatttttcatttagtaataagcatttaaygtttctctatttttttcttggtgtgatagctttttttcttttcttagccctgaataatagttcattttctggatataccaatttgttcatccatttatccaaacatttactgaaggacttctgggttacttctgagtttttgcaatttgttttgtattgttttgtttttcccaactttattagagtataagtgaaaaattaaaatcgtataaatttgtggtatacaatgtgatgttctgatttatgtacacattggaaaattaataaatcaaactaattaacatattcatcacaacatatacctatgtttttgtggtgagaaaatttaaaatctactcttagtttggagttatggcatagaaatgctgctgatttttatatgctgattttctatcttgtaactttactaaatagtttattagttctaacaatttggtgatgtcattagggttttc

SEQ ID NO: 817790 - DNA, 571 bp, Homo sapiens
ccacaaatccttttattatattcatagttttgtctgttccagaataccatgtagttggaatttagagtacacagccttttcaagtttgatttttcatttagtaataagcatttaacgtttctctatttttttyttggtgtgatagctttttttcttttcttagccctgaataatagttcattttctggatataccaatttgttcatccatttatccaaacatttactgaaggacttctgggttacttctgagtttttgcaatttgttttgtattgttttgtttttcccaactttattagagtataagtgaaaaattaaaatcgtataaatttgtggtatacaatgtgatgttctgatttatgtacacattggaaaattaataaatcaaactaattaacatattcatcacaacatatacctatgtttttgtggtgagaaaatttaaaatctactcttagtttggagttatggcatagaaatgctgctgatttttatatgctgattttctatcttgtaactttactaaatagtttattagttctaacaatttggtgatgtcattagggttttc

SEQ ID NO: 817791 - DNA, 532 bp, Homo sapiens
ctttggcccaacaatcaggctctatcctattatccagtcctaattgtatgcctcattccaggtaaactgagataatcatcattttgcaaatatacactgtacttttttacttctgaactttcttgtcccaccccaatcccacatcctctaccatttttgcttaggaagatctttcccttcgaagcttaattcaaacaattattctaggaaactgttttaatgaaaatagtttgaatagtgtaaaaccaaggacatattttataaggatgctttctagaacagtcttcaatataattccatgccctcatgtccaactattccaataaaagcatttctatgtgggccaggctatgatgcattccaagtctgattctacaatgggatgaatttagggacgcattttaragtgtggatggatagattatcatgggtgtccaatcttttggcttccctgggccacactggaagaattgtcttgggccacacataaaatacactaacactaacaatagctgatgagcttccaaaaaat

SEQ ID NO: 817792 - DNA, 622 bp, Homo sapiens
gaatcaacttgatcatccataatctcaaacatttgtcattttgaggggtagcactcaggctaacacayggtagtctgacatgtttgtataaaaacattctaattactttcttataccttattttagaacctaatttaaatttaaattttctaaactttatattaggcatgcatcaaaaatatgcatcaatttttctaaaatttaaactagaaaaatgtttaaatttaatttagatttttctaaattttaatttaaattttaaattagaggtttaaattttaaaaaaatagatgcatatgttaggtgcccagtgtaaatttttgcttatttatctgtttttgatgaacaaatactcccacattctcttcagtctgcattgattttctgggctggttgcactgaatttgtagtcagaaagtaattgaaagttgtaatggggtgccatctactggggaaatagaacatagattaaaaaacagaattgataggcgttcccactgcaaaaaagaatgtgatgaagatgatgtaaaagaaaacatgaaaaaagatgggaagtttacattttgcataagactagaaaaattttatttgaactcaaatatgcttctttgatatactactt

SEQ ID NO: 817793 - DNA, 658 bp, Homo sapiens
tgcaaggtcatgagtaaggccttttggggactgcacatacaagacaggtccacactccaaggagcttaacaacaggctatgctaggccaggtgcagtggctcacacttgtaatcccagcactttgggaggccgaggcgggtggatcacgaggtcaggagtttgagagcagctcggccaacatagtgaaaccccatctctactaaaaatccaaaaattagccagatgtggtggcacacacctgtaggcccagctactcaggaggctgaggtgggagaaccacttgaacccaggaggcagaggttgcagagagctgagatcatgccattgcactccagcttgggtgtcagagtgagactctttttaaaacaaacaaacaaacaaacaaaacaggcaacaggctatgcaggcaagacccgtgcatataaaataactgagagtccaaggcagtagctgccaaaataatgacacattctataagcactactgtcctagccatcactgctttctggagagaataattcaatttagttgaaaaagtgttttacattaaatgcccactaaaagtctgttgattatgtaagactgcattctkaatttcacaaggcaggatccaccaagttccataaatgtaaataagttttcctcccaaaagtaaca

SEQ ID NO: 817794 - DNA, 642 bp, Homo sapiens
aagttttcagctccattataatcttatgggaccactgtcctagatgcagtctgttgttgactgaaatgttgttttgcagtgcackactgcaactgaatcaacctcaaccaatgacaggattcgaggggtgagcaggagtgatgggtgtgtcttaaaggcaactttcaaagaaatgagcacatcactagggagatccagggtgtggctggaataaactgagaactgttcgggacagtttgtggtaggcgtgataggatgcacagacagcagaggaaaagcttgagcagcctaaagggagtgtgtgagttctatctgaggccctgcccagcaacgtggattaagatgagctggcacccaatgaagaagtgggagtgatagatgggcttcaaaaaaggcaatgctcctgctttgtgggaagatgtgaattgctgataatttgaaacaaaaaatggtgagttctgctttctcttcccctgtgactaatgctttcatacatatacatgtgtgtgcacatggccacacgtggacacacacgagacacacaaaaccaaggactgacgtgacaaacatgacaaagctggcaatggtgagcaggttggttttgagatgaaaggacctggggagggtaaacgcaccagaaga

SEQ ID NO: 817795 - DNA, 609 bp, Homo sapiens
tttaagtctttttagtctacaggtattgcctgtagtttttttttttttttttttctagtttgttagattctggatccaactatggtgcacagatggcatttgaccaacatatttttaaatctttttagtctacaggtattgcctccattcttttttattttccttgcaatttatttgagtgtattgtctttgagattgttttaaatttcttgcatgagaggaactggagcttggaggagtttatgaaatgatatagaagaaggtatttttctctttttcatatttgtcttattttagaaatatccatttgggagctgaaatgaaaacatccacttcctcactcccagtgtacccaactgaatatcatgacatcaatacaatctcctcaggtccatggttagataactattgtcttcttgaaaatcaacccaggatcccaaaggaccaaaatcactgagagaaggccccagtccagggagcaayagacaacaacaggagaacttttggcatattcattccgtttgcatttgcctgttttctttctcctctatgacttccaagatccctcccaaagcgtgattctatgattcttgtagagtcttaggacat

SEQ ID NO: 817796 - DNA, 650 bp, Homo sapiens
gttctacagaggacccctgccgttggcctatctcttaacagatgtttgctsggtgctggccatgtgtcaggcactatgctaggtgctgggaggattccgaaacaagaaagcatgcaagattcctgccctcctgggccttaaaggaaagtagggaagccaaacattaaataaataattataccaataagtatctaattacaagttttataagtgttaataacaaaaattgcagggtttgctacaaagcatgtaactgaggacctaatcttgtattaggggccagccaaagtagttctttgaggagatacatttaatctgacacctgatggatgagtaatagtcactaaaataaaagccaaataaagaattttatacactcccaaaagagatattttacagctttacaaggctcaaatccaactaattcacccctgtctctgggtagtactggatgttctattttaccacttatgagacaatgctttggaaagccaaaaactaggcagtcacacttggtatctacccttcatccttcctgcgacagtttgaagtgagagttgagtgttctggatgatgaatctaattgcaacttattctgtgctaaaacatagttatggtcaaggtaaaattactaacctttggagatattc

SEQ ID NO: 817797 - DNA, 480 bp, Homo sapiens
gattaaaataaccacaatcagaaatgacaagaaggatattatcacttaccctacagaaatataaacaaccatcagagaatattatgaacacctctatgtacataaactagaaaatctaggagaaatggataaatgtctggacacatacacccttccaagaatgaaccaggaagaaattgaatccctgaacagaccaataatgagctctgaaattgaggccagtaataaatagcctaccaaccaaaaaaagcccaggatcagatggattcacagctgaattctgtcaggtgtccaaagaagagctggtatcattcctactgaaactattccaaaacactgaggaggagtgactcctccctaasttattctatgaggccagcatcatcctgataccaaaacctggtagagatacaacaacaacaacaaaaagtcaggccaacatccttgatgaacattgatgcaaaaattcttaaaaaatta

SEQ ID NO: 817798 - DNA, 480 bp, Homo sapiens
gattaaaataaccacaatcagaaatgacaagaaggatattatcacttaccctacagaaatataaacaaccatcagagaatattatgaacacctctatgtacataaactagaaaatctaggagaaatggataaatgtctggacacatacacccttccaagaatgaaccaggaagaaattgaatccctgaacagaccaataatgagctctgaaattgaggccagtaataaatagcctaccaaccaaaaaaagcccaggatcagatggattcacagctgaattctgtcaggtgtccaaagaagagctggtatcattcctactgaaactattccaaaacactgaggaggagtgactcctccctaacttattctatgaggccagcatcatcctgataccaaaacctggtagagatacaacaacaacaacaaaaagtcaggccaayatccttgatgaacattgatgcaaaaattcttaaaaaatta

SEQ ID NO: 817799 - DNA, 552 bp, Homo sapiens
caaagcaggatttcgttaaaaaaaaaaaaaaacatacaaagggtgcattggcttcattctgtcagagttgacattctayctgcacataattgggtttgtgaatgacaggtttctgaggaataaggcatgatttagagagaggagattctgcattctcctctaccccaaaacaacctctgcaaatcctctaccccaaagttgcagcattaaatcatggcttccgtatctcagcagccataattagccctttcatggcatacacagtattgtcaggcggagaccctctctttaactatctccaagtagcttggtcatctgcaccagtggccgttatcatttggaaaatgactaacaatctataccaattaacttgcctgccattacttgaaaggattcatcatgagtagactggggacagggttggtggcaggaatacttatccttgagattttgacaggttatttacaacaccgaaccctgaaccacaaggtcttgttttatgtgagaagtgataggatgaaggcaaaaaagggatcttcctttagaacatga

SEQ ID NO: 817800 - DNA, 639 bp, Homo sapiens
gagcaacccaaatgtccactgatggatgaatgtgtaaacaaggtgtggtgtatayatacaatggaatattattcagccttaaaacggaaggaaattctgacacatgctacaacatggatgaaccttgagggcattttgctaagtgagataagccagtcccaaaaagacaagtgtatgattccatttatctgaggcacctagagtcaaattcatagagacagaatgtagaagagtggttggttgtcagggactgaagggaggagggaatggggagttactatttaatgggtatagagtttcattatggcaagatgaaaagagttctggagacgggttgcagaacaatgcagatgaacttaatactactgaactgtacacttaaaagtggttaagatggtaaattttatattatgtttatttaaccacaattaaaaatgtctccacacattgtcaatgtctccctgttgagaaccactggtttcaatgcattgccttcttagtgtctttgttccttgagaattcttgaaactgattcctacccaggccacacagttaattttcagttattagcaagaattgaaagcagcagatgacccaaaaatatttgtgtttgcttttaagcaaataataagtggtctg

SEQ ID NO: 817801 - DNA, 595 bp, Homo sapiens
ggtgggtctttcccatgctattctcatgatagtgaataagtctcacaagttctgatggttttctaaaggggagtttccctgcacaagctctcttctcttgtctgccaccatggaagatgtgcctttcaccttctgccatgattgtgaggcctccccagccacatggaactgtgagtccattaaaactgtttcttctggccaggcgcagtggctcacgcctgtaatcccagcactttgggaggccgaggcgggtggatcacgaggtcaggagatcgagaccatcctggctaacacggtgaaaccccgtctctattaaaaaatacaaaaaaaaaattggccgggcatggtggtgggcacctgtagtcctagctactcgggaggctgaggcaggagaatggcgtgaacccgggaggcagagcttgcagtgagctgagattgcgccactgcactccagcctgggtgacagagcgagactttgtctcaaaaaaaaaaccaaaaaccaaaaaactgtttcttctgtawattactcagccttgggtatgtctttatcagcagcatgaaaatagactaataccacatggcaaatgagacaaaa

SEQ ID NO: 817802 - DNA, 607 bp, Homo sapiens
agcccagctccttccacagtcctgatccagcagatgggcatgcccgggagacttcttccacgtccccctcctgcctacgaatccactgactctttggatgaaatgtggtataagcaaggcagaaatgggttggcttatgtaactgaaaagtactgaagcaaggatgccttcagttgtgcttggacaagatatgaaagccatcgggacttggtttcactccatttctgggctcagcctcactctcaggtcccatacggcaggcacctcctggtagcatcaggctctccaccttgtggtggtaagacagccacagcagctcctcgtgtgatcttaagttcaaagccaacaggcaagaccatgcatcagttcctgtagtccctgctaaatacctgacaggacttctgattgagcccgatttccttacatgcctgtccctcaaccagtcactgaggacgagaggatgtggcaatatggccaggcttgctccatcasccttccagccagacttcctggactaagagtgaggcggggaagagcagcatccaagcgagcaccctttccctttctatgccttgcactaaagagcggctttcagaatgtaaactga

SEQ ID NO: 817803 - DNA, 637 bp, Homo sapiens
tcacttagcataaattcttcaacgtttatgttgtagcatgggtcagaastgccttcctttttatggctgaacagtattccattatatatatacacggcactttttttttcttttaaattcagggggtatatgtgcgggtttgttacgtggatatattgcatagtgttggggtttgggcttctattgaacccagcacccaaatagtgaatatagtaaccgataggaagttttcaactcttgtccctttccttccttccccctgtttggagtccctggtgtctatcgtttccatcttcatgtccgcatacaccacattgtgtttatccattcatgtgtcgatggacacttgggtcgcttccaccttttggctattttaaatagtgttgctataaacatgggtatgcaaatatctgtttgagtccttgctttcaattcttttgggtatatacccaacagtataattggtggatcatatgggactctatttttaattttttgtgaaactgccgtatggttttccatagcagctgcaccattttacagtcccatcagcataactgttttataaaggagaaaaatagaaaagcgattggtagttaagtagtatgtggtatttcagaatgccaaggctggagct

SEQ ID NO: 817804 - DNA, 620 bp, Homo sapiens
tgctgccccaactccagaaatattactccaatgttatgatcacttgcaaaattcgatttctcatgctggtttaattatagctcctgacaaaattcacactactactscttactcctacttggggaccttagtgaatgacactaccattgcgctacagaaagtagccatacatagggatcaactaaaaacattaaatgactttcaaaaattagtaggggatgttaattggatacgacctgctctaggcattcctacctatgccatgagcaatctgttttctatccttagaggaaatcctagtctcactaaccctcagcaattaacaaaggaggctgaggcagagttacaactgattgagaagcaagtccataaagctcagataaatagaatagatccagagaagactctagatttgctaatttttcaactcagcattcacctactgctgttattgtccaagaacaagacttagtagagtggctttttcttccacatactaattcacagactctaactccttatttagatcaaatcaccatgatagggattggagaactcgaattgttaaattacatggatatgatcctggaaaaattattgtccctctcacgaaggcacaa

SEQ ID NO: 817805 - DNA, 633 bp, Homo sapiens
tccacctaatccattccccattatccttcaaacgttgtctccaatgccttcagggaattatccaaccatcagcctaccttggggtcctctacagaatttcagggtcccatgtagcctttattcctagcgtttatcacagcaagacttgagtcttaccatgcacaactcttacattaccaaaacaattgcttatccaacaatggacacattgaaaccctggaatttcttctaatggaatttttttgaccatgtattttttaatggtatgataaacacattgagaacaattttcaaggtgagtgataatggagtgattcgctaggcagccgatggcttgttgaagatgctgtatcagctcactctccacattataaacactcagcatgggtcaaaatggacagatcaaaaatgactctgtcagaagtatttcactatgacaatcttaacaactacagattgcttacaaatgaacaagagatggtagggaggtactaggtgagagataactttggaaatacatggcaaatgcaaatagataataygaatagattgtacccaacacgtttaaacatcttctccttcacgttccgtagaatctcacctgaagattttcctctgaactctgctttcact

SEQ ID NO: 817806 - DNA, 634 bp, Homo sapiens
ttttgtatatggccatgaaaatagagattgcatgtcctggtctcttttacagcttagagtgatgtgagaccaagttttcttcaatggcatgtaagtaagagtcatgtgtgctacttcctgatctcgcccttaaaagttttctttatatgtttattagctccctataatacctgctggctggaagtagtgccatctgtgacaggcactttaacccatacagcgtatttttatgtccctcagcccacttgttctggatacaacagacatatcagtgcaggtgcaaatccatctaattccatggatagatacaaatgtatgcttcttggaataagtgttgattaaccaaaacctggagaaaagattttaaaaggagagattagaagaaatgaatacatccaagaaaagggaaatggctcaggcatttactaactatgtaattcaggtgaattactttaagcattagaaccatattttctgcatctttaaagtggtgatagtactccctgttttaaaggtgattagataatcgcaagatctcaatacattttcactgttaataacagcaataacctcrtaatgtggggatccatcaacttgaaggtagggaaaggtaagtaagtggttggagctttct

SEQ ID NO: 817807 - DNA, 473 bp, Homo sapiens
catagattttcccaatgagcttcccttccctactcttaatcatatagcattttcatagagctgtgtaagttggcccttgtattggtttttcagtgatgaggattttttttcatttctttaaattttttgagagggaaactggttagattaagcagcattttaaattatatgtattatattttgtgtatttttacatattatgttttctaaagttatgattatttttaaatgtagaacatatagaaaatagtataaaattaaaatctcctataatctccctcacctaaagataaccactataccattttgcatacatccttgcaaacttatttctacatyggtggagtttttctttaaaaacaaaaacaaaaacaaaacaagtgagatggtgatatggtttgggtctatgtccccatcaagtctcatgttcaattgtaatccccaatgttggaggtggggcctggggcaggtgg

SEQ ID NO: 817808 - DNA, 560 bp, Homo sapiens
ccacagcctgctttttctccctggtgcagtgtcaggccagagttggccgctgctgaccccaccaactttacatcatactcactcttgccttggaatctcctgcagttccaggccctctccttcccacaacccatctgcctagccagttcttgcctctgctcacccctctcgtctttctgaaactctcctaagtctactggtggagacagatgtgccaatagggcagagcccgtctgaagtactaggagccgaaaggagtccgaagaccttgctgccatggtggcaccagctgcatgttgaaggtgcgcagcggtttgcctgtgaagaaagaagggatggaagctcataaggaggctgtgtgggaggccagcaaagttgcttgtgaaggatgttgcttgccttgcttatagatggcccgagctaggcacccatgctcgtgcagtttttaagtttgggggcagaaactccagtctggactaattacatatacagtgtctttttcactacaacctcttgctttwtctgtgcccactctacccttctgaggaacagtgatccct

SEQ ID NO: 817809 - DNA, 505 bp, Homo sapiens
ggaaaagaatgttaactgttgatttcccctaagcagaaaaataaactgaggaagtaagatagggaagtggagttggtggggcagtgagataccattttatttaggaaagtcctgtatgccctcactgaataatacatttgagcaagacccaacagtgctaaagcagcaagctatgttgatctgaggggcaggtgtgggtggtcacagagggaagaaccttaatgaaagcttcaagggcaatgaccctgagattacagcatgactgacttgccatgaatctgaaggaagtgcaaggaggccagtatgtctaaagtaactggaataagcaagggggtgactagttacatgagtaaagagaggtaactaggacatgagttcaaagaggcamtagatcttgaagtatcttgtaggtatgtgtaaagattttcacttttcctgtaagtacaatggaactttagaaactttagtaaaatggaacaatagaaacttttgaacaaataattga

SEQ ID NO: 817810 - DNA, 637 bp, Homo sapiens
ctttataaaatcaatgtttstgttgattttaagaatttaaaattaacaggggcaactcattgttcaggttcttggtggcaccttcctgctgtcctcagtcctacccagacttacaagctaatttggtatcatggattgtcagtaacagctttatggttttagggaatgctgaatgcaaatctgcctgtaaccaggtaaaacacagggtagctttggccattgtgtaagtcattttgctaggattagaactcacacctacagacttcctgccccactctgctggtgctgtgaaggcctgactaaacactaccctactactgtgggggcaggtgcctaggctctggcctgatcttcactgttccctcctcaatctggatactcagtgtggtcgcagaataacagccccctaaagacctccacatcttaatatgaaccttacatggcaaaaggatcttgcagatgtcattagattaatcatgtcttgagatggggagatgattgtggattatttggacccaatgtaatctcaagcatccttataagggaaagaaggagttagaagaatgaaagaatgatatgtgagggtggatatagaggtcagaggtttgaagatgctattctgctggctctgaagatg

SEQ ID NO: 817811 - DNA, 543 bp, Homo sapiens
ttatttccagggtaagagagccagtaaatgatgagcctttcatgaaagatttaaaaaaaaaacacaccaaaaaaaccttgtgagatgaagaaaagaaagacatttgcatcagtaatagtgaaagaagaaattactttgatttgtagaccatcgcatctttctttcaaggatttggctttatttggcgtggtatctcacttgtcttttcaccagtcctggcaacattcctgacaagtgagaggaagtgagacaagaaatgatacagtaagggccaagtacgcaactccagggccaggcatagtcattgcctgcttgggccccacttccttcctgcacccccggggtcatcaaagcacactctctcttcagattcctctggagacaggggtttctgcctcttaccccatccccttcacctrggagagaactgtcactaaactcagcaaggaagactttctcaccttgggttttcagttaatgggggtagacacaaaacaactaaggacattgactgcggtaaggtatttagacaaagcaggtaga

SEQ ID NO: 817812 - DNA, 543 bp, Homo sapiens
ttatttccagggtaagagagccagtaaatgatgagcctttcatgaaagatttaaaaaaaaaacacaccaaaaaaaccttgtgagatgaagaaaagaaagacatttgcatcagtaatagtgaaagaagaaattactttgatttgtagaccatcgcatctttctttcaaggatttggctttatttggcgtggtatctcacttgtcttttcaccagtcctggcaacattcctgacaagtgagaggaagtgagacaagaaatgatacagtaagggccaagtacgcaactccagggccaggcatagtcattgcctgcttgggccccacttccttcctgcacccccggggtcatcaaagcacactctctcttcagattcctctggagacaggggtttctgcctcttaccccatccccttcacctgggagagaactgtcactaaactcagsaaggaagactttctcaccttgggttttcagttaatgggggtagacacaaaacaactaaggacattgactgcggtaaggtatttagacaaagcaggtaga

SEQ ID NO: 817813 - DNA, 615 bp, Homo sapiens
tccctggtctcccttgccacattgactcttcagggaggactcctctctcccagggaagtttctgttagaattgatggargaggtaagggactgtctcttaccttctaggagtcagcaacttttttctataaagggccagatagtaaatatttcaggctttgcaggccatatggtcctgtctcatagccttcattatttgtttgctttttcacaaccttataaaaatttaatatcattttaacttgccaggtgtgggagtggggggtatacagaaacaggctactaggccagtaggttgctgaccccttagggtcatattagagaaaaaatgagacaaagaaagactcatagccctcttttctggtagaataaaggaagccagcacaccaccatttaatgaggtttcattataaccaaatacatgcaaacatgtaagtgtgtaggtgtgatatagatccatatatacacacacacagcaaggagagaaactcctggaaacattaagatccccattacaattcataagtttctggttctataactctttcttctacctgtgagccacccagcattcttcctagttaccaagccaatctgagctggtttgagttggtt

SEQ ID NO: 817814 - DNA, 615 bp, Homo sapiens
tccctggtctcccttgccacattgactcttcagggaggactcctctctcccagggaagtttctgttagaattgatggaggaggtaagggactgtctcttaccttctaggagtcagcaacttttttctataaagggccagatagtaaatatttcaggctttgcaggccatatggtcctgtctcatagccttcattatttgtttgctttttcacaaccttataaaaatttaatatcattttaacttgccaggtgtgggagtggggggtatacagaaacaggctactaggccagtaggttgctgaccccttagggtcatattagagaaaaaatgagacaaagaaagactcatagccctcttttctggtagaataaaggaagccagcacaccaccatttaatgaggtttcattataaccaaatacatgcaaacatgtaagtgtgtaggtgtgatatagatccatatatacacacacacagcaaggagagaaactcctggaaacattaagatccccattacaattcataagtttctggttctrtaactctttcttctacctgtgagccacccagcattcttcctagttaccaagccaatctgagctggtttgagttggtt

SEQ ID NO: 817815 - DNA, 547 bp, Homo sapiens
tatagaatgctgggatggtggggttattttccaacattttaagtcttttactccactctcttttgcttgcatggtgtgcaatcaraattttttttataattattattcttcgtgttctatagataagatttttctcctgttttttttccatatttttctttttgtttttggttttatacaatttgaatatgatatgcttagtccatttttggtgtttgcttggtgtttcttgagcattcagaatttgtggtttggtgtctgtcattatttttgagaaaatgtcagccattattactccaagtatttttttctactttactttcttctttttcttcttctaatatttcatttacacacgttatgccttttgcaattgttctacaatttttttgaatgttctgttctcctttttaaattatcttttctcagaaaccattgtaccaaaaggataccttcactcatgtttatcacagtactattgacaataccaaagtggaattggccttagtggccattagaagatgattggataaagaaaatgtggtgt

SEQ ID NO: 817816 - DNA, 602 bp, Homo sapiens
gagggaaaaggatacaccaggaattaaaaaaaaaatcagggaaaaatatctgcctaacaatctgtccttctacagcagtcgttctcaactgatggttaattgtccctcccccaccaggggacatttggcaatggctgaggaccattttggttgtcacacctggaggagggggcttgtgccactggaatctggtggggagaggctggggatgctgtcggacatcctacaatgcacagcagagcccctacagtaaaaattacctggtccacgcatcaagagtgctgtgacagagaacacttctataagaatttgttctatttttatttttactttattttatgctttaatgtattattattttttgagatggagtctcattctgtcacccaggctggagtgcaatggcatgacctcggctcactgcaacctccgcctcccaggttcaggggattctcctgcttcagcctcccgaatagctgggattacaggcatrtgccaccacgcccagctaagttttgtatttttagtagagatggggtttcatcatgttggcctggttggtctggaactcctaacctcaagtgatccacccgccttggcct

SEQ ID NO: 817817 - DNA, 618 bp, Homo sapiens
agacagttataactctttgatttgtcctaatacattgagtgtatggagatgttygacagatactaagtaaatctagcatacactacttgtgcccaaattggtttatttcacatttctgtattttggggggaaaagcaatttctgtatgacagatgcacctggagtttgccacgtggcctccacacagaaagggctgtagagtcagagatttagcaacaagaaaattgcattttattcttatttcttaaaaaaaataaaaagcatattttttcccatggaacatgtttgtattgagttagtccatgtctacacagagtaagtgaatagtggagacgaaacaatgatctgggtaaatcaaagctcccagtcatctgctactgaagttaatgttggtttggcctcaattggaccctaccagctgcccacaataaaaaaaattaatatattgattaaataaagccaccaatccctcatctctctttacctgtgtaaatatggcctaaatgtctccatcaatgtcagggagccactataaaactaaactttttcagagagtgttttaattcttaaacactaaagctgaatgaagttctgagagtgggtaacataagaagagtt

SEQ ID NO: 817818 - DNA, 576 bp, Homo sapiens
tgttttataggtattaatacatttaattctcactctatgaggtaagtctattagtgcctttttattatttatttatttatttatttttcttgagatgaggtctcgttctataacccaggttgctggagtgcagcgatgcagtaacagctcgctgcagccttgacctcctgggcttgagtgtgcctcccacctcagcctcccaagctgctgggaccacaggtgcacgctaccacactcaactaattttttatttttagtagagatggggtctcactatattgcccaggctggtcttgaactcccaggctcaagcaatcctcccactttggcctctcaaagtgctgggattacaggagtgagccaccacacccagcctagtgtcattttacagatggggaaaagagagatacaggaaagttaaatattttgtccgaggtcattcaaacactaactagagaaggcaatatttgaacacaagcattcagacttcagattttaaactcttctgatacggtgaaatgtttatggtacactgttaagctaawaaaaaggatgatattgaatcgcacatatagt

SEQ ID NO: 817819 - DNA, 549 bp, Homo sapiens
ctgggtccagggccctgctgctttgtgcagtcttggaacttgtgccctgcatcccagccatggctgaaaggggccaaggtatagctcaggcctttgcttcagagggtgcaagccccaagccttggcagcttacctatgttttgtccgaaggtgcatagaagtcaagaattgagttttaggaacctccagctagatttcagaggatgtatggaaacacatggatgtccagagagatgtgtgctggaggggtggaggcctcatggagaacctctggtagggcagtgaggaagggaaatatggggtgggagaccccacacagacccactggggcactgtctactggacccgtgagaagagggccactgtcctccagaccccagaagcatagatccactgacagcttgcactgtgcacctggaaaagccacagactctcaattctggcctatgaaagcagccaggagggaggctgctcaacacaataggaacccacctctttcatcagcatgacctgaatatgagacatggrgtcaaaggagatcattttgga

SEQ ID NO: 817820 - DNA, 564 bp, Homo sapiens
cattcggcggcactctgaccttttcaaggtacccccagctgtcttgcccggagtcaggtccttaacacatttacaaatagtcttcrccaggattctcaagcagtcagcccttttcttcctgagaaagaagagactctcgggcttccgaaccctccagagctgctacgcatcaaggacaagcatcaccgaagggtctcctgttgtgcatttctccaagatcctttgcaagttaaacagtaagttcacttcagccacgccaacaccactcacagtcactggagagaagccaggcggagcctcagcaaggacatttgggcccagttacccttgactcgttggacacaatgctgacctctcatccctgaggcaaccccagctctccctgtctccatccagaagggtgagtctaggtcagtccagcaaatgccagtttacagaaagctgagagaccaattcaccaagagacaatttgcagagctcaacttgccaagcaaacacatcgccaaacttatctaatttgcttattagaatgttcaacagggctattcagcatcactagtggga

SEQ ID NO: 817821 - DNA, 588 bp, Homo sapiens
agagagcttcaagactgagaccataactcagaccgttctgggccaatgccagcctctgccaatcatgcactgatgtcatattgaaaaaaagaaatatgacccatgacttgggcccacctactgcacatctgtgtctgatgtttgcacacagagaatgcagtggtctcaagctgggatgggcctaccgtaaagtcaagagagacactgccatgtctctttcccatggttttcctttcaaattcccacagattttgcattctactccataatattctcaggagccgcagtacttacacatttaactttcctgaattcaactatatgaactgagcgaaaagagaaggtggatccgaatgtgaccttacttggaatatgattgctgcagatgtaattagttaagatgaggtcatactgaagtggggtgggaccctaatccaatatgactggtgtctgtaaaaaggggaaattgggacatagacaaacacatagaaagaccaccacagggagatgaaggcagagatcgaggcaacrctcctacaagtcaaggaatggcaaacattgccagcccctgccaggaggtaggagaag

SEQ ID NO: 817822 - DNA, 620 bp, Homo sapiens
ctcacagatttttttttttaaactgcatgagacaaacaaatgtatctacacttgcgttctgttagtytaaaattctgggctaaattatgactggatttggggacatataatcaagcatccaaatacatgtaaactaaagatgaattttgctggcaaactagttccagcctctggcattagaactacttagattttcttttcaaatactagactatatttacagcttaaaaattggatggaataggagccattaaaaactgatgacattgaaggaaataataacaatattttccatatgtaaacccaagctgaaaatacaattggcatctctgtctgctcagtgcaaagtattttgatgcttcacacatgttatcatgattgctgctactttaattcccacatctcgctggcaaaataattgaatagtgaagagaataaatgtctcttacagtatgtgaggcaaaaacccggatggttcagatcacatttggccaaagaaatgctttcttatttctcttctagaactgtgtgtctgaacactatcacgggctgtccaaagtgttttattagattgttcttccccctaaatacctgatttctgtattagaggcatgctctct

SEQ ID NO: 817823 - DNA, 586 bp, Homo sapiens
tgtttgccgcaactctattcacaaaacggaaaatatggaaccaacattaaggcctatcaaaaggagatttatgaaatcaatcctggtttatcccttgcatatagttctacagttattaaaatggtgatgttcaggggacactaactcaacccgaggggtggttgcatcggctttttgcaagaaacaggccaagctaatggctaagctgtttggggagcacctgctcattgtagaggagacacctgcctttcagtttccatcacatccttgtaagactacagactcaatatcaccagattatcctcttcgcaggagaagctgcaaaatgtcctggcttttaaaacgttgtgcaggtcttggagggtagaaagaaagtatctgtgggctgcattttagctaacattcaggagtttcgcaaactttaatgtggaactaaaattattgtcaggtaataatgctcagtacttataatcagtcttaaaacrtaagattaaaacactatatttctatttaggtaaaattatgtacatatgtttgcatgtgtgtttatgtgatgttgacacaaatgaatgcacaaatgatatat

SEQ ID NO: 817824 - DNA, 630 bp, Homo sapiens
attatatctttcaaaatagctagaagaaaggacttgacatgtacacaacacactggtaggataaatacttcagtgatgtataccctgaatatcctgacttgatcattacacgttctatgcatagaacaaatatgcatatattatgtttgtaagtatttgtggggtacattctatgcatatttgttttatatatacataatatccaattttttttgttgaagaaaacaatacgagcttaactttttcaatatattatcgccatccacaaggagggcacttaaatatttccttaaaatcctaccattaactaataattacaagagctttgattatgaattgctttctatatgtgcctgggaccatgtttagcacctcacatgaattatctcatttaattctcataacttccctatctggcttatgatttttttatgtcactggagggagcagtctactaatcccaaagaagtccaacaggtactagcctacctggctgaaagggagccaagcaggtctacttcacaaatgytttgaagctaatcatggcttccttttgtatggactccacagtccctgagattattcagcaatcacctggtgagatgtgatgtgtgattttgatacaaatgt

SEQ ID NO: 817825 - DNA, 521 bp, Homo sapiens
attaaccaggacacatacaaaccaactgttttatctagcttgcatgcatcccaagctacaagttggtgcattcctcagactaccagcctcttctccataaacgcaggtgaaaactaggggctctttttccctcagctattcaatccaacatgaatagctgcaatttgcaaattagaggaaaatgacagtgttttctctgaatggttttactccccagccataacgctaacgctaacattgggttactttctcctcagctcagggaatggagaaattagtgtcaggccagccccccaccccttttttcaccactagcaagttgcctcaggttcacacaccagagaaggaatcagctccccctggaatatttttcagcaaacacagtccstcagcctagtctgtaacccctttcttgactttaacatttcactcttttttcagacagagacaggctgatccgcagtactgcccagggtgagtgaagaaacaggcaaaataattttaaaatactaaacacaaaa

SEQ ID NO: 817826 - DNA, 610 bp, Homo sapiens
attaaggttccacttgaggcaactggatggatggtctgtcacaaactgtacatggttactgtaatatccattctctatatttttgttggtactagaacctccagtgtttcaytgggtaccagaaataggggctgtttcctagcatcccgggaaatagcagtgacatgtggttaagttctggacaatgggatacaggaagaagcatcatgtgtcagcttctggaaaatgtcgttaaaatagaactgggccatgtcatttgttccccttcccctccttcctcatactgctgtttagaatgcagatgagatggctggaactctgccttggaccaggagcatgagcccaaatcccaggggatggtgcaggaaaaagctgcagacagtctgtgtctaagaccaaggcacagccacactaactctggatggcttattttgaactcactgtatgtgagagaaatacgaagttctatgccaaatccatctcagtcaatggagttgacacagaactccatccttttagttgctctggctttaagcctttgagtcatccatgacttttttctctctcaaactccacttgcaatcttggtagctctactttcaaaatatat

SEQ ID NO: 817827 - DNA, 628 bp, Homo sapiens
aactccgtaagcagccaaaaacagggcccttcgtatgcctgggcttcaytttccccatttataaaatgagggggttgggccatctgacctcagagggcccatctatctctgaagctccagaatctcataaggatcaagaatggcagaagaagaagaatcaaagatctagtaactgactccagattctagaagggctgggtttttttgctttgtcttgtttggggtaaatgcactctgaaaggtaactttgggccggaaaatcagtcagatttgctgggataagaaggttcaggtgggacccaaggatggtcttcaagaacatggaggggatgtgcatctggaagcagggttaagctggttctgtgtgatctgaggttggaaggcagaccccatcccatttcagagatgaccaatctgacaagtaaaggagtcttccccccatgcttcagaatacattctctagcttcattcaggtttctattcaaatatcagctcctcaggtatctactcctaaccctcgccctaactcagtgcctgtctctaatgccagtcgaaaatgccacctctgtcactctctaggcccttacctgcgtttgcctttcacactgccctacagaccatcatatga

SEQ ID NO: 817828 - DNA, 610 bp, Homo sapiens
gtcatttaattgtctgtttctttctttatccaccattagattataagcttcttgggggtagagcctgggtctagttcactgtgccttctgagtactagattgtcaattaagtatttgttcagtcaatcagttgttcaatcagtccttcagtcaatcaaaggatgagtggataaatgaatgtgggtagttcttcaattcaagaaatatcaagaaaatcatttccaaaagatttctgttctacccctaacccagctggccatttcaaccagagagctctgtgcttcactccactcctgggctgatcaggagtcgatatttgagctcaatgcttagctttaaaaagcttaggtgaaaagaagcaggactatctaaatatagtccttattttcagatatgtaacttaaaatccttcctgaattaagtgagatcagcagagagccacattcctagacttcagcaaggtgccctagagctactttattgaatggcaggcaggagggggtagtctgatgttcatgacgtactgtgggaggattttataaraaactgccctgtgaagcttattactgtgtttactgtcaggttattattgaggacatttattattcta

SEQ ID NO: 817829 - DNA, 534 bp, Homo sapiens
cccaatatcgcaaggggcgtagacctccaccgtgacattgtctctaatatccaaaggtggagaggatatttcttccaatttcgcacggatgtacaccacccctgtgatacagttcctaatatctaggcggcgacaggatgatattagtctcaatatcgctggaggtgtacactccctagtgatgttgttcctaatatccagggacggagaggatgctatcactcccaatataacagggggtgtacaccccttctgtgacattgttcctaatagccagcgggggagaggaagatattactctcaatatcgcagggggtatacacccccttgtgatattgtttcttagatcccgggagggagacgatgatactagtggcaatatcgcaggggctgtacacacctcctgcgatattgttcttatccctaaggggagagcawaatatgactctcaatatcgcagggggtggacacctcctttgtaatattgttcttaatatccatgatgggagaggatattactccctgtatcgcaag

SEQ ID NO: 817830 - DNA, 431 bp, Homo sapiens
gtacacccgtcctgtgatattgttcgtaatatcccagggaagagaggatgatatgacacccaatatcgcaggcggtgtacaccctcccagtgatattgttcttaatgtccaagaagggaaatgatgttattaccgcagatatcgaagagcttgtactccctctcccttccaggatattgctcctaatatccaggggaagagaggataacattatgtccgatatcgcagggggttgtacaccccacccccgtgatattggtcctaatatccaaaggtagagacgataaaattactcccaatatcgcmgggggtgtacacccctcttgtgatactgttcttaatatttaggcggggagacaatgatattactgtccatatcgcaggggtggacaacatccctgtgatgtggtttttaatattcagtgggggag

SEQ ID NO: 817831 - DNA, 693 bp, Homo sapiens
tccagcatcttcagtgacagaggcaatgggatcctttaaaatgttgggccaagaaaattggccacagatttgcaatccaaaasaaataggaggttgctaaattgattccagctatgaaggacatcgaaaatttcttttgttatttgactgtctatcatggtctatttgcactcaatttaataggcaaatgaatttccgactttcccttagcagccttgagtaatgctgtctcgtatttattattttgcattagaatggttggaaaagttaaaggaaaatttccctagcaagaattggcttcttaaaaaaataagtcatcttggacaacctaacatttagtaaaggcatttgtcataaataacctcaagtccaatttatggcaagggttttaatttgtaagggctttatttctccatacaaagggattggagaaacaaactagaaagccagaaaacagaccacaaacactgagctagtggttccaactggagtgttccctgagcagtgacttatgaatacttgtttagaagaatcaactcaaacaaatttaggaaagtcacatcctgcctttagagcttccagtgtttgttagcatattaaagtctctgaaatgacctacaatattgaaatctcagtcttctgctatttttaatatttatttcaaaatgaaataatttttgtgaaaaacatttt

SEQ ID NO: 817832 - DNA, 262 bp, Homo sapiens
cattcctgcctggcaccacagggatccaatgggagaggagcgggggtaaaattccatagggagaagcaaatctctagctgaacttggtgacaatttgaacagggtgagaaagcgcctggccagaactcaggagagggcacaaatccagtgtgcagactccgggggcaggggataaaccaagcycttttatttcccagctgggagcggggagcctggggcaggttttcaagcaggtattgcttctctacttagaaacaacctg

SEQ ID NO: 817833 - DNA, 621 bp, Homo sapiens
caagaggaaaaaaattaaaatatttaatacatttattcattcagcaaatttgtattcagcagctgctctttgctgggtgtcattcctgtcactgtgaggacactggcaaaccaaagagatkggtccttgtctttgggactcctagagttgaggacagataatgcataggaagaaacaggtgagttatctttcaacaattaaaatggaatgattgggggatgctgggggaacacttcaggttgggtggtcagggaaggccactgtgtcacatctgagagctctccaagatgattccagaagtccacccctttctcttttcaatttattgtatctgtctttcctccttctgtggcctttaccttcttgtaaagcacttactattattatttgctttgacggaggaactgtaaaactgaaataaagatgcagttaaaaaaaaagagcctgaaatgcattttttataaatcagaagctcaggtgcaccatccttttttcaactccaagaaaatcataaattattttattagagggaattaccacagctctagatcttaatgattgctgaacaggaggtttttttcttttctaaacatcaagttagctgccagttttaattttctt

SEQ ID NO: 817834 - DNA, 518 bp, Homo sapiens
caccaacaccactttcaaaccckcaaaggtcatacaacttttaggcaagtctcttgaatacttagcaattggttctcacaagctggcttcagcttcaatgcagtactgtttagagagtttaaataactttcccacggtcactaaaccagtaaatgtttaataaaaagatcgaaaatagaatgctatttattctgtcagaaataaaaaagctatactttatcaagagaggttttcttttttttttctttttgctgaaaacataatgctaagcagaaatttgcaacatatagtataaatgccttcaatgtcttcacttcagggaattagctaatgagtaccaaggcagaagtggagaagtttttagtatcttaaaatctttaggtaggatttggaggggtagtcgttgccaatattattacacacacatggcataaaagggatttaaacagcttaagatgataaaagttgcagatgggacttaaggagtgagaaagaatccatcaattaataaatttaaa

SEQ ID NO: 817835 - DNA, 518 bp, Homo sapiens
caccaacaccactttcaaaccctcaaaggtcatacaacttttaggcaagtctcttgaatacttagcaattggttctcacaagctggcttcagcttcaatgcagtactgtttagagagtttaaataactttcccacggtcactaaaccagtaaatgtttaataaaaagatcgaaaatagaatgctatttattctgtcagaaataaaaaagctatactttatcaagagaggttttcttttttttttctttttgctgaaaacataatgctaagcagaaatttgcaacatatagtataaatgccttcaatgtcttcacttcagggaattagctaatgagtaccaaggcagaagtggagaagtttttagtatcttaaaatctttaggtaggatttggaggggtagtcrttgccaatattattacacacacatggcataaaagggatttaaacagcttaagatgataaaagttgcagatgggacttaaggagtgagaaagaatccatcaattaataaatttaaa

SEQ ID NO: 817836 - DNA, 625 bp, Homo sapiens
tacttttagaaatatgaacaaagaactgaataagatgctaaaataagagataaattatgcaaatgcctataataatgaacatttcataggtcttgacattgaaaaattgtaaggtgagagttgtaggtaagagaactccaaagagaaataaatgggtaatgaaagataggacctggaaggcctagatgtaggtctgctccactcattgaacacacccaacaagctcctaacatgctccaggcactatgcggcgctgcaggagacaaggtatgggctgtgtcctctcagggagttattcgcaagaagacatgatgaattctctttctctaggtcaaatgaccaaatatgttttgattttaaacattgtaagagaataatacggaaaagtgtaataagattagagatctcaaagttcctgtcttagtttggtgcaaaagtaattgaattttaaatcattataacgaggcttaaacacatctttattaatcagaataggaaccattacaatccacacatttttgccaatgagaaatacattttttcattmctgtagtatagaaatctgtgcttcaggattcaatgaactcttgaaaagcattttctgcatcctgctggttgtggaagc

SEQ ID NO: 817837 - DNA, 549 bp, Homo sapiens
ggataaatttaagagtactttattaaaaataaacaataatcttctcttcctcacacacacacattatgcagagccattttcaagaatccaggaactaaaaagcttttaaataggaataatttctagggagcttattggaacatatcaagcagaccttacatttgaacatgtcctatgaatattaccattgaaagtatttcttaaaatgctattaacagaacagtttctaagatgacacagcacaattaagcaagtcttgtcttccattagtgcccattcatgatttcaaggatgattccacacacttgccacattgctactttgaaaagaaataacccattagattcactatgccaaaatttaagacaaattttcaacagcttatagttgaacagaagagatctctgcttaactcttaacaaaacagaaagttgggttagccaataagctacattttctctaacatgaacacatatgaaaaatgtaggaaaayttaaataaaagaaatacatctcataatctaaaatagaaacttttagtatagtttca

SEQ ID NO: 817838 - DNA, 630 bp, Homo sapiens
gcatccctgactcctactatttcttttcctcctcttccttatttttattccttaaagttttcattaacttgtatacccctggttatttgcttttgtaatttctttattaaaggttagcatttgtcaagataacctttagaagtagggtgctacaattgtcagatttgttgtttctgtctccattaaattgttagactgacatagcagattttaaaaatcttctccccagttcttctccccagtttatggtttgtttttttctgttttcttgcatgtctttgctttactttaattatgattacattgaacacatggtttattctagaatacccagttaccatgtttttattctttctagtgcatttatctatttatgttaatccccatgatttacataatctgtagctaaaatcaacaatatcttggtaagatatgtttctccatgattaggtatttctttgtcagctctatagatagcattaatatgatatcataaaatatctttgcacattttcccatgaccacacaatctttagcagcatgttttattctttattttcttttcctcktctctatgtacggtgattgtgaagtaatgagattagtgttgatgatattagaagtgtgtat

SEQ ID NO: 817839 - DNA, 622 bp, Homo sapiens
tctcatttcaatgactattagtggatcctttttaaacactaagaatttaatattgtaataaagaaacaatttattgaatgttttctctttgccacacatttcattagcattccactgtgtcatgatatctctttaccagattatctaactcctttaaatatgacaataataatcaacagcagccaggataacaatagctaacatttattgagtaattacacgtgctaggtactgctctaaagactttattaattacctgatcttcacaacaaactaatgagatagtatagcagttgaggtcctataaggcaacagatagcatgcctaaatgtggcaaatttaaaaaagtcttctaaaagagacaatttacaaaggtatggatactattaagaaaaatcaataggggttggtgaagagcaacattgatccattagcaacactaggctcatgggtctgaaaaaggagcagttattagaaattagagagaataggcatagatatagcagagggccactcamctgggaagttttcccaaataatcacctaccactactactctttacatgaggcaggaggagagaatgtatttataaacaaatgtagctgttgcaatttcagcttc

SEQ ID NO: 817840 - DNA, 610 bp, Homo sapiens
actgttgtgtatcctgattgtggcgatggttacaagaatctatacatgcggcagggcgcggtggcttacacctgtaatcccagtactttgggaggccaaggcgggtggatcacgaggtcaggagttgaagaccagcctgaccaagatggtgaaacactgtctctactaaaaatacaaaaattagctgggcatagtggcacgtgcctgtaatcccagttactcgggaggctcaggcaaagaattgcttgaacccgggaggcggaggttgcagtgagccgagatcacgccactgcactccagcctgggtgacagggcgagcctccatctcaaaaaaaaaaaaaaaaaaaagaatctatacatgcattagaatttatgaaaatgcacatcccctcaaaaagagtcaattttactatatgataatttaaaaaataaaaaaaagacagcaaagggtcatcgaatgtggaaaatcaccactagtctctcctggttatctgtgtacctctccccrtacatataaaatgtcatatatttccaccatcctgtgctttcattcattcattatagacttatgtagcacttagtatgtgccaaacaatttaaaaataactat

SEQ ID NO: 817841 - DNA, 551 bp, Homo sapiens
tgcacctcatttgctgtgtgtctcttgtttcaattcatttaaactatgaagacaagaaccagggtctcacaacagccatcaacattgttggtgataggttatgttatttaaacttttatatacttagcgacattttatcccctttgacaagcgaatgtctaatactaagagtgatgtgttaaagttttctattattattttgtttctgaacacttctccttgatagttctgcatcataaaattggctgtatttattgtaattggaggctttagcattgtaaagtgttcatatttgtcttaatttgatgacttttggcctaaattctactttgtctgttattgactaaggatcaaggggctaagaatagcagaaataagcatcactggaggatggagttcatacatacataatttatcttcccatgtttcttcccttgctgtattactacagttgccaacaacaacaacaacaacaaaatytgccacctactactatgttgcttaggacagatccctgatcctctctgagatctaccttccacatgtgtaaa

SEQ ID NO: 817842 - DNA, 617 bp, Homo sapiens
gcccatgctgctgttctgcctatggagtagccattctttattgctttcactttattctatggattcatctctaattctttcttgtatgagatccaagaaccctctcttgggatctggatcaggaccyctttctggtaacaagagcaaagaaagaaaagaggagagttatcatcatcactggtcatcagagaaatgcaaatcaaaaccacaaggagataccatctcacaccagttagaatggcaatcattaaaatgtcaggaaacaacagatgctggagaggatgtggagaaataggaaggcttttacactgttggtgggagtgtaaactagttcaaccattgtggaagacaatatggcgattcctcaaggatctagaactagaaataccatttgacccagccatcccattactgggtatatgcccaaagaattataaatcatgctactataaagacacatgcgcacgtatgtttattgaggtactattcacaatagcaaagacttggaaccaacccaaatgtccatcaatgatgtagactgtattaagaaaatgtggcacatatataccatggaatactatgcagccataaaaaggatgagttcatgtccttttcag

SEQ ID NO: 817843 - DNA, 661 bp, Homo sapiens
aaatatgtctaacttagaagtgtatgattacacaagacagtgtttgttttctaatgtttaaagctgtattgtaatgagaccttattgtaaccctgactctctatcatcccttttccatttcttttcttttytttttttttttgagatggagtctcgctctaccacccaggctgcagtgcaatggggtgatctcagctcactgcaacctctgcctcccgggttcaagtgattctcctacttcagcatcctgagtagcagggattacaggtgtgtgccaccacacccaactaatttgtgttatctttagcagagacacggtttcaccatgttggccaggctggtctctaactctgaccttgtgatccacccaccttggcctccgaaagtgctgggattacaggcatgagccaccatacctggcattcttttcagtttcttttcctgcatttattgttcaaaaacagaggacatcctcactgccaaccatcagcattcccagatctcctggtcagaatgaatcactactttctctgtattctcagagaactatgtatcaaaataccatcctttatttcattttaataacaaacttctcaaaggcacacttgctgtgatctcctcctgctggatcctggcccagtgcgatggagaaggccatctc

SEQ ID NO: 817844 - DNA, 585 bp, Homo sapiens
caacaaaaaaatgcaatgaggaaaggacaaccctattcaataaatgatgctggaaaaattggatagccatatgcagaacaatgaaactggacccctatmtctcaccatatacaaaaatttactcaaggtggattaaagacttgaacataagacctgaaagttaaaatcctagaagaaaaccaaagaaaatgcttttggactttggcatatgcaaggaatgtatgagtaagaccttaaaaacaaatgcaacaaaaacaaaaaggcacaaatgggacttaagtaaatgaaagagcttctgcacagcaaaagaaataatcagcagagtatacagaaaactaactgaatgggagaaaatattttcaaactatgcatctgacaaggactaatactcagaatctgcaaggaactcaaacaactcaacaaacaaaaaaacaactagccccattaaaaagtgggcaaaggacatgaacacacattcctcaggagagacacacaagcaacccacaaacatataaaaaatgcttaacatcactaatcgtccaagaaatgcaaattaaaaccaaaatgagataccatctcatacca

SEQ ID NO: 817845 - DNA, 615 bp, Homo sapiens
catggaaatgaatgtttttcctcakaaaaacctgcagcatacaggccatgccatcttcaaccctgcaatgagaaaattaatgtaaataccataacatcacccagactgggtaagcagacaaaaaaaaaagatgcttttgaaaaacatagaaatgcttatggcttcttgtattttgtatattactttaaaccttgatagttgtaaatctatactgattattttggtttgcactaaattggatccatttaaatatgatttcgtccaaatggtcaggtgggtaaaaaagtcctaaaaacttaaactgctttgattcccaaagttgtccaatcagagccaggtccaggaaataatgccacaccaccccaggtctttttgtaaccaaaatttagactcggatcaatctcatggcagaactatcaattaagttaatatctgtggaaagatgagattgtagtgtaagccttagatttctccatggttgatagccttccttgtgatctgggtataaattattctttggagggacacagactaaaaaatgtctttcaagaagaatgggtgcatggatctacaccattaaacaagaagttctattttctttttaagttttgagaa

SEQ ID NO: 817846 - DNA, 705 bp, Homo sapiens
tgaaactgaagcttaaaagtacaacacattgaacctgggaattatatctttaataggcctaaaaacatttataagtaaaaatattattcattctttactttttaatcataggaggtgtgtatgtgtgtgtatctctttcttgtttaaattccagaaggtaatataaatgaaccaaagagagtgtacaaaatccgccccacttaaacgcttgaagttggtttttactgacatatatgatatctgcatggagtgaattcactatgttctgtttcacagctgctctgactttcaagtgcctgggagatcagtggccagtgtactgccgagtgatacgtgaaaagaacctatgtcaggacatgcggtggtatcagcgctgctgtgaaacatgcagggacttctatgcccaaaagctgcagcagaagagttgacctctagcaggctggctggatcacagctcttggcaattacattatttataaacacacacactagcatgtttttcagaccaaatattatcagattacatataatttaatcaaattaatttatttttttgcctgccaaacatccaatgtggtgcttgttttggttacacaaacattttgatttatactatatggcttcataaataattttatatgaatgaattagttggatccastaatataataaaaagaaaaaggaaaaaaatagatcattatactt

SEQ ID NO: 817847 - DNA, 530 bp, Homo sapiens
attaaatctacctaaggaaagtacaatcttctctgtacttgggtacacatgagataatttcaccatgtaaaccaacaataaaattctaagtcccccaactaattgaatggacccctcccctcagccaagagcattctagaagtaaacctgaaacacaaatttaggccatgaatgggtggtagtgttatgctagatagtcaggcagacatgaccagggcagaagtgggactctccctcccccgcaaccaggaatgtcaggcgaccatcaggtgatggtcaggaggttgttaactgtctctctaaaataataattagttgcaaccagcccctggggaaggcagtttctctatagatagaaaaaacctgaaactggtgatcagcaactttccaataagatctcaggaattgggcaagtgggctcaagcataagcattaagaggaaaaatggtggagtttaactsgtatatgacctcctaggaatattagactagtaagagaagagcaccttaaagtgagcatgcatgcaactc

SEQ ID NO: 817848 - DNA, 578 bp, Homo sapiens
aggaaaaaatccttctccctaacatctgccacccctagataaaatataaaaacgcattcccagatttatacccctcaatttaggctacaataactggttggggcaaaaaagagataaatgggtggattctattttattctaagctctaaaatgttaatctattgtatagggttgtcattaaatacttccccagttaaagggttctcaaatgtgagcagtctaatcactcaaaatacatgtgttgaggggagagtttctacacatacccattcccaatcccccttttttggattcttggctgttttagaggaacccaaagaagtccttccttctcccttctttgtttcaccaaatcattttcttttctgtttctgctcaatttttatcttttacatgacgaatacttagcagatatatgctggttcaactgcacaccttgaaatcgtttcatagtgttcatcagtagcctctattctaagaagctcactttaagtacccctgctacttccctggtctattccgcaggatccwctagactcacccctaatccttcggtaaagggttgacccctggctggc

SEQ ID NO: 817849 - DNA, 623 bp, Homo sapiens
gaacttccttttcttcacctttgaaatatgaatgatgacatccctgtcttgggactcttaggaggattaaattagggcacatgtgtaggcacccaayagggtgcctggcacatagtaggagcttgataaatggtggttattaaagaaggaaaattttgaatccaggtggtacaaatgattctttgggggctttataccttgtcttccacatgaaaattgttcccccatgttgccatgaactgtgcttaatattctcctcaaccaaccagtcaagtattggagtgagaattagaattagagtatgggctctgagagttcaggaacttttctgtctcattaaatgctgcctgcacctgagattgagtaggtatgtcagtaaacattactggcactaattacttgtgcatctactattgtgcaagcctttatgatttagcactatgggtggcttaataaaatgattagcactagtcacttctctcaagtaacttagaatgtgagtttgatgagtaatggctgagctccttcaggtgccaaagtgttgagatgggctcaggttacctaagaggaagtgtgagaacgttcagagaattatctcagtaatgctagcaaggagctatggg

SEQ ID NO: 817850 - DNA, 637 bp, Homo sapiens
ttctctcccattgttctgcttcaattagaagaaaaaaactaactgtatgataaagtagagaggtcaagtttggtgttctagaaatatgtggccccacagtttcctggatatatcactttatcctttttatttatttatttttatgtcttttgagatggagcctcaccctgtcccccaggctacagtgcaatggcgcgatctcagctcactgcaaactccgcctcctaggttctagcgattctcctgcctcaacctcctgagtagctgggattacagatgcccagcaccatggctggataatttttgtatttttagtagagacagggtttcactgtgttggtcaggctggtctcaaactcctaatctcaggtgatctgcccgcctcagccacccaaagtgctgggattacaggcgtgagccactgtgcccgacacccactttatccatttttaaactattctggtgatcttcatttatggattagctttcaggatatcattatyactattttctttttctcttgtataaatgagagagacattcctatcagaattttaatctcatagactaaactattttccatttattttgaggaaggtgaaatacgaaaaagaatcaactaaataagaaattgggc

SEQ ID NO: 817851 - DNA, 577 bp, Homo sapiens
ttctgcatcaagactgtgaggcacttgaaagcaaaaatcatgagatattcaactgtgtacccttactatcttgcccttgggtagaagctctatcatttaaatttcttcactttttgcaaaatacaagaaacatttacagaacagctgctctctgctagacactgttctaattgctcatgattgcaccagaaacattgaacaaaaaaggccaaattcttgcctcgtggagattacattttaatgaaggtaggcagaaaaaggaatgaaataaataaagttttaacattgtgttaaaagacatatattaaaaaatatatatccataggaggaaaaattaagcagccaaagaatatagacgtattagggcagaagatgcagttttaaataaaatgatcaatgaaggcttcactgagaaggtgatatttagtacaagaccttaagaaatgaaggagcaagccatgtggccacctcgcgaaagagtaatttaggcacagggaagaggaaatgtaaggccctataaaaagaacatayttggactatttaaagactgacaaggatcccaatatggctggagtga

SEQ ID NO: 817852 - DNA, 659 bp, Homo sapiens
actatttggctattatgaataatgctactgtgaacattcctggataagtgtatgaatgaacatatattttcatttttcatgggtatacacataggaatggaattgctgggtcatatgakaactcgttttaaacttgtgagaaacttccagactcttcaaagcatctacactatttcacattcccactagcaatttaagagaattccagtttctccatattataacctacccttgttattgcatcctttttattctagtcatcatagtaggtatggagtggtatataattttgcttttgatgtgcttttccctaatggctaatgatattgatcatacttcattgagcttattggcccaatcattttgggaggccaacattaccctgaggccaaaatcagaatgagaaatgacaagacaattacaaattaatatccctcagaaacataaaaataaaaatccccccaaaagtactagcaaatcaactaagtagggtttatatctgaaatgcgaatcttattcaacatttgaaaaatcaataaattcaatttatcatatggtcagattaaagatgaaaaagcatataatcatttcaatagatacagaaaagtcatttgacaagattcagtatctattatataatatacatatatagttatata

SEQ ID NO: 817853 - DNA, 533 bp, Homo sapiens
gccacaaaacttagcagagaatagctgatttttgctgggagaggaacagagatagcaacaggtatttcacagaagaggaaacacagatgactaagataatrttaaaagatggtcaaccacattagttgttaggaaatgaaaataaaattactctggggtattatttcatgctcaactcattgctccaccttccactcccctacaccatcaaaaatataaataaatcaagtccagcaatatcaggtattggtgaggctagggcaaataagattcttatacactgagaatatgaaaagtcatttgttacaactactgtgacatagtttgggcattaactagtatatctgacatagtgattctaccaccaagtagaccttagagaagcttttgcccatgtgtcccggagacatgtgcttgcatattcacagcagcattgtttataattgcttataatagctaaaaacaaaaaaagtaatgcctatcaactgtagaatagacaaaatacaattttgtcaatacacagaaatattata

SEQ ID NO: 817854 - DNA, 533 bp, Homo sapiens
gccacaaaacttagcagagaatagctgatttttgctgggagaggaacagagatagcaacaggtatttcacagaagaggaaacacagatgactaagataatgttaaaagatggtcaaccacattagttgttaggaaatgaaaataaaattactctggggtattatttcatgctcaactcattgctccaccttccactcccctacaccatcaaaaatataaataaatcaagtccagcaatatcaggtattggtgaggctagggcaaataagattcttatacactgagaatatgaaaagtcatttgttacaactactgtgacatagtttgggcattaactagtatatctgacatagtgattctaccaccaagtagaccttagagaagcttttgcccatgtgtcccggagacatgtgcttgmatattcacagcagcattgtttataattgcttataatagctaaaaacaaaaaaagtaatgcctatcaactgtagaatagacaaaatacaattttgtcaatacacagaaatattata

SEQ ID NO: 817855 - DNA, 639 bp, Homo sapiens
ctgcctccctcccttgctgtgcttagccagcctggttctccctgcagatgcagtttcaggggatgctgtgaactgatcagaaaatcaatagaaggcaacttggaggggagggtgcagaggacattgtcattgtgacttggtccccttaagagctgagatgcttactcaagagctggaggttagagtagaggcaggctccactctctgacctcaaggtatgagctttgttaggaaatgagcagctcttcctgagaaattctcaggagacatgtcatacactgcatcttccatgaaaggccaagtcttggttatggcaggaggtggcaggaggtagaaggaaagttctgtgaccaagtatggatgaaaatgaatttttaattttaccatgtgcctgggatttcagagggtctcaaataaaagactagtgacaagggagctataagagattgtgtcaggagagaggaagaatggccaagtacagggatgagaacattagtctgcaaagagggctgactgtkcctacaatttttgacagtgaccagggctaatagagaagtgacatgtggtaggattaatggcacataaattttcacacagggctctccacttacacattttcagcttcattttgtaacacta

SEQ ID NO: 817856 - DNA, 639 bp, Homo sapiens
gcacctgcagtcccaacttgggaggctgagaygggaggattgcttgaatctgggaggtcaaggctgcaatgagccatgattgtgccaaactggaatcccaggaaaaagggactgatagcttggaagggaaaaaaatctttgaagaaataaatttacagattcaaaaatcttgcatttagcctgagaaaaatggcagatttcatggcagaacattataaattttctctgacatctcattagaactaataggtgccagaagagaatggaactatatcttgaaagtgctaaaagtaaaatgagaaaggagagggaagaggggaaggggagggaaggggagagaaagaaagagagaaagagagaaagagggagaaagagagaaagaaagagaaagaaagaaaggaagaaagaaagagaaaaagaaaggaaaaggagagagaaaggaaggaaggaagggagagagaaaggaaggaaggaagggagagagaaagaaaggaagaaagagaaaaaaaggggaaagaaagaaaaaaagaaaaattaaacttttaaatttaaaattctgtatcccgtaaaatcatcctttaagaattaagatgaaacagagatattttcggataaaataaaactagagaattcatcacc

SEQ ID NO: 817857 - DNA, 639 bp, Homo sapiens
gcacctgcagtcccaacttgggaggctgagacgggaggattgcttgaatctgggaggtcaaggctgcaatgagccatgattgtgccaaactrgaatcccaggaaaaagggactgatagcttggaagggaaaaaaatctttgaagaaataaatttacagattcaaaaatcttgcatttagcctgagaaaaatggcagatttcatggcagaacattataaattttctctgacatctcattagaactaataggtgccagaagagaatggaactatatcttgaaagtgctaaaagtaaaatgagaaaggagagggaagaggggaaggggagggaaggggagagaaagaaagagagaaagagagaaagagggagaaagagagaaagaaagagaaagaaagaaaggaagaaagaaagagaaaaagaaaggaaaaggagagagaaaggaaggaaggaagggagagagaaaggaaggaaggaagggagagagaaagaaaggaagaaagagaaaaaaaggggaaagaaagaaaaaaagaaaaattaaacttttaaatttaaaattctgtatcccgtaaaatcatcctttaagaattaagatgaaacagagatattttcggataaaataaaactagagaattcatcacc

SEQ ID NO: 817858 - DNA, 422 bp, Homo sapiens
gcgtttcccaaacacatacactacagggaaaatcatctagaatttaatgtttgataaatgctcattatattgatatataggacttctttctcaactaagagctttagtaactaagagctctatattaactcagtattcaaaataacccatgatgctgctgatggcaaggcttacccaggcttcctggatatgctgcgagaacataggctgattctgcagaacatggaaatttcaggagttccagtgattgggggtggcctcaatcacggcttctctaactttttcaagagaccccagatccctaccagcagaacagggctctggagcatttggcaatgtactsatcacaagtaattgtattaggctgaaccatatgcaattgccattctttggtatctccattacattcaaccaactataac

SEQ ID NO: 817859 - DNA, 558 bp, Homo sapiens
cttggtcaatgcctattagcaatttaattcctgragatggatgaatagatggataagtagatgattaacagatggatggatagatatgtagacagataggcgaatatgtacaagtatgttcactggcactatttttaggaccaggatcaggaagttggagtccaccaaggtgcctatctctgggagaatggataggcaaagtatgatggatatacaattatgtaggttaaatataaattgccttgcatcagttccctcagcccagttctgacaccagctgtagcttttcacactgacagctttccacctcaaccttctgtagcatgtctattaacttttcacactttgaactttcactcaaactgtgggagcttgctctgcccacacaaattgtacactagctcttgaagcttctgtctggaagtaaattataacatttcattgtggtagcgtgatcagacccaacaccaggtcattggggtgatgaagtccagtggagtcaaaggaatgagaaaagacagtttgagagataaagtgggtccagggggccaacgtgag

SEQ ID NO: 817860 - DNA, 624 bp, Homo sapiens
tcttcaaattaaaacagcaaatctcttaagtaccatagagtaaaacggttatgttttcctcattatgaaatatatatacawacataattcatttgagtagctcttcagatttattccataggaaacgttttaggaaaaaatggttaaatcaatgaatgctataaaactaagtaattcatgtaaactatggaaaaatggtattggaactaatggaaatgttaaggctttctcttaaagcctaaccgtcaaaattgaccagaaatacaaagagaacagtaatttttatttttttattttattcttttgttttttggagaccgagtctcactctgtcgcccacgttggagtgcagtggcgctatctcagctcacagcaacctctgcctcctggagaaccagtaatttttattattgtctttgaacaagtttatctcaaaccgaatatatagtctttaccagagaaaggtgaaataaagttatttgcaagagttaaacaaatacctatctaatggagaagctcactgacaaatacacaaatcaggaagtgagtgaatggacttaggagataataatttaataaaattcaggcaacataaaacggcagccacaatatggcaaccatatg

SEQ ID NO: 817861 - DNA, 600 bp, Homo sapiens
agcctcgactccctgggtccaagtgatcctcccacttcagcttcccaaggagctgagaccacaggcatgcaccacctcacctggctaatttttttatttttatagayggggtctcccgatgttgcccaggctggtctcaaactcttgggctcgaggaattctcccaccttagcctcccaaagtgttggaattacaggcacgagccacagcacctggtctatatttaccatcttttaaaaattaggtaatgtacgtaacagagatcctttaccctttactctatcctttaacacacagcccaattatagagaggctttccctgcttgttttgttcatttctttattatttgaatttctaaataaaaacatattacttttataaacagaaaaagtaataaagatttttaaatctgtaataactgtgttgctctccaaagaggataagaggtctgtcctccaaaaggaatattaaggcattaaatgtattgcatatacattattaaaggaagaataagaaatgtatacagagtctgaaattaagaacaaataatttctactatctaacttacaacaaatcaaataaattagcaattagaataa

SEQ ID NO: 817862 - DNA, 578 bp, Homo sapiens
gctgcatatcatctgtggaggaagcattattcaagggctaaggactaggctcaatttatttctgtggctccagtacctacaacagtgcttgtcaccttctaggtgcttaatgtggaattaaattttaagaggagcttcccaaattgcttaatatctttagaataccaggaaaaaaaaggtccagtaccccattcctaatcatcctctgctatcgctgagtcagaaaaaatggctcttgtctcccaatggtaggcagtttagctgtgagaccatcctggggacatgggtgtagatagaagcagatggatcatgacaactggaaagatcccagtagagcagctttgggccttagtctactttgctttgctctggaagaggccaaaatgaactgttcaacctataattcccaatttatgcaccaaagcactccagggcatcatggcatactcacagggatgctgcaggatattttaaattttgagtgaayaatagtgatattaaacctctgtcagataatgtgagaatgaatagcatgagggaacttaccacttcaacattagtacatagtatattcccct

SEQ ID NO: 817863 - DNA, 589 bp, Homo sapiens
tgttaccttatcgcatcctcatcacatcctcctagaaacccttgattggctttccattaccttcaggggcctcttagcaccacgtacagtcttccaggcctggcacctgcccacttctccagtctttcttctttccccatccctcacgtcttctactctccagccattcgctcattcactttccattcattcattcttcaaatgcgtactgggcagccactccaagtcagatgctgtgttagctgctagaaccacagtgcacagtggggggacaagacaaacaagagcctttctcttaagaagcttacatgccagggaatgtaaataacaatgagagaaagaaagagatgagagcatttctttctttctgtgaaaagtgttgctaggagaatgccacagggcgatgtgattgagagtgaatggaagaggccgtgtgcctttaattgggtggccagggaaggaaggcatgagttgagaaccagccactccaaatttcttgcagttccatgatcgtcccaggtttcrtctatcctctgtgcacgtgcatacgccactgcctcctccaaaatgcccactccaccccagcccc

SEQ ID NO: 817864 - DNA, 609 bp, Homo sapiens
ctacagccagaggccagtatttggatccccagagaatgtttccaattttatggtaggaattgatgggaaaagattatttttkacagaaattcacctgacggcagaatttcctgggtcacatctcttcagttaagtagaagattcctgattctgaacagtcaaacaatttaataccaactgtcaactagcattgaagatttttatgtccttagttcagctttgtgcttgacctttcttgtgcacctcccttttttattctgggacattaatggttgtttataaaagaaaacatataataaaattgtaaaatctgtttattcatgtatatatgctcaaaaatgtgtcaaggcatgaggaagtcttctagggtacgggacaaattctatgtcttgacctgggtattggttacccagggtatacattaaaagaccattgagccacttaagatccatatgctttactgtatgtaagacgcacctaaataaaaagattttttaaaatgtgtctggctttaatcttacagagagccaaaacttgatagatgtaactagtacatcctacagtaaatcagttcaaacctacaaacatttattaagggcttactatgta

SEQ ID NO: 817865 - DNA, 609 bp, Homo sapiens
ctacagccagaggccagtatttggatccccagagaatgtttccaattttatggtaggaattgatgggaaaagattatttttgacagaaattcacctgacrgcagaatttcctgggtcacatctcttcagttaagtagaagattcctgattctgaacagtcaaacaatttaataccaactgtcaactagcattgaagatttttatgtccttagttcagctttgtgcttgacctttcttgtgcacctcccttttttattctgggacattaatggttgtttataaaagaaaacatataataaaattgtaaaatctgtttattcatgtatatatgctcaaaaatgtgtcaaggcatgaggaagtcttctagggtacgggacaaattctatgtcttgacctgggtattggttacccagggtatacattaaaagaccattgagccacttaagatccatatgctttactgtatgtaagacgcacctaaataaaaagattttttaaaatgtgtctggctttaatcttacagagagccaaaacttgatagatgtaactagtacatcctacagtaaatcagttcaaacctacaaacatttattaagggcttactatgta

SEQ ID NO: 817866 - DNA, 633 bp, Homo sapiens
gatacagatgaaagccctctctaggtgtgggaggtctctttgtgggtccatgcaataactaatctcttgagaaactgcaggtattattacaaatggaaggtcaasttcatgggtgctgtggcaatttcctttataaagtaaaaaacccttccacaaagtgacagtccattttctagtttagaagtgaaataattattgaaggtgcagcatatgtactgctattgtccctatttcatagctgagaacactgaggctcagagagggccagtcacttgcccaaggtcacacagctcagtgggtagaactgccggaccttcagccctgggtctgaccccagtgcttttacctccattccaaccggctcccatggcatctgccttgggcttaaacaaaagttgtgaaagtactttgtagacagtgaggatgctcacttctcagttacctggctctgccctcaccctcaacctaaatttagcaggggccagcaagcagacctcagtccccacctccaccccagtttctttcctttcagagcccaaatccctcatagctgtttcccagaatgcttgcttcctgtgtgtcctccccctattaaaaaatctcctgttgattgaaagataaaacctttctttt

SEQ ID NO: 817867 - DNA, 528 bp, Homo sapiens
acttaatcatgttttgaaggcctctggtggtgcaggttcttcccagggcagggtagactagaggttatgcacatagactttggggccaggttgcctgctttcaaatcccagcttccacactccacacactggtaccttgagcattgttttgtcacttaactattctgtgcctcggcttcctcgtctgtaaaatggaagatgataataccacttatttcatcgtggaactgtaagagctaaatgagttactgtaaataaagggtgtataacaatgcctggcacataaatgctcaagatgtgttagctatgatggtaatccatatcagctgacccctttccatggatcctccaagggggagagtgaggtttccagagattagatgactcgcacaagtttcatccaacccctggcagagctgacatccaaaccctgatcatttgacttcgctataaaacatgcctgcgggtgctcagtcttgctcatgtwtgcattttttttgcctcaatttaaagttttttaaagaaagt

SEQ ID NO: 817868 - DNA, 459 bp, Homo sapiens
ctgctaccttttgtaccaaactttcaagcacagatttctggctgcaaaatttaaacccataattaattatattagccacatttctctctcataagggagtagacttcctattgttaccggcagcaaacctgtacggttctgcagcaacctcaattatggtctcctcagaagaagaaggaattcgactgaggggcataaggcagaaggagggaccaagacaagttttagagcaggagtgaaagtttatttaaaaagaataggaaatggctattcctgttctttttataaactttcctaaacaggaaaaagctattccgcttcctttagaatgggaatgaaaggaaggaaagtaccagttagaagacagccaagcgggcaacctgaaaggcargcgtgtggtctgacctttcgacttggggttttacgcacgttggcatatatccggggtcttacatcact

SEQ ID NO: 817869 - DNA, 459 bp, Homo sapiens
ctgctaccttttgtaccaaactttcaagcacagatttctggctgcaaaatttaaacccataattaattatattagccacatttctctctcataagggagtagacttcctattgttaccggcagcaaacctgtacggttctgcagcaacctcaattatggtctcctcagaagaagaaggaattcgactgaggggcataaggcagaaggagggaccaagacaagttttagagcaggagtgaaagtttatttaaaaagaataggaaatggctattcctgttctttttataaactttcctaaacaggaaaaagctattccgcttcctttagaatgggaatgaaaggaaggaaagtaccagttagaagacagccaagcgggcaacctgaaaggcaggcgtgtggtctgacctttcgacttggggttttacgcaygttggcatatatccggggtcttacatcact

SEQ ID NO: 817870 - DNA, 602 bp, Homo sapiens
aagagcatacagtgtcaacaacaacaacaaaaatcacagaaaaaaaaaactaaatatgttgaatgtattcaggaatgagaaatgaggattataacctgagatgcacagctctgccaaaayacatgtgcaactgaagaggagatggtaaaaggaagcttctattggcaaaaggagaagtttacataagctgcttggaaatagatttcactggtttcagagacacaaagccacagttggcgtcagttcactgctggagatggttactgggcaaacattctcttgacagcaccttatctgaatgattgtagtcctaagaaagcatttttttttgtgagattattttagaaagttatcaagatagtctttatctcagacaggcaagcataagcctttccccttcatgttctcttagctctagtctgtttggatctgacaaaaagtgatttcatcctggtatcttttacattcgcaataggtacagaactccagacaaagctgaagggtatccctggagtatttggcagaatactactgttgcatacatgagaagtaaacactcaaggccgggtaaataaatgtctcagattagatataaaagtgtc

SEQ ID NO: 817871 - DNA, 625 bp, Homo sapiens
aggcctcagggcaccaaaagactcaatgggtcaaagatttgtggactgttggtttgtyttaatatttatttatttatttatttatttatgacagagtctcgctttgtcgcccaggctggagtgcagtggctctgagtcagctcactgcaatctccgccccccaggttcaagcaattctcccacctcagcctccctagtagccgggattacaggcgcctgccaccacgcctcgctaatttttgtatttttagtagagatggggtttcaccatgttggccaggctggtcttaaactcctgacctcaggtgatctgcccacctcagcctcccacagtgctgggattacaggcatgagccaccgtgcccagccctctttattctcatctgaaacaatactgagcaactttctaatgtgagtcacacttcttctgactcttccactacagtgggatcccccaaatctaggaccccctaagctggtattgctggacagtgatctggctttttaaggtaggaaccctggtctcttgatgacagccaatcacaactttcttgctccatttgagatgctgaagggactctctggttattataaaactcattaaattgcaagcaaataaatttct

SEQ ID NO: 817872 - DNA, 483 bp, Homo sapiens
aggtaaagaaactccttccaaggatccaactgtatcgagtgagtgtatagcctcatctgaatacaaggaaaaatgttttctgccacagaacattaatccaggtatccaaatgccaaagacaagccctattcttccatgttgagtattgcgataacctctttatctttcccatctaaagagcccctccctctttccctcttgatgaaaagattttgactatgctatttgcttgctcacaaatcttctgttgcactccactgcctacaaaattaattttaactttctcaagctgtcactcaaagctcttcacaatctggcacttattaggagctccatacttatttgctttgttgaagaaagtatatcataaattasatttgaaggtgttgagagatggggtaattaaaaatatttatattcaacatggtacctcaaagagttgttcatacgttgttgctgctcagaaaatctttgatgaataaa

SEQ ID NO: 817873 - DNA, 566 bp, Homo sapiens
agctgggtgtttcacagatggtattctttgcttgtagcaaagaaactgtrcattataactgccaccataaggctagttaactgtagctattaatcccttgaaagaagagtatcaatagtatccaccttgaggtggatttggcagtgttgtgttccaccaagctggtgtgattttccttttataatctgtgtgtgtgtgtgtgcaggaaggaaaatggctttgcacacattaaggatacacagaatgtgtatcacagtgcctagcacagtgcatgtatacttaaaaagatgtgtatctcagctccaagctaatagcagccatgaggttaatagaaccaacaggactttgcatgggtcgcgaaggcaactccagtttactgtcaccattttgagcagatggaatcgagtagcttggggtaaagaggaagcaactctcctctcttgagaccaagagttgacacaactcaggcaggccttaccagaaagaaccagtaactgggactcaagtagctgtcattgggttttgacctgccattgagtggttggaaagcaggccctgattcgatc

SEQ ID NO: 817874 - DNA, 599 bp, Homo sapiens
tcggactacttgtcccaggcacggattctctgcagagggcmtagaagtcagggcattggtggtctaggtggccagcaggaccatgagcagttcccaggtaggctgctttgaaatacttgtgctctgaagactgtaagaatttattcactcatccatctgcctaccctcccctccatccacccatctattttacaaacaggtgcctttcctgtaccaggctctctgacaggcttacacctaagccgtgaggatataatgatgacaaaagcaggcttggtcccttccttcaagaaacctaaagtcaaaactaaaactagatgacgcaaactgatagactgtgggccaaatcctgaccccagaccaatttggatcaccctacatgtgcctaaaaattaattaaatgtcaacattcaaaaagcaggagatttcacctgaaaatctggatttctgccttccttgaaaacaaggaggtctggcagagctgagcctgcaaccctgcactgcagtgatggctgaagctgagtgctttagatggggcaggcaatctccagtttgccccagtcactaccactcccaatagtctgtctctcttggcctag

SEQ ID NO: 817875 - DNA, 657 bp, Homo sapiens
cacacacacacacacacacacacactcaggtcaacaggatatttttctsccatgagaccaagaaatctccctttgtaagggaagaaagacttgaggagagggttaaagagcagtgagcaggatgacccccagagcagttctcgtagctgctagacactgcctaacctgagctcagaagagtgggcaagttcaaccattcactaagcctcattatgaaatcatcagaagcggccttccttagccctgctacttggaaatgaaaaagagattttatattaaaaaacagattttcttaagagaatgtacatggccttggattttaatagatcttctgagagttcttgacactggtagagtttaagagcacagcttttggcctatcttgcttcaaggctagactgctaactgctcagaaaaaaaggctctaagaaaaaacactttaacttatgattctggtcttttcttaagggcatttgttccattccttagtaaagacaggtctaggacaatctgctcagagatatttcatagaattatcactaattctgggatccccctcttccaataatggacaaccaacactcctccagaactttttgtttcatttagcttgtatgggataatattgaggaaacgggataccaaaactctaaaaca

SEQ ID NO: 817876 - DNA, 622 bp, Homo sapiens
tcccaagttcaaaaacaaacctcagttcccctcaacagaaggaaagacttaaaataaaaagacygtggcacagctgtgaagcaaggcatggattcttttcttatgactgttaaatgtacagtccccttagaatggaaataatgttattaccctggagggggctccattatgatgcacactggttcatattttagtttagagcacaggttcttaagagagtgacttattcctgaaggaataaaaaggactttgagaagaataaaagtagtcaacattattatggggcattgacatagcaatttgcttgtaaatgattttaaaaactactgctaataatacaccttattgtatatagtactcccaaccaaagccaccttgggtaatcaaattaatacaaggcaatagaaagggaatgggagcgcatatagcattaacagcaacgactacaattaatacaagtacataaaataatccaatgggaccactgaacaaccctgggcaatgaaagcatttttcaagatataccatttaatgtggttgtacagcagagtaatataatgggggtgaatagtatttactaaggaaagaaattgatgcaaagagtgaatgctcaacaatggag

SEQ ID NO: 817877 - DNA, 559 bp, Homo sapiens
tacggccctgaggtgggacgagtttggtgcgtttgaggtgcattkgagtgccagtaggttggaatgcaggacctgaggggtgagccctgtgagatgaagttgagaggcagccagtagtcaggaggcacaggtgtcctggctctagtccagtcctgtcttggtagagcaacacaaaatcaagcttggaaggtttttatgccatcagatgtccagaggtgtttctttgtttatttgtttttaacctagactcagtgttgatctactttacccataacttgggtaaatgaatatttgcaagaaaatgtcaccgaagcttgtaacttagaccccactcttttaccagttcccctctgccccttcagaggatcgcttacagttttagagttcctcatttttacttttaaataatcagtattaatcatgcatgggaggaagattatcatgttttgaaatgatgacagttttgatttgacatgctattagttcgaaggttgtaaacagttgacatgtacaacactgcctccccaaattttattttaagacatggggaggcatctca

SEQ ID NO: 817878 - DNA, 523 bp, Homo sapiens
gccctatctcaaaataaaaataaaaaataaaaaaagaggccagacgcagtggctcacgcctgtaatcccagcactttgggargccgaggcgggtggatcatgaggtcaggagtttcagaccagcctggccaatatggtgaaaccccatctctactaaaagtacaaaaattagctgggcgtggtggtgcacacctgtagtcccagctgcttgggaggctgaggcaggagaatcgcttgaatccaggaggcagaggttacagtgagccgagatcatgccactgcactccagcctgggtgacaaagcaagactctgccataaataaataaataaataagagttaagtaggtctctagatggaaaatataaacatttcttttttctagagctttctaatcttctaattcaagggttatttgagcaataggtagttgcatttctagttaccaattttaattccaagtttatgctattgtgcatttttgttttaaataattgcggatacttttttcctcatttatgatg

SEQ ID NO: 817879 - DNA, 633 bp, Homo sapiens
  misc_feature 42: n = A,T,C or G
ttctctcccattgttctgcttcaattagaagaaaaaaactanctgtatgataaagtagagaggtcaagtttggtgttctagaaatatgtggccccacagtttcctggatatatcactttatcctttttatttatttatttttatgtcttttgagatggagcctcaccctgtcccccaggctacagtgcaatggcgcgatctcagctcactgcaaactccgcctcctaggttctagcgattctcctgcctcaacctcctgagtagctgggattacagatgcccagcaccatggctggataatttttgtatttttagtagagacagggtttcactgtgttggtcaggctggtctcaaactcctaatctcaggtgatctgcccgcctcagccacccaaagtgctgggattacaggcgtgagccactgtgcccgacacccactttatccatttttaaactattctggtgatcttcatttatggattagctttcaggatatcattatyactattttctttttctcttgtataaatgagagagacattcctatcagaattttaatctcatagactaaactattttccatttattttgaggaaggtgaaatacgaaaaagaatcaactaaataagaaatt

SEQ ID NO: 817880 - DNA, 648 bp, Homo sapiens
tgattgctagtgtttgtgtgtgcgtgtttgagacctatggcatttctttattttattagcccttgaagtcagattagagattcagtttgaaattttgtaagggagcatctcttaatttgccyaccaagtgtcagccactcctgtgagccatacatgttacctcactgaacccttccatcaatgctgaaaggccattttttgaaggggaaattgggtctttgagaggtgcagtaatcttgccaaaatccacagctggtaaggtacaggtttggtttcgaatccaggtctttctggcatcaaaacccttgctacttccacttctgctccgtaatacttcttggcacagagtaggcagtcagtgtcatttttctataacctgtcataaaaaataatgcagcttgcatgatagtaaaaatataagacttattaatacaggaggttccccatttcacatccagcctcttgaacaaaacatcagcctgacctcagatactgggatgctctgggttgagttatgtctgagaatgaatcagttgccccagagggaaggtgctctccaatgcaggacaccccagccaccactggagggagctcatctggtgtttctgcactctgccccatggcaactggattactataaagtctcgc

SEQ ID NO: 817881 - DNA, 617 bp, Homo sapiens
ctgaaaattctaaaaatcagagcatctcttctcctcccaaggaatgcagctcctcaccagcagtggaacaaagctagacggagaatgactttgacaagttgagagaagaaggcttgagatgatcggtaakaataaacttctctgagttaaaggaggatgctcgaacccatcacaaagaagctaaaaaccttgaaaaaagattagacaaatagctaactagaataaactgtgtagagaagaccttaaatgaccggatggagctgaaaaccacggcacaagaactacatgacgcaatcacaagcttcagtagctgatttgatcaagtggaagaaagggtatcagtgattgaagatcaaatgaatgaaatgaagcgagaagagaagtttagagaaaaaagagtaaaaagaaacgaacaaatcctccaagaaatgtgggactatgtgaaaagaccaaatctacatctgattggtgtacctgaaagtgatggggagaatggaaccaagctggaaaacactctgcaggatattatccaggagaacttccccaacctagaaaggcaggccaacattcaaattcaggaaatacagagaaagccacaaagatactgctcgagaaaa

SEQ ID NO: 817882 - DNA, 522 bp, Homo sapiens
agtgttcattcaagttcacagccacatatttttaaaaaagaaaagaaaaaaaaaaagaactaaaacaaaaccccaaacaaatagtaacaaagaaaccagcacggggagtctggcaaactcatcccccaaaagggtctccctttgaagggagacaggaggccttgggtcaggattcgcaccatggtgggcacaaacccaggagaacactttcctgtaaacgtgttttcatgctggagccaaggttttgacttgggtttggatttttatttatttatttattattattattattattattttgcatctaaaggatgttttggaggagcacagagtttgtctggtgagggtaggctctgggcagatttttctgtgagtctcccctgcctgccrcatcaggatcatccctggtgccctgtggtggcaccaggtgggctgcccacccacaggcgtggccttcacagtgggggccatctcagcctggggtagcgatctgcctccacttctctggcacttggagagtga

SEQ ID NO: 817883 - DNA, 614 bp, Homo sapiens
tgactatttataaaggtagagaaaaacaagggatagtttgaactacatgttggaaagaacaaatacactgctgaatattaatacaatatggacaggtgtcccttcacctatatgcatttttatctgagaaatatttccccatattgaatagaaaatggagaaatctataactggtacctttgtgatgaagagagaacaatcatgttaggattagagattactctgctgataattttttttttttatttcaaaggcaattagctaagaagctaaatattggttaaagaaaaaaatgagattctgagtaagttatttatctgtgacccacttttctcattcttaaaatgggattaataataatagcaataacccttcaggtatttggatgattaaatgagttactgaatataaaatgcttagtacagtagtctggcacaaagttgcccattctataatgggaaaagtgatatcctgactgataaattctaatgttaaatttaattcattccagttggktgcagtggctcatgcctgtaatcccagcactttgggaggccgaagtgggcggatcatgaggtcaggcgatcgagaccatcctggctaacacagtgaaa

SEQ ID NO: 817884 - DNA, 336 bp, Homo sapiens
gatctgagcatgccctcgtgtaattgcaaatacttctaaaagcttctttccttgtacgcctaaccataagttctatttttgagaatcaccattgagtgtcaacagagtactagagagtgcactagccactgaggcatatgttatcccactttaaatatttagtgcctactgaatcagaaaatataatataaaggatgtctcmcttacttgagtagatatgtttccaggtggctataatattaatacattgcagaagcaagaggtgaaaccctagaataatttgaattaagggcaaacaagaaagaccggatccccaacaaatacacctactttaaa

SEQ ID NO: 817885 - DNA, 609 bp, Homo sapiens
caggaataaggccagcttcacctccaaagtgcctgtggcctcggatacaggctaggggagcttggagagcagcttactggagatccccaaagttgtgcctcatggactgccatggtgagggacagaacaaagaagaagccagtcatgtgagcaccgtggaacactcaagcagctcccattttatatattttatatcctaggtgtctacctaagatttagcttggaaaagtatttctgctgctttgaattcttataaagtctgaaaatcactgatccagaccaattctttcactttacagataggaaaattgacatccagaggggatgacactgtgaattttaacagatgtcatcatcttcctcacagtgtgatattattagtagtattattaggcaatttttcttgccatttcaacttggagtaggaggaagcaagaaaacacacaactttgaggcccttagctggctggagctgcttcaaaacttaatgccaactttgagaaacttttgcctccatctaccagsctgatcaagattgccagggtctgccatcactcccacttcttagtaaacagaggatgaggggatcacaggttgaaagaaattgca

SEQ ID NO: 817886 - DNA, 563 bp, Homo sapiens
tcatgggagggatccagtgggaggtaattgaatcatrggggtgtgtttttctcatgctgttctcgtgatagtgaataagtctcatgagatctgatggttttacaaaggggagttcccctgcctacgcgctcttgcctgctgccaagtaagatatgactttgcttttcctttgccttctgccatgattatggggcctccccagtcatgtggaacggtgagtccattaaacctcattcctttataaattacccagtctcaggtatgtctttattctcagtgtgagaactgactcacacaaaggcactgtcctatgcattgtaggttgtttagcagtatccccagcctctacctgccagatgccattagcaccaccactcccaagctgggtcagccaaaagtatcttcagacattgccaagtgtcccttgagggtcaaaatcacctccagttaagaatcacagcagtagaaaccattttttccccctaacttgcaccctgtcttttattttctgcccagggtttcgggagttttccaccatgactattgccctgctgggttttgcc

SEQ ID NO: 817887 - DNA, 399 bp, Homo sapiens
ctgatataataattatagtaataatagctaacattactaatattaatattatttaacacttaccagtactattactgtcctaatgttacagaaacagtaatgatagctaataacttagatagcacttacatactaagcactattccaagtactttattagctcatttaatcctcattgcaggttctggtgaggttgttgtgatgaagcagtataatataaagagcccagcccatgttctgtgcgtaattaacatcagaaaatggcaacttyaggctattcaaaaaaggaaattatgtgaattttgtcaccattttagtggcagacttttgaaaaccataacaaattaataatgaaatgccttttacagataaacactgctaggttttgtgggggaatga

SEQ ID NO: 817888 - DNA, 646 bp, Homo sapiens
tgggcacaatgacacatacctataatcctcagctacctgggaagctgaggcagaaggattgcttaagcccaggagttcaagaccagcctgggcaacacagtgaggctctgtctcaaattttaaaagcamcaataataatagcagcttgtgatatagaaaattatgaatcttctacatctaagaccctaagggcctaaatttttttcttcagaacacatataaaaaacacattccttcctgatctgtattatcaatctcaatgatgattacaataattatgcaatataattagaaaattcctaacagtaaaaatatgtacatacatatgtacgtacatataaccatttctccagatggaaaaaaatgatgacaaacatgtaagtagaactagtttttaaaataaatatttatcaattcagtaaaaataaacaatccaatgactgtgtaattagaaaatccctcaaatatgttaaaaagaaattaactcagaatttcaaataccattctacttattacagtttatactactttccaagtcattaaaaccactatatacctttttcctttagttcttggggtttttcccaggttgattctaatgttctattattataataatatgtcttcccatctgctgttttatatt

SEQ ID NO: 817889 - DNA, 600 bp, Homo sapiens
ggaatgatgtctaatgacaatcttatttcctttcctatgtcagtgacttgagattttgactagttgcccaaatattttttcctttttctataaagcccagaagttgttttaggatatakcttgaccttgatcattctagattgattttgctaggtactcatgtcagtctcactctcttttttttttttttttttttttttgagatggggtatctctctgtcacccaggttggagtgcagcagcttaatctcagctcactgcagccttgacctcctcagctcaagcgatcctcccacctcaacctcccaagtagctgggactacaggcgtgtgccatcaggctcagatttttttttttttttttttgtattttttgtagagatggcattttgccatgttacccaggctgttctcaaattccgggtctcaagcagtcctcccacctcggcctcccaaaatgctgggattataggtatgagccacagcacccagcctccgtctcttttttattttaggaacgttttcttgagtgttagctttttgaatttaaattacttttaaatttccatttttattttttatttgtgacttttctatcata

SEQ ID NO: 817890 - DNA, 622 bp, Homo sapiens
aatagatcagatcaaacacctgtaacttcatgttctttacatgaagtttctttcatgattaaaataagacaatgaaaaagatatttttatatcaaattcacaactcaaaagaaacgagtgcaagtgggtctgcccattagatgataaagaaattatggggaaattggcaaatttgacaagaaagattaaaaactttttgcttctttactgtttattggaaggtgatcctagaaaagtttgtcacagctttctgaaatctgagaacatttccagaaaaatgtaagttgatttaaattattggttataaatttttccttgaataaacttggcagaaaagttaatattttgtattattgtaagtttttttcccaatggagaaactgtagaaacttttttaatattctaagtcaaaagacaaaatattttgttactattattacatatttcagtctgtcttcacagtcagctttgtccagtgaaagaatctgtgactggaaatacttaggttctcaattaaaagaatacaaaatgttatttgacyccgaccccaaaaaatgcacacgcaaatactagaatggaaaaaaaaaagcctgaaacaacacaaatgattaacagtattcaa

SEQ ID NO: 817891 - DNA, 614 bp, Homo sapiens
tgctaaatttgtgatattaatcacagatcttacgtattagctgactgattctttctgtaataatccaaataataaattcaaaaacaaattggaacaaaaccccaacttctcatgaatctcatatgcaccttcctgctcctagtggtttaggtgaacactgtcttagattactttctgtgatggcggaagtgtcctgtatttccactgtctgatttgaagtgtggctagtgcaactgaggaactgaatatttaattttatttagttttgttttaaagctattggctaccctatcaaatagtacaggtacagattgcctggttgttaagaaagtatctgaggctgggcgtggtggctcacacctaatcccagcactttgggaggccgaggcaggcagatcacctgaggtcaggagttcgagaccagcctggtcagtgaaaccccgtctctactaaaaatacaaaaattagccgggtgtggccatgcctgcctgtagtcccagctacttgggaggctgaggcatgagaatcacttgaaccygggaggtggaggttgcactgagccaagatggtaccactgcactccagcctgggcaaaagagcaagactccatctca

SEQ ID NO: 817892 - DNA, 527 bp, Homo sapiens
gtgggcaatatcaacacttgagaagtctaaagaaaamaaatcaaaagaatcagaagcaatggtcagggagttaggagaaaaatcaggaaaaaaaaaaaaacactttcaagaaagaggaagtggtaaacagctccataaacatagaaaagtctgtagaattaggacataaatgagggttgaattttacattttaagtcactaatgattttagtgatggtagtttcaaaaggattttcgcatccatttcttcctttctaatttctaccttgccagttctggctctcattacctcttgcctaaaatcctaactggtcttcttacctccagtttctcccctccccaatccatcatcctataaaacgctgcctaatcaatcttaaaatgcagctcacctgctctaaaatccccactgacccaccacgacctatagaattaagcaccatatctactgtatgtattcaggattcttcacaaaagccctattctaccttaccaatattacttctactcctcctttcatatcctac

SEQ ID NO: 817893 - DNA, 609 bp, Homo sapiens
gctgctgtgaaattgaatgctaaactatgtcatgtccttccatgcccgcagcgttcatggaaagaggggccatgccagctgcattggctaaggtgggatacatgaaaggaagggtctgtagcagagccttgaaagataggattggccaggcacagtggctcacgcctgtaatcccagcactttgggaggccaaggtgggtggatcacttgaggtcaggagttcaagaccagcctagccaacatggtgaaaccccatctctattaaaagtacaaaaagtagccaggcgtcatggcgcatgcctgtaatcccagctgctcaggaggctgaggcagaagaatcgcctgaacctaggaggtggaggttgccatgagccaagattgtgccactgcgctccagcctgggcaacagagcgagactccatcacagagaaacaaaacaaaacaaaaaacaaagacaaaaacaaaaaaaagataggatttggagaggtggtaggtgaggagaacattctgggtcagggcggtgatctgagcagcyggggcaggggctcagtaaatattcactggctagatgaatgaatgaatgagcaaagataataatgaaattatcag

SEQ ID NO: 817894 - DNA, 616 bp, Homo sapiens
gtgacaggtgatgtagtagttatcagtttaaggcaatgatatcgtttcccttttaaacaaattttagggttttaaaaaatgggtcaactttaagaagaatgttaaacaacagtacagatgacataaagataagwcaaaaatcatgcaggggaacacaaatgaagtgtgaaaaacactagggtttactttcaagaccctccctttaaatacaactacccggccaaaggtggtgtcacacgcctgtgatcccagcactttgggaagctgaggcaggaggatcccttgaggctaggactttaagaatggcctagtcaacatagcaagacctagtcaacatagcaaaaaatacagacgggggtcctgctatcttgcagtggcagtggcccccgtggctcttgcaggtgcagtggctcatgcagcaggattgcctgagctcaggagtttgagaccagcctgggcaacatagtgagacccccatctctatgaaatataaataaaaaattaaccaggcacagtgatatgtgcctgtagtcctagctactcaggagactgaggtgggaagatcttttgagcccaggagtttgagcctgcactgagctatgatcatgccatgcac

SEQ ID NO: 817895 - DNA, 555 bp, Homo sapiens
taaaaacgaatgaagaaagcctggtacccttcctcatcttcacgctggggacacaggtgcccagccccagagctccagccctgggcacagcttkctcccactcatccttgcagctgctgcccaaatgactctctcatactctgtctcctcccctaccccctcacaggctcccgtttcctcctccccatcgtcactcatccagcctccccggagcacagacctgggtggctatgagccagggccaggttcctactcacattcttggaagcgaggaaggccatgccctgggctacttggctggagaagtgaagcaggtcccggagctccaggggccgtccatcctccttgtccaggtctagggtgggaagaggcgtcagggcagccctgccacactccccacccctcaccccagcagccccttctccttttcccttgttatcaagcaaatggggcctggccctgggacctcctcaccttgctcagagaaggagtcatttgaagaagtggagacaggcctcatctccacataggtgtccacaccctggctggagaagc

SEQ ID NO: 817896 - DNA, 602 bp, Homo sapiens
taatttttctttttaattttttgtggagcctgggtctcactatgttacccaagctggtcttgaactcctgggctcaagggatcctcccacatcagcctcccaaagtgctgggattacaggagtgagccactgtttgaatttatttgtacagatattttatgttagcaccaataagttaactatctgtaatggaagcttcttggtcatattcaacttcaaaactgggtgtgcctcaatttgtaaaatatctttagctatgtttacataagaaaatatagctgctattcacaatagcaaagacatggaatgaacccaaatgcccatcaatgacagactggataaagaaaatgtggtacatatataccatggaatactatgcagccataaaaaggaatgagatcatgtcctttgcagggggatggatggagctggaagccatcatcctcagcaaactaatgcaggaacagaaaattaaacacttttaagtgggagctgaatgaaatgaackcataaacacagggaggggaacaataacacactggggggtgtccagtgcatggggatggggcacggggagaggggggcattaggaaaaatagcta

SEQ ID NO: 817897 - DNA, 602 bp, Homo sapiens
taatttttctttttaattttttgtggagcctgggtctcactatgttacccaagctggtcttgaactcctgggctcaagggatcctcccacatcagcctcccaaagtgctgggattacaggagtgagccactgtttgaatttatttgtacagatattttatgttagcaccaataagttaactatctgtaatggaagcttcttggtcatattcaacttcaaaactgggtgtgcctcaatttgtaaaatatctttagctatgtttacataagaaaatatagctgctattcacaatagcaaagacatggaatgaacccaaatgcccatcaatgacagactggataaagaaaatgtggtacatatataccatggaatactatgcagccataaaaaggaatgagatcatgtcctttgcagggggatggatggagctggaagccatcatcctcagcaaactaatgcaggaacagaaaattaaacacttttaagtgggagctgaatgaaatgaacgcataaayacagggaggggaacaataacacactggggggtgtccagtgcatggggatggggcacggggagaggggggcattaggaaaaatagcta

SEQ ID NO: 817898 - DNA, 602 bp, Homo sapiens
taatttttctttttaattttttgtggagcctgggtctcactatgttacccaagctggtcttgaactcctgggctcaagggatcctcccacatcagcctcccaaagtgctgggattacaggagtgagccactgtttgaatttatttgtacagatattttatgttagcaccaataagttaactatctgtaatggaagcttcttggtcatattcaacttcaaaactgggtgtgcctcaatttgtaaaatatctttagctatgtttacataagaaaatatagctgctattcacaatagcaaagacatggaatgaacccaaatgcccatcaatgacagactggataaagaaaatgtggtacatatataccatggaatactatgcagccataaaaaggaatgagatcatgtcctttgcagggggatggatggagctggaagccatcatcctcagcaaactaatgcaggaacagaaaattaaacacttttaagtgggagctgaatgaaatgaacgcataaacacagggaggggaacaayaacacactggggggtgtccagtgcatggggatggggcacggggagaggggggcattaggaaaaatagcta

SEQ ID NO: 817899 - DNA, 602 bp, Homo sapiens
taatttttctttttaattttttgtggagcctgggtctcactatgttacccaagctggtcttgaactcctgggctcaagggatcctcccacatcagcctcccaaagtgctgggattacaggagtgagccactgtttgaatttatttgtacagatattttatgttagcaccaataagttaactatctgtaatggaagcttcttggtcatattcaacttcaaaactgggtgtgcctcaatttgtaaaatatctttagctatgtttacataagaaaatatagctgctattcacaatagcaaagacatggaatgaacccaaatgcccatcaatgacagactggataaagaaaatgtggtacatatataccatggaatactatgcagccataaaaaggaatgagatcatgtcctttgcagggggatggatggagctggaagccatcatcctcagcaaactaatgcaggaacagaaaattaaacacttttaagtgggagctgaatgaaatgaacgcataaacacagggaggggaacaataacacactggggggtgtccagtgcatggggrtggggcacggggagaggggggcattaggaaaaatagcta

SEQ ID NO: 817900 - DNA, 550 bp, Homo sapiens
cagtgaaatcacgcacagtagatatttttgtttaktattgaagcaaatcaagggcaagactaaggtcacaatagaacctgaatagtcaaaaggaatgattccttgagagtgggcatgaccgaacattcctacgttgttaggtctaggagccctataaaagcaattactcacaagtctaccatggcaatttcataaccaacctggaaaggatcagacaacgacatcaattttcctctgatggatatgggaaaccctcagggaaaggtaggattttaagagttatttaacattatggcagaagtttggttgaatggtggaatgctctggaactgacataacttgggagatttattgtacagaaattggaggggactttgcaccgataacagagatgaggggaaagacacatcagcaagtaatgtgtttctactggtaggctggtaaatgtttaacaactggctctcaaaaaaaaaaaaaaaaaaaaaaaccctgaatttacatagtgtttttttttaattttctgtgatataaatatcctaccatggcagat

SEQ ID NO: 817901 - DNA, 376 bp, Homo sapiens
gctataaaggaaattatcaggacctctgatgaaacttaaataagggctgagaattagttggcagtaacctgtcagtgctaatttaccgatttgattctcgtattatgactatgtagaacatcctcctttgtaggaaatacacagtaaaatattacagcatgagagaagcattcggtcagctttactttcaaattgagaaacaaaaggttctgtgtgttatactaataacttttctataagcttgagactgtctcaaaataaataaaaagcaatatttcaatggcttgtttacattaattattacctaacacttcaaactatgagctcatatccccaggaataaakgtgctaaaaatcctttgtgacttttaggttg

SEQ ID NO: 817902 - DNA, 448 bp, Homo sapiens
ccattcctaggaaggctttctggttcataaaaatcactccgccagtaatcagcatgataccttagttgctggtcattycacccgttagctgtgtcttgatttctacagcagaagtgttgcatttctgtgagcacatgtgcttctgtattagaccaagtgtcttggtgcaggggctgtatttattgctctgtagccccgggacttaaccaggagacctttgcttgcagactgcctggcttttcttactcagcactcaacaggagacttggggatttatctcacagcctgagaagcacgtgggaaaaatagctactcaaaactttgtgaagaaaattcctaatttgctggcttccctggtctgcggctggggctcactggcctttgtgaggcagacgaaggagatttgacaaagagaggaaagaagaaaggcagagatgggacaggaaga

SEQ ID NO: 817903 - DNA, 621 bp, Homo sapiens
actggattaagcagctaacctgcattattttgcttaactcggtcagtgtttcatacagcagatagtagcgctattctcatttgatagacgcagaaagtgagcctcagagaggttagataagtggcccaggctcctccgtgagtaggtaatggccggggttcatcccaggtctgactgaagagtccatattctttacatctttgcctcactgcctcttcatgtaagctctggacctgccatcataagacaaatgggaagaggtgtcctaccttcctaaaggcattttccaaagtgatttctgaagatatctgatatgggcaactttccagaattagttcagttgttaaaggtttcacggatgaataaatggtgtgggggatgggggttgagaagaggtcagaaggagagacagcgtggagaatgatttccaaggctggatcttttctttatttgattctagtaaattttaacgaggcccttaataaaatcccagtgcttagcagagcctccacatttacaagttgccagacctggggcrgaagaagggaagttggaatcctggcgctcagcttagtcctgctgacctttcacagttcaggcgagccaggcttgtaagattga

SEQ ID NO: 817904 - DNA, 618 bp, Homo sapiens
ctggctaaactcttcagaagttactttagctcrtctatcctttcaaaatgtgattcccaggactgagagagctcccaagcgtggtctgatctaggagtagaaatgaagttctctcctcccatgagcctaacacaatacttttgctaatgtagcctcagcagcaggaggtctgcttttcccccactctgcccagaagagggctctttacctgttgtaaattgtctgccataaacataaaataaacactgcagaagcccagctgggtgatgactaataagaagctgacagtgtacctgggaaggaaaggaagaggcagacagagggaggaaacaaaagctaaaattatttcttaagaatgtttactatttgaaacaattatttttgttattatttttaaaaatttccctactttcttttattttgaaaaatttttaagccaaaaagttgaaagaatagtataattaacatccatgtaccctttaactaaatataccagttgttaatttttggccccaaattgcattacatatatatataatatatatgtatatatagacgaatgaatattcgtctatacacacacacacatacacacgcaatttttttcagaatcatttg

SEQ ID NO: 817905 - DNA, 596 bp, Homo sapiens
atacaatgtgtaacaatcacatcagggtaaatgggctatcacctcaagcatttatcctttgcattacaaacactccaattatacacttttagttattttaaaatgtgtaattaaattattattgactataatcaccctgctgtgctatcaagtactggatcttattcatgctttctatttttttttgtactcattaaccatccccactttcccctcacacccctactacccttctcagcctctgatatccatcattctagtctctatctccatgagttcaattgttttaattttagctcccacagataagtaagaacatgtaaagtttatccatccatgcctggtttatttcacttaacaaaacatgaaaatgcatacaattactgattcataatttgggagtaattttttttctatgagattgtacttccacacatactgtatattatactggattttcattttagaataaaacagagcattctacttgttgaaaggaaacattgatgaaacaaatacctggtgagctagcacaacttaactarctactggcctgcaggaaggaagctatgagaatcatgaatcttctctactca

SEQ ID NO: 817906 - DNA, 638 bp, Homo sapiens
atttctcaccccttcttatacagccgcactgattttctgtataaaggcggtagcaaccacagttctcactcgttgactgtcaacaatcaagccagagcttttgckagcgggaatatcagaggaatgaaagtgaatgtggaaatgatgccctgttctcgtttttataatgacaccgcctgctcttagatcctcaaccactactcattcctgtctgcttttcctgagaaataggtcctaagggcagatttataacaatactagattgtcttctctttcttttctatcacagacttaagagctatgttgttctgaagtaacatgctaaaatatcacactatataaaataaaagagagtcacaaaaatagaactcaggagactgggaaagtcacaaattatgcacaaagccccctttttaatatgccagatgataagaacaaattaaattacaatctgccttggaaaaatgacagctaatttattcatttattcattcattcaatgtgtttttattaagggtctcttattgggtagtcattgggttaagaggtagagttggaactgtcccaacgagtcccagccctcagggagttgatagtctataaaagaatttgagaataaatagagaaattacaatggc

SEQ ID NO: 817907 - DNA, 569 bp, Homo sapiens
ggtttgggacactcagggaaatggtaaggatggccacagtaatttttctcacagagataattgataatcacatccacagcagtgacaaatggtaaygtaagtgaaagaaaagagtaaaaaatattcaagcatcaaaaggatcattcaatcagtcttctagaggcaggtaactttttacacaatccctattggtaaagcaaatacaaactgaattcgtgtgttaaacgtgtttacttttgcaccaaaaacagtaacacagacaatgtgtttcaattaaaaggaaccctggagcaaaaacgtgttacagtcaggggtagaagcagagtgtatcattatctcgtaggcacagctgtcaagataatgaacagctaagaagagtggacaatggaaggtgaagtatgacttgtcatgaaactgtcaatagaatctgagctcactttccattagtaggtgctatgaaattgcagggatgtgctgaacagccacagaaataactaaagtaaaagtggcttcatggcacttagtaattttaatatttgtcattgttaccaaaagccttaaagcagtga

SEQ ID NO: 817908 - DNA, 531 bp, Homo sapiens
actgcaagctctgcctcctgggttcatgccattctcytgcctcagcctcccgagtagctgggactacaggcgcccgccaccatgcctggctaatttttttgtatttttttagcagagacggggtttcaccgtgttaagccaggatggtctcgatctcccgacctcgtgatccacccgcctcggcttcccaaagtgcagggattacaggcgtgagccaccgcgcctggccctgcaatagtttcttatactaaattgcccatttctacttaggcaaatatttaaaaactcaattttcctggctctaatccactccagtgaaaacagtattcctctgtgtttgggtttgcctcaatagtcacctaagaagatgtttaaattagaaatgtgaacaaactacaactagttgttgaaatgcccatctatatggctgagcaggtggtggccctgggaggatggtggcctggatgagcacaacctaaggagcactcttcttgtaatctggaaggcatggtctatatctgacttgattct

SEQ ID NO: 817909 - DNA, 434 bp, Homo sapiens
aggcaaggacacaacaaacaagaaaactacaggctagtattcctgatgaacatagaggcaaaaatcctcaacaaaatgctagcaaatccaatccaatagcacatcaaaaagaatattcatcatgattaagtgggattcataccagggatacaaggagagttcaacattcacaaatcaataaacattactcattacatcaacagaatgaaggccaaaaacatatgaccatttcaacagatgcaaaaaaaaagcatttgatgaaatgcaacatcccttcatgataaaaactctcaacaaatttggtatagaaggaatctgcctcagcacaataaagaccatatatgacaaagccatatctaatatactgaawggagaaaagttgaaaacatttttactaaaatcacaagacaaggatgtccacttttactaatttt

SEQ ID NO: 817910 - DNA, 587 bp, Homo sapiens
aatattatttagccacagaaagtaatgacgtctgatacatgttacaacatagataaaccttgacaacattatgctaagtgaaataagccagacacaaaaaggcaaatattgtatgattccacttatgctgagtatctataataggtaagcttagtcagatggtaagtagattaaaggttaatgggttctagagggagaggagacagggagttattgcataatgggtacagagtttctgtttaggatgatgaaaagcattgtaaatagtagcaatggttgcacaatattgtgaatgcaattaataccactgtatttattatacacttaaaaatggccaaaatagcaaattttattttaaacagtagtctataaggttttttctattattattatttttttttttttttttactttttaaactattttgttaaaaactaagacacaaaccacacacattagcccgggcctacacagagtcaagctcatcaacatcrttgtattccacccccacatcttgtcccactggaaggtcttcaggggcaattaataagcatggagctgtcatcttcagcctcccgagtagctgg

SEQ ID NO: 817911 - DNA, 643 bp, Homo sapiens
caactctgcccagaacattcagggaagactgaactgggctttggagactgagtaggagtttggttgccagactgaaaagtaagggaaggatgttctaagccccagaaccacatgtgcatagcagagttgcaggcagccatcctattcactatccttcatttgcccccaagcctccctccactcctgtgatcctgacccaccatcttctgtctgtcactctctagcccccttgctgctgcagaaactgaagcccctgccaagacacaccagggccacaggcccctcttgccttccccaccatgtcccctggtaaatatgctcagggacacatgcgtgaaccataaattcagccttctggggatggattctgctgaataaaaagcacattcagtagcgagaatatttgtttttgttttccttctccgagtaaatggaaacatgcactgacctcacttttctcacaagtacagtagctttcctgagcggccgtcaggcctggggtgccaggaaaaaagtggtggaacattcagccttgggaacaagggcctcagtggcagctgtggccggccagtggaatacagctgtcaggccgctgacatgagtttccgagrggtggggaggatccggcctgggcctcccaggg

SEQ ID NO: 817912 - DNA, 564 bp, Homo sapiens
ctgatttatttttttggaaggaatcattgtaactatcaggaagacagtgtgggcacatgggaaaaagagatttcatgatagccactgctcattgagagaacagaaggctttgaagatcttctcccaggaagctgtaaacacatacagagaagatatttaccaaaatgtctgaaataagaagtatggagattaataatgaaaaattgattgccgcccacacctacaatggcaactttggcttttgatgtttattgaatttctgaaggaatttgtaacttcaccagttttggatatttcactgttctctaatgtccagggacaggtatctatgggcaaagtggcagcagaaaggaggtggggaaaataaataccgccccctctgggtgagaattttggagggacaataggtgattgaaaatttaaaaaaatatatacaggctccattttaataatttgaatggggaaataataggtttccaaaggaaaataaactatggcaggtcttagccagtaggaggatgtgtgttcttacgtgtrtgctcacatgcatgtgtgcatttatat

SEQ ID NO: 817913 - DNA, 579 bp, Homo sapiens
tcttctgcatcaagactgtgaggcacttgaaagcaaaaatcatgagatattcaactgtgtacccttactatcttgcccttgggtagaagctctatcatttaaatttcttcactttttgcaaaatacaagaaacatttacagaacagctgctctctgctagacactgttctaattgctcatgattgcaccagaaacattgaacaaaaaaggccaaattcttgcctcgtggagattacattttaatgaaggtaggcagaaaaaggaatgaaataaataaagttttaacattgtgttaaaagacatatattaaaaaatatatatccataggaggaaaaattaagcagccaaagaatatagacgtattagggcagaagatgcagttttaaataaaatgatcaatgaaggcttcactgagaaggtgatatttagtacaagaccttaagaaatgaaggagcaagccatgtggccacctcgcgaaagagtaatttaggcacagggaagaggaaatgtaaggccctataaaaagaacatayttggactatttaaagactgacaaggatcccaatatggctggagtga

SEQ ID NO: 817914 - DNA, 660 bp, Homo sapiens
tactatttggctattatgaataatgctactgtgaacattcctggataagtgtatgaatgaacatatattttcatttttcatgggtatacacataggaatggaattgctgggtcatatgakaactcgttttaaacttgtgagaaacttccagactcttcaaagcatctacactatttcacattcccactagcaatttaagagaattccagtttctccatattataacctacccttgttattgcatcctttttattctagtcatcatagtaggtatggagtggtatataattttgcttttgatgtgcttttccctaatggctaatgatattgatcatacttcattgagcttattggcccaatcattttgggaggccaacattaccctgaggccaaaatcagaatgagaaatgacaagacaattacaaattaatatccctcagaaacataaaaataaaaatccccccaaaagtactagcaaatcaactaagtagggtttatatctgaaatgcgaatcttattcaacatttgaaaaatcaataaattcaatttatcatatggtcagattaaagatgaaaaagcatataatcatttcaatagatacagaaaagtcatttgacaagattcagtatctattatataatatacatatatagttatata

SEQ ID NO: 817915 - DNA, 591 bp, Homo sapiens
ggttggcccagtacatgtaagctgccaagacttgggacttgcaccctctgaagcaatcacctgggctgtacattggcccctttcagccatggctggaatgcaaggcaccactcccgagactgcacaaagmagcaaggccctggacccagcccatgaaaccattttttcctcctatgcctctgggcttgtgatgggaggggctgctttgaagactctgacgtgccctgaagacattttccccgttgtcttggcgattaacatttggttcctcattacttatgcaaatttctgcagccagcttgaatttctcctcagaaaatgggtttttcttttctatcatattgtcaggctgtaaattttctgaacatttatggtctgcttcctcttgaacgctttgccactcagaaatttcttctgccagataccctaaatcatctctctaaaattcaaggttccacagatctctagggcaggggtaaatgccaccagtctctttgtgtagagagtgacctttaactccagtttccaacagtttattcatctccatctgagaccacctcagcctgaactttattgcccatatcactatca

SEQ ID NO: 817916 - DNA, 472 bp, Homo sapiens
aaggaaagcaaggtgcagaacggatgtactgagtcccatggcaatcacwacacgactatgggtgctaggctgaatgaggagaccttgccacaaatcccacctgctccctccctatcattacctatatcctccagatatccaagtcaaaagcttgtgtgagtgatgaagaaagagactaggaaccccactcaagaccttcagagagatggccctttctgagagagtctgctagctcttcaaactatagaaagaacatgggctttgacatcaatgctttaggtttgaagtgtaaccatcccataagttaactgcatgctcttgggtgaggaccctcctctgtgaagccaaaatcctacccctcactctggcagttgttgtgaggattaaatgagacagtatatgtaaagcccctgcccctagcaggctccttttccacagccagcctttctcatatccacagcatacctggtcc

SEQ ID NO: 817917 - DNA, 504 bp, Homo sapiens
cttgttaagtggagatgggcaataaaccagcaaacctgccgacatgctgggcaggaccccgamgtctgcatgagggtggtaggtggaggggctggctacttggataagggggccttggaagggaagcctatctgaggaggcaacctttgaactgagatctgaagggtgaggagctggtcgagagctgaggaaagggcgtacagggaaaaagaaaagtgggaacgaagatgtggcagcaggaaaatgctcgcctgtgtgaggaacaggagagtatgacagctgacagtgctgcgggaggaaggggctgagcgggggaggaggcagcagctgatgacgaggggcttgcaggccacagagaagcgtctggatttcattctactgaagagcttgaaggggtgggggaggcgtgcgacaggatccagggtacacgtttaaaaatatccataggtatccctccagctgctgtgtggaaacggcttgaagaggggcagggacaccagtaag

SEQ ID NO: 817918 - DNA, 504 bp, Homo sapiens
cttgttaagtggagatgggcaataaaccagcaaacctgccgacatgctgggcaggaccccgaagtctgcatgagggtggtaggtggaggggctggctacttggrtaagggggccttggaagggaagcctatctgaggaggcaacctttgaactgagatctgaagggtgaggagctggtcgagagctgaggaaagggcgtacagggaaaaagaaaagtgggaacgaagatgtggcagcaggaaaatgctcgcctgtgtgaggaacaggagagtatgacagctgacagtgctgcgggaggaaggggctgagcgggggaggaggcagcagctgatgacgaggggcttgcaggccacagagaagcgtctggatttcattctactgaagagcttgaaggggtgggggaggcgtgcgacaggatccagggtacacgtttaaaaatatccataggtatccctccagctgctgtgtggaaacggcttgaagaggggcagggacaccagtaag

SEQ ID NO: 817919 - DNA, 504 bp, Homo sapiens
cttgttaagtggagatgggcaataaaccagcaaacctgccgacatgctgggcaggaccccgaagtctgcatgagggtggtaggtggaggggctggctacttggataagggggccttggaagggaagcctatctgaggaggcaacctttgaactgagatctgaagggtgaggagctggtcgagagctgaggaaagggcgtacagggaaaaagaaaagtgggaacgaagatgtggcagcaggaaaatgctcgcctgtgtgaggaacaggagagtatgacagctgacagtgctgcgggaggaaggggctgagcgggggaggaggcagcagctgatgacgaggggcttgcaggccacagagaagcgtctggatttcattctactgaagagcttgaaggggtgggggaggcgtgcgacaggatccagggtacaygtttaaaaatatccataggtatccctccagctgctgtgtggaaacggcttgaagaggggcagggacaccagtaag

SEQ ID NO: 817920 - DNA, 633 bp, Homo sapiens
atacctaaaaattggcctctcatagttattgatcttaaagattgtttttttcatattcctttacataaattggattgtgaaaaatttgcttttactgtaccatctatcaatartcaggagcctgcagttcattatcaatggaaagtacttcctcagggaatgctaaatagccctacaatcttccagctttatgttgggcaagtgctttcaacagtttgagcccaatttccccaggcctatattcttcattatattgatgatattttaattgctgcccccactgataaagaattaattgactgttatcaaagtttgagccgccgtgttacagaggctggattacacatcactcaggataaacttcaacagaccactcctgttcaatatttaggaatggtggtcgataaacaacatattcaacctcaaaaagttcaaattaggaaagattctttgaaaactttaaatgacttccaaaaacttttgggtaacattaattatttaagacctactttaggtattccaacctatgtgctgtctaacttgttttctacaccatggggagattccaatctccgcagtcccaggactgacccctgaggcttcactagaactggaattcgtagaggaaattcc

SEQ ID NO: 817921 - DNA, 646 bp, Homo sapiens
aagtaaaagaaaccaatctgaaaatgctatatattttatggatccaactacatgacattctggaaaagacaaggttatggagtccataaaaagattagtgactgccaagggcctgtatggaggratggatgaatagcagagcacaaaggaccttttaagggcagttgaaactactatgtatactgcaatggtggatatatgtcattttacatttgtcaaaacctatagaatgtacaacttcaagagtgaatcctaatataaactatgaactttgggtgataattatgtgctaacgtaggttcataaattgtaacaaatacaccatggtggtgtgggatgttactaggcggggaaattttgcatgactgagaacaggcagtgtacagaaatctgggaagaatttctatactttctgctccacttttctgtgaactcaaaactgctctaaaaataaagtttattattttttaaaaaagaaataaagtattgatacttgctacaacatgaatgtaccttgaaatggttttgctaagtgaaagaagtccattatcggagttcacatattatatgattccattcatatgatagtccagagtagggaaatctatggaaacagaagagagtggtggagaatagtgggtaagag

SEQ ID NO: 817922 - DNA, 429 bp, Homo sapiens
attaccaagcaaacacaatctattcagagcagagagttagtaatattaattgtatcagataggaatttttatgcaaagtgtttaaaactcagctgaaatgccttaagcaattgatccagagtcagagtgggctttaagtgaacttcgttgattcagcagtttagacattattaccaaatacccttgatgtctcatcttccttctgtctcttagctctcccttccatagggattgttccatcatcagattccatgtggtagacatgccccaaatacacacagtagcttcagctttactcttatgacaaccaaatagctgccccagtttcaagccacacatgctaaccctaaatgctccagggaaaagaaaatgtcagttccaasagcacatagccaggtcttgggatccctttcattgtcttgaaatggg

SEQ ID NO: 817923 - DNA, 619 bp, Homo sapiens
tagtaactgaatctacactgtttacgtagtttatatggctgaycattgtatttttaagaggattcatgtcagtagtgctcagtgtctgacaaaagcaaacacaaatcatccctggagaaagaaaggtaccctcaacccagtcctcaaaagaaaccgcagagatagcatgccagcaaatataaacccacaatctaaaatcacagagaaatgaaaaggacataacccaggattagcagggcaagtcagtagaaacaacaaatagatccacatcctcaaagacttcaatattacattttcagatacatactacaaaataaacgtgttgtattaaaaaggtgtttaacacgtataagaaaaaagaaactaccaaaatgaacagatacttaaagaaaaaactaaataaatagtataaaatttttaaaaggccaggcacagtggttcacacatgcaatctcaacacttttagaggccgaggtgggaggaccacttgaggccaggagtttaagaccagcctgggcagcatagtgagacctgactctaaaaatttttaaagtagctgggcgtggcacctcctgtcctagctactcaggaggctgaagcaggaggattgcttggatcc

SEQ ID NO: 817924 - DNA, 602 bp, Homo sapiens
agaactgtgagagaatacattttcttctttataaattacctagtcttaggtagtctgttatagcagcacaaaatggactatgccaccaacctagacctcctctccgagttctagacccatattgctaatgccatctgtacatcttcacctcagggaattacaatgaccctcatattcaacatgtctaatatagaatgaaacatcttatctcaccctttcctctcccagtctctcatttgcttcatctcctctatttcctctcaaaagtggtcactgccatttacccagggaacatggctggaaacctggaagccatcctggactccttcctcacccttccccaatatctaaccatcaccaaccaatggcgattctatagatcttaacctgttaagtctctcacgcggacgactgaaatcttttcttactggttttcaagactgaagttagttcctatacccatgcctaytattcaccctgtatacttcaggcaaagagacattctagagtgtaaatctgatgatagcatgcccttctgaaaaccttcatagctccccattctatactcaacggtaggaccaaactctcatcagggttttggc

SEQ ID NO: 817925 - DNA, 550 bp, Homo sapiens
gtgaaactatactaaaagtttctattttagattatgagatgtatttcttttatttaarttttcctacatttttcatatgtgttcatgttagagaaaatgtagcttattggctaacccaactttctgttttgttaagagttaagcagagatctcttctgttcaactataagctgttgaaaatttgtcttaaattttggcatagtgaatctaatgggttatttcttttcaaagtagcaatgtggcaagtgtgtggaatcatccttgaaatcatgaatgggcactaatggaagacaagacttgcttaattgtgctgtgtcatcttagaaactgttctgttaatagcattttaagaaatactttcaatggtaatattcataggacatgttcaaatgtaaggtctgcttgatatgttccaataagctccctagaaattattcctatttaaaagctttttagttcctggattcttgaaaatggctctgcataatgtgtgtgtgtgaggaagagaagattattgtttatttttaataaagtactcttaaatttatcc

SEQ ID NO: 817926 - DNA, 634 bp, Homo sapiens
atttttaaatgaaatacacacttctaatatcatcaacactaatctcattacttcacaatcaccgtacatagagamgaggaaaagaaaataaagaataaaacatgctgctaaagattgtgtggtcatgggaaaatgtgcaaagatattttatgatatcatattaatgctatctatagagctgataaagaaatacctaatcatggagaaacatatcttaccaagatattgttgattttagctacagattatgtaaatcatggggattaacataaatagataaatgcactagaaagaataaaaacatggtaactgggtattctagaataaaccatgtgttcaatgtaatcataattaaagtaaagcaaagacatgcaagaaaacagaaaaaaacaaaccataaactggggagaagaactggggagaagatttttaaaatctgctatgtcagtctaacaatttaatggagacagaaacaacaaatctgacaattgtagcaccctacttctaaaggttatcttgacaaatgctaacctttaataaagaaattacaaaagcaaataaccaggggtatacaagttaatgaaaactttaaggaataaaaataaggaagaggaggaaaagaaatagtaggagt

SEQ ID NO: 817927 - DNA, 563 bp, Homo sapiens
tgcagaagaaaaagtaaaaacagacagaatcatcttttccttccaartggatgcagagcagattcatgtccccactcaggctgtgcccggcttgtgacaactgtcgtgaagggaaatcttagcttcagagacagaaagcagattttgggtggtcttggggttggactgaacttatggttttagcatctggctctcacatgccagtttactcctcaaaatttgtgtgcctggttaatgccttttttaagaaaatgtaatttttttttcaggtgagccatacaccagacacattcctatgtaatatcttatttaatctccctgacaacctgctgagggagagttaccaccttcattttacagttgagaaagcagagattcaggggaattaggtacctttcccatagccttatagctagtcaagggcacatggagttgatctccaaacatctgatttcaaagtctatgcttttctcggcacatcagcctgtctcttaaaaggcaagtgttatcctgatgagaatgggcctgaagctatacatgtactttcaagggtcatgggggca

SEQ ID NO: 817928 - DNA, 702 bp, Homo sapiens
gtgttatcctgatgagaatgggcctgaagctatacatgtactttcaagggtcatgggggcacccccaggacaaacactcaaggggatgaaagtgctcaaggtgtgccagcctcacttctaaactggtccttgcacctaaggggctgaagtttgttttcaacggttcttgtctctgtgaatccccattttttgagccccttgaccctagctgttccaacaatgagagatactaggattctgttggcttcagtctttcttgctactaccactggacaaatgagtaaatctgggggcaatgtgaagcactgtgcttagcctgtctctgtgaacagtatgactgttggagtctttcttttctgtttttcttgtgaatatagatgggacttcggagctgtaaggaagagagtggaatatttgagacctagctgttactttctttgtgaagacacttaaataacattttcaggttttatttactccttccatgctcaagcggaagtttccgtgacagcagatgagaatgaagagaccactgtagcgcccaaagcctaggctcagaaaatggtccagagaaattgtcttatagtggggaaaccacagctgtagaatcagagaraagtaaaggaagtcttgtaatcccatggaccctctaagacacctcatgaaattctggataaggataggtcaactaccttatcctgc

SEQ ID NO: 817929 - DNA, 637 bp, Homo sapiens
acatatgatgtttggttttccattcctgagttacatcacttagaataatagtctccagtctcatccaggtcactgcaaatgctgttaattaattcctttgtatggctgtgtagtattcactcacatatatrtgtgtgtgtgtgtgtgtgtgtgtgtgtgtgatgtgatatatatatgtgtgtgtgtatatatatatatatctcacagtttctttatcctctcattgattaatgggcatttgggttagttccatggttttgcaattgtgaattgtgctgctataaacattcgtgtgcaagtatctttttcgaataatgacttcttttcctctgggtagataaccagtggtgggattgctggataaaatggtagatctacttttagttctttgaggaatctccacactgttttccatagtggctgtagtagtttacattgccgccagcagtgtagaggtgttctctgttcaccgcatccatgccaacatctactgtttcttgatattttgattatggccgttcttgcaggaataaggtggtatcacattgtgttttgatttgcattttcctgatacttagtgatgttatatacaaatggccaacaaacatatggaagtcatttttagcacaaaacttgc

SEQ ID NO: 817930 - DNA, 670 bp, Homo sapiens
gagaatggcacccttttggaatgaagactcagtcctctacaagatttttaattagaagttagaaatccatatttgtatggacaatcttcagacttaaagattgtcccacatgtgaaatcctgtgtatcagcaggktggtgccaagctcagcacactggggacagtagttggtcctcaggctgtcagcctgcagccccctggttatgtcacataatcccaaagcatctccgaaatttggtgtccttggtccagtagggatcacagtagatcgtaggacattgaggtatggagtaactggtctgagatcagagctctaaagagggtcagagctgggacttgggcaggtggactgactcaagaagctcatatcctcatgctgttctcactcacaggcagaattctggcagcaaatgatctgaattagaagtcagccgacctgggtcctgggtcagggtctgcgtatgagtgcagctatgacgcaaaagagggtgaggccagagcatccccaagccgcttccagcccttctgttgcactccacaccttgttctccaatgcattgaccagaaaggcccaccatacactagcattataaaatattgcacaggatgtgtccgaggataaattatgatagcatacagataaagattttatagttcaagaacatctata

SEQ ID NO: 817931 - DNA, 669 bp, Homo sapiens
gctagatgcctttgtgttcaaaccactttgcatgactcttattctgagtgactccagtgtgaatatgacattactaatgacctgctaagtgtgtacagatgtgggtttctccagatgtggtgatyaataacataatggagatagcggttgactcatgtttatgagttgtttgccttttattacgtttctgagtttatttgctttgaactgttttttaactccagccaataaactcacctttaaatcttaaagggcatcatccccttaaatctcactggggaaacagggcagagggaatgtgccccaggctagagctgagcatcaggtccatctaatgcaggcattagactgaattagggaaggctgggagttgcaatcattgccccatttcactccaaggaccataaagaggcttggtaaaccctgacacagtgtttgcagtctggcgcggctgataaaggaagatatttctttttttaaaaatctagtgaaatatgtaatcattttgaagtaagcccagagttctggccagtgtttctggaagacgttgcttttgcttgaaaacagaatgctgatgaaaagtcgagtaaaatgttgttacagatgttcaactctgcattaaggctgttggaattaccaccacatcttaaatcaattctcagaacattg

SEQ ID NO: 817932 - DNA, 478 bp, Homo sapiens
atttcttgcacaactccagggggcactattcacattgtgttctgtctacaggcaccatgaatgggtccttctgtgccatggcagccttgatgaccgagggayggaaagacaaaaccaggagtcaaacccaggtggttgacttgacaacccttgtggaaagaaaataaccctaggcctcagtttccttactgatagaaagttccaccagactggctgggcacggtggctcacgcctataatcccaacactttgggaggccgaggtgggcagattacaggaggccaggagttcgagaccaggagttctggccaacatggtgaaacccggtctctactaaaatacaaaaattagctgggcatggtggtgcacgtccttagtcccatccactccagaggctgaggcatgagaatcgcttgagaccaggaggcggaggttgcagtgagtcaagatcgcaccactgcactccagcctgggcgac

SEQ ID NO: 817933 - DNA, 615 bp, Homo sapiens
tttttttttttttttggagacggactctctctctcatcaggctagagtgcagtggcgcaatctaggctcactgcaacctccaccacccgggttcaagtgattcttctgcctcagcttccagagcagctgggattacaggtgcacaccaccatgcctggctaatttctttttgtatttttagtagagacgggattttaccatgttggccagactgatctcgaacttgtaacttcaggtgatctgcccttgtcagcctcccaaagtgctgggattacaggagtgagccaccgcgcctggcctacattctttttattttattttattatttcttttttatttagctagctaggtagcaaggacggggagagtgtctcactttgttgcctatgctggtcttgaactcctggcctcaagcgatcctcctgccttggtctcccaaagtggtgggatttcagccctctttttaaaaattaacagataaaagtgtatgtatttaacgtgtacaacacgatgtttgaagtatawatacattttgggatgactaactctagctaattaacatatgcattacctcacataactatcatgtttgtgtctgctttattcttttttgca

SEQ ID NO: 817934 - DNA, 548 bp, Homo sapiens
taaaaagacaacccaaggaatggaagaaaatgtttccaaatcatttctaataagaggttaatattcaaaatagataaagaatttctgtaactcagcaaaaaaattttttaatgggcagaggacttgagtagatatttctctttcttcaaagaagatattcagatggccaataagcagttggaaaggtgcttcataccagttatcattgcagaaatgcaaatcaaaaccctaataagataccacttcacacccattacgatgactgttacccaaaagaagaaagacagaaaaatgttgataagaatatggaaaaattggaactgaacccatgtgaactgttggtaggtgtgcaaaatagtgtagctgctttggaaaacagtatttgtacactcagacagggatttgtacactcatgttcatagcagcatgatttacaatagctaaaatgtggcagcaactcargtgtccaccaacaaatgaatggataaataaaatgtgatccatctatacaatggaatactattcagccttgaaaaaggaaggaaatt

SEQ ID NO: 817935 - DNA, 611 bp, Homo sapiens
cccactcagtcatccaggggccctggttcctggcagttctgtgctccacagtccccgggacagggctccctcatcatcttcacccaccggacctcacggcagccttgaaaagcctacggacccttctcagaaggaaagaacacgtgcaggacaaaggaatccaactctgattgtaatacagtgatcaaaatattttttcacactgtgacatagcaattcatgtgcttcttcatgaatgcattaagtaaaaaatcacctgtggcagctttaataaccactgtgacttagaagcagagatgagcataaatgacatttcaaggtgcctgctggaagataacgtgataggaaatgcctgtgatttcttttggtaacagtcacaagttctgctaacactgctgtggtgtgttgctgcatttgtaatggattcgtgctagatgcaagactggtccccagagatgttcctgattcctggacctgggaatatgttatgttccatggcacgagggactctgcagatgtgagtaagttaagggtttgggatgggggcgttatcctgggttgtccacctggacccaatgtcatcacraaagtccttctaagaaggaggccgg

SEQ ID NO: 817936 - DNA, 611 bp, Homo sapiens
tgttttcctccctatgggaaggatggcaaaagaatgtacaacaaacgcagggcccagaaaagcatccccaggacatttcatcactgccttgaggaaggytaggcaggaggggggtgtccccagcctccactgtgtggctgaacattggtggagccaaactacaccctgccctgttgggggccagaggcagcagggtgctgaacaggagcagtggaaggtggctgcttatcagcaaggaaaggctcaacagcaaacagaggaaaagttgttctagatctcaactacctgcctttgggattttcagcacctgcaatgtctggaatccaggagggcggtgactgcactgttccaggagcagggtcggggcctgggactagccctatgctgtggtgactcgagttaaccccagcttctccccttcagggaagggaggtctcctcactccctgctcacctctggggagtggggactggggatcacatttaaccctttggttgccagtgaggtacactttgagtagagtgaggcctggcccatcaacgtgccactgccctgtacctgcagcacacacatatcttgatttaaagaagaaagaaaaagaagaaaaaaac

SEQ ID NO: 817937 - DNA, 611 bp, Homo sapiens
tgttttcctccctatgggaaggatggcaaaagaatgtacaacaaacgcagggcccagaaaagcatccccaggacatttcatcactgccttgaggaaggctaggcaggaggggggtgtcyccagcctccactgtgtggctgaacattggtggagccaaactacaccctgccctgttgggggccagaggcagcagggtgctgaacaggagcagtggaaggtggctgcttatcagcaaggaaaggctcaacagcaaacagaggaaaagttgttctagatctcaactacctgcctttgggattttcagcacctgcaatgtctggaatccaggagggcggtgactgcactgttccaggagcagggtcggggcctgggactagccctatgctgtggtgactcgagttaaccccagcttctccccttcagggaagggaggtctcctcactccctgctcacctctggggagtggggactggggatcacatttaaccctttggttgccagtgaggtacactttgagtagagtgaggcctggcccatcaacgtgccactgccctgtacctgcagcacacacatatcttgatttaaagaagaaagaaaaagaagaaaaaaac

SEQ ID NO: 817938 - DNA, 516 bp, Homo sapiens
tggccccgtgggctgcgtgtttttccagtggctttttcagccacggcctgaccacaacccagattccgttgggtcggccatgtccaagtgtttgtgttcagctgggccagatggcaagcggggccgaggctggggacccaggcctcccagaagtcctggcgaagcacccccaggccctcactccaacatccctctgcctagaagcccctgccccgtgaaagccactcagcagccagataacaaaggacaggggatgatctcgctgagaagtcccagggggatcttgtatgtcccgggaggaggggcctcccggcctggccaggattccaggtgcaaagatgcaacttttgccaacgcagacttctttgagctgcaccattctggcccgcaaacttttgagttggttkgggaccaggtcagcagccacaattgcacgtcagcaaccagggctgtgtgtgaacagctctgcttccctgtgggccctgagcaaggtatgtcccgctctcagcctcagtt

SEQ ID NO: 817939 - DNA, 458 bp, Homo sapiens
atgtacatcagccatcccagactgaggtctgaaccaccgagcaagtttttttttttttttttgagatgcagtctggcctcgatctcctgaccttgtgatccacccgctttggcctcccgaagtgctgggattacaggcgtgagccaccgcgcccggccggagcaagtttcttaatgggaagttacaccagagctggagactggtctggcccttgcgagggatgacctgtagattctcttcagtggggggtcccctggtgccaccgggtggggccaaggctccgtctggtcagccctggaggagacatacctgcggctctctgaaaggcatctatggcactctccagcccagcctgcgtctgccgatcrcaccgggtcccaatctgggtgtagagggccccagtgttgaacaggacactggccttctccagcagcaggttctgctggctgaccggaacc

SEQ ID NO: 817940 - DNA, 369 bp, Homo sapiens
ttcccatacacctacccatctatctatctatatgtatatatgtatatatgagagaaatattttttctgaaatgtttkagagtaatttgcagatataatgccccttttcctctaaatacttgtatttcctaaaaacaaaaacattcatttacttaaccacagtactgtcatgaaaatcaggaaatcaacacagataacaatactattttcatatatatatatatattactgctccttgcagagcaggggtaccccataggcagtgtgcctagagtagcctataatactattttttaacctaacctaacctatatgttatcttcaaatttcatctattttcccactaatgttcttttctaatcaaggatcc

SEQ ID NO: 817941 - DNA, 616 bp, Homo sapiens
aagaatctagtttccacatcctgatgactttatcctgcttgctctgaccatcaacaaccctaattctccagtccttcaccctccctgatcccctttaraactccagcctggaacttcttggggatatagatgtctcctcctatctccttacttggcgccctgtggtaattaaactctctgcttaatccgtgtctgtgtaattggtctgctactacacagcagacatatgaacctgttggttctataacaattctaaagtccttgtctgctaattccaacttctcatatcatctatgggtctatttttgttggacctttttctcctgatgattggtaacattgacctgctgctctgcacatcatgtgatgttttaagttggatgtggatattatgcttaaaagaacagcagaaattgaaaaatattttcatctggaagtcactccatttcctctgccaagcagtttaggtgagaatctcctcaactttgatccaatcagaggttgggatgtaaaaattagttttggttcacttcgggtttcaaacatcttgagtaagatctttcctatgactatttcagaccactccctctaacaggactgtggaatctaagcacta

SEQ ID NO: 817942 - DNA, 530 bp, Homo sapiens
agagcctaataattcacatctctgggatccatgttcctcatgtataaaatggggatagggatagtactgacatcctaaggctgcrgtgagaatttagcaaacctctgcccatcaaataacttgtaagcaaatattcatggcagcgttactcataacagcccaaagcggaaactacccaaacgcccatcagctgctaagtggctaagccacatggggtgttcccatacagcagaatatcacgcagccataaaaggagtgcggcagtgacgcgccacagcatggatgcaccttgagcacacgccgctgggtgagggatgccagacacaagaggccacacagcgcaggactccacttctgtgaacacccagaaggggcaaatccacggagggagaaaggcggttagtggctgccagtggactgggggaagaatcagagtgatggctcagaactactgggtttctttttggggtgacagaaacgtcctggaattagatagtgacgatggttgcataacactctgaatatcctga

SEQ ID NO: 817943 - DNA, 694 bp, Homo sapiens
tgacagggtttgagctcctggatcctgccgtgccygagacagtgcagtcctggattgctccattctgtggactaatacattgcacacagtcccttttggtttttggcttaaggcatgtaaagttgggtttctgtcatttgtaattgtaagagcaattagaagttactttaaaatactatttaatcagtatcccgcttaaggtgtttcccatttcactattacaatcagtgttgccaggaacatcttgtacacttatctttgaacaatcctatgaatatataggtaggacaccttcctaagacaggaacttgtggatcaaaaaacaggtgcattttggccgggcacggtggctcaggcctgtaatcccagcaccttgggaggcaaaggcgggcggatcacctgaggtcaggagttcgaggccagcctgaccaacatggagaaaccccatctctactaaaaatacaaaattagctaggcgtagtggcgcatgcctgtaatcccagctactcaggaggctgacagagaatcgcttgaacccaggaggtggaggttgtgatgagccgagatcgtgccattgcactccagcctgggcaacaagagtgaaactccatctcaaaacaaaatcaaagacaaaaaacaggtgcatttaaaactgtgactgttattgccttccaaaagggtttcccaattcatg

SEQ ID NO: 817944 - DNA, 638 bp, Homo sapiens
agattgtgtaagtccagttcataaatggtgattctcccttggaaaggtgaggctgaactgggagtagaaaagcaactgctcatgtgtaatttccagactgtactatttacaggtggggcaaacaattaccaccagagatggaagaagacagggccatgtcactggtttcttcctctcagtgtggagggcatggtggtgcatagaatggggaagggacgctgaagaaggagcttcctctggtgcagccgagcagacgtaagagatgcacctggcccagtcctacacctgggtatgtgtgtgttgtggggtaggagggtagctgagaagtgggagtggggagagggctgtttagggaaatgagcatttgcaaatgcaaatctagtaattacatacccacacatgcactatcatagttagatacctaactacccatttgcacacacaattacccaatgtgtaagggttcatcacggataagtaggcaataggtgggcacacctgttggactggcttcagaaaatttcagcaattctataacacaagaaggagaaaaggaaagtcrtttaaggaaaagtcttggaccaccaattaaggaaccatccaagggggtcccgtgtgttcattgttacaggtcttgt

SEQ ID NO: 817945 - DNA, 446 bp, Homo sapiens
taaaaaaattagctgggtgacagattgacaccttgtctcaaaaacaaaaaaaattgttamaatgtacataatatgggaggctgaggcaggtggatcatttgagcccaggagttcgagaccagcctgggcaacatggagaaaccctgtctctacaaaaattagctgggcatggtggcacatgcttgtaatcccagctacttgggaggctgaggttggaggattgcttgtgcttgagcctggaagtctcacggagcctgagaggctgccatgagccaagatcatgccactgcactccagcgtgggtgacagagtgagaccttgtctccaaaaaaaaaaaaaatttattatttttttgaggaactgccatacggttttccatggcagccgtaccactttatacacattcccaacagcaatgcacaacgattccgacgtttccacaacac

SEQ ID NO: 817946 - DNA, 464 bp, Homo sapiens
aacagaattagaagacagaggtcaagcaccagaaccagattaggtatagaagagatgttggaattgtcagatcagaaayttaaaccaaatatgattaatatactaagggttctcatggaaatgttgaacaatatgaaagaaaaaatagacaatttaagcatatatatagaaattctaacaaagaatcaaaaggtaacgaaggacataaaatacactgcaacagaaatgaagaacagccttacaggttcatcaatacagtggaaatgtctgaagagatgatgagtgatcttgaagaactgtcagtataacccgtcaaactgaaaaggagaaacaagacatcagaagatccaaaaactgtcagaaaattacaaaaagtggaacatacacataatagtactaactaaagacaagaaagaaacagaagaaataactgaagcaataatgactgataatttcccaaaatt

SEQ ID NO: 817947 - DNA, 606 bp, Homo sapiens
agaaccagattaggtatagaagagatgttggaattgtcagatcagaaatttaaaccaaatatgattaatatactaagggttctcatggaaatgttgaacaatatgaaagaaaaaatagacaatttaagcakatatatagaaattctaacaaagaatcaaaaggtaacgaaggacataaaatacactgcaacagaaatgaagaacagccttacaggttcatcaatacagtggaaatgtctgaagagatgatgagtgatcttgaagaactgtcagtataacccgtcaaactgaaaaggagaaacaagacatcagaagatccaaaaactgtcagaaaattacaaaaagtggaacatacacataatagtactaactaaagacaagaaagaaacagaagaaataactgaagcaataatgactgataatttcccaaaattaatgttatacatgaaaggaaatatccaggaatgccaagcaacataaatacccccaaatccacacctgggtgtatcatattcaaggagaaaattaaaagacaaagaaaaactttgaaagaagttacagggggaacaaacaacatctttgttataaaaacataaaagaattaag

SEQ ID NO: 817948 - DNA, 614 bp, Homo sapiens
tgacagagccaatcaaggacatcttgaaagagactgtggatatggccaaaatggtgggrgaagcatgaagggttccaagatacagatcttggagaaattcaagaactaatagatgccacatcaaaggagttaacagaagaaggcttgcagtaggtgtttccaaaccagtgccagattatgaggaagacatagaagaagcagtgccagaaaacaggttgacattaggcagtccgatgaaaggattccaagtatttaagactgctgttgacttctttaacaacatggactcttttgtgacaggggcaatgaaatgaaagcaaatggtagaagaagaattgataccatatagaaacatttttagagaaatgaagaagcaaagaagtcagacagaaatcatgatctatttccataagattatactcagtgtggtctgcctctcttgctccctttctacctcctccacctcttttgcctgtgccacccctgagacagcaagaccaatgcctcctttccctccttcttttcagtttacccaatgggaagatgatgaggatgaagacctttacaatgatccacttcctcttaacaaatagtaaatatatttctcttcttta

SEQ ID NO: 817949 - DNA, 612 bp, Homo sapiens
ataaagaaacggaagaatgcctttgataggctaatcagtcatctgaacatggccgggcgcggtggctcacgcctgtaatcccagcactttgggaggccaaggygggcggatcatgaggtcaggccatcaagaccatcctgtctcacacggtgaaaccccatctctactaaaaatacaaaaaaatattagccgggtgtggtggcgggcacctgtagtcccagctactcaggaggctgaggcaggagaatggcatgaacttgggaggcagagcttgcagtgagccgagatcgcgccattgcactccagcctgggtgacagagcaagactctgtctcaaaaaacaaacaaacaaaaaaaaaaaaacaaaaaaaaaccacacaactgaccaatgaccaggtgtatgggctccaggcagcatccagctgggtgtagaaaccccctcccaccaataaacaaatgaaatagaaaaacaagctgggtgtggtggcacatgcctgtattctcagctacttgggagactgaggcaggaagattgtttgagcccaggagttcgaatctagcctaggcaacatagggagacccccatcttaaaataaataaatttaaaagaaaa

SEQ ID NO: 817950 - DNA, 484 bp, Homo sapiens
agaagaatccagcaagggccactccttctcggtaaagtccacagcgacatcttggaaagtcaccgattcctggaacgccacacaaacttggggtcagcgaggaaccagcctaacgatgttcatggtaagatggctgaggttgaagaccgggcatgagagacccaacacaggatttccagatggcctgctacggggctcaacatttcctccaggcatcagtcctcagacatcctctctccccattgaggccatcttgtcctgtgccgtcacttcagatgcaaccctgacaagggactaatctccctccagttctagcccactccgagagctttgccctttatttccccccgtctctggggctgagcawgggcctgagattttgcaagcatgagggaaacagatgctacataaatcacttcccctaacttccccaacaccaggacagccccaatattccttggctctctcttgggccctgttctgg

SEQ ID NO: 817951 - DNA, 619 bp, Homo sapiens
aggctgtctaggtttgaatcccagctcttccccttgttacctttgaccctagggaagtggccttaccaccctgtgcccggtttcctcatttgtaaaacaaggacaataacgtcctttccacaagagcgtttgtgaagttgaaggagatccaacttgtaaagcacgtaggacaggccagacccagtgaatttgtgactgtggagtgctggtggctctcagcacttttggaggccgaggccagaagatcacttgagcccagcagttcgagaccagcctaggcaacatagcaagacctcgccactacaacaaattttttttttttttgagactgagtttcactcttgttgcccagactgcagtgcagtggcatgatcttagctcactgcaagctccgcctcctgtgttcaagcgattcttctgcctcatcctcccgagtagctgggactacaggcatgcaccaccacacccagctaatttttgtatttttagcagagacggggtttcaccktattggccaggctggtctcaaactcctgacctcatgtgatctgcccgcctcgacctcccagagtgctaggattacaggcatgagccactgcacccagcccaaatttttaaa

SEQ ID NO: 817952 - DNA, 355 bp, Homo sapiens
gcactaaaagcacttcacaccatgcttggcgtgcagtgagcacacgctaagtataagctgtgttcattcccttggggctgcgtgggcatcttgcatgcattacacatagctctaccttgctatttatttatttatttatttatttatttttgaggcaacgtcttgctctgttgcccgggtttgatctcttatttatttatctatttatttatttatttatttatttatttatttttgaggcaaygtcttgctctgttgcccgggcttgatctcttatttatttatttatttatttatttatttatttatttatttttgaggcaacgtcttgctctgttgcctgggcttgatctct

SEQ ID NO: 817953 - DNA, 648 bp, Homo sapiens
atcgtccgatggaaagatctggcaagccacgtatgtaaccttaaactttcttgcagccacgttaataaaaagggggaaaaaaccaggttgaacttggtttgaagagtctrttttgctcaatacatctaaaacagtatgattccaacattctgttttcatgctaggtcttcaaaatccaatgaactcactgcacatctcaagttggacaccagattttcatcggcaacatgatctgtgtaggtttcataaaatgtacagctattcacataccaaagctgttccaaaatgatgtggaaaaagtgcaaagtctttacgcactgaatcacatattagctttcaaatgtaaattcaactgaaaggatctaacatgaaagattcagctcccctgtcacactcaccacgctaaagcgctcaataggctagaccggacggcaagggctcacactgccccgcattacgaatgggtctctcgccctgttcttaccccacagcaaacattccaagtcccccttaggacaaagacgctgttccccaagctggttttccaggaccttctcacctcattgctcaccatccccaatcctgcgctctacacgccagcacaccaggccctcagcagcccccaggccttctcaatttctatgttcc

SEQ ID NO: 817954 - DNA, 590 bp, Homo sapiens
tggaagccacagccctggacttgagcccctctattaagctccctctcctggattgtttgataggatatcaggtatctgccgcattaaggagacctttgagagacactgaagactcagcagaaggaatacaccattcctctttctggaagcctaccaagtccttttctttcccccaagaaatttaagagctgggcaaactagaccctcagaaggaaaattcttgcctctcctccacttcccacccccttttaatcccctctgaccccagcgctgacctctcaggaaagtcaggtctctctcagggtgagttctgaccagtcttcccttcttgaatttgcttccgaagtgggttatggaaacaaaggcccccagtgcagagaagccagcgtggtgaggggtgaactcgaaccaggtctctgcagaggaaatacaacggcaagtgagtcccagcacagaaccaggaatgtagcrggtatgcaggaaaaagaaatctattaatgaggaattacaaccatgacaggagaatgttagagatggactgtgtggtatcagaaaccactggggatctcatcctcagacctgagtctacg

SEQ ID NO: 817955 - DNA, 600 bp, Homo sapiens
atacccacctattaagggctgggttttgggctatctcrttatcatttattccccataaaacaaaaaccctgaggtagggattcttttatccccatgtgacagatgaggacacagactcagaaaggccaagtgactccccgaaagccacacactggttagcagtggagccttgattcaaacccagaagggcaaacccaaagccccttcctctcacacctcatccctcctcacctcaaggccagtttactgagcagagaggaactcacgcttccagattcaccccatacatttaacctgctgcgcagcaaatgcctggactttgcctggcagaaaatgatcatgaaatccctgggatgggggcagcctgggccctcaagaaacatcccaacccacattcccattgcccttgttgaggaggtcagtcctgggaaatcctactcccttgttccttcccaggttccatctgagctaagtgcctccaggaagggcagggagccccatctccacacacagcacgggaagagggggtgtgacacaggcctacatcagaactctcaccagcctcagcccctgcagacccggtgggactgggctttgctt

SEQ ID NO: 817956 - DNA, 611 bp, Homo sapiens
ctgtacattcccactttattatcaaccaccttaaatgtggttaattatgtgaaattatggttaaggtgaggggtaaatatggagaaaaagaagggggcttccctgtattcactagacttttatttcgttccagggcttatgacagagcccaagagagtcagagaagctttctacaaattcagctgtcgcattcattttcttacacactagagttgccacttaaaaatactaaaataaaataaaaaattaatgttgaccatctaacaggaatacttgactcagctactaagttacaaatttgcttcatttttggaagacatctagcatctgagaattggacttttcccagaagttcacttggtaacctcaggtaagtcctggttcatcctggagaggatccgaggggaaagcctgatgggacccacggccgccctgagaagaaaggggtgctgtggggtgcgggaggaggaggagctgggaagcaggagcgcccgggactggatctagctggaaagggggcagatgctctcccggaatcagggtaggtaccctctaggaatgggacgttccgagagsggggtgtgtctggaacattggctaggggtccttag

SEQ ID NO: 817957 - DNA, 586 bp, Homo sapiens
tagaatatggtgttccccactgagtgtttgggggacttagtagggtccccagtgtttgctcctggttttagcctcaggagcacttggtaagggggctatagggatggtcgctcttcacccttagagacaagtggctcttgtaaaagggggtcatctggtttggcacggtggctcacgcctgtaatcccagcactttgggaggccgagctgggcagatcacctgaggtcgggagttcgagaccagcctgaccaacatggagaaaccccgtctctactaaaaatacaaaattagatgggcatggtggtgtgtgcctgtaatcccagccacctgggaggctgaggcaggagaattgcttgaacctgggaggtggaggttgcagtgagcggagatcaagccattgcactccagcctgggcgatgagagcaaaactctgtctcaaaaaagaaaaagtaagagtgggggggatcatctataatatctaattctaccttagaactttcctttggtggtgggggtgggttctgggagtttgacagattgytaggttttggtataaggtcataaaatcctgtgcatatgggattt

SEQ ID NO: 817958 - DNA, 385 bp, Homo sapiens
gtacttgaggagttgaatagttttaatttcttgccctgtgtttcacaaacacagtttattttgattaggaacttctactgggtmtgaagatgaggcttgaactgctgtcagtgtttaagatttagcaagacttggtgtcctttttagacccaggagtcaaagccctttaactgaatggaacagggacctaaaagcatatacggaaagttatatggacataataaacttaatttaaaaaaatttaatttaaatttccttgtaaccaaaccaaacttagtaatactgacacaggaattactttgataaagtgtgagatctgtttagtaggccagttttccaaaggcaaaagaaaagcccttctacagtgtgactgctgttccctatg

SEQ ID NO: 817959 - DNA, 669 bp, Homo sapiens
ttgtctctacaaaaaatacaaaaagtaggtgggtgtagtggcacgtaactgtagtcccagctactcaggaggctaaggtgggaggatttgatagagcctgcgaggctgaggctgcagtgagctatgrtcacaccactgcacttcacctcagggacagagcgagaccccttaaaaaaaaaagtggccagagaaagcctcattgagaaagtgacatttgtgtaaagctctgaaggaaggtgacaggtcaggtggtcatcatggggaagagcattctaggcagcgggaacagccagtgcaaaggccctgaggcaggagcaaacctcataagctggaggaacagcagaaagacagctgtggctggagcagaggtagtgagggtgagggcaggaggtgacaggtgggtcatgtggcatctcatcggtcacaacaagggctctggcttttaccctgagtgagaggaggccaggattctgagcagaggagggacgtgacctgactcaggtgttcacagggtccctctggctgtgtgtggggaacagattgaggggaaggcagaaggacagaaggacagggaggaggctcgtgttgtggtccaggtgggagacaagggtggacagaaccgctacaggaaaggggtctggatccaggcccaaagagaaggttcttgga

SEQ ID NO: 817960 - DNA, 609 bp, Homo sapiens
tccatctcaaaaaaaatattttgttcgcagtattggtttggtactgtggrcacacagaactctgtacaggaacagcaataacagaagggtgacagggcaaggaagatgagcactgagaagtgaccaccgatttggcaaagtcaaggtcactggaaatggggatgagcagtttcagcaggggacagaagccttccgagagggggtttaagagagcctggggctgtgcatggtggctcacccctgtaataactttgggaggccgaggcgggtgggttgcttgaagccaggattttgagaccagcctgggcaacatggagagatcctgtctctacaaaaaaaatttaaatattagctgggcatggtgctgcacacctgtagtcccctctactagagaggctgaggtgggagaatcacttgagggacagacattgaggctgcagtgaaccatgattacatctctgcattccagcctgggcgacagagcgagaccttatctcagaaaaaaaaaagaaaaataaattagccaggcatggaggtgcgtccctgtagtcctagctactagggaggctgaggcaggaggatcacttgagcccaggaattcgaggctgc

SEQ ID NO: 817961 - DNA, 609 bp, Homo sapiens
tccatctcaaaaaaaatattttgttcgcagtattggtttggtactgtgggcacacagaactctgtacaggaacagcaataacagaagggtgacagggcaaggaagatgagcactgagaagtgaccaccgatttggcaaagtcaaggtcactggaaatggggatgagcagtttcagcaggggacagaagccttccgagagggggtttaagagagcctggggctgtgcatggtggctcacccctgtaataactttgggaggccgaggcgggtgggttgcttgaagccaggattttgagaccagcctgggcaacatggagagatcctgtctctacaaaaaaaatttaaatattagctgggcatggtgctgcacacctgtagtcccctctactagagaggctgaggtgggagaatcacttgagggacagacattgaggctgcagtgaaccatgattacatctctgcattccagcctgggcgacagagmgagaccttatctcagaaaaaaaaaagaaaaataaattagccaggcatggaggtgcgtccctgtagtcctagctactagggaggctgaggcaggaggatcacttgagcccaggaattcgaggctgc

SEQ ID NO: 817962 - DNA, 467 bp, Homo sapiens
cgaggctgggcactgtggctcacgcctgtaatcccagcactttgggaggctgaggcaggaggattgcttgagccaaggagttcgagaccagcttgggcaacatagcaagacctcaactctactaaaaaaataaaaaataattagccaggcatggtggcatgcctatagtcctaaccactcaggaggctgaggcaggaggattgcttgagctcaggaggcagaggctgaagggagccatgatcataccactccactccaacctgggtaatagagtaagaccttgtctcaaaaaaataaaaaacccaatacaggataacaactatttacatagcatttacattgtgttgggtattataagtaatttagagtgattttaagtctgtgggaggatgtgtatrggttctatgcaaatactatgccattttacatgaaggagttgagcacccatgaatttgttcagtaccctt

SEQ ID NO: 817963 - DNA, 538 bp, Homo sapiens
ttgggaatttaggactccacttcggggtcaggaaagctgagtttcagagatgggcaaggattttatgaatgagagctggttatgtttgcagttgaatctctagctctcacttttgattttcagtatgggcccactgggtgcgcccaactcaagggtctagccattgtaactgcaaggaagtggatgatgaggaaaagagtaggtagaaaagagaaaagaacaaaacaaaacaaaacaaagctcacctctgcagagaattattcttcctgctccttcctgtcaaaagcatctcccaaaacggagatcgcctggcctgccccaccccccaacccttataggtgccggggaattcagacaattggcaccttctcttcccattggcgggggctggctcactagaattcctctgcattgcaccgattggaaggcatttagctcccttgattcagaatgaatgrgctgcaggtcttgatcctacaggtgcttccgatttgtaaaggaaactcttcccttgcttcttaggtctagaagaacaagc

SEQ ID NO: 817964 - DNA, 488 bp, Homo sapiens
gattgtcgtactgggaacaatttgagtgcagcacagatttcatgttagcttatgcatggttttgcccaagagaaacactaagaaaccacaacaacccccrccctgcccccgcaacccaccgaccctgcactcagccgagcagagccatgtaggattgtacacaatgcacacaggcatgtacctcaaacatctacccgcttcctcagtacgagccttgcccattctacactttctgtctgatttcagatcattgttctttcacttcacaaaaactcacaagctgcgacacttcccatattcacaagcaaagttcatgttttactcagggtaaagtttcatgccacatcttctgtggcattgcaagacctgctgaggtgttacagggctgattgtggtgttgtaggatcgtgcagtgtttattgtggtaataaagtgttttgtaattaatcagcaagtataaaaccatgctgtttaagcttctggttaaa

SEQ ID NO: 817965 - DNA, 488 bp, Homo sapiens
gattgtcgtactgggaacaatttgagtgcagcacagatttcatgttagcttatgcatggttttgcccaagagaaacactaagaaaccacaacaacccccgccctgcccccgcaacccaccgaccctgcactcagccgagcagagccatgtaggattgtacacaatgcacacaggcatgtacctcaaacatctacccgcttcctcagtacgagccttgcccattctacactttctgtctgatttcagatcattgttctttcacttcacaaaaactcacaagctgcgacacttcccatattcacaagcaaagttcatgttttactcagggtaaagtttcatgccacatcttctgtggcattgcaagacctgctgaggtgttacagggctgattgtggtgttgtaggatcgtgcagtgtttattgtggtaataaagtgttttgtaattaatcagcaagtayaaaaccatgctgtttaagcttctggttaaa

SEQ ID NO: 817966 - DNA, 678 bp, Homo sapiens
atttattttctgatttctttgtacaggttttatgatttctcttggatctcactgagcttctttaaaatcaatattttaaattatttatctggcatttttacattttcattttggttaggatccattgctagagagttagtacaatcctttgggggtatcataacacctgagtttttttaatatgccaagaattgtgcattagtttcttatctgaagaaactatcacttcttatttttgcatttactgctgtttagatgggactattttttcccttgaggatgtgactataatgtgtgtttagtagggtcatttggcttttctgagtgctttcattgacaaagactctataaattccttggttatagacagtattagtgcagtggctttctaaatgtggttttagtagtggtttactaggtgtgtgagtaggctcttggtctcctgtggggccaggttagtgaggtcttaaagcttatctggttcccaagcactgtttacttgtgtcagcagcttttgtattgggttgtgtagtttgacatctagtccagtagatgacacktgcaggttagagccagctgcagcagttgcagtagcttttatgcttgattgttgtttaccaggagaaactttcttgtgcatcaggcaatgggctggtctgtgaaatgcataggagcttg

SEQ ID NO: 817967 - DNA, 568 bp, Homo sapiens
ttacacaaatctagatgtaataaactgctatagaataatgtacacacaccataccaggatctgtttcccagttttgatattatgcgatagtatgtaagattaaccactgggagaaactgccagaagggcactttttttcctttgagacagagttttgctcttgttgcccaggctggagtgcagtggcacggtctcagctcactgcaacctccgcctgccgggttcaagagattctcctgactcagcctcccgagtagctgggattacaggtggctgccacgcctggctaatttttgtatttttggtagagatggagtttcaccatgttggccaggctggtcttgaactcctgacctcaagtgatctgcctgcctcggcctcccaaagtgctgggattacaggcgtgagccaccgcgcccggcccagaagggcacattcaacctctatacaattaaaatctcgctgggtatggtggctcaagcctataatcccagtgctctgggaggccaagcggggaggaccacctgakcccaggagttcaagatcagactgagcaaccaaacgagac

SEQ ID NO: 817968 - DNA, 562 bp, Homo sapiens
gtctttagcgactccccactctgtgcttttgggaacttggttcctacacctttggtggcacttatgccctcaggctgcacttgaaaggcttcagatgggtctctcaggaggtaggggagagctgggatagcgtcatgggaagggattctctcgtagggggcgggcagccttacatcagggtctgtatcttgcaggtgggatgcctcagcttggcacacagggtcttcatggcccgctctgtcaggatgctgctgcccaggtccagctgccgcaggtgtgggtgggtgccaagcatggagcagaaatcttcccactgctcctcaatgagggtcttatcccgcatcctatgtcaggggggatagaaacatgggctcatgggatggagtttaacatgagcagtcgtggcaacacgtcggaggagagggaccgagctctcgaggtgagaccacggtggctttagaggccctgaggcaactwagcggctgccatcacactttgcatgactagccctgtgtccaccctgcctcccggatataccgatacccgagggggtatgcaggca

SEQ ID NO: 817969 - DNA, 458 bp, Homo sapiens
tctactggtgatgtgacactgggcaagtcacttgctctttggaggcctcatttgcatatctgaatgatgggggcattgataacagcacctccctgtcaggttggtgagcccgagtggataaagtacccaggaatcatccatgtagatagggtgcggatatgatcatagtgatttattaacattaggctataatcattttactgtcagagctaaagtcaagggacatggtgacatcatagacagctctgataccagtgggttgggggaggtccccaaacgccggtgggacctcgaacccagccattatccaggctcttgacaccatcgagagtgaattcaagaaacaagtcagaaaatagtgaaagtgggccgggtgcggtggctcacacccgtaatcccagcactgtgggaggccgagacrggcggatcacgaggtcaggagatcgagaccatcctga

SEQ ID NO: 817970 - DNA, 627 bp, Homo sapiens
taagaccctctctaccaaaaatttaaaaattagccgggcatgggccgggcgcagtggctcatgcctgtaatcccagcactttgggaggccgaggcaggcggatcacaagatcaggagatcgagaccatcctggctaacggtgaaaccttgtctctactaaaaaatatataaaaaataagccaggtgtggtggcaggtgcctgtagtcccagctactagcgaggctgaggcaggagaatggtgtgaacccgggaggcggagcttacagtgagccgagatcgcgccactgcactccagcctgggtgacagagcgagactccatctcaaaaaaaaaaaaaaaaaattagccaggcatggtggcatgtgcctgtggtcccagccactcatgagtctgaggtgggagaatgacttgagcctgggaggttgaggctgcagtgagctggtgatcacaccactgcactccagcctgggcaacagagcaagaccctgtctcagaaaacaaaaaaaacaaaaacaaaaaacagaacagcttccagggagccagygccccctgggctgccaggggaaggagagagctcagccatggagtaggatctcaccccgagtgggcccccaagacctcctttcc

SEQ ID NO: 817971 - DNA, 623 bp, Homo sapiens
catgatatcttctaggttaactgctattgctgatctctgcatgtaggccaagctcactatgggaggaatttcatttatagtttaaagcaaagacgatcatggtctcttcccaacactcacccccaaggagataaggagggcatcccacgagcaacaccacgtgttcaagatgcatccctggaacctgaacacgggcagaagattgcacaacctccctggacccttactggagcaggctgtccgcggtcctcagtcactttttttttttttttttgagatggagtctcgctctgtcacccaggctggagtgcagtggcttgatctcagcttattgcagcctctgcctcccgggttcaagcaattctcccacctcagcctctcaagtagctgggattacaggggtgagccaccatgcccggctaatcggctaatttttgcatttttagtagagacagagtttcaccatgttggccaggctggtctcaaactcctgacctcaggtgatccatcygccttggcctcccaaagtactgggattacaggcgtgagccaccgcacctggcccttggtcactttttcatcccaacctcccccgcttcccctttcccttaacatcaaaacag

SEQ ID NO: 817972 - DNA, 600 bp, Homo sapiens
cacacggcatcatacagcctgctttctaagcgcaaggccaaggggaagaggtggttcctgccacactctgggaccccgctgggtgactgtggcctggcatggtgagctgggggccagccactgccctcaggacagcagggtcctctgcctttcccccgcagagtggcctggcctgcctcatgcttcctgcagagctggaggctgatggactccagacccagcacttctgctgcggcctcagccattctcccagctcctccccatctggaggtcgtgggtagccctgtgagggtgtgggcttgggagccagctgagcttgggagccaactaggcttggattcaaatcctgcctcggtccctctgttctctgaatggaaatcctcacctacagtgggggagctggcagtattcctgcagggctgctgggttgaagcacaggtgcaggcacaagccttgctcaacaagtatcgggaggctcctcccatctggagagcacccagggcayggcatgtggcccaacaggaccaggctggagatccagggaaggcggggatggggaagccccaggaaccccctgcagacaggaggctctgccctgag

SEQ ID NO: 817973 - DNA, 649 bp, Homo sapiens
gcaagaagaaggtgaccagtgggtagagcaaggagcacatgacgtatcccacagccctagggaagagcagagacacaggcgtcagggcaaaagacacaactctagggacagctccatcctggcccctggcrccctggccccccacctgctggcttctttgatgagtgcaatcgcgatgagaattctcttccggagaaagatgagcagcaagatgataatgacttcaaggatactcagaatgatcactgcaaagggcaaaggctgagccggctgggctccccactccctccaaggcctcatgtgggggcaggaatgggagactgtgactcactaaaggccaaccaggtctgccgtaagtgcaggtacacccggaaatccgtctgaaagccgaggtccaccaaagagacatcagagccggcctcaccacgcagtcgggagtactccatgtagcagtgaaatattcctgcatgggggaaccacaagctcagtccagcagtgcctcctgcaactttgcaaagcagctacaactgcccccatttaacagaagcaaacatcgaggcttctgcctcagggactttacacttgcagttcccaccgcccggtgcattctctccccatggctggatcccacacatccttaggtctctgc

SEQ ID NO: 817974 - DNA, 612 bp, Homo sapiens
cctctggccagcctggcgttgcaccgtttgtccgcctgctggggcctggtctgtgttcccgtgctcccataaactccctgatgtcactaggaaaatacgcatcaaaaccacagtgagatatgacttcacaccttctggaatggctgtattttttttttttcttttgagacaaagtctcgttctttttgcccaggttggagtgcagtggcgccatctcggcccactacaacctccacctcccaggttcaagcgattctcctgcctcagcctcccaagtggctgggattataggtatgtaccacaccaggctaatttttgtatttttagtagagatggggtttcactgtgttggccaggctggtcttgaactcctgacctcagttgatccacctgcctcggtctcccaaagtgctgggattacaggcatgagccactgcacccgaccggctataattttttttaatggaaaacagcagatattggtgagtatgcagagaaattgractgcgcgtgcattgctggcagggacgtaacatggcgcccctgctgtggaaaacagttccagcagctcctccagaagttaaacgtgggattgccataaaatccagcaat

SEQ ID NO: 817975 - DNA, 562 bp, Homo sapiens
atctgtcataagctctatgcctacatatccagtataatccagtgggggctgtccagtcccrgtgggactccaggtgggtccagtttgcaactttgagaatttactaaattttctctctgtgtgatttgaactccaccaagtgattgtttttgtggtaccattatacagtttctgtctccgacaactaagtcatcctacgcggtgagtgaattcttttccttctctagctatgcaatattgtttaataattgaggcttttaggatcagaaattatcagggtgattcttttgagccaggaattcatcaggtactgtaggtactaattctcaggcttcccatggccattgatctcttattacagcttctccacatacataacatgaagtgacattgagagactgggctacatgcttggctaattgcaaaaacaaatttcttgtttttcctggaatttctggtactggcacatttagttcatcatagaaagtttgaaacactggctcaggagagtctttgtaagcttctcgaaccaagatatttactcaaggatccagtctggccc

SEQ ID NO: 817976 - DNA, 555 bp, Homo sapiens
ttttcctttctgaaggtgggatggatctttttcatttttttttttaatccaagtggcctaaatgacacaagaccagtgttcacatttatttccacacagtgctaatttatgacagttgtatttattttctgccatatagcctcttttctaattaagagaaccacaccttattcctaacttattactattaatgacagcacaggcatcaaattttaaggtgacttgtttgggcacccctttttcttctgttttagctaacactttactcatatcatttatgagccccaaccagtcctcagtccttaatcttatttaaaaaactgtccctccagggttcaagcaattctcctgcctcagcctccaggcatgcacgaccacgtccagctaatttttgtatttttagtagagacggggtttcaccatrttggccaggctgatcttgaactcctgacctcaggcaatccacctgcttcattaaattatgcactaaaagtgtataattacactgtttgtaatacaaatgataaacgctagaggtgacggatatcttattta

SEQ ID NO: 817977 - DNA, 608 bp, Homo sapiens
ggcccgtgaaaggcaactgagcasggatccatgggaaagacaccctcagaggcacaagattctctcgttacctttcagtttgctgatacttcagttaaagtctcctgggaaacgtctgcattaggttcttcctctgtagttcttcttaccttgcctgtaaaacaaaacctatctagtgtctgcataggtttccacttcttgtccccacctgaggaatggaaagcaacggcacagtccttgctcatgttttggagtgaaaggagcttgaaggtcatgtgagctttgccaaggcttctcctggcctcatgtcagatacagctcctaactcccaagcagcctaccatagtgtcctcctttttttgcgtgtgtgatggggtttcgcacttgttgcccaggctggagtgcaatggtacaatctcggctcactgcaacctccgcctcccaggttcaagtgattcttctgcctcagcctctcaagtaactgggattacaggcatgcgccactaagggaggagaccactcctcatattgtcttatgcccaatttctgcttccaaagaaagaagaagtaaaaactaaaaggcagaaatgaaatccacaggcagacag

SEQ ID NO: 817978 - DNA, 602 bp, Homo sapiens
tattataaacatctgttaatgaatatataacataagtagaattagcaaaatcaataacaaagttgaaggcagatgtaatgaagaatgtttgcatgcaactgaagttaattttttactgcattaaagtatattgttggatcttttagaggttttatgtaatcccctagataccactaagaaactacctgcctagatacacaaaagaaaataagaaaaaaattaaaagcatatcaatacaaaaataaaaaaaaaacacaaaaagacagaaagagaaaaagagacaaagataaaagaatcaaataaaacaataaaataacgttggccaggcgcagtcgctcacgcctgtaatcccagcacattgggagaccaaggcgggtgaatcactggaggtcaggagtccaagaccagcgtggccaacatggagtaaccccatctctactaaaaataccaaaaattagccagcatggtggtgggtgcctataataccagctactcaggaggctgagacaggagaattacttgaaccttagaggcagaggttgcagtgagccaasattgtgccatttcactccagcctgagtgatagaccaagattccgtctc

SEQ ID NO: 817979 - DNA, 610 bp, Homo sapiens
gcctctaatccaacactttgggaggccaaagctggtggattgccagagctcaggagtttgacagcagcctgagcaatatggcaaaacctcatgtctacaaaaaatagaaaaagaaaaaaattagtgggtgtrgtggcatgtgactatagtcccagctacttggggggctgaggtaggaggattgcttaagctcaggagattgaggcttcattgaacctagatcacaccactccacttcagcctgggtgaaagagtaagaccctttcttcaaatataaataaaataaaataaaagatttaataaaaacaaaatatggtacataagcatcatggaatactacgtggccattaaaaaaaaaaaaaaaagaaaagaaacaaaatcatgtcctttgtagcaacgtggatggagctagagaccagtattcttagaaaactaatgtagagacagtaatcccagcactttgggaggccgaggtgggtggatcacctcaggtcaggagttcgagaccagcctggccaacatggtgaaaccccgtccctccaaaaatacaaaaattagctggtgtggtggcaggcgcatgtaatcccagagtctcaaaaaataataataa

SEQ ID NO: 817980 - DNA, 610 bp, Homo sapiens
gcctctaatccaacactttgggaggccaaagctggtggattgccagagctcaggagtttgacagcagcctgagcaatatggcaaaacctcatgtctacaaaaaatagaaaaagaaaaaaattagtgggtgtggtggcatgtgactatagtcccagctacttggggggctgaggtaggaggattgcttaagctcaggagattgaggcttcattgaacctagatcacaccactccacttcagcctgggtgaaagagtaagaccctttcttcaaatataaataaaataaaataaaagatttaataaaaacaaaatatggtacataagcatcatggaatactacgtggccattaaaaaaaaaaaaaaaagaaaagaaacaaaatcatgtcctttgtagcaacgtggatggagctagagaccagtattcttagaaaactaatgtagagacagtaatcccagcactttgggaggccgaggtgggtggatcacctcaggtcaggagttcgagaccagcctggccaacatggtgaaaccccrtccctccaaaaatacaaaaattagctggtgtggtggcaggcgcatgtaatcccagagtctcaaaaaataataataa

SEQ ID NO: 817981 - DNA, 610 bp, Homo sapiens
gcctctaatccaacactttgggaggccaaagctggtggattgccagagctcaggagtttgacagcagcctgagcaatatggcaaaacctcatgtctacaaaaaatagaaaaagaaaaaaattagtgggtgtggtggcatgtgactatagtcccagctacttggggggctgaggtaggaggattgcttaagctcaggagattgaggcttcattgaacctagatcacaccactccacttcagcctgggtgaaagagtaagaccctttcttcaaatataaataaaataaaataaaagatttaataaaaacaaaatatggtacataagcatcatggaatactacgtggccattaaaaaaaaaaaaaaaagaaaagaaacaaaatcatgtcctttgtagcaacgtggatggagctagagaccagtattcttagaaaactaatgtagagacagtaatcccagcactttgggaggccgaggtgggtggatcacctcaggtcaggagttcgagaccagcctggccaacatggtgaaaccccgtccctccaaaaatacaaaaattagctggtgtggtggcaggygcatgtaatcccagagtctcaaaaaataataataa

SEQ ID NO: 817982 - DNA, 200 bp, Homo sapiens
tctaaagtgttaggattacaggcgtgagctactttgtccagtctcaattattgtatttcttttttggatttggtaggttgttcaatcagttagtctccctttctttccagcagtgtcatagcttgagggacctagtaatggcrgttagacagctgcctgttctaatcctggttacatagatccagaaggattcaaagtgt

SEQ ID NO: 817983 - DNA, 547 bp, Homo sapiens
cgtgagccatcgtgcccagctagacgtcttccttttttttttttttttgagacggagtctcactctgtcgcccaggctggagtgcagtggtgcgatctcagctcactgcaagctccgcctcctcccgggttcacgccattctcctgcctcagcctcctgagtagctgggactacaggcacctgccaccatgcgcagctaattttttgtatttttagtagagacggggtttcaccatgttagacaggatggtctccatctcctgagtttgtgatctgcccgccttggcctcccaaagtgctgggattacaggtgtgagtcaccgcgcctggccttttttttttttttttttactggatttctttttctcctgattttcggcctcagctcctagagtggcctcagctaggtaaccaacgggagtcgacttatctatgccaggcctgcagtttcacatctgtgacgggatgggacaaatgacaccgtggtattcgatgacagctcccaggtayttcaaggttggcccttactcattcagggggtatgttt

SEQ ID NO: 817984 - DNA, 585 bp, Homo sapiens
actccagtgtgtctaccttggaggcgctcagggctgcaaagccactgcgtggaagaggagtgggcccgggagctgcccttgtcagttctgacttgattgcatgtctcccccgacctctgtttctgcatctgtaaaactgagatgctaatttcagccctgatctcctcctagtgctctctgacacggttctgtgaactggcaaaggccttcaaagtcccggcagaaatactaagaattacaattgctaagacagaccaacagctcaccatgtgtcgggcactgttcttagtgaggagacatttccggtaggcttattgtatgccagaacagttatgaatgcttcccacaaattaatccactcagccttcacaataatcctatcaggtgggaattatcatcatccccatggcaccgatgatgaaatgagctcacaagggttggggagcctgctcaaggtcacacagccatggagtggcacggctggatttgaaccctgtgctctcactcgcttccatacacctctttacagaggctggaaaccagaacattgaagttctggatcckagctgggccaggctggggagc

SEQ ID NO: 817985 - DNA, 606 bp, Homo sapiens
ttcaattggacaatgctaggaaagtccaatcccagtagtgcttgcccggtgtcacagattagcgggtcagtgagtgtcatgagacaccwtttacacaaacactatccttaatgcctgtggcaacaaaggtctttgctttctttttttcttttttgagacggagtctcgccctgtcgcccaggctggagtgcagtggcttaatctcgcctcactgcaacctccgcctcctgggttcaaatgattctcctgcctcagcctcccaagtagctgggattacaggtgcctgctaccacgcccagctaatttttgtatttttagtagagacagggttttaccatgttggccaggctggtcttgaactcctcacctcgtgatccgcctgcctcagcctcccaaagtgctgggatgacaggcgtgagccaccgtgcccggcctaaacagctgtcttattggtacctatggaaagatcaagaagaaaagaggacagaaagggatataacagctagtcttagagactcctctaacaagattaaaaagcagaaatcagattactttttttgtttgtttgagactgagtctcactctgtcgcccaggctggagtgcaa

SEQ ID NO: 817986 - DNA, 623 bp, Homo sapiens
ttcagttgtctagttcacttgctacattatagctgaatgactgtcagtccagtctggcaaaagagagaaggtagattgttcctccgatatcctcatgagttttgccacatactgcatagaaagtctgatcagtgtaatttttactaaggagatcctgaggatataacaggaagttccttgggtaaatgacaatgtccatgtatctacatcatggaagaaagttaaattaatgctataaaaatggtgtggccgggcacggtggctcacacctgtaatcccagcactttgggagactgaggtgggtgaatcatgaggtcaggagttcaagaccagcctggctaagatggtgaaaccccgtctgtactaaaaatacaaaaattagtctggcatgatggcaggcgcctgtaatcccagctactcaggaggctgaggcagagaattgcttgaacccaggaggtggaggttgcagtgagctgaaattgcaccactgcactccagcctgggtgacagagctagattctgtctcaaaaacaaaaaacaaaaaacaaaaagcagtgtaataagtggaaatgtygactcaaagaatagacattaagagatttttggcctggcacggtggctca

SEQ ID NO: 817987 - DNA, 477 bp, Homo sapiens
aggggggacagggattcactttgttgtccaggctggagggcagtggcacgatcatagctcacagcagcctcaacctcccaggctcaagcgatcctcccacctcagcttcccaaataactgggactacagacgtgtgccaccacgcccagctaatttttgtattttttgtagaaacgggggtctcactattacccaggctggtcttgaactcccgggctcaagcgatctttctgtctcagtctcccaaagtgctgggattacagctgtgagtcaacataccgcgcccagcccccacgtagtcttttctttcttttttgagacagagtctcactgtcgcccaggctggagtgcagtggcatgatctcggatcactgcaacctccccctcccaggttcaagcaattctcctgcctcrgcctcccgagtagctgggattacaagcacctgccaccacgcccagctaatttttgtattttta

SEQ ID NO: 817988 - DNA, 649 bp, Homo sapiens
ggaaaaagggaggaaaaggggcaaagcgctcatgccatttgttgagaaagtttctaggccaggtgcrgtggctcacgcctgtaatcccagcacttcgggaggccgaggcaggaggactgcttgagcccaggagttcgagaacagcctggacaacatggtgaaaccccgtctataccaaaatatacaaaaattagccgggcatgatggcgtgcatctgtggtcccagctcctcaagaggctgaggtgggagaatctcttgaacccaggaggtggaggctgcagtgagctgtgattgtaccactgcactccagcctgagtgggagaataagaccctgtctttaaaaaaaaagtttcgggatgttttcccgtaacatttccactcctcccctgctgaccaggaagtagtcttatgaacagccgtgaggaaggctaagaggtgtagactttattttgggtcgccctgaccagatatatttggagttctgttactgttgtagcaaagggaatagatgttggttgccaattaatggtttgccactaacagtggagacaagagcatgtccttcgatgttgttggagtgttggacacatggaccactgagagcagcctggccagcgtcgctatcgctcagtaaatattagctcttgt

SEQ ID NO: 817989 - DNA, 634 bp, Homo sapiens
ccctatagatgggccccagataggatttaaatctggtcctattagcatcccacatgtaacctaggcttgatttaggcttcctcagtatcctgccacactccacaataagcattaatgagtgagaccctgtctcaaaaaaattacaaaaagaactaagagggaggcctcgatatgctgtgtgaccttgagaagtcattgcacctctctgcacctcagttttctgactcaggaaatgcctatctcacagggatgctggtgaatggatgtctggtgaatggtggtatctgcccgtccagcatccatcctcctcatgccttccccactctcaatccaagtagttgagtgggttctcatcccctgctccagagctaagcatatgaccttaaacctatgcaatcaagctgcagtgactggataagaaattggtcctgtgacccaggccaggcaaatttaggggaatcctggaaattttcctggaactacagggaattttccatgggggttgagyttctgggatttatctttagcagcatgagagtgaaaccatcacagagggatacaaagctaagagatgaagactggcattatgatggcctggatccagccatgcctgaagaccacccttcctggactt

SEQ ID NO: 817990 - DNA, 493 bp, Homo sapiens
ccggtcgagactcggtcttgaaaaataaaaaagaaaaagaaaaagatgtttagtgcagccatatcatagcaggactcaacatccttgccaatactatgtgttagatataagagaataagtacattctatgtctttgtactttaaccaagatatttgtactagacatgctcacaggcacatagtacattctacgtccttgtactttaaccaagatatctgtgctggatgtgctcacaggcatgtcccagctcgcagcccatgccctttccttatttggaaatattattgcttttctaagtccttttgtaagcaacttcctcttttcctttgctctctattgcctttacctatttaggaaagttttaaattattagccagtcrggtttaatttagattgtgaggtcttgcttcagccaatggagacaggacacagtagcaaggacaaactgcataagggataaaaattgcttccctcctttgttcaggtgtgctc

SEQ ID NO: 817991 - DNA, 644 bp, Homo sapiens
gggaagctaaggcaggaggatcccttgagtccaggagatgagaccagcctggccaacatagcgagaccctcatctctataaaaaattaaaaatagaggccgatgcgggtggatcacctgaggtcaggagttcaagaccagcctggccaacatggtgaaactacatctgtactaaaagtacaaaaatcagccgggagtggtgacggggacctgtaatcccagctactcgggaggctgaggcaggagaatagcttgaacctgggaggcagaggctgcagtgagccaagattgtgccactacactgcagcctaggcaacagagcgagactctgtctcaaaaaaaaaaaaaaaaaaaaaaaaagcctgtaatcccagcactttgagaggccaagacaggtggatcacccgaggttgggagtttgagaccagcctggccaacatgctgaaatcccgtctctactaaaaatacaaaaattaactggaagtggtggacgggcacctgtaatctcagctccttgggaggctgaggcagragaatcacttgaacctgggaagcagggctgcagtaagccaagattgcaccactacactccagcctgggtgacagagggagaccctgcctcaaaaaataataataataaaataa

SEQ ID NO: 817992 - DNA, 579 bp, Homo sapiens
acctagagtttatactgtactattttaataaatgtaaaatatgaaaaccttgctgttgaagagttacaattacttccttctattgtttgtgctattcatatattttacatctacacatatatctcacaatactgtgttataatttttccttagtcataagtcttataaagaaattgagaggaaatagtatttataaatatttggaggtagatactttggggctattactttggggctatttataaatatttgaggcagatactttggggctaacagaaacactgtttctcctttaaattttatccacaatgtttgcatttttaagtacatcttgtctacagtaattattactgtggtgtcttagtggtgattttctattttgcattatcttctacattgattagtatacttggaattttctaaagaaaatttttttcttttttctactgcyttctttctttctttctttctttctttctttctttctttctttctttctttctttctttctttctctttctctttctctttctctctttctctttttgagatggaatttcattcttgttgtccaggctg

SEQ ID NO: 817993 - DNA, 639 bp, Homo sapiens
tgggcccagcattttgtaacaatcacagctgtgggcagcacctattcagccaagagcatagtcacttcacccaggtgatggggccagagatatgtcacaatgcccctataaggggttcacccaggtagtagagaagagtcacctcgcctagttctggggcccagtgatattttttatttttttgcatgtaaggcacaggaaaaaagtcacatcacctaggttctgggttcagtgatatgtcacaattcttcctgtgggcaatgcataggcagaagagtcacctcacctacatgccagatacagtaatatgtcacagttttccctaagaacagggctctggcaggtaaaaagactcccattatttgggtgatgagcacaaagatgtatcacaatgccttttgtaggcgggcaaggccaggcaggagactaacatcacctgggtcctgggctcagcaacatgtcacaatctccccttgggcattgcccaggcatgaaaagagagttacatcatctaggtgatacatccaaatatatgtcaaaatttaccatgaaagcagggcctaagagaaaatagcgatacattacctaggtgctgggtccagtgacatgttacawtcccttctttgagccagaaccaga

SEQ ID NO: 817994 - DNA, 527 bp, Homo sapiens
cttgctaagaatacatgtgtagcttatagctgtgcaagaaaaccataagrgttttggttaaattacctgttgttatatgttataaagtagacataaaattggccaaaatagattaaaattctacaaacatggagtcaagtttctcttgactccagataaacttggaggcttaggaaagacagacctggaaaaaacccagtaaaaggctaatcagaagctcagaggaaattgcaaccatttgccctttatctacctatgacctggaagctcccgccccacttcgcgttgtccttttctgaacaatgtgcatcttacatatagtgatggatgtctcctgtctccctaaaatgtataaaaccaacatgtgccccaacaaccttgggcacgcattgtcacaacctcctgacactctgacatctcagatactttgggctcaaattagtaatttcaggtagaaattaaaattcttattaaaatagaaacaaacaaaaggactaaacagagaaaaactaataaaagtgtgctca

SEQ ID NO: 817995 - DNA, 311 bp, Homo sapiens
cacatattataaaatccaccaatttaaaagatacgattacttagttttagcattgaattgggtcattcttgcattgctataaagaaatacctgagactgggtaatttgtaaagaggtttaattggctcacagttccgcaggttgaacaggaagcatggcagcgtctgcttctggggaggcctcaggaaacttacaatcacggcagaaggcaaaggggttgccagcgctttacatggccagagcaggaggaagagagaygggggaggtgctacacatacacacttttaaacaagcagatctcaaaataataa

SEQ ID NO: 817996 - DNA, 604 bp, Homo sapiens
gtagcaggcaaggcgggggagagcatcaggacgaatacctaatgcatgtggggcttaaaacctagatgacgggttgataggtgcagcaaaccaccatggcacatgtatccctgracttaaagcaaaataaaacataaaaaattacaactacctccaccaaaaaaaaactgggggtttccacggccccctcctcaggtttgataatttgctagaacggctcacagaactcagggaaacactttccttactattaatggtccataataaaggctgcaactcaggaacagcccaatggaagatgctgaaggaaaggtgtgcagagagggtgcggcgtttccctgcctcatcaggtgtaccacccgtgttcacctacctgaaaactccccagatcctgtttaggtttttatggagattccattatgtaggcatggttgattaaatcattgcccattggtgatcaattcaacctccagcccttttgccctccctggaggtcaggagttggggctacaaattccaatcctctaatcagatggttggttcccctggcaaccagcccccatcctttggtgtttttcaaaagctacttcattaacataaactt

SEQ ID NO: 817997 - DNA, 501 bp, Homo sapiens
tggtcgtattccaaaaataattaaacagaaagtggaggttaagaccacagtgctgcaaatgctcattccatcacaatcattcttgtgaaaaatagaaataatgggtcagaaggtatttttagagtacttttcttatgctattgctgtgaaattattgtcttttttactttccatatgaaagtctgtacttgaacaaaagatgccatgaatttcaagtgaatatgctcacacatttattctccctagaagggcactgatgtgtttgcagtcaaagcgtggcctttcttgccttacttgtgctgctgtgtttgtgtgaaataaaaaggcagcaagtaaagaagaatcaaccatgacatttctaatttcaacagycacagcctctgtaattgagtgttaatgtcacctagaaataatgacagtatttcaaaactgagaaaaaatgatactttatatttttagtttattatttatagtttataaacatttatagtttctgattta

SEQ ID NO: 817998 - DNA, 661 bp, Homo sapiens
agtaataatttcacctgggtactggatcctgtaactaaactctaaatgtcacacaagggctttagagaatatgcttgagtgtcataatcttttgtgacctttcctcacccagaactttatgctttttcacccagaaccttatccattgccctaagcctagaaaacagaagccaaatctcccctattgactgggtccatataggagggctatcattacacacacctctaaacttggcctagatatatgtcacaatagctcctgtgagcagaaatcagacagtcacatcactttggtgcttggccaaagatatgtcacaattccactcataaacaggacccaggaagatgtgtcaaaaatggccactgtacgcaggagtcacatcacctgggtgcttggcccagctatatgtcacaatctattctgtggaagaatacaggcaggaaatgagagtcacatcacccaggtgctgggcctagttatatgtcacaatcctcctgcaagcagagtcaaagcagaacacaaaagtcatatcacggaaatgatggacccagtgayatgtcacaatccccactgagggcagggcccaggggaaaaaaaagagtcaaatcacataggtgatgggttcaggcatgtcataatgccttttttgggaacagccta

SEQ ID NO: 817999 - DNA, 506 bp, Homo sapiens
ttgttcccctaaccacagaaccatggattttaacattaccacttcagtttgtaactcagtgttaattttacactgaagtagccatgcttagttggctgcatgcttccagtcctctacatactgagccatttgaacagaactatgcaaagctacagaggacattacagcagaagtgattagtgtgaccaaagaaacaatagcaaaaattatgatgcctgaggctctacaggcatgatgagtaagtttagttagaagaagtttcacaaagtgccaaacaggggtggcatcacaaggctcagacagattaatgagaatccatagcccaggaatgtgacccagatatcaaagtagagatattacatgtttgcaatgtgctatgattaatgcagtgatataaccagcaagatttaaggtcaattgagtattgcttacctggagctggtccgccttagctgccaaaaagacataaggattaaaaccacaamccataaattgagtggtgatat

SEQ ID NO: 818000 - DNA, 573 bp, Homo sapiens
ctcctggcctcgggccttttccaacacgtgcaggtttgcttggggtctgcctccaatgccttgagtgtcactgttttgttttagtggtgatgcctgctcttggaagcccacttgggcctaactttggaaacaatcctctggttgtactcagctcacagagctgtttctcaaacacgacttcacctaggcttgatcaaataccagcttcaccacttcctaaacctaatcctctgcaggtcctggtagctttgttcatagagcagttctttggattgaaccagaaaatgtatacaaataatttcacaccgtgtctggcatctggtgtatgctgaatacaagttggttgcttctggggatcctcgatccaaccccaggaagtctagaaatgattctccctgatttaaaggtgtcatagagactcctcagagtagagagggctggaatctgggtctctagttcactgttccctcctttcacaggattcccttgctgttcaggaacgtaatgtctatatgaatatcgttgccaraattgtctcaggccatagatatatcttcactttccgtgttgagt

SEQ ID NO: 818001 - DNA, 623 bp, Homo sapiens
aaaataaataaataaataaataataaataaataaacctgcaagggatgcagcatgtcaggaacggatataattttaagtgcttctaactgaaatatgtagattgatagctgaatcacaaggacatctcaacatacatacgtttattcccacactttcaaccgtgtactcaacacacctttcctcagcccacagtgagtccggtcttccctctgggaagccgaggcaggggtgctccaggctgctccacgggagatcgggggctcctcagacctcccctccccaggcctagcgattcagtgtccagcttcaggtcaggcccggccccactccccacctgtctttctgtctctgtctttctctaggggtcaggcggagctccaccagtgtctccaactcaggtgctggaaaccagtcacagcactgggcttggtgacaccaggccagggacctagcagaccctgtgtagagctgatttcttgctcctctacacagggggtggggctgctgyccttcagcagagcctcggctttcatttaaagccagcagtttgagccctgccacaggacatagtcagagctttgccgcagcctgctgctcccggggaggcttccctgattgctgc

SEQ ID NO: 818002 - DNA, 527 bp, Homo sapiens
gcaatcttctctaggctttgtggtctttgtgtcactctgtctcctctgtggatttttcattatgggcgtaacaattactggattgatgcgtcgcctttgaaagccttgttggaagygtgtcgctttggagaaatgtgctcaggggaagccttgaacatgcattatccgccccccaggtaggcaggcccctgtcttgagagcacacagggcatcttctcactccttagatctcctgagaggtgcctggcgctggggtgttatcaaccatggtgatgtgatgggagaggcgcaccagggagtgcagggaagagcaggctgacttctggctctacgaagctggagaaccctgctagcatagcacaaagagcgccggactgggtgccaggacagcgggtcccaggcttgactctagctgcgtgtcatttggcattgcttcctctctcagtgtcctcatttgcataattaggagacagaatatttttccaagagttgctcattcattcatttaagaatattgcagaggccgg

SEQ ID NO: 818003 - DNA, 555 bp, Homo sapiens
aggctgaggcaggagaatcgcttgaacccaggaggtggagcttgcagtgagccgagatcacgccactgaactctagcctgggggacagtgtgagactctgtctcaaaaaaaaccaaaagaagaaaaaaaaacccataaaaccaaacaaaaaaaaacttgtggatctatattttctgaggcctccaaatacttcagcaatatgacaaataattcagtagagtgggaaaacctatgttatttgcacagtaggcatgtttaatactttaacttcctgtgggcagggtttcattgggaaatgtaatcaactcggatcacctaaaatggattacgtggccctaaaccaatcatggggcagtgcaggaactggaaatggggcctggagtccttcgacttctccataaataggcgcagttcagctccaggccagttggagagtgcatcccagatgcgagaaagttggaggcataaggcgggaaggaggtaagtgtccagaggccatgtctgtggggtttaggagctggcatkcaggggggttagtttcagaaagatttgggt

SEQ ID NO: 818004 - DNA, 599 bp, Homo sapiens
actggattttccctttccacagggtaaaatcagccattaatgaatgagcatcaacctactaggccaatgagaatgtgcactaagtgtccctacctgggggtcctgtgtgctatatactcccagaattgaatactaacccgcatacctgcctttattttttcccatgttccattgcttgctttaatgggaaaagaactgagagtgaatacacggtgatttctaggaacatgaaaccacttttttaagagacaggatctcactatgttgcccaggctgttatcaaactcctgggctcaagtgatcctcttgccttggcctgagcagcagcaggcgcccttgcagcaaagccacttttaattccagaattttaggctctcttttctctctcatatttgtatgcttttttcaaaaaaaattaatttgctttcaaattgaaaactaaaaattgtatacaattgggcacagcataatgtgctttgtaggatgtgaacrctgtaaaatggctaaattaagctgctattcacatgccttactttatgtactaatcatttttggctgtgagaatacttgattgaaatctactcttttagcaatttcca

SEQ ID NO: 818005 - DNA, 588 bp, Homo sapiens
gttggtctttctgtctcaggggtggcagaggcagaagaaaatscacatctaagtggataagtgtaaccatgtagttcaaacctgtattgttcaagggtcaacggtgtgtgtatgtacacatatacatttacatatttatataaatatatatctgtaagattaatttctgaaactgcaaagttaaagaagggtttctaacactcgtgccactacaatgctatcgctgtattgatctttgtcaaatttatgtgacaaactacataaaaatagcgtcccatataaagatcgcactccatataacaacaggcaaataaatgttccatgaaggaataaagaaatgcatgtaaaaattaacagagatggatgatgttaatattaattccactctcttccttgaattttccatgttgattcactggctcctggctctgctgccccttccagtcaactgtaagtcatatctccttctccctacataaatggggagcccgcccttcaacctagagaaggaagggaatgaaagagagaggcaaaactgctgacgatcacattcaacctggggcagattcagatgtcctcaattcaaac

SEQ ID NO: 818006 - DNA, 507 bp, Homo sapiens
tccggatcctcaagcctgtgtgcacgcgagcagccgagggacagtgtgtctcagacrgcgtggcagggacggggcgtgtccccacggaggtgggtgcagttgtgaatgtgtgacgggctgacagggtgcgtggccgtatttgtaaatgtgatttgctttgaccaaatgctctaggttccctttagcctgtcttcgggcctgccacaattaaatgaccgcaagaaagaagtctatgctaagccccataatgaacgtttcaagcaagaaggatgagaattttagatctggaagtgtccgcgggacaggatcttgtcaagacctgatggggaagttctagaggtgggattcctagaagaggggcctctaggagctctttggtggtgagctacatgtttcagagccattgcaagcagacctctgtccccaagaattgccctcaacacagagacagactctagcctcccttttcattccgtttggttttgtgtggatgaaggcagaagtggc

SEQ ID NO: 818007 - DNA, 591 bp, Homo sapiens
agggctggagctgtcagattttttcaaactctttttgcaaattgtatattccttattgtatgtggtcactgaaatttctgttccatcatctctacagtcagttagtaccagacaaagatttacttaaatatctggctgtaaaaaggggaggaaaaaaaggtccattagccctttaaatcttccaatagatacttctggggaaagctgctgtggctgatggggctaaaatcaaggcagttatctgtgctggtccctcaaggtaacacaaaacccaccaaactgcacaaccctgaattttttggaagacaaggtcacgctgcccacccaggtcccaaccggctgttccaggaatacaggctgctctccccacagctgtggtggagctgaggagtgaaggaagtgattagttggtacacagcattccaggcacataggcctgtcatcccatagcattggctggactgagaaatgggggatggtggcttgcacragccactctttcacctaagaatagtagcctctttattcatccagcactccccttgttgttatggaagtgcctgataagattccagaattaagagtttgtgg

SEQ ID NO: 818008 - DNA, 598 bp, Homo sapiens
gatttattgagtgttagcacagttcctttaaggagccttcatagccatgtagtactagccaagatccgcataaaagacgcatcccagcatggcccctaaaatccttcattatgtgytcttaagaataatgtgttgggaagtcagaacttccttatagggctgttatgatcatacttgtacatgtcttttggagcacacgtgtacacatttctttctgtatatactgggagtggaattgctggggtgtggtcatggatacacatctgttcaactttttagtaagtttaaattcttctgaacagttttccaaacaaatgaaccgtcttatactctcaccagcagtatatcaatgttctgctttctccacatctttgaaaatacttgacatcatcagtttaaagaatattttcattactctcataggtaatatagtggcatttgattgttgataattgtggtttaattttccattttctgattgctgcctatttgtatattcttgcaatttctcttcgctccttgctccgggcattggatgcattcgatgtgtctgttttttacagagcctctgttcagtttgcaggacaacaattaacac

SEQ ID NO: 818009 - DNA, 442 bp, Homo sapiens
cgggacgtccatccctgtctgctcacacctttcttctctccctagtcctgccagcgactcccccacaacttgtcagcccccgggtcctagaggtggacacgcaggggaccgtggtctgttccctggacrggctgttcccagtctcggaggcccaggtccacctggcactgggggaccagaggttgaaccccacagtcacctatggcaacgactccttctcggccaaggcctcagtcagtgtgaccgcagaggacgagggcacccagcggctgacgtgtgcagtaatactggggaaccagagccaggagacactgcagacagtgaccatctacagtaagaaggggcaggggcggagtggggcttcttgggggtgtgacctgaacccggggcggggctcactgtgtgcctattccaggctttccggcgcccaacgtgattctga

SEQ ID NO: 818010 - DNA, 262 bp, Homo sapiens
ctgtactaaaagtacaaaaattagccgggaatggtagtgtgtgcctggagtcccagctactcgggaggctaaggcaggagaattgcttgaaccctggaggtagaggttccagtgagccgagatcatgccattgcactccagcctgggygacacagcaatactccattttaaataaataaataaataaaactaaataaataaatggagtagtcttgtgtgtactgatgggaaatggtcttcaacatattaagttgaaaaagta

SEQ ID NO: 818011 - DNA, 262 bp, Homo sapiens
ctgtactaaaagtacaaaaattagccgggaatggtagtgtgtgcctggagtcccagctactcgggaggctaaggcaggagaattgcttgaaccctggaggtagaggttccagtgagccgagatcatgccattgcactccagcctgggtgacasagcaatactccattttaaataaataaataaataaaactaaataaataaatggagtagtcttgtgtgtactgatgggaaatggtcttcaacatattaagttgaaaaagta

SEQ ID NO: 818012 - DNA, 498 bp, Homo sapiens
tatttcctttttaaccataggtctcaaagggcttaaaaatatcccttcttagattttacaaacacactgtttccaaacttctcaatyaaaagaatagtttcactctgtgagatgaatgcacacatctcaaagctgtttctccaaaagattctttctggtttttatctgaagttatttccttattcaccataggcctcaatgtgctcccaaacatcctttcccagatcctacaaaaacagtgtttccaaactgctcaatcaaaggaaaggtttagctctgtgagatgaaagcacacatcgcaaactcattctgagatatctttctggtttttatctgaggatatttcctttttcactataggcctcagtaggttcccaaatatctcttcccagattctacaaaaacagtgtttccaaactgctcaatcaaaagaaatgtttaactctgtgagatgaatgcattaatctcaaagcagtttctcacaaagcttctttctag

SEQ ID NO: 818013 - DNA, 548 bp, Homo sapiens
gagtctcagagagggcaggcctctagcccaagttacagagctcacaggaagccaggtttgtgagatcctcaagcccaaacctttttcctctgccatgctgttctgcacccattcattagggtcaatgccatattaatacagggacatgtataaatggaggaatctcaggcaatgtcatggtcccagaggggaaatatcttgaggtctttgaatcagcacctggctcctcctcccacaccccggatgctccacccagcagacccagggctcccctcctggccctccttgtatcctgtccagaattgccctgccgggtggacttgggtgagggggtgcttgaaggatggggctcctagcacagctgctaagcaggagggcagggaagacagtgctcctgacactggctgggtgttggggagccccaaagcctcccccaccccaccaccactgccagctcaatcarccaggggattcaggctcctggccctacagcctcagtggggtagggtgcatcccccaaaatccctactccctctgcaaggacagac

SEQ ID NO: 818014 - DNA, 554 bp, Homo sapiens
tgaattattgttaattaaattccatagtttatattaggttatactcttcgcattgtgtatatggattttgacaaatgacatggattcattattactgtatcattcagagtagtttcatgtacatatattttaatgtgaccacatggaattatgctagagagttcatcctgttttttgtttttttcactcaatattattttaaaggttgacttatattactatgtgtgcatctaactcctgccaaaagctctatatcctttttcctctatatccgttgtttgcctctatataattttacctgccttctctccaattaggaacaagcaggcttatccaacacctccactaaaataactgctgcagggaacattctcttacatgaccccctataaacaggtttcagaagtcaagatagatacacagtagcaaggttgctggtacacagagcatgaatcccattaaaaattttaatttctaccattctacmtgcccactaatagtgcaaaagtatttcttttattattattatttgagacagagtctccctctgtcac

SEQ ID NO: 818015 - DNA, 550 bp, Homo sapiens
cgggattatggactctgagggaatatgtataatttttatgcactatgtttattggcacatttgtgctaatagccaataagatgatattgctgtcttaataccatgcgagtctctgtgactctgtggctaatgagtgggggcctctgagtacctgactgaggcggggaagggggcaacatgggctccgggatatggggtacgatgctgagaatccaaatactggcttggcagattgtacccttataatatggaatatgtaatgcagagaggaaatccgggtctaaccagggaatggaaccaccagggaaacactgacattgcctttacagcaaagtgaccgtccttgggagacaaacaacaatcccaaagatatttagtcctcaattaaataaagccatgtcctcctgattggcttccagcgacccttctgctcccaggarccggagattttgctttttgcgtgaatttatggctacttctggacagataacaagatgttagacagctgaccctccaacttggttctagcttctctctgtgaatttcatgt

SEQ ID NO: 818016 - DNA, 649 bp, Homo sapiens
tgacccacttaacctctttgagactcagtgagtgccctcatgccaaacagggatagtaaaacctatcctgctgaagcccccaygggagcgggatcatttctctgtccagcctttaacacccctcagcatggggcctgcggcaccagctcccaaatgaacaatgacagaatgagtgttttccctccaacggcgccaggaggggtcagggatcggggtagcagcgtggtgtttcccccttctgggcagcggaggggccctgcttggccagccattcagaccccaccaaccctgcacctaggattggatgagatttcctgcccaggggttggagtgagatttgctgccacagctgcctgagccccaggacgaaggggaggctccgcctagcgggtattggacgccccagctgcctgagcccgggagccctgggatgaagtaggggctgcccatgccaaccgcagttcccccaacctgcccgccgcctagggggaagcaccaccccctgcccggggagaggaattcactcccacagggattctcctgctcattactcgacccacgcgtgagccaggcttcgctctctgccaagatgacacgtctaagaggcttagtcttctttatgctgtggatcctgaggaaatccacttag

SEQ ID NO: 818017 - DNA, 617 bp, Homo sapiens
ccaataatccccattttacatgcaaagttatgataggagagggggaagaggggaaagggaatggagcaacaggatctggggcaatgggacaataggggatgggatgtgtctgggtgagacccaaggtggggtatggatggggagagctcctgggtctggggcaagagggaggttattggcacagagatagggtgattaggagtgggcacccctgggaccggaccaggtgcagtggctcaagcccgtaatcctagcactttgggaggacaaggtgggcagactgcttgagctcagtagttggagaccagcctggacaacatagtgaaaccccgtttctactaaaatacaaaaaaattagctgggcgtggtggcatctgcctgtagtcacagctacttgggaggctgaggcatgagaattgtttgaacccaggaggtggaggttgcagtgagcagagatcgtgccactccactctagcctgggcaacagagcaagaccttgtctcaaaaaaaaaaaaaaaaaaaaaaaaaaaaaggagtgggcagccctaggaccttaggttgcttgrggactggattggggatgccatgtcggagcacagagatctgggaagctgagt

SEQ ID NO: 818018 - DNA, 592 bp, Homo sapiens
cctttgagtgacagatcgtgaaccttgattctggatcccggggcattcgaatytagaacccacaataggagcctggaatctggtgtttggaatctggcaatcgaggctggaaacctttgcacctgctatgagaagcctggggcctagactacaaatggtagatttgggattttgaattgtggggtctggattctttttttttttttttctgagatgaagtttcgctcttgtcacccaggctggagtgcaatagcgtgatctcagatcactgcaacctccacttcctgggctcaatagattctcctgcctcagcctcctgagtagctgggattacaggcgaccaccaccacgcccagctaatttttatatttttagtagagacagggtttcaccatgttggccaggctggtgtcgaactcctcatctcaagtgatccacctgactcagcctcctaaagtgctgggattacaggcgtgagacaccatgccaggcttggggtctggattctacagggtggatctagcctctgagctttcaggagtagactttggaacatacagtctggagtttcaaatctgtttttgcattgaaa

SEQ ID NO: 818019 - DNA, 514 bp, Homo sapiens
ccatcagagaagctggtctctcattccagaccccaaagcctccaggactgctggtttcctgtgccccatctgccaatattggataggaagccacctttcaagtccacatggcacagcaggagctagagtgtaacgttccttggttttgtctttggttttgtggatctccccttgtgtccttagctgtctgtccctatttacagcaaagagaaggtgatcatgttaaggagccagtccagtgtcccctgccactgggcacttatgttttccattagatctctcctctgaacagaatgcttgacaggtatctccggacacactagggtgagggcttgtttacttgctacatggcttcagggtaactgggaaaagacctgccatcagacatgggggccytgacatgccagtatcaacaggaaacatccctgggccattggtgtcacacagtagcccaggttcacacacacacacacacaaacacacacacacacacacacagctataagcaagagta

SEQ ID NO: 818020 - DNA, 474 bp, Homo sapiens
atgaaacaagcaaaaaaaatactgctgttattttgagacagtgagttagcattttgtscaaatatgtactatgtaattttttattgatatgtaacatgcatagagaaatacatgcacaaattcttcattcaagtaaagctcagtgaattatgaagaatacacttgtgtaatcagataataaaactaggctggacgcagtggctcatgtctgtaattcagtacattgggaagccaatgcgggaggattgcttgagctcaggagttcaagaccagcctacccaacatggcaaggctctgtctctattttgaaaaaataccaaaaaaaaaaaaaaaaaagatccaggcaggctggttgcatgcctgttgtcccagctactggggaggctgaggtgggaggatcacttaagactaaaagtttgaagctgcagtaacccagcattcagccactggactccagcttgggtgacagagtga

SEQ ID NO: 818021 - DNA, 505 bp, Homo sapiens
gtgagatactaacacagagaaaacacagatgtggctgtgttttcactgaacttttggcacttaatcctgttttraattaatgatggcttccattttttagtctttcgagggaaaaaatgcaagaaaactgattatttctacctgccgcaagatactttgtcagttagcaccaaacctggaatctagactcctcttgccaaaagccagtgtcttctaatacccccaataatgcaaaccagcaatgcaaagaggaatggaagatttcatgccccaatctctgaagaaaaaaaaaagagtagatgcaaggttcctggggtccgggtgtgcttggtttactgccgggacagcagggagcccattgggctatagggtcaaagaatgaatttggggatgaagtatagacctggccacgcagccctgatgatcacactagagtctatactgtatcctaagagaaacagaaggtttaagtagagggatgatttttcagagtttccctttagaa

SEQ ID NO: 818022 - DNA, 658 bp, Homo sapiens
cagtttatcaattttgtctttttgaaaaatcaactrttctgttgatcatttttattgtttttggtcttaaattcatttggttctgttctgatttttgtttttttttttcttgtaacttggaatttggtttgttattaattttctagttccttgaagtgtgatgtcaagtccttaatatgtaagctttctacttttttgatgcaggcatttaggctataaactgctctctttgtactatatttgcatatctcacaggttttattatattgcatttctatttccatcttttttcccacaatttttaaattttcattttaattttctttttgagatgggttttactctgtcacccaggctggagtgtagtagcacaatcttggctcactgcaacctctgccttccaggctaaagcgatctttttatttcagcctcccgagtggctaagactataggtgtgcaccaccacatttagcttttttaatatgtattttttgtagagatggggtttgccatgttgcccaggctagtctcaaactcctgacctcaggggatccacctgcctcagcctcccaaagtgctgggattgcagctgtgagccaccacccctggccggccatcttaattacttcatttacaccgtgactgttcaggagtatgt

SEQ ID NO: 818023 - DNA, 568 bp, Homo sapiens
tcgtgccattgcactccagcctgggcaacaagagtgaaactcygtcaaagtctgttttgttttgttttgtttgagatggagtctcgctctgtcacccaggctggagtgcagtggtgcaatctcggctcactgcaagctccatctcccagattcatgccattctcctgactcagcctcccgagtagctgggactacaggcgcctgccactatgcccaactaattttttgtatttttagtagagatagagttttgccgtgttagccaggatggtctcgatctcctgacctcgtgatccaccccccttggcctcccaaagtgctgggattacaggcgtgagccaccatgcccagcaaaaaataaaataaataaagtattgatgtttattgctggatttggtggctcatgcctataatcccagggctttcaaaggctgaggcaggaggatcacttgaggccaggaatttgaaaccagcttgaaaaatatagtgagaccttcatctctaaaaataaaaaaattaatcaggcagggtggtgtgtacctatagttctagctactcaggaggcaga

SEQ ID NO: 818024 - DNA, 582 bp, Homo sapiens
gatatgagatttggcaggagccaggggcagaatgatgtagtttggccctgtgtcccctcccaaatctcatcttgaattgtactcccataattcycatgtgttgtgggagggacctagtgggagataatcgaatcgtgggggcggtttcccccatactgttctcgtggtagtgagtaagtctcacgagatctgatagttttatcaagggtttctgcttttgtgtttccctcattttctctggccactgccatgtaagaagtgccttttgcctcctgccatgattctgaggcctccccagccatgtggacctgcaagtccaattaaacctctttttctcagtctcaggtatgtctttattagtagcgtgaaaatggactaatacagggtccaacgtcatcattttgctgtggatatccagttttccgcagaatttgttgaaaaacacttgtcctttcccatttaatggtcttggcatccttgtcaaaaatcatctcactgtatattaagggtttatttctgggctctccatgtcttttactgatctatatgtctgtctatgtaattttgacctcaaggttcctt

SEQ ID NO: 818025 - DNA, 568 bp, Homo sapiens
cttgcgggtcacccaggctggagtgcagtggcgcgatctcggctcacggtagcctccacctcctgggttcaagtgattctcctgcctcagcctcccaactagctgggattacaggtgtatgccagcatgcccagctaatttttacatttttagtagagacggggttttgccatgttggccagggtggtctcaaactcctgacctcaggtgatccacccacctcagcctcccaaagtgctgagattacaggcgtgagccactgcgctgggcctattattattttttgagatagagtctctctctgtcacccaggctggagtgcagtggcctcatctcagctcactacaacctacgcctcccaagttcaagtgattctcctgtttcagcctcccaagtagctggaactacaggcatatgccaccacgcctggctaatttttgtaattttagyagagatggggtttcaccatcttggccaggctggtttcgaactcctgacctcaagtgatctgcccacctcagcctcccaaagtgctgagattacaggcgtgagtcactgtgcccggtcc

SEQ ID NO: 818026 - DNA, 452 bp, Homo sapiens
ttcatcctcagtacctttgcacagtccctgtttcttttttctttttcttttcttttgtgtgtgtgtgtgtgtgtgatggattcttgctctgttacccaggytggagtgcagtggcatgatcttggctgactgcaacctccacctcctgggtgcaagcgattctcatgcctcagcctcctgagtagctgggattacaggcgtgcaccaccacgcccggctaatttttgtatttttagtagagacgggtctccctatgttgcccgggctggtctcgaacccccggactcaagcaatccgcccgtgtcaggctccgagtgttgggtttacaggtgtgagccactgtacccagcctgcactgtccctgtttctgtgtggtacgttctctcttcagagagacgtgaaagatagttctacttcagagtggatacactgggaggatccttgatgccttg

SEQ ID NO: 818027 - DNA, 452 bp, Homo sapiens
ttcatcctcagtacctttgcacagtccctgtttcttttttctttttcttttcttttgtgtgtgtgtgtgtgtgtgatggattcttgctctgttacccaggctggagtgcagtggcatgatcttggctgactgcaacctccacctcctgggtgcaagcgattctcatgcctcagcctcctgagtagctgggattacaggcgtgcaccaccacgcccggctaatttttgtatttttagtagagacgggtctccctatgttgcccgggctggtctcgaacccccggactcaagcaatccgcccgtgtcaggctccgagtgttgggtttacaggtgtgagccactgtacccagcctgcactgtccctgtttctgtgtggtacgttctctcttcagagagacgtgaaagatagttcyacttcagagtggatacactgggaggatccttgatgccttg

SEQ ID NO: 818028 - DNA, 537 bp, Homo sapiens
atttttgtttatttgcttttgcttctctctgcccaggtgagtatcatccccacaaaacaagaatcctgcctggtttgttaactgctacaacctcaatgcctggcaaagaacagatgctcagtaaatatttgctggatataaatccagctaagccaagattccattggttggttaatattttgcacccaagggccagatcttacatttactattattaaatattattgtgttagattcaactcatcattcctgtccactcaaatctttgagatcctgcttctgtcattcagcatatcaccatccctggctgtctatggaaacttcataaagctgctgccacatcttttccaagccagtgacgacaatagcagacaagggctgtctgttcctgcagacaaccctyttcctgcttcctttgtctcattgctgatcaagttgtaaaactcagggtttagccctggccccctcctctacataccgcccttttgctaccccactctccaaaaggaggaggcacaaaatacactatgggcttgg

SEQ ID NO: 818029 - DNA, 588 bp, Homo sapiens
ttctaaattatagtgagttgtagaattatttcattatatattacaatgtaacaatacagaaattaaatgcataataaatgtaatgtgcttgaatcatcccaaaaccatccccccaattctagtccgtggaaaaattgtcttccacgaaaccggtccctggtaccaaaatggttgaggactgctgacagagagggtatgcaggcctctatatgatcccagggtttcagagtcccttggctgctggtgcgtgatgacattttgtaccaacacactggtgtgccagggctcgtactgactcagagctgcagcgtgtcacttctctgcatgactcttacacctgaagcaatgatctgggtgctatgtctctctgggtgcctgtccaaaagtactgccagtaatgtgctcagggaggggctgcagtccccttggtcatgctgttccaaagcacacatcaatggaattcaatcacagggaaggagaaaaggccagtccctccctttccaaatagtccatcactgagaaataaactgcatcaatttgatcaaacctcaacatttgtgaaagcagaggtyccaaactcaaaaagcc

SEQ ID NO: 818030 - DNA, 517 bp, Homo sapiens
agctgtatcctcatctggggcatgtctactggtctaacatggaaaggtcatgattccatgagcattgggatttcgtctttcaatgggattstaaacaggaagaggctctccaacaaagagacattaaaatactctgccttccaaaacattcagatagatgcaatcactagaagagaataagattggttcttctcaggaaaaaaacataaacataactaagtcaggttaaagtagtggttttctcattttcttgactgtgacccacagtaagaagtgcagttttaattaggacaagaaacaaatacaacacacacacacacacacacacacacacacacgattttgcctgtacacacaaatagaaataaaagtttcattaaaaaatactaaatccaattacacagtaaacactagaacccaggtctctgaccctctgatatttttacaatgtttaattttatttcatttgtacaaaaaggcttgactcaatccatttttaattttctcaacttactgt

SEQ ID NO: 818031 - DNA, 517 bp, Homo sapiens
agctgtatcctcatctggggcatgtctactggtctaacatggaaaggtcatgattccatgagcattgggatttcgtctttcaatgggattctaaacaggaagaggctctccaacaaagagacrttaaaatactctgccttccaaaacattcagatagatgcaatcactagaagagaataagattggttcttctcaggaaaaaaacataaacataactaagtcaggttaaagtagtggttttctcattttcttgactgtgacccacagtaagaagtgcagttttaattaggacaagaaacaaatacaacacacacacacacacacacacacacacacacgattttgcctgtacacacaaatagaaataaaagtttcattaaaaaatactaaatccaattacacagtaaacactagaacccaggtctctgaccctctgatatttttacaatgtttaattttatttcatttgtacaaaaaggcttgactcaatccatttttaattttctcaacttactgt

SEQ ID NO: 818032 - DNA, 647 bp, Homo sapiens
aaatggaagcaaatgggaaaatgtttccagtatgaakagttgacttgctggttctgagacccaaatggttcttttgaccaccttccccggtctccccagtccctacttaaggttagaagaaagcagagctgccaacttggatatagcttccatgatttggaagctgtaaaagaagtgatccttgaaaaccatttcaacaacaaagttctgttcatgaaacagctggtatttttgtgagttatcacagacttgtgacttatataaggatggaaattaaacacacacacacacacacacacaagcaacatttttgaggggaaaaaatcccctcatgttaccctaagaaaagggaaatatttgtatgagtcaaaagcatctggctttgttttattggagcctaacattttccagttcttaccattttcatattgcttgccctaggcctttcaggtatccttggcacattggccttggggacattttcagaaggagaaagacatgagaaacaaataaatacatatatgcatatttcctctaggaatgatggttttgtagtagtcttgtgctaacttaaaaagcaaagtaatgacatgttccttctacgggtaactcatgtcattactgaagaaattgaaagcaagtgacaa

SEQ ID NO: 818033 - DNA, 607 bp, Homo sapiens
attccaattttcatcttcccagacctttgatacttttgcaaaacctctagattgctgcttttaaccgggctgcaaatttttgcrtcaagaatcgagaaatgaccttagaggagaaaggattcagggaaagaatatttcttctatccccttcaagtcctgaatttattgctctctttctcatgccttcaaacagttgggatttttattttcctggtgtgttatctagttttatagttgttctcaagaaaagagtttgtgtaatacaagtggagccatgatagctaattatagaagtgtttcatttagttttatttctttttcatcaagtactatgaaagtttgatataatgacgttacttcagagctctttcatagttatatatgataagttctgatatgtggtttattttctagattctgaaattttaatttaatccataattgtttaaagggagtttacaattttccaactaaaaggtctattgcctgacattttattattcatttataattttattgaatttccataagagaatgagtttatatttttataaatttattaaggcttttttgtggtttcatatatgatgactgtcaaaagttccag

SEQ ID NO: 818034 - DNA, 536 bp, Homo sapiens
agaattttttaagaaacagtaaagcaatgcctgagttaaaatattaaatttgagtgagtgcaattgtgttactttaaccatattaatattttacaaatgttctgtctcaaagcttttggatcaaatcagcttgaacagcaaagtatttttgttcatctaaattttagatttaaattataacagtcagtgattgaagcatatctaaagggtcagaatttagttaatgaacagtatctttacaatatctcctaacttctgcctttatttttgatatactttaaaaattttttccattaaaaagataattccagaatggtaaagatttgaagaaaaaaaaaaaagcatacaaatcaaacatagcctgatttccataatacgaattataaatgtctatatttacatttgatagcaaaagcctcctaattattgcaaagccatttattaaaggaagggtaatattttccatggakagtgatggtgtaactggacatccataagcaaaaaacaaacaaaacaaatgaagccctcaacttaac

SEQ ID NO: 818035 - DNA, 636 bp, Homo sapiens
ataaatacacatgaagacagtattaagaatgatatgatcgggaggccaaggcggatggagcacctgaggtcaggagtttgagaccaacctgaccaaaatgttccccgtctctactaaaaatacaaaaattagccgagtttggtgacacatacctgtaatcccagctactcgggaggctgaggcaggagaattgcttgaacccaggaggtggaggttgcagtgagccgagactgtgccattgtactccagcctgagccacaagagtgaaactccatctcaaaaaacaaagaaaaaaacaaaaaacacaaagaatgatatgttcatgggtgtttaagaagatttggtggactaatgggctacccaatcttaatgagtcaaaccgaaagataacgcgagtgagcaaaatcagcctcatctcctgcacacccttcttatatcaccatttgcagggggttgttattcatcattaagtgagggaaaaagggatattctgcttgagtgtaaaagttgacttatgtamattaaatcatgcttcctaagtgaaaataattctatacccatttttaaatttaggcttcaaatgggaaagtgaaatgatgcaatcatagtatttaatgacagtaggattaaaaatga

SEQ ID NO: 818036 - DNA, 469 bp, Homo sapiens
attgtaaaaatgtttaaatatccaatacaatgtgattggataaacaaaatatggtacattaataaaatgaaaaactcaagtagtatctcctaagaggagataaacaataaaattgaaatagttaataaaaaaatacatttagtattttgttagtcttgaatatgattgcagcctttttttaaacaacctttagacttacactttttaatcaaaatgtaatgtgggttaataatagatattttaaaaatcacaagtaatatggttttgatctatgtccccacccaaatctcatgttgaaatgtaattcccaatgttggaggtggggcctggtgggaggtgattggatcataagagtggtttctcatgatttaacaccaccactccttactcctctctgttgtcctcagaatagtgagttctcaggtagctggatgtttaaaagtgkgtgcacctcccccatctctcttcc

SEQ ID NO: 818037 - DNA, 556 bp, Homo sapiens
acaacagagagtcacaaccaatgagataaaaaaatgataagcctgggaggagagaaattccgtatcatagttgctgacttcagtatcccttcgtcagtaattaatagttcaagttggtaggaaattaktaaaggtatagattatctaaacagcactatcactctaattagtgaattcaatttatagaataatcctttcaacaagagtgacgatacattcttctttacctcttatagaacttccaccaagataaagcatattctgaaagctggttgccagagaaaccaatcagcgataaaagaattgggactttcagcttcaccttctctacctctggggaggaaagaaagggcagatattgagctcaatctccagtggctactggtttaatcaataatgcttacatactgaagcttccttaaaaaccctaaatgaaggagttcagaaaaccccaggttcaccacaatgatgaagacattcatgtgcctagagagtagcccaccctaactcagtggggcagaaactcctgtggtcagaacccttctgtgtcttgctt

SEQ ID NO: 818038 - DNA, 557 bp, Homo sapiens
acctgagaatgatggctgttatttaatgtgtttaaggtattttgattttgtaaaattctgattttagaatacrccccccttggggagaatcttctaagcgagaagttataaagagcccgtgggacatggtctgatctggtagagagagcctgaggaagacttgctcattccgagatttcatgttgatcagttaccttggtctgaaaatagcaaagtgctagaaatacctttcagagagagaagttacatgtccactgaggagggaaaacatgggaaaaggaagatgccaggtttctctatgagctctgtaatggggacagctaatataaattgtggattggtagggaagtaagaaaaaggaaaacacatgcaggttagagtgttttcaaagaaaaatctccacaagtcacagtgactgaataccatgtgtaatgaaagacagggactgtcaatgctgatggagtttcaagcctgcctaattggggaaatgctggtgttattgatgaaggaaaggtacagcatgctgagcccagtgtagatggaaggaaaaggatgag

SEQ ID NO: 818039 - DNA, 570 bp, Homo sapiens
actggataaaatttctatctggttaagatttcatcacttcaagctaaagcggaaggaggtttttatattgatattggaaaagtccttgrttgtattggatgccattattcttatctctaaacatgaactgatgtcaccatttctttatatcagtctcagttttgataacaaattgactctcttaaacttcttaagcagattgataattcatgcacttccttgtatccagtgactctaatcttaaacaaatggaacataaaatactgaaccaattagcaaaatgaactgtttcttaaacgtttataacaatctatggatcttattgtgcctaaatagattaatcattttaatttttttaaaaatttaaaatttctctaaagttttcttttgctttctagatacacaaattacacacacacacacacacacacacaaacacacacacagtggcaattaaatattcgtgccttgaaaagtgagaaaggatacagatgtccttctgcctagtagacctgtttatgagaggtcctgtagactccctgtactcacttgactcccaaattcattacc

SEQ ID NO: 818040 - DNA, 634 bp, Homo sapiens
tatggatcttattgtgcctaaatagattaatcattttaatttttttaaaaatttaaaatttctctaaagttttcttttgctttctagatacacaaattacacacacacacacacacacacacaaacacacacacagtggcaattaaatattcgtgccttgaaaagtgagaaaggatacagatgtccttctgcctagtagacctgtttatgagaggtcctgtagactccctgtactcacttgactcccaaattcattacctctatcaacccaaatatgctccttttccttctgtgtatctacttcattaaacatctgtgcaatcagccagacacaaacttgcagaccccgcctcaccactctcctgcctcttatctgataaatctcccagtgccgcaaattctccctctagcccggcttgttcatctgtacacttgcctttattacagctctcataccatagcagatcaccactgcttttctcctagattactgcagccatctcctgtttgtctctcattttccagtatcactctcttctaatttgctgcagctrgagttaggttctaaattccaaattcattcatgtatctactttaaataactcagtacttcttttttgtttgtttgtttttc

SEQ ID NO: 818041 - DNA, 649 bp, Homo sapiens
cttcataaaatctctgccaagcttatttattaattgttttccgaatagattctgtaattcctacattcaacttttcctacccagcccctcaccctttgcccgccccsccatggccagtctggaatgctaatacccctcttctcacccactcaaatcctatctgtcccctgagactcagctaaacctaacctcccttaatcattggagtctgaagggccttctttaactgtacctgtagaacaattaatttgacttttaaatatttcttttgttatttaaaacatgagcattttgatacattttgtctctttaactagattaactcctcggtcacatctccatatcttcatttaccttatagcatctgacatagtaccaaacacatataacattaactcaaaaactatctgtggatttgctttaaggaaattgtcttctctctaataatgtaaataggtatgaaggagcttttgctactgcatggaaccacatacttttagcatctgtgctggctgcagtaagttagacaacacaaatattcaaaagctggattgaaaagctttgaaaagaaattaagttattctgaaactttaagttcttccattacaaactaagagcaaaacataagccatgaaaaatttgacctaag

SEQ ID NO: 818042 - DNA, 613 bp, Homo sapiens
gcgccctctagtgtcactttagggactatgtgactctggaagcgccgttacctccaggattacgccaagggtgtaaatttctctatgtcaggtgcatgccctcyactgccaacgtcactccacagcttgataatggtggtgctcacagagcactgacattcatttaggtctgggtaaggctcacattccataaggtgggatggaaagaatcatcagtcccttctaacagggagctttcaagctccagaaaccaggagactcattcaacacattcatctctatatgtccacctgggaccattaggcacatagatgtaaattttatctggaaatagccctgagtgcccccatgcgtgtgtacagccagggaaacacacctactgggaggtcatactcaccaccccacttctaaaccaggccacagtttagaaccccttggttatataatatggataacggatgtctaataaatgcttttaatggcttgagattatatctgctcttgagcctgtgtgttcaaaggtagtaaaaccaaaacactggtgaaatggtagaagaagaataataaatttgttgacacaaaattccagcacagattttcaattgctcatctc

SEQ ID NO: 818043 - DNA, 639 bp, Homo sapiens
cagaattgtgtcaaacatgttaaggattttcatctgtcccttgagcctactagaaggccttggaaatgccagtgagggaattgtataatgaagtacctawaaagacagagtctttataggtgaagtgatggacaattgagatagcatgctacacttaagatgccttgagaaatctgtaaagtgtattggagactagtaaactaaggtccagaaaaacaacaacttgaaataagaaaatcagagttcaaatcctctccttctagtttctagcactttgaccttgggataattcattaacttctcctactcattacttcagcttcctcacctgcccttgtagctgtgagtttccaacaagatcatctatttgatagccccttgcaagcaataatactgttggaacgtaaagtagcaatgattgctgtaaacattatagcaatagttgttgtagtagcagtcatattaaaaacttctatgagacagtatcttctgtgataacaacccccaaatctcagagctaaggatgacgagcagttttttccccctcctgttgaatgaggactactgctggctgtggctctgctgtagactgtgggttggcagagcctgctccctgagtcttctcatcccaggatccac

SEQ ID NO: 818044 - DNA, 518 bp, Homo sapiens
gcagacaattagttgtttctgtcctcatacttatttcattstaaaatgtaagatgtccagatacctcatggagatggcttggcaaactactaaagagagttttcgaaagcagaaggtcctgtcaggagccaagactaacattcataaggacttctttaatatgtaaggctaatctataggtgacaaaagaaaggaaaaatatgaagaccagaatgacaacataagagcaaagaaacaacctaaattgttgtagtttggaaaggtaaactcacatactcagtctacaaaactcagaaatgactgctcagaatcattatgtaaataaatggtgtggtcaaggtgagaatgagtaagaacctggcagaaagctcagttaccaaccgcattaagaaaaggcacaatattcaaagagaaagacacttttctctacgttttctcagtgctgagcttccattaccaggtcatataggtattgggagatttccctattgtgcagaatgttggaaagaagggttgca

SEQ ID NO: 818045 - DNA, 548 bp, Homo sapiens
agattttaaaggttctggagctatgaccacattatataagtatttaattttcacaacattttctaagtgatttcatttgtggaagatgaggcttagattaagtaacacgaagctgatacttgaaagactgctgtgttgaaagcaggtctgtttgaatataccatgctctttaaacttcattatagaaacattttctcagactagtacattggtgttttatgatttccaatagcataacaaatattttagttatatatgccataactaatgtggtagttcaagatattactgctaaaggtcatcagaaatatttctaaacacaatttatcgcatttcataaagaccatgggaaccttaaactggacggcgtatgccttaaagtataatatctgcaaactgtaaatccctttttttaaacaaataggagttgtgtcctaaaagggatggtaaatcataaacaaaacaataaattaactatataagaaagcagaraccatactcttgacattggaagtgattaccatattacaaaaacactgacatgatgt

SEQ ID NO: 818046 - DNA, 602 bp, Homo sapiens
ccataaaattgttttaggtagaaaagatttaaaagaaggataaattatgtgtctgctctaaaaataatrtattctcaggttaagaaaatttagcaagtagaattctttgctcattaggccaatagtctatcctggagggtctgcagaagcctacatgcactgagttttcaccaagtgatgaagaatttgtctcaaactttccaattagtgacctctaagaagcatttttttttttagctttataacgacctactactattcacttaatttgggcataactgtcactaaaagtctttctacatgcaggtggagtaagtaaagaaatttaaaatttcttaggctgaatcataaaaggaagaagaaagcatgtttcctaaagagaaacaaactcattggtgaggaagtggcttcctttttttcacccaggagagacaaaaatctagagtttttcattaagacatcttcattaatcaggttttgatatgtaaggtttcttcactaacaagagagaaagagaatatttaaaaaggaaaacattttggatatccagacatctctcctagcttatcaaagaaagatgcagtaaacctgttgtcttttgc

SEQ ID NO: 818047 - DNA, 599 bp, Homo sapiens; identical to SEQ ID NO: 817738

SEQ ID NO: 818048 - DNA, 608 bp, Homo sapiens
tttaggtctacccaagaactccaacaactgcctgctgggaaaagaaaaagagggaaatgcttaatgagcaaagatctatgtaaaagtcctaaagctaaatcttaataggaaaggctttatttcaaccacttggaggcatgcatgaaaatttagcacaaaataagggattggaaaataggcttaccatattgatgacagtggtggactttagcagacagagaatatgcaaagatgcaacaggtatgcaaataactccaggcagtttcagcatgtcacgaatatattttataggcaatagttactctggttcttggttaatccaaatattttccagtgaatttatttgagaaaaataattgagtgaaataaatgtaatgtttcagattaagcacaagttctaaagtaaatattaatttcaatccttcaatcttattcacattgcctatgaagcgcaaaagctggctagtgtttatgaggtgtttaagtgtgtatgtatgtgtgtatgtttcagatggaagaggagggagaataagaaaacgttaagaacaaatgacacaacttttgaccaagcatattttcacrtaaaattgaaattaaagtcccatgtt

SEQ ID NO: 818049 - DNA, 634 bp, Homo sapiens
gtatctttttataacataccacttcttcaagcagaatgaattctacctttaattgtattactacagatttggattatatcatttatcataccatagtacagttacttatttctccaygtgcctacctctcttgaaagtcaggcaacccttccaagtcacaaatcacatattgttcacattgcatgctacctaatatatagcaggcccttactatatacttattgagttacatttttaaaggtacagtaaatagaattcttcttccccactttaattctaaatatgtcacaaaaaaatctaagtctcataaactgttagaaggtaaaaagcaattatttttataatgtatataagctgcattattctttgtttacctcatggacagtgtgccccccaggacaccagtgaatgctatccctaaagccacctgctcaccatgcattgcatggacagttgtagtatgataacgacagtaccaagagaagctaggagaccaaaacagcagagttcattttagctcttggtgaaaagtaaaaacaaatcaatgccttttcctttgggaatcagtgaataaacttcttaatgtctgaaacatgtctccttgttcagttttcagaggagaaacagcattttt

SEQ ID NO: 818050 - DNA, 598 bp, Homo sapiens
tgcttcaatctccatggagaaagaagacctatattaaatattagattaatgcatgttgttatatagatgcactgtcaacaactttgggaaaacagtgaacattcaaggatggctagaaatgaactgcatttaytaagctaatattttcctttgaagaaacattttggtcaatatttgatgccctgtagatttgagcaagaaagataaaggcatttaggtttgtgattgctcttggcaagaaagctagtgtctgtaagaaattaattacaaccaaaaaaaaaaaaaagaaagaaaaaaccaaaaccttaatgggtggagctcataggtgaatgaggacctctgcaaattgacatggatttcaggtttaactttcttgtaatggaaataaaatacaactgaacatgctctcattttttaactctgtacaaaatacctactcaaggcatctttgtattttggttccaggttctcatcagagaattaccgaaagtcaactctgagcagttaccaatggatagttttaagcaaatcatatatcagagaaataatgtaataggcattttaattagccattctcctggattccctaaacttagtc

SEQ ID NO: 818051 - DNA, 636 bp, Homo sapiens
tgatttattccttgacccctctatgtgttcatgtgttctcatcatttagctcccacttataagtgagaacatgcaatattttattttcttttcctgtgttaatttgttaaggataatgtcctccagcttcatccatattcctgcagaggacatgatctcattcttttttatagctgcatggtatttcatggtgtatatgtaccatatattgtttatccaatttgtcattgatgggtcatttaggttgattgcatgcctttactcttctgaatagtgctgcaacgaacatatgtgtgcttcataatagaatggtttctattcatttggttatataccaagtaatgggattgttaggttgagtggtatttctgtttttaggtcttaaagaaattgccatactgtcttccacaatgtttgaactaatttacactcccaccaacaatgtataagccttcctttttctccacaacctcactggcacctgtttttttttttaacattttagtaatagccattctaactggtgtgagagggtatctcattgtggttttgatttgcatktctctaataatcactgatgttgaactttttttatatgattgttggctacatgtatgtcttctttttaaaagtgtc

SEQ ID NO: 818052 - DNA, 636 bp, Homo sapiens
tgatttattccttgacccctctatgtgttcatgtgttctcatcatttagctcccacttataagtgagaacatgcaatattttattttcttttcctgtgttaatttgttaaggataatgtcctccagcttcatccatattcctgcagaggacatgatctcattcttttttatagctgcatggtatttcatggtgtatatgtaccatatattgtttatccaatttgtcattgatgggtcatttaggttgattgcatgcctttactcttctgaatagtgctgcaacgaacatatgtgtgcttcataatagaatggtttctattcatttggttatataccaagtaatgggattgttaggttgagtggtatttctgtttttaggtcttaaagaaattgccatactgtcttccacaatgtttgaactaatttacactcccaccaacaatgtataagccttcctttttctccacaacctcactggcacctgtttttttttttaacattttagtaatagccattctaactggtgtgagagggtatctcattgtggttttgatttgcatgtctctaataatcactgatrttgaactttttttatatgattgttggctacatgtatgtcttctttttaaaagtgtc

SEQ ID NO: 818053 - DNA, 536 bp, Homo sapiens
ctctttctctacattggctataggtttagaactgtaatatgaaattatgctgtttgtggttgcagtattcccatgctactactttagtactctgatgactttaaagagttcatttttcccttatgctattcctaatcattatgaaaataaatgtaacaaattagggtatatgatcttatggtaattctatttttaattttttgaggaacctccatacagttttccacaatgatggtagtaatttagattcacagcagcagtgtggagtcatgtgacacataacaccatttcagtcagtgacagaccacatatgcaagagcaagatgataaaggagctgaaaaattcctgttgtctaatgacatcatagctgttgtaatgttgcagtacaatgcattactgacatgtttgtggtgatgctagtataaaaaaacctgtgctgccagtcatgttcaagtrtagcatatataattatgtacagtatataatatctgataatgataataaatgactatgttactggtttatgtatatacca

SEQ ID NO: 818054 - DNA, 489 bp, Homo sapiens
cttacctgcaggtaaattaccagactccaaaaaaatgtatctttcttcagatcttctgctatactttttctgacgggtggatggtacctatttttagattaaatagaaaaaagacattttctttttgtttacactcaagcagcatgagagtaaatattaaaaataaccaataattggaatatcccagttattttcatcatttgtgaggacaaggctgcttcgtaatcatttgaaatgacagaaactgtcttcaaatatcttttgctatatttcagtgctctgctgacagtgcatctaaccatatctatttaactttttaattatatgtacttacttttgtaattaaacaatgcaatcttagaaaatgggtttaacttttaattgcatggwtgaaatatgacaagtccaattactgcatgtcaaagctctgtttattttttgtttttcttctttttatctttttctttttaaagaaagggggcctatttc

SEQ ID NO: 818055 - DNA, 591 bp, Homo sapiens
atcttataggtgcctttatggaaataagtagagtccaacagaggaaagccacattaaaacaatgacaaaaacaagaacaacatttttgttctgccttacattacctctagagcaataggctaagttagatacactcaaagaaattgcctctcaagcttgaggacctagaacacagaatgtggcaggtgtattttggaaattactccatgggaaatcacatgggccttcagttccccagggaaagttggggaacagcctgcttttagacagaatgctgagtaaccacagtttggaagagaaaaagaaaaaatgttgatgtgatgaacagatggaagggcttgatgtttttaaatgcaagttaaagaagaaagaggcaataaaatacagagaaataataattttcaagtatgaagagatcatactgcgggagttggacacatctccagagagactcattaacatctattaatggagggatgctcttcggtgtctaatctcaatctyctcttcaagaaaagctggcacactagaaattatggagtgttggaaacagagagggctgcatggagacagctgttggacaagagctct

SEQ ID NO: 818056 - DNA, 629 bp, Homo sapiens
tggatcccgaggtggcaggggccaagtggccgaccctcaaccatcaaaagcaaggtggagatagctaccataatggagaacaaaggcaaagtggcaatcagaatagtctgactcatgtagagctctggcactggctaattaatcactgtcttactagaagtaaaattgataggaagcctactgcattcctacttaatttatataagcagaaaatgtttaggtcgaatggaaaaaagactaatttgaattataaaaatatagaatcacagcccttcaatcaatttccaaacttgagccagtttacagacccagaaccccattaatgaaggggaggctgggtcttcttgaggaaggacaccactacgctaccgacaatttatgccgttaatctttctcccatccttccctaaggcgacttccagccttttaccagggtaattgtgtattggaaaagggaaataatcagacactttgaggactactggacactagctatgagctgaagttgattccaggggacccaaaacgtcattgtggtcctccagttaaagtaggggcttatggaggtcaggtaattaatgragttttagctcaggtttgacctactgtgggtccagtgggttcctgga

SEQ ID NO: 818057 - DNA, 616 bp, Homo sapiens
actaatcagtttcaccatctaaatatgattcctgtccaaataggtttttcttttttttccagttgatcacacaagaatgtttaaaaataaaggtgaccctgtagaggaaatcatgtttgaaataagacaaactataaataaggttcttgtttgttgtggcaatatgataaaaaatataaacagaattacttgtgcatctaacaacaagcgatactggtaaaaaaaaatgacaaacgctgaaagagaaaggaaaatccaaaatgccagaaaagcaaatgtaacctaaactgaaaaacaggatggttagtgtatgagccatatgcagcttccttatatatatgtatgtgtgtgtgtgcacacgtgtttgcgctcctgtgtttgtgtgtgtgcgtgtgcattgtcattaatgtggactgcagtaatccagaagcctggattttaataacaataattgaacagaagttaagatcttgagcttacatgaggcaatgagttggaaagaagccttcaaataaaccttggaccttaactgttatagctttgtaataatrtagtaatgttgggccagaaaaatgatctcacaggtaaagaaagaaacagggaaagtaatcagtat

SEQ ID NO: 818058 - DNA, 546 bp, Homo sapiens
actgttctatcatcaatgccacacttttaaatcattggagctttctgatgcacccagaaatctggctcagcattatcttccaaatgtttttgtttcaaagtatatcattktacctcatttatatcaggttatgtgtttttttcaatgtccactaatgcacttacatgtattttaactgaagttccattaaatctagagattaatatggcagaattgctatcttctctatagagaatctttctgtctataaatatttatgtcttttaaagtgtggtttgataaatatacttattttttaaatatttatttgatatctttgtacatttattcttttaaaatatttcatatgtctactattaaaaacacttcaagttttattttataatgtttcctgcatttagaaatgcaattactcctgtatctggatcttatatctgacatgaggaaacatgataaaatttcttattaattttacaaaaaactgtatatttgggaaaattcctatatgaattatcacatctaatttaaccaatttttttctttctt

SEQ ID NO: 818059 - DNA, 562 bp, Homo sapiens
tttagttgtcctctccttcttgacaatttgctctgccctagatttttatctttcttttcttgtgaaatgtacagaagacctacttattatctaattgcttttgtttttgcactgctgagaaattgcgtgtgtgtttatgtcttaaatttttatatttttatgttttttctgaatttaaaaaatagtggtaaacgtgggggcaggtcttgagataattattgtatagattatgtcactatggcatgtatgtttatatataatacaatatatacataatacaatatgatgtaaaatagtgtaatatagcacaaaataatgcacagaatccttcctgcctattaaatgaggaagagctcaaatttaattctgcccaaagtcttccttgaacgaatctctgtagatcatctctctcaccatctgtaatatgtatttggcacttaattacactaggcagtttatgatatctgtttaaatattaaagaattaataatagtagatattatgtaytgagtgttcattatgtgctaggcacagtaacagacaaacccagatgtatatttcc

SEQ ID NO: 818060 - DNA, 452 bp, Homo sapiens
aagagtagtaagaacacagaggccagtaaataaatgatcagagctttcgggtttaaaaatgatcccagttgagaacttcagctgtggtaacgtgaatatgtaaccatctagaggcaaatagaacagaaacttttgaggggttggcgccaaagaaatgaaaagtctggcttgtagtagcctctcgttacttgacttctgaagccatggctaagcttcaaaaccagattaatagaaagcagtcgccaagacgtgacttcaaagtctatggcatatgtgaccatggaggaaaatggacaagaaagactatcatggacagtaaagtccagaacaacaaaaaagaacaggtaagggggctcctttcatagaataaaccragaactgagtatattccaactccaagccaggacactttgtcacagttttctcttttctactccataattgtattttgg

SEQ ID NO: 818061 - DNA, 526 bp, Homo sapiens
aaggcactgggctagcataaagaagtctagattgagtaagccctcctggggcttagaagctgatagagagaatcatgtttggaacatgacataacaaaatttgttataaaaacagagaggagtctggaaatcaggctgcatatgtaatacacattataaagatatcatatgcctagtacaaaaataacacaaacaggaaaagttctgaatggaacctactacatactaaattaccacatgatataagaagcatcatcaatcaacccaaaaattgtcgattattgaagaaattgggctgggaaaattgagtactagggaaaaaaattgagtttgacactgctatcaaaaattggtttgaatagttgagaaaagttaaatgtggaaattctgataaaatggcaatgtaggaaaagcatstgacactcatgaccaaacccccactataactccaactccccccgaccaccaccaatgcttgaggaaaacaagtgaatataaaaataagtaaaaccttatatcagcactg

SEQ ID NO: 818062 - DNA, 589 bp, Homo sapiens
ttccacagtgccttggtcttcatagcaaagttgggggcactggggatacagttaaaaagcagaaaaataaaaattaaaaaaatttttgacctttggaaacctgtgtgcctgtgtgtgtgtgtgtgtgtgtgtgttgtacctacttaattctggcagtaaactttcctcttctctgtgttcctatggtaactttaactcttgtaaattgtgctgattgctaatgtcattgaagattatttttcctattgtctttccttcttcccacttcacaccccatagagtatatgtctgatccacatctgaaaggactgaactatcaatcctccagagagaaaaaagcagttacaaagcttccagccaagcattttccggtaaaaatcagaacaaaggagtgatctcttctacttcactaagttccagtaatattacatcaagatatagaagggatcactccactgattgcagccmccaaaactgtgctctagcaaaaacatattactgaacaaatactatttttacacccattcacaactcctttgctcccagaaaagacaaaatgtcctattaaaagctgtaagatgtctctttg

SEQ ID NO: 818063 - DNA, 486 bp, Homo sapiens
atgtctggggccacagaaaacaacaacaagaacagaaagctgggtggcatgctgttgatccagagcaggcaaagggggattcagattagtggcctctttctcagaggcaaagaaaagastggagcatgtgtgctacattgtggattttaggggcctgtccaagagactgatttccattttgcctctcagggtgttgatggccccagcatattctagattcctgggaggcactaaaaataaactaaaaaaaaaagagttgggtggtgtactatgcttctacaggaaccgttatatagcaaacagacactagagagactatgagattacaaattactgaataagaaactggtgactctaattagggatatacatgcacaaagaaaagacatatacacataaaatgtttgaaaggtccgcagaaactctagaagggctaattggtgaaggtactttcatatttgaagcatgttcataaaacatgaaaga

SEQ ID NO: 818064 - DNA, 395 bp, Homo sapiens
ttaacttctcatttcattataattgtggcattttaacatttaagggtagtcaaatatgttattattgttctttaraatttttctaagtctttgaggtttaaacatgtattgcccttcaatatttctgtaaagtagcaaaaatatataacatgagagctaccctcttaaatattcttatggacagttcagtgttgttaactataaacacaatgttgcacagcaaatcattaggatttttttatcttgcatgatgtaaactttatatctattggacaatacccgtttccctttctgctagcacgtggtaactaccattttctgttttgatgattttgattattttagataagtcatatatgtggaatcatgcagtgtttgtcctactgtggctggcc

SEQ ID NO: 818065 - DNA, 599 bp, Homo sapiens
catctaggagaaattcagggactgcagcctcccttgaaggtggcagagagaaccaaaccctcaacccacccccagtcacaaaggtaaaatcaggatggaaaccaaaagacycatttttgtacttaatttccattgattaaaaaaatatgtaaatgcaaagatgttgacacgattaagccattatgggcttattgcgcaattatttctttgatagttcatgacggctcaattggaggcataatggactattatgcaatgacatctttgctgagttttttgcttgttttcctcttttccttaattttctttctttcatctttcctcctttaaaaaaagagagagagaatttttcatttgcagatcattgactttttaatgtcagattatttactcaatagtcaataacgatgcctttggattcattatgggctatcgtgtaaatagctaattgcattaataacagcctttttacaaatgtttagtttgcagctcatcacacccacggactgtgtaattgctgctatcggggctgatgggcaggcacagccctgggtgcctgcatggtgacagggggacgtctgttgcctttgttctaacct

SEQ ID NO: 818066 - DNA, 538 bp, Homo sapiens
tccaaaaaattataatttttgagtatccaccactgaacttaacaatggtgccaggagatcattggaatcatagctaatcacccaagaccatttgaatgcagcagagagagtgggggaatgatggaacagattmtatgagaaaagggagaaaaattgggataagcagtgaaaacaaaatgtattctctacgtacaggcaggatttcccatggtagtaattatgaccctctttcagttatccatgccttgggcatagctaatgagcagcagctggggtaagcggaagcagagttacagacaatcagcaagcatttgccaaacccttgcaacatggactgtgatatagtttggatgttttgtccccttcaaatctcatgctgaaatgtgacccccacctgatttcaaattatactacagagttatagtaaccaaaacagcatggtactgacataaaaacagacacatagactaatagaacagaacaaagaaccaagaaacaaacaaatccacatgcctagagttaacttattctccacaag

SEQ ID NO: 818067 - DNA, 468 bp, Homo sapiens
catgctttaatgccaagagcatcttccgggataartggtaacctcagcagaaaaaatgactctccggttgtgttttgcgtattgacaaatcgatagctcccaccctggcagtcctcagtgtctcctggcttagtgtagagttgcagcctcctggaggccatgttcactcctgttcctctccacggtgggcttgtgtcgtgaaggaaactgtagattaattagttccagggccttctttccaggtgtggtgtaatcaagctcgtactcatatttggagtcgtgaatcaagtatgcatagggttgggagagggctgagtggagaagccaggctgtgtccctctggggtgaagtgaggaatgggagcgggagagggcacaagggcataggtctgtgagcgtggaggatggaatgatgctgggtcgcatttctggggagagcgcagtgtgccctggccttctcagccggggg

SEQ ID NO: 818068 - DNA, 577 bp, Homo sapiens
tttgggaggctgaggcaggaggattgcttgaggtcaggtgtttgaaacaggcctgggcaacatagcaagaaatttaaaaaattagctggatatggtgttgcatgcctgtagtcccagctacgtgggaggctgaggtgagaggattgcttgagcccaatagttcgaggctccaatgagctattgatacaggagatagaaacaaattatttaggcagataatgagggcaaaagattccttagcagaacttcctttctaacaaacagcagcgcccaaaattatttttttctaacaaaatcatcttgaaacattgagctgcaaacatagatcaggaagctggaatctcgcatggggaatgttggcagctgcatcaatagaaaagcattacctgggggccaggcatgtctaccatggaagctccattttccctttttcattagcacatgtacagtaagacaaatgggcaacatggcgcagctcaggctgaaaacccgcctgyataataaaagactgtggtggcggctgccagaaattctcaccctatgcaaatgacacacctgtttctaaccagtttttaat

SEQ ID NO: 818069 - DNA, 581 bp, Homo sapiens
taagtgttgggcactgagctatgctctggagatcaatactttgaacagaacagtgtcaatggttgcaatatggtctgttcttatttgactccatttcctttcagcctccagctccctgacagactwactgaccacacctgtgggcttgtgcccctctcagcaaaagaaacataagatgctccctgatggtgctgggaggtgcctcaacatacaggtgttctggttgtgatgcctcatatctgtagtcaggacagcttgctgggtcctgtcttgcccaaatccctggtttccagctccttgcctaagatccagctccctgcgtggctagacttgcctgaccactctcttctcacctaacttttgacccttgctatggcttgaccatcagctcttagatatcccctcaaacctggctccatcaggccaagctgctgatgcccactataaatcccgtcttaccatcttggacctgggtttccagtctttatgacacacatgttctcaggcaagaagaaaggaaggacaaaatgatacataggtatgcccatataagtgtacttgtcagttggaaacctgagaat

SEQ ID NO: 818070 - DNA, 589 bp, Homo sapiens
atttacagaacatttcatccaattgctacagaatatgcattcttttcataagcacatggaacattctccagaatagaccatatcttaaactctgaactaattcaaaaraagtagaaatcataccaactatcttttctgaccacaagggaataaaactagaaatcaataaaagagaaaccttggaaacttcacaaacacttggaaattaaacaacattctcctgaatgaccaatgggtcaatgaagaaattaagaaggaaatttaaaaatttattaaaatgaatgaaaattggaataaaacacactaaaatctatgggatacagcaaaaggaaagtttatagcaataaacatgagtatcaaaaagcagaaagacttaaaataaacaacctaatgatgcacctcaagaaactagaaaagcaaaaataaaccaaacccaaaactagtagaatgaaagaaataataaaagtcagagcaaaaagaaatataattgaagctaaaagaataacagaagatcaaggaaatgaagaggtggttttttgaaaagataaaattgactaacctttggttagactaactaagaaaaaaagag

SEQ ID NO: 818071 - DNA, 624 bp, Homo sapiens
gcatggatttatttctgagctctgttctgtcccgttgrtctatatgtctgtctttatgccaatatcataccattttaattactgtagctttgtgatatattttgaaatcagaaagtatgatatctccagctttgttgttcttaagattgttttggctattcatagtctcttgtggtcccatatgaattttagaatttttttttctatttctgtaaaagatgtcattgggattttgatggagattacattaaatttgtagattgctttgggtggtatgaacattttaacaatattaagttttccaatccataaaaatggaatgtctttgtatcttgtttaatttctttcattagtattttgttgtcagtacaaatctttacctccttagctttttcatatttttattcttcttggtactattataaaggggattgctttcttgatttccttttcatagttcattgttagtgtatacaaatgtaatcaacttatgtatgtggatttttgtgtcctgaaactgtactgaattcatttattctaacagtttttttaatggaatctttagcattttctatatgtaaaatcatgttacctgtaaacaggaagaagtaaaattgttctgaa

SEQ ID NO: 818072 - DNA, 624 bp, Homo sapiens
gcatggatttatttctgagctctgttctgtcccgttggtctatatgtctgtctttatgccaatatcataccattttaattactgtagctttgtgatatattttgaaatcagaaagtatgatatctccagctttgttgttcttaagattgttttggctattcatagtctcttgtggtcccatatgaattttagaatttttttttctatttctgtaaaagatgtcattgggattttgatggagattacattaaatttgtagattgctttgggtggtatgaacattttaacaatattaagttttccaatccataaaaatggaatgtctttgtatcttgtttaatttctttcattagtattttgttgtcagtacaaatctttacctccttagctttttcatatttttattcttcttggtactattataaaggggattgctttcttgatttccttttcatagttcattgttagtgtatacaaatgtaatcaacttatgtatgtkgatttttgtgtcctgaaactgtactgaattcatttattctaacagtttttttaatggaatctttagcattttctatatgtaaaatcatgttacctgtaaacaggaagaagtaaaattgttctgaa

SEQ ID NO: 818073 - DNA, 626 bp, Homo sapiens
tgtcagtctccttttctgagagtccatctatgctgatttctcttcctgatcaaagttcctaccaacctgtcacaaagggcaccctattacatcaggtggtgtctcacctatgtgaaactagaaagrgtgctaaacataccaaggcagtattttaagccaactgtaacctcttgaaacacacatgaggcaaatctagaaccagagacttaaaaagtgagtcagagtctatactgggaactttatatgcaaacaaatttcatgtacatgggcatacaattcagatgtacttacattcattatattattccaatcacagaaccgaaggagaccatgtactctttcaaacacacaaatcccacccttcttatctgcatgccttagcttatttcctatctacagcctgaaatgccctttctctgaatctgtaaatacacaaatacaattattatgggttgaattatatgcaccaaaaaatgctcaagtcctaacccccaggacctgtcactatgaccttatttggaaattgagtctttgcaaatgctcacatttagatgaagtcattagggtgggccctaacacaatatgactggtgtcctcacgaaaaagggaaatttagagataaagac

SEQ ID NO: 818074 - DNA, 537 bp, Homo sapiens
atggattcacagctgaattctaccaaacatacaaagaagaattaatatcaatcctcctgagactattgcaaaaatcagagacaaatgggactgyattaaactaaaaagcttctgcacagcaaaggaaacaatcagctgagtgaagagacaatccgttgaatgggagaaaatatttgcaaactattcatccaacaacagagtaatatccagaatatacaaaaaactcaaataacaacactaaaaaacaaatccccaaaagtgggctaaggacataagtagacatttctcaaaagaagatatacaaatggccaacagatatatgaaaaaatgttcaatatcactaaccatcagagaaatgcaaattgaaacctcaatgagatgtcatcttaccccaggtcagaatggctattactaaaaagacaaaaaataacaaacgttgatgagggtgcagagaaaagggaactcttacacactgttggtgggaatgtaaactagtacagccactatggaaaacagtatggagatttctcaaaaaac

SEQ ID NO: 818075 - DNA, 619 bp, Homo sapiens
ctccgccctggccctgagccaggtgggcggccaactccctttgaccacttcctggggtaactcccccggaaatgccccagatgcccgcagcccaagtataactccaacttccaggctcaggaccctcatccctcacctcctcctgccaagatcaccccaagcagaaaccagtaggcataataattagtatgtgtgtatatatatatgtgtgtgtgtgtgtgtgtgtatgtactttgctgattagatattttatcagatatcttatctatataaggaaacaacaacaaaagtgaagctgacagtgcgttgagagccgggctttagcacaccacagctctatgtcttaggatccctcctctctgccagtgtggcgcccgcctcctactcccatcctctgcctccagtctcctctgccagcctgtcctccatccaagctccctaggcatcctcttcaaactctttgctgattgctgtaaggcagtggagcatgtggttaagattctgggcttcaggtcaagctgatttgggatytgaggacatttgctaacagtgtgaccttcggcaagtgactgtgtctccctaagcctcagttttctcatctgcaaaatagggatcataa

SEQ ID NO: 818076 - DNA, 503 bp, Homo sapiens
tttcccttctccatatccatgcttctttgcattgtgactctgcgactctgtatcttatcagatctctytaagtctgggatagccttatgacgtcctttgaccaatagaaagtggccttgagaagacttgtttgcttatactctctttcctggaatattgccaagcctccacatggatatttccagtctagcctgttggatgatgaaggatacttggcccagttattcatgttgcctgagccaacagccaagcatcaagtatgtgagtgaagtagattagacagtcagctcagtcaattggacaacccacctcaggcaggttagagaacctaactgagctcaaacaagccagacctagatcagcaaagccgtacacctgatccagagactcatgaattatgttaatgacttttgctttaagccctgcaaaattagggcccataagttgtctccttgtttgtgtaaataaagttttattagaacacagcatcatccactggaata

SEQ ID NO: 818077 - DNA, 460 bp, Homo sapiens
gtgtatatatgcatatatacgtatctgtacacacgcaccgtgtatatatgcatatatacgtatctgtacacacgcaccgtgtatatatgcatatatacgtatctgtacacacgcaccgtgtatatatgcatatatacgtatctgtacacacgcaccgtgtatatatgcatatatacgtatctgtacacacgcaccgtgtatatatgcatatatacgtatctgtacacacgcaccgtgtatatatgcatatatacgtatctgtacacacgcaccgtgtatatatgcatatatacgtatctgtacacacgcaccgtgtatatatgcatatatacgtatctgtacacacgcaccgtgtatatatgcatatatacgtatctgtacacacgcaccgtgtatatatgcatatatacgtatctgtacacacgcacygtgtatatatacatatatgtacacacactgt

SEQ ID NO: 818078 - DNA, 460 bp, Homo sapiens
gtgtatatatgcatatatacgtatctgtacacacgcaccgtgtatatatgcatatatacgtatctgtacacacgcaccgtgtatatatgcatatatacgtatctgtacacacgcaccgtgtatatatgcatatatacgtatctgtacacacgcaccgtgtatatatgcatatatacgtatctgtacacacgcaccgtgtatatatgcatatatacgtatctgtacacacgcaccgtgtatatatgcatatatacgtatctgtacacacgcaccgtgtatatatgcatatatacgtatctgtacacacgcaccgtgtatatatgcatatatacgtatctgtacacacgcaccgtgtatatatgcatatatacgtatctgtacacacgcaccgtgtatatatgcatatatacgtatctgtacacacgcactgtgtatatatrcatatatgtacacacactgt

SEQ ID NO: 818079 - DNA, 632 bp, Homo sapiens
ctgggtgctgatctgcatatggttccgtgaagtgaacgcttcactgtgcaatagacaaatgctttggcctctagaacttctaagttcacctccatcccaatacrtacctaataccctggcacttttgtgaagaaagcaaaacaaactaaagtcacggttcatttttattgtataggcttgtgatttctgtttctggagactattttagtggaaggaatatcaccaatactaaaaccactgtttttttaacccctttgatcctttaatcttattcttttggctacctcatcttctttcttttggtctgcttacacttccttgtcttctgttacttccttcccattctatatcccatgtctgaagcccaatagcctcctggatattaatgggagaaaactgctcctggttctaggcttgtcttacctcctgctcagcacagtgagccccatgtcttcctcctcacccattcctctcacttattttctctctcttttttgactactgtaaggaaaagattaccatgcagaatccgatgaagttattgacattttatagagtccaggggtgggttctatagccctgaagatgatatcataataagatgtatgggcagctggtgtgccaggcaggaa

SEQ ID NO: 818080 - DNA, 590 bp, Homo sapiens
gttaggtggatccttttcaacttatcaggattttattttttactgggcagtgtatttcagttttatttttactcctagggtgtagtctcactctttgcattgtccctactgttaagatttagactttcaggggtctaaatcttttctgggtgatggtgatgctatggagatctcctgattctattttgttcaataacatatctctactactttcatttccagctatgataggctaattggattggtgctggacctatttagaataataagtatttctaaaactggacaaaatacatgactagcagttttcctgaattgaggatcacatgttagaattaaggctgctaaagtggctgaaaagtcaaggctgatgatgataatccagtattctatgtgggggtcactgattggtctttcatccatggctgggctacaaatacaaagggtaagacctagtgctgcagggctgaattatgatgccagttattacactacaatatttccrcttgaccagattgaatcaatacaattattctcaaactattaaaaaataggagcagtaggaattctctttactaattctacaaggc

SEQ ID NO: 818081 - DNA, 564 bp, Homo sapiens
tctccttcctccaaactgtcccaatctctacttgttacccagttccaaagtcacttccacattttyaggtatcttttcagcaacaccccactctactggtaccaatttactatattagtccatttgcacactgctgataaagacatacccaagcctgggtaacttatacaggaaaaagagttttatggacccttacagttacacgtgacaggggaagcttcacaatcatggcagaaagcaaggaggagtaagtcaagtcttacatgaatgtcagcaggcaaagagagatcttgcgcagggaaactcccgcttataaaaccatcagatttcttgagacttatttactatcatgagaatagcatgggaaagacctgcccccatgattcaattacctccaaccaggtctctcctacaacatatgggaattcaagatgacatttggatgaggacacagtcaaaccataccaactccataagcccctagtttagctggaagaacacaatgacattttggatcccctggaattaacatcagctcagggctagtatccagtagtccccaaa

SEQ ID NO: 818082 - DNA, 572 bp, Homo sapiens
gctaaaattttgtcatttttttttttatatttttaaaagcatcaaatagctactcctgctttcctttcatttatagttgtgtgatatatcttcttccatcctattactttcaaactatgtctcttccagacaaagcattattggatcacagtctttaaaatccaatttaaaagttcttgggttttggtgagattgtataacccacatgcatttaatattattgatatgtttagaattatatctgccattttgccttttgttttctatgtgtcacatgtcttttttctttttctacttttttttatactaagcagcttatgtttaatgtagcagtttaatttttagtaaattttaaattatattttgaaatatttattagtggttcttctaggacttacaatgtatgtcttaacttatgaaagtctaatttagatttatactgattttatacccataaaatatagaaactttattcctatatagctacattccctccytatattttgtgctattactgtcatacatactacttctataaagcttacaaactgaacaatacattgttataatta

SEQ ID NO: 818083 - DNA, 501 bp, Homo sapiens
ttaacacattttgaggtttaagtgtcggtagtacatatgcttagagatgtccattaggcagacatacttgcagatatggagaggggagagagagacagattttgaaccttcagtattaaaatggtaattaaactacgggaatggtaagacctctcagggggaatgtgtagagctaggaaagtagtgcttttctttctttttttttttttttctttttgatacggagtctcactctgtcacccaggctggagtgcagtggtgaaatctcggctcactgcaacctctgctacctgggttcaagcaattctcctgcctcagcctccgaagtagctgggattacaggtgcttgccatcgtgcccagctaatttttgaatttttartgtagacaaggtttcaccatgttggccaggctggtctggaactcctgacctcatgatccacccgccttggcctcccaaagtgctgggattacaggcgtgagccaccgttcccggctgaac

SEQ ID NO: 818084 - DNA, 472 bp, Homo sapiens
gaaaaatattacaggtacacatggaaaagacatgatcaccaagtgaaaacaatctaaccagaaagctttaacrtctgtcagttaagctgaagctgaaattctgggagcatgacatgctgcagggccaaaaggaatggataattagtattcctctccttcttcctcaccctctccttcaacagaatccacaccaacctcctcataatccttctcaagggcagccatatcttcacgggcctctgaaaactcgccttcctccatcccctcacccacgtaccagtgaacaaaggcacgcttggcatacatcaggtcaaacttgtggtccaggcgagcccaggcctcagcaatggctgtggtgttgctcagcatgcacacagctctctgtaccttggccaggtctccaccaggcaccacagtgggaggctggtagttgatgccaaccttgaagccagtggggcaccaatccacaaac

SEQ ID NO: 818085 - DNA, 552 bp, Homo sapiens
actttgtgtgtttccataatgataagtattgctctttcatttctatatgttagaactccttcaagcctttcttgtagagtcagtctgtttgcgacarattcccttagtgtttgcttatttgggaagtactacttttcttcttgaattataagtcttagttgagcagtatacaaaattcttggctggcatttttttttttctttaagagactgataataagaccctaatttcttttggcttgtaagattcctgctgagaagtctgttgttagtctgataggattctttttacaggtaattagatacctctctcttgccacgtttaagatttttaaatttttgttgactttgagtagtctgatgactatatgtcttgtgctggttattcttgcaatgcatctcacaggaatcacctgagctttttatatttggatgtctggatctgtagtaagtcagggaagtttttgggagttattctttcaaacaagtttcccacacttttaactttttcttcttctccctctggaataccaatgattcataagtttgtatg

SEQ ID NO: 818086 - DNA, 508 bp, Homo sapiens
tatctgtttttttagtctgattccagaggtatttcctttataaaactctctsaggttattctaaattaattctttacattatttttctacctattttgagtatcttctatgcgcaagggactaattggcactttttaaaactattaaatgtttgttcatgtaatctagtgtgtgattctatgttacttacttgttcaaacttatctccataaatttatttctctatttaattattatgctcttaggctcagagtttgtgtctctcttttctccttttgtgtccagcattgacctagcccaatagtcagaccatagtagaccctgaattaatattagtgaatggctgattgattgatgatgaccttgtggcttttcttatttctaaattatatattgtaaaaataaaataaattatagtttttcatgctgaataagtgattgtttcaaagtaggcaacaaaaacaattaaaaacattcattgacatctgtagttcaaatatggactaaa

SEQ ID NO: 818087 - DNA, 592 bp, Homo sapiens
tgggtttagctagtaaaaacaagatatcatattactgtgtcagattagatttggctgtgagatacagagacccaaaataaaggtagcttaaacaggagcagagtgtgtttcatgctcacrtaaaatcctctatacttgccgggcatggtggctcacgcctataatcccagcacttggggaggccgaggtgggtggatcacctgaggtcaagagttcgagaccagcctggccaacacggtgaaaccccgtctctactgaaaatacaaaaacattagctgggcgtgctggcacacgcctgtaatcccagatacttgggaggctgaggcaggagaatcgcttgagcccaggaggcggaggttgcagtgagctgagatcacaccactgcactccagcatgggtgacagagtgagactccgtttcaaaaaaaaaaaaaaaaacctctatactttcatctataaagtggagattattattgtactaccttatttggtcattgtgaggattaaatgagctaatgaatgaaaacttcttagtacagtgcctagtatattatgaatttaacttttattgctgttatcattataatcctttc

SEQ ID NO: 818088 - DNA, 645 bp, Homo sapiens
aaccctcgttccatgcgtctctcaaaaaatgggaagagtcaacaactgagtgtgttcaatcaaaatggcggcaacaagttaaagttgagtagctgagtaatggctgcccactttggccaggcragatagcttggccttcttcttctccagaacccaccagcctctcttgtttgtgtgaccactctagctgctggaagcttttgagattgtaatcccttgtttggcaatgtaaccccaaaagcagaggttttacaatgtcagtcttctttcttccctttcataagtggaaagacccagtatagagattcatttttccactgacgtaaattatactaccaccccaatttagattgcagatgcagttacaaagagtttggttttaaatatattttccacctcactgcataaatgttatatggcatatttagaaatcctgcccccacccccagtaaaggtttctttatgaaaactgaaattcccaccattcaactatctaccatgctttgagatttggggatgattctagctgattccagaattatagctgaataagcataatacctgtcttctgagtaactttcagcaatgtagcccctagcatatctaatttaatgcttgttaaaggaattgcttttttgtttgctg

SEQ ID NO: 818089 - DNA, 622 bp, Homo sapiens
gttgcattagtggggactctgacatacaaattggaggcattcaaatgaaaccagtttaagcaataagaacagaaagatttatttgggttcttataaataagaatccctagatatttggtcttttgaggggaacagatgatttaatcatgcttctctaattctatacaataaatgagatggctgctggtggcccctatgttacaatctgaggaaaaaaagaaatatttttaatagctgtagtaaaaatcccagggaagtctctgattggtcaatgggtcatgtggccacctttgggtgaaggttgggggtaacgaactgaatatattaatatgaaataggatgagggatggagctcaaagaaaatattgctgatcagaccacaaaacaaatggtcactatgcatgaacaaccaggcaccccgtttccaggagaaggttcttcataagggtctttgacttcactggaaaagcaaagctacgtaaaatgcaagaaattatgattttattgacagaattgaacatcatgcagattccagtctttctggattacggggagraaaaaggtagaagataagtattgaaataatgcctcgtgattagccattgaatatatgtgtcataca

SEQ ID NO: 818090 - DNA, 514 bp, Homo sapiens
tttgcaactcaaagtgccatacagtcattactgggaggatcctcacaacagccctgtgaggtaggtgttattctgatttcacaggtggagaaactggggctcagagcacagctgaacagggcaccmgagagagggcaggccccagagctgggaacccacagtgagggaggacacagggatgactcttctgagactgtgtttatgtaactatcattgaacactcatctggggaggctggtcagaatctcccccattcccaggtgccaaggaggtcagaagcagaagggttgcaaggtcgggaagccatcctgatcatggcagatctgctaggttttccaaagcaaagataaaatgtgacctgtggactcccaagaaactgctcacttacctatctgtaggtgtacctacctcatcaacccaccctcatccacccacccactttcctagctattcatccattcatccgctcacttatcaatccatccacccatctgtttatcccttcatccatcca

SEQ ID NO: 818091 - DNA, 616 bp, Homo sapiens
tgaacagctctagcaagccacactgacagggactaactcagaaacacagtgtggagggacagaagcaagccagaaatgatttccacagagtgatttcatttggatcaaggtcaaaggcagrcaaaactggatagtattgtttaggagcccatccaccaatatcaagacaaggttattcccagggcggggaggggctgtggttggccaggggcacccagctgtcttctgggggtcctggcaatattctgctccttgatatggtttatggttacatggatcatgctttgtaactattcttttaagtgaacagggatgctttgtgtacttttttcacataagcaatatctcaatttataaaaatgcaatggatacaatcaatggccaacaagcacatgagaagatgttcagcagcactggtccccagggaaaggcaaatcaaaaccacaacgacatgctcctttacactcactaggaggctaagacaataacaagtgtcggcgagggtgtggagccatcagaaccctcttgcactgctggtgggcatctgaaaggaggcagccactctggaaaacagtctggcagctcctcagaatgttagacacagaatgtgtgactc

SEQ ID NO: 818092 - DNA, 587 bp, Homo sapiens
gggatccaagctccaccccctytgctctcccactacaggactggagagaacatgggaccaagcaaccctcaaactggatggtggcggagctgaacaacgcttcagaggtcacctgtccacatcccagcggctcagacctctgcctaggagggtgggagctcagcaacatttcacttccttagttggatgcggctcagggccctcttcacagcacccagagctgcagttcctaccggctcccaactcccccgatgccctgctgatggccaactcagagcaggtgtcttttagctagtcctttctggaagggggtacaagaatactcacacaaaccgagctggctcaacccaggcaagaatacacaggtcgggatggaggcctggccttttacgcagctgcctagtgccatgacagagcctacaggctctcggacaaatgactaaggccaagtccttaaccacagctacagtttactgagcattcgtgaaaaggtatctactatgagtatttactccatccatcccagtccatcccagtccatcccaatccatccatccatccatccatccatccaatctatctatcta

SEQ ID NO: 818093 - DNA, 557 bp, Homo sapiens
tcgccatgttggccaggctggtcttaaactcctgacctcaagtgatctacctgcctcccaaagtcctgggattacaggcatgagccgccatgcctggcttattttctattttttatgttagcatttcataaactttgtgaatattatgagcatgctgacatgctaaaagatggtctacttcaggggttggcagacaacagccctgagccaaatcatgatgtcccctgcccattcatttacttgtctatggattcttctacactacaatggcaggggcgaacagttgtaatagacagggctggcttcacaggcgtgagacctgtatggtcatagaaagccccagcctttagaatgatctcctgcttggtttaacgctcagctgcaactatcttgcagatattaataatttttaaaaaggggactctgcatttttattttrcactgggccttacaaattatataactggtcctggtgacagagactgcaaagcctaaaattctttagacctataaaacctaatatatttactgtctggccctttacagaaaaagtttgc

SEQ ID NO: 818094 - DNA, 625 bp, Homo sapiens
tagccaaaattcccagagcaaagaaataygtgacaagggttgtggccttgtaacttttgaaattgatcttaaatcacacaaagattttttgctcaaaaattctcctgtggtgcctcagtaacagaggaggatgaaattatcattcaaggagactttacagatgacataattgaggtcattcaggaaaaacagacagaagtagatgatgacagcatcgaagatcttggagaagaagtgaatttgaaaatttgtctgtagttaatggcctgaactgacagtagatatggccaaagggagagaggcctacatatatatatatatatatatatatatatatgtattctacagtaaaactgtagactgccttcgttcttggcattttccctgttctgtacaaggctgcttatttttttattgccaaagtcaaataaacaggagagactgtcatgctcatacatgaacagaatttagtcaaataaaaaattttggttatttggtactttttttttttttttttgagacggagtctcacactgtcgcctgggctggagcgcagtggtgcgatctcggctcactgcaacctcgacttcccgagttcaagtgattctcctgcctgagcctcccg

SEQ ID NO: 818095 - DNA, 580 bp, Homo sapiens
aggagatcgagaccacggtgaaaccctgtctctactaaaaatacaaaaaattagccgggcgcagtggcgggcgcctgtagtcccagctactckggaggctgaggcaggagaatggcgtgaacccggaaggcggagcttgcagtgagcggagatcgcgccacagcactcccgcctgggcgacagaacgagactctgtctcaaaaaaaaaaaaaaaaaaaaaattttaaaggtacaaaaataaattatgaaagtactaaataaaatttgggtaaatatatattttatacattaatattgtatatatggggtgggcaaagcttttctaaacatgtagcaaggacagaaatcataaaggaatacactgattaatgatataataagggaaaacttacacatttttttgaacattaaaattgaaggaaaaatgataaatttggacaaatgtttgcaacatggtggggaaatgattaaaaagtcaacatatgaagtactcttagcaataaaagaccatctcttcagtaaaatactaggcatgaacatgcgtaggcagttcagtaaagaattacaaataaaaacatga

SEQ ID NO: 818096 - DNA, 479 bp, Homo sapiens
tcttagaaaaaatagaataaggagttttttcctctccctygagtttcctgcattaattacagtaagaggcaggagagggaaagaatacattgcaaatacagaatttcttaagccataagctgctgaagaagatactgtgagtaaatttgatctttgactaataatttctttaaaataccttgagttcctactgaatttatttgtattttgaatcatatccttattgtctaaagcaatcactatatccagtcttgtaatagagtattcaaggcaacaaattgtccacagggagaatatctctgtggattaaccatagcaaaatctaaattcggggtcaacttcctcttgctactattccagtcactgcactatctcttggtgactcacagttgtatatgctaggagctttggttctcacctatggctgtaccttagaatcaccaggggaactttaaaaagaagttcttatggctgggtcc

SEQ ID NO: 818097 - DNA, 508 bp, Homo sapiens
tgtcatatcatatttatatcatatttatttaaaagaagagtaataaacattagtaagagggaaatttrttataaatagatgtggacttccagtaatagtaaggaaaaagattaatggggaccctccaccacttcccatgacaaacacaggatgaaatataactatgtaaagaagctgagctcaaaacaaagaaagggaaatcctccgaggctagaaataaacaggcaaactgaaaccagagtggaaagcagacccgttaatgctaaggaagggcatgggggggacatcagaacagagtgtgggttctgacatctagggactgggcatgtcatgcccatggggaacaggaattagggcctcaggcccacataaatggaaagttggaactgagaataggatataaaaataatttttgacaatcaaggtctgagagagtttactaactctgagactcatattgaaagaactactaaaggatgtgctgtaagaaagaggaaactgagcccag

SEQ ID NO: 818098 - DNA, 598 bp, Homo sapiens
ctaaggacttacctgtaattgtgtagggataatagttccaagccttctctgtcacataaaatattttggggacaacagctctagcccaactaggcagtttgctaagaggaaagaaagaaaaaagacaattggagtctgttcagagtctcaccacactaccacatctttctggataaaatgctggagaaatcagggggattctggggcatctcttttctccacagctgccctttccccatctcttcggtctttgtcatagttaactttttcccgtgcatattcaagtgctctcaaaatgtgtaaagacagaaggctacagcctggtgggggactccatcagactgtcagcctgtcctctttggatttgcaaagacatgagaattcagggcctgaagggttccatgtttggagggttggccagcctgacctttgcctcctaggagtggtatcacggaatgtttaagcccaaacactggcagggagaggaagctaatcttagagatagatgtcagcctaagcaactcatacaagtgacattttgaaaatggacaaaaccaacagagakcagcaacttagagataggaagagcaacaaaata

SEQ ID NO: 818099 - DNA, 572 bp, Homo sapiens
ttaattgcaatttgactaatgttggactacaaataccttcccacaactcttgccacttcttcaagacatccccagtcccggggatatcactatttcaaagcaatcaagaattctaatttgactccatattttgcacttgaaatttacctcactttgatcttcataaagaatttatcaagaacccactaaatgtgagaaacaaatgaccaaaggcattcttcactgtttatataagatgctttggttttccaatgatttcatagtataaaacttgctaatgaacatccgatgaatacaacctcagcgatttgaaaaacttacaaaatataatatctctgttgagcacttagtgttataaagaacataaaacatagcctttgtttaaaagttaatgtttatttagctgtgttaattgttgatgagttaatgtttatgaattaakgtttaattcaactgtgcaaaatattttcactgatccctttcaatgtccataagtatatgattgtatagagtctaatgacatattatattctgccctgttaccttatttgcttacctgtcttattcttgtc

SEQ ID NO: 818100 - DNA, 314 bp, Homo sapiens
taagtattttgttttctcaggtgatgggcagggccataaagctcccaaaaatttctgtcttttttgttcagctacaagaatgggtagagaaataccatcaggtgggggcagggttagggaggtccgggctcacgctttcctttggcagggcttgctgtggccactgggctgggcggtggttctcaggcyaatgggatcagttccagaggggatctttgctgcctctcctatgtcatatagtttgccatggtagtagaggatagctggtagtgagaggtttcaacacagttggtggggctggtctctccttcagt

SEQ ID NO: 818101 - DNA, 546 bp, Homo sapiens
gaaaatgatttagactatattataaatattcatgagtttatagtgatattcacaaatgattgaattaaaaaatggagcacaaaatataaatctcccattcagaagaataaaaaatgatttatgtagatactgtaccctcaaagaggttagcataatgcttcatagtgattttcttccaaaaggtacagtacttcaaagaaatggggataactttaccttggagaaacctagcaagcactgcctcagccagattttcaaggtcaacatccacgataataagtgatgctgatagcatgtacccttagtatgatgtgataagaatagcactttacctttgtagtcttttttccaaaaatgcacattctcatttgataatgagaacacataagacaaatcccaactgaggtatattctgcaaaataactgaatgatactctttagaactgtcaaggccataaacaaaaaagaaaatcygaaaaaatctgtcacagccaagaggagcctaaagagacataatgtcacaatgtggtatcttggatgggatcc

SEQ ID NO: 818102 - DNA, 585 bp, Homo sapiens
ggagggctctaagccattccagaggatccagtcccatggtggcaggccaggtttccattagcaaccagaacagtttccaataacccttcactataattttgatgaacacataagttaaactttgaagaactggagaaactggtgcctgagtacaagggctggaatgccaaaacaaacccattaagaccatacccgggttttctcagaccctaaagtctgatcgaataataatagcattcttacacaccttgttttgtcttaagattaagaaattttccaagactctagagaaagctttccagacctcagaccccagttaaagattagacatagatcgagtgaaacactcctgtttgtaggtgcaatctcacatctagcatggagcttaaaatgtatgtaagcactagaacaaaacttgtaactttgggttggtctggtgagttactctgactttctccttgtaaccagttgcagaaataaactcccttcattcccagtctgtctgcatcttgttattggactggragaacaagcagccagaccccaattttatccaggaacaccatgattcaaacatctctcatt

SEQ ID NO: 818103 - DNA, 638 bp, Homo sapiens
tggtcctttaacacatatgtagcttagatatagtaagaagtggcagtaaccaattttgttatttttcttcatttcctgaattagtttcctaaggctattttagcatactggtacaaatttaatgggtcaaracacacacatttattatcttaaattctgaaactcaggagttctaaataggcctttctgtacaagcagggctgcatattctctttttttctggaggaactatagaaaaatccattttcttgctctttacaacttttagaaggtgcttacattccttggcccacgtcttccttccatcttcaaagccagaattggtcagttgagtcttaaaccaaatcaccctgacactgactcttctgcctctctcacaaatatttaaggatgtttgtgaatacactgggcccacctagatgatccaggatggtctccctattttaaggtcgtttgattagtaaccttaattccatctgcaaccttaatccctcttttccatgtaatacaccatatttatgaattccagggattaggtcatgaatatctttgggaggccattattctgtctaccacattcttcttgtcaaatgatgttgtacaatttgttcttctcttccctggttgaaatcttagtc

SEQ ID NO: 818104 - DNA, 549 bp, Homo sapiens
actcattattttctccaaaattggaggtctgtaatttctttcttaattcgtgtgttatataatactcatcccccattgtttcagttrttgctttaaatactaatattcctcgtgtaaaagtgagtcatagagtccaatgcacctggccaggagcatcggctacagggcctctacgggcaggattcgctgaataggggagacagagctacctgtctagtatgatgttcgggctctatggagaatagtaatctagagcttaagatgggaaaacaccactttgggaggccgaggcgagtggatcacgaggtcaggagatcgagaccatcttggctaacacggtgaaaccccgtctctactaaaaatacaaaaaattagccgggcgcagtggcgggcacctgtagtccctgctactcgggaggctgaggcaggagaatggcgtgaacccgggaggcggagcttgcagtgagccgagatagcgccactgcagtccggcgtgggcgaaagagcgagactccgtctcaaacaaacaaacaaacaaacaaacaaaga

SEQ ID NO: 818105 - DNA, 636 bp, Homo sapiens
actttcagttggcctttgaaatttgagaaggtcgtatagtacatttgccataaagtctttgcttaacgtggaaaacaagtctttartggaagcccaatatccttgggacagctgctgtaagcttttttagtaaatcactgctgcttatgagtttaaattttattacggtccagttagtcctcatcagtatgaaaaagtctgatttatttggtcaaatttacagtttctgtcttactagaagacaaaatcattattttatttgccctccacacaaggtcagtaattggaactccccaaatacacattcattttagttgttcagagaaagttacaaaacataattaaaatggattccttagaccacatttgtggtgagattgcaatgacggacctgaataaaattccctctcactctccaagctctgaaacatcctctggtttctgcagtgtatacttcaggacaactgaaccctgaggaatatcagcataggccatgtcattttaatcagtaataagagtctcacattgtctagttctttcctgctttacgcaacactgttgaacttcatttggattttcatttctaaatttcagagtgtgatgccaagattgctaaaacatttcagctggtaagaa

SEQ ID NO: 818106 - DNA, 629 bp, Homo sapiens
taaacatattcaacgtgtgagacaatataaaattcctagaaaccactattttggttcatttggaccaaagtatctcrgtaggttggaaagtttagttgtctaattcacaaacttagcacttcatctactcaacagagacttccagaattaatcatctaggaagctggccaggatgcaattggaataacaacaggaaaaccaaaaatgattttctagtttatacactcatatatacagtgtacatcactactatagaaagaagagtcaaaaattaatatcctctgcaaatggaagagtccacacagaaaccaaatacatttctggaatgccaatgacaattaaagttacattgaatgtaaaggcattaatattctttagccagtgtataccctgctaatgtctggtgacaactctctgatgttctctctcactttttcattaaaaaaaagacaaagttcctgttttacataaattgaagagcctttaaaattactttttctcatcctcctctttcataaatgtttttcaggcatcgacctagtttatatgacaacacatccttttgagaaaatcataaggtatttacttattgggtacctactgtgtgcattattagagcagttatgact

SEQ ID NO: 818107 - DNA, 637 bp, Homo sapiens
tcatctgtgcctcagtttgagcatctttaaaatgtgaagctaatagaacctacctgttttaggcataatgatctagaagaagagctaagaaaragcttcttatggaggtaaattgttgaagggctgtgctgaggaaaacagggagaagtgaggaacaggatggacccgggggaaagcagagcatgcacatgacctcccctcgtgtctcatcatcaattgcttcagactgacccaaaaattcatggagtaaaacaacaatccttacattgtctcatgattcttgtggttcaggagttcgggcagggtacagtgaagtttgtctctgctccaccgtgtgagataaagtggctcaaacagctggaggtggctgagagagcatgactggaggcttaagttccatgtggcatttactggggatgcaatggcctagatggtttcttcactcacgtgtctgacacttgggccgggagggctggaacacctgagggccagctcttctctgtctgtctacacatctctctctgtgactggcttgagctcttcatagcatggcccccaaagaatgggcaggctttgttacatcctgccttgccttcctcagaacaaatattgcaagagacatttgcaggtgcttcaa

SEQ ID NO: 818108 - DNA, 612 bp, Homo sapiens
attcaaatatatattccttgagttgaaaaatcaaatcatttttaaaagtgttagctgatgttaattagatgcacctaatgacatatgtaaacttggcagcatttaattgtttgtaaaattagttatgaaaccactaaattcttctaataatgtaacaaagacattaatatgtatactcactcactttgttatatatgtacaagatatttggaattctaaattaccaaattgtgtttagaaaaacagtcttctgattaaaatggaaagtcatggttcttaaaaatgatgttaacaagatattatgaggttacatcttttttgagcacagtcttctgtaacttgtgaacatggcactgatgcttcctcacagatttgtttcttttgaatttcatgtgattggcaacatcactatgatcaaatggtgggtggtaaatgtcaaaaaatatttttgcaagttgtgtatttaccttgaaaaacagaaattcactatcttaatttatgattaaaaatgcattttcatttgtatttagttcggtaytgctgaaagggttattgcattaaaaaatttttaagtgttatcaaaaagtaaataatagccacttgatttgcacc

SEQ ID NO: 818109 - DNA, 545 bp, Homo sapiens
tgctttttaatgtactttggccatctctactctgatttattagtaacatttcaaytctcagaaagtgtatgtatcagtcagcatcccagtaagaaacaggcaacactcacagctgagatgtttgtgaaaatgaaagatctatctgcaagagatatagacaagtttaaggaaaaccacagatgtgttgagacacccaagaagtagcaatagcaatcagctgataccacccccctagcactgatagagaaagaagagaaaatggaatcactaaagtctgggtcataatataaatgctaccaggcagaagccgccccttggcaaggcatagccagaaccacattgaatcagaaatacagttgtaggaaaaaactactctgagctacaggagtctcccgttaggctgatgcccaccagataccacagggaaaggagttccaggtgatgcagatcatacgagcaagccttgctgggcacagagcaagacagagatgggcagagaacagatgtgagggcaaagggaagagaacaggatccaaggtccatta

SEQ ID NO: 818110 - DNA, 555 bp, Homo sapiens
tgcctgtaatcccagcttctcaggagactgaggcaggagaatcacgtgaacctaggaggcagaggttgcagtgagccgatatagtgccactgaaatccagcctgggtgacagtgcgaggctctgtctcaatttaaaaaaaaaaaaaaaaagaagaagaaaaagcaattaataactcattatttctgcattttactcatgttcaaatatttttatatatttttcatatagtgtttagagtataaaattaagtgaaaaatgatgacttgaatccaaatttttttaaaaagctcattgtatgctttcataacatatattgtttaggacgtaatacttattgaacgatcgtaaaacgtagcctttaaatattgtctccttcaaatttatttatcacgcttgcatacaaaacaacccacttaactgtttatttgccctatgactttattttgatttctacggtttttcctctttcccacagaattattgtttcagtacctttcgttgttaaaaaaaaaaagagctaatcaaatgtgtraagtattataaatgattagcag

SEQ ID NO: 818111 - DNA, 621 bp, Homo sapiens
gtcttgggtgggtgcgtatgtccaggaatttattcattttatctagattttctagtttatgtgcatagaggagtttatagtattctgtgatggttgtttatatttctgtggggtcagtggtgatatcctcatcatttctgacttgtttctttgattcttctttcttctttattagtctaactagtggtatatctattttattatttttttcaaaaaacaggctcctggatttgttgatttttgaattttggggggtttctatctccttcagttcagctctaatcttggttatttattgtcttttgcaatgttttggatttgtttgctcttggtcctcttgttcttttagttgcgatgttaggttgttaacttgagacttttctagttttttaatgtgggcatttagtgctataaatttccctcttagatttgctttagctgcatcccacagattctggtacattggctctttgtttttattagtttcaaagawcttcttgatttctgccttaagttgattgtttacccaagaatcattcaggagcaggttgttcaatttccatgtagttatatagttttaagtgaatttcttaatcttgcattctaatttgattgcactgt

SEQ ID NO: 818112 - DNA, 613 bp, Homo sapiens
aatttcagttgctttatatctcatcagcatttggcatcgtcagcctttttaattttagtttagtaatgtgtatgcagtgacatcgtattatggttttaatttgctttcccctgatgactaacgctgctaagcagcttttcatatgcttatttgccatccttaaaacttctttggtgatgtgtcaattcaagattttacccatgttatattgggttgtttgcgttctcatttaggatttgtaaaaattttttgttccaattttttttttatcagatttgtgttgtgtcaatattttcttccactctgtggcttaccttctcattgtcccagtggtggtattcaaaggaaaaatggttttaattttaacgaagtccaacgtatcaacattttcttttatggtttatattgttgctgttgtatctaaactgtatttccatatttatttctaagagttttatagttttagcttttacatttagtcccaygttccatttcgagttcgcttttgtatgcaatgtgaattgtcaaagtttatttttttatatggatagcaatctttttttttttttttttttgagacagagtttccctctttcgcctaggctggagtgaa

SEQ ID NO: 818113 - DNA, 558 bp, Homo sapiens
ctgtcttgagttggttttttatatggtgaaaggtagaggttcagtttcaatcttctgcaaatggctagccagttatcccagcaccatttattgaatagtgagccctttsttcattgcttattattgttggctttgatgaagattagatggctgtaggtgtgctgctttacttatgggttctgtaaactgttcagttgatctatgggtctgtttttgtaccagtaccatgctattttagttactgtagtcttatagcatagtttgaagtcaggtagtgtgatgcctccagccttattctttttgcttaggatttctttgactattcaggctctcttttggttccaaatgaattttacaatagtttttttctttcaaattccatgaaaaatgatgttagtagtttgataggggtagcattgaatctgtaaattgctttgggcagtatagctattttaacaatactgattctttctattcatgagcatggaacgtttttccatttgtttgtgtcatctctgatttctttcagcaatgtttcgtaattctcattgcagagat

SEQ ID NO: 818114 - DNA, 626 bp, Homo sapiens
gacctgcagctgcacccatgttgctgtaaaggacatgatttcattcttcttatgcctgggtagtatttcatggagtatatagaccacattttctttatccaatccaccattgttgggcatctaggttgattccatatctttgctattgtagtagtgctgcaatgaacatatgagtgcatgtgtcttttctgtagaatgttatttttcctttgggtgtatatccagtaatgggattgctgggtctaattgtagttctgtttcagctattttccaaaatttccctgttgtagccagccttcaagatgaccctcaataattctcaattactggttcatggctttgtgtagtcctctctcacattgaataggttcgagtgacccatgttaacaataagatgttgtgaaaatgctggtgtgttacttctacaggtaggccatacaacacattgtatcttctatcttgctcctgcttggatcattcaccctggaggaagccagcttcaatgcagtgaggacgatcagamagctcaatggagaggtctgtgtggtggggtccatgtatgctggcctcctgccagaagcactcagttgccagtcgtgtggatgagccaccctggaagttaatcc

SEQ ID NO: 818115 - DNA, 548 bp, Homo sapiens
ggaaggctcccttccgggtgcggtgatcacaaaaggcccaagcaaagtaacatcatttggacagctccctagaatcctcatctcaaggctgtaagaaaaatcttaggaatgatttagtgcacattcttcattccacggaggaggaaactgaggcttgtagaaaagaattgctctgcccaaggtcatagcctctttgtggcaagtagctgaaaacccaaacccgtgacagtaggtccagtgctctctgcagcaagccgtggaccccacctgctaaatcacatctctggcagaactgtcgggcagactttctttgaattgacaaacagaatgggagagaaagtcacgtgcttcagtcaaagcaaaaaagaaaagcttttattctgtatgtggtttctcatagaatacttctcgcccagctgcgcccaagtaggtaaaaggctcttgcttatgctaaggagcctttcttatctctgcacaycccactcctttcctgctaataccaagtacagaaggcaatgaaagaaaaggtcacctgccttcctcctaat

SEQ ID NO: 818116 - DNA, 537 bp, Homo sapiens
tccaatgaaaggggaaaggattgaatctgatgacctgggttcactcctagctttactatttcccagctatagaatattgggagtccctggacttccttgagacttagtttgtttctctgaaatataagggcataatgtttgtcctttatacagcatagatttaaagatcaaaaagctgtagtttttttgtaggtcaaaggggctctgtaaatcgtaaagtgcttgcagaatggtgaagtggaaatacggtgggattaacgtttagatgacccagccttaaatccaggctctgccaatgattggttttagattcctaatatttagaatgactagataactttgactttccttagaggtctaataatccatgaaattaaaatttcaagtattcaaaaataatttaaattcaacctctgagtcaggaaatgaaaactgatctctttagatttcaaggttttaaatatgataaagtakacataagcagaaggaaacattggaaatagatgtttcacttgaaatgggcagcttttttagaaa

SEQ ID NO: 818117 - DNA, 518 bp, Homo sapiens
acagtaagtttagcataattcttagggacactaggatttctcaaatggtaaatgagtatyggcttcaatttaaagtcaccagctgtattagcccctaacaaaggagtcaacctgtactttgaaactttgaagccagacattgacttctccacagctatgaaagtcctagataacattttcttccaataaaagaccatttggtctaccttgaaaatctattatttaatgcagccccctccatcaattttcttagctagatcttctgggtaacttgctacaacttctacatcagcatttgctgcttcttatattatggagacaacttctttccttaatcaaccactgttagcttcaaacttttcttctgtagcttccttgtttctcttagccttcatagaagtgaagaaagtcactttattctggatttgactttggcttaagggaatatcgtggctagtttgaacttttacccagagccctaaaacttcctttatatcagcaataagattgtttcagtt

SEQ ID NO: 818118 - DNA, 641 bp, Homo sapiens
ccattgtagcattattaattggtctaatttcaataatgttttttctcagggaatatggaagctgggggagagggagagagatggagaatgtctggtctgtggagcagtcaacacacacacacatttattattaagttcaacatgttatctgagtgtggtttatggtgccccaaacaatgatggtagccacatcaaagatcactgatcgcagatcaccaagacagatgtaataatagtgaaaaagttgtaaatattgtaataattaccaaaatgtgacactgagactttaaatgagcacatgctgttcagaatgactcccattgactcctatagacttgctccatgcagggttgccaaaaatctttagtttgtaaaaaaaatgtggtatctgcaaggcacaataaaatgaaacaaaataaaaaatgatatctttgtatgtggtcttttgtgtctggcttctttcaccaagcataacatgattgagtttcactaatgttatagtatgtatctttgtccttttttataactgcygagtaatgttctgttgtatggctatgacacattttgtttatccattcactcactgatggacatttggcctgtttccactttttggctattgtgaataaagttgctatgaa

SEQ ID NO: 818119 - DNA, 579 bp, Homo sapiens
ggcaagctcaaatctgataatcccaaaccagcttgctcactacattccctgtgtatcactttactctctaaacaacaygaatgatcacacatgcatacatttatgtgcacattttacttttcaaactgtgagtgtctgatctttatcttaattaataaccctactgttctccttgttatccatatttgaaaaactaaagccatttcaatgcaccccttgccttcacatccaatcagtttctgaattttagcatttcttttttgttgttatgtttcatacaattgtaaacattttttcattctatttctaccatggagaaggcagtatcatgtaaaggttaaggactcaggctctggaaacctgatcttagatctggcacttccttcctgtgtaaacttgggcaaggctcttaatctctgtgcctcaatttcttcctttgtacaataatcaagtagatgtaggcttcagttctcagaatgtttcagttatttttatattgacctctccatagggctgcttgagtttcctcacaatgtggcagctgcctttccccagagcaagtgatacaagaaaagacac

SEQ ID NO: 818120 - DNA, 575 bp, Homo sapiens
aacaaatgtatgtataatgacacgtgtccatcattacagtatcatacagagtattttttacttcgttaataatcctctgtgtgtcacctgtttatccctttctgccaacccttggtagccacttatcattttactgtttccataatttttcatcttctagaatgtattacagttggaagcacacagtatgcaaccctttcagactgtcttccttcacttagtaatagggagaatgaattaaatataggaactcaagtttcctccatattggttgtggcttgttagctcatttatatttagtgctgaataatatttcattgtctgtatgtaccacctttgtactttcagttttttggtttcttggtatatcttggttgcttccagttttagcaattatgaacaaacctactataaatatctatgtgcaggtttttctgcagtcaaaatttttaacttctttggataaataccaaggagtacaattgctggatcatatgataasattatgtttagtttttatagaaactgccaaaaggttttccaaactggttgtaccattttgcctttttcaacag

SEQ ID NO: 818121 - DNA, 637 bp, Homo sapiens
acattgtataaaggaggactttcatttgtttaacatcttttttttgtgccagccgctatggtggatatgtgccaggaacttacatgagtgatctcattcaagtgtcttttccctgggatatgggcagaggctccaggagatggtgccatgcagctcggagagggaagccaggatctgacctaggactctcagatgcaaagtgccttctgctgcctttctttcaagctggccactacgttgtagcatgtgggcatggtctctgcaaagacaaaacccactaggcggagagagggcagattctctagcacatttctagtgttgatgccctaatgggagtacggaccctcattggggattccatgagtctgagaagtgaaggtgatttgttaacagttgctctccctggggttagtgaatgcagtagctttaaaatgcactctcggaacttggcaggcagggcaggtgtgtcactagcaacccacagtggggaacgtgtggatgaaggatcgctggtgcattgtggaacctgcctctggggcatttctcttgaaggaatctcaccccagtaaggtcarattgcaaacacgggatcctagaggggctaaatgaggcagtattatgaacattcttttggaga

SEQ ID NO: 818122 - DNA, 497 bp, Homo sapiens
cctacacacacacacacacacacacatacacacacacacataagtccttacactatttgtccagtaataaattattaatccataaaatatcactaattcagactaattactagtcttaatgtatgtctatgctaccaagatatccagatattttatagctatacaaattatctatcacatgatggacttacattctgtctccaaggcagttctgagaacattgttatcttgctcctcatcctacacgtccaaccctaaaatttccacactcctcctcattcgtgcccagtcagttccatcccaggcaaaaagagttcaaacaaaacctaacatcaagtcactaaactaaatcaagtttgtgtttgcatwtgcagtaaatgatctgtaacttgtaagccaattatttataagtaaatatatgttttaaggtttttgaaagcaatttgctctctgaattaagttaaacaggcccttgaaatctcatctgtgcaataact

SEQ ID NO: 818123 - DNA, 620 bp, Homo sapiens
tcacaccaattagaatgattattactaaaaagtcaaaaaagtaaccgattctgatgaggttgcagagaaaagggaacatttatacactcctggtgagaatgtaaattagttcaaccattgtggaaaccagtgtggcgattcctcacagaactagaaagagaactaccatttgacccattactggctgtatacccaaaggaatataaatcattctaccatgaggatacctacacatgtatgttcattgcagcactattcacaatagcaaggacatgaaaccaacctaaatgcccatcaagggcaaactggacaaagaaaatatggtacatatacaccatggaatactatgcagccataaaaagaacaaggtcatgtcctttggagggacatggatggagctggaggccattatcgtcagcaaatgaacacaggaacagaaaatgaaatactgcaaattctcacatataagttggagctaaataatgagaacacatggmtacaaagaggggaacaaagcacactggggcctatttgagggtggaggttggaaggagggagagaatcagaaaaaataactattggatactaggcttaatacctgggtgatgaaataatctgta

SEQ ID NO: 818124 - DNA, 605 bp, Homo sapiens
gtattagatattaaaaagtagttaacaatccccccacctgatatcattgaaataggtgtaagattgcacaagttaacatttcatgaaragttatggccagtgatattgaccttctttttgttttagttctgttcaacttcacttgagcttccagaagtaatgaactcatcatgacaaaatctaccataaaagagcttgtgcagttctaactctgacctttttcttcctgctagggattcaatggaataatatgtaccaggctctggaacaagggggcatgacatttggctgggtttgctggatgattctttttgattcaagcctttattttttgtgtggatggtacttgagcaacttgattcctggtaagaattttgccttttgtaagataacacaataaattttaaaaacagtttgaattaatatgcataaatattagaataatcacttattctttaaggaagatccagaaagggaagtcttaggatatatatttaaaaggagctgtacatttttgagaaaaaatgtgatgcctttgtttcccaagtgaaaggtaaaaggccatgtgagggaatagccaggatgaaattagcatgaaaactcac

SEQ ID NO: 818125 - DNA, 627 bp, Homo sapiens
ataaatatgaagaaatttggagaattcccactttctgatttcaaaggttactacaaagccatggtaatcaaaacagtgtggaactggcacaaaaacagacgtaaagaccaatggaataaaatagagaactcagaagaaaatgttcacatatatggtcaattggttttcaacaaatgagccaaaaccattcagtgagaaaaagtcatttccataactgatgtggggaatactggatatccatatgcaagagaataaaaatggacacctaccatacacagtatagaaaattaactcaaaataaatcaaagaccttaatgtaaaagctaaaactataaacttcttggaagaaaacacaggaaaaaacttcaggatattgcagttgccagtgattttttgggtttgccaccataagcacaggcaacaacaacaacaaaataggtaagctaaattccatcaaaattaaaaactttagtacaagaaaaactacaattaatagagtaaaaaggtagcccatggaaagagaaaaaaattgcagattatatttctaatatgagattaatatccagaaaacaamgaacttctacaagtcaccaccacaacaaaaaccaaccccattcaaaaatgggc

SEQ ID NO: 818126 - DNA, 669 bp, Homo sapiens
gactggactaataggatagatgcatgcatgaaaggaagtttattaaggagtactgactcacacgatcacaaggtgaagtcccacaataagctgtctgcaagctggggagccaggaagccagtctgagtcccaacacctcaaaagcagggaagccgacagtgcagccttcagtctgtggccaaaggcccgagagcccctggcaaaccactggtgtaggtccaagagtccaaaagctaaagaacttaaagtccgatgatcaagggcaggaagcatccagcacatgagaaagatggaggccagaagactcagccagtctagtccttccacgttcctctgcctgcttttatcctagctgcagaggcagctgattagatggtgcccacccagattgagggtatgtctgcctctcccagtccacagactcaaatgttaatctcctctggcaacatcctcacagacacacccaagaacaatattttgcatccttcaagccaatcaagttgacacttaatattcaccattgcattggtgcatggaattccaccaaatcacaagtatggaataaacacccaagtccttcagagtcaccccagacccactygaaagcaggctgatggcacaagtgtgaggagaggggagcagaggcctgcggttgtgaaaagcagataa

SEQ ID NO: 818127 - DNA, 669 bp, Homo sapiens
gactggactaataggatagatgcatgcatgaaaggaagtttattaaggagtactgactcacacgatcacaaggtgaagtcccacaataagctgtctgcaagctggggagccaggaagccagtctgagtcccaacacctcaaaagcagggaagccgacagtgcagccttcagtctgtggccaaaggcccgagagcccctggcaaaccactggtgtaggtccaagagtccaaaagctaaagaacttaaagtccgatgatcaagggcaggaagcatccagcacatgagaaagatggaggccagaagactcagccagtctagtccttccacgttcctctgcctgcttttatcctagctgcagaggcagctgattagatggtgcccacccagattgagggtatgtctgcctctcccagtccacagactcaaatgttaatctcctctggcaacatcctcacagacacacccaagaacaatattttgcatccttcaagccaatcaagttgacacttaatattcaccattgcattggtgcatggaattccaccaaatcacaagtatggaataaacacccaagtccttcagagtcaccccagacccactcgaaagcaggctgatggcacaartgtgaggagaggggagcagaggcctgcggttgtgaaaagcagataa

SEQ ID NO: 818128 - DNA, 445 bp, Homo sapiens
actgtcagaggtggtaagcaaagtactctgaggagcagtacacagtatggctgctgtttcctttccgggagatgatacaatctcccrgggggcaaggccaggggtgtgacaggtcagaagtgagcctggctgtgtctgactgtggctaatgagaacaccacccacagcaactgccttcagcgaccctcagcccacaaggtcctgggagggctgggacgaggcctcctggttgagataggagaatgagaatgagcccttgttcctgtccaggaccctccttttgcagagagtagaggtcaaaggagctggggttcccctcctgaagccagcaccataggcagctccgtccccctctctgcctagggaagccgggatggaggaagggggacttgaccttgggaagcacaccccagtgcttggatggattctgagatttcataatgaa

SEQ ID NO: 818129 - DNA, 594 bp, Homo sapiens
gtcctccctccatcctgcttataggacacacccaggtgatacagccygaatttctggcaatgctcatatgaactgcaagctcctctggaggtaacgtgggtgtgtcaggacacagcgtctgtgcagtggagacagcacaagtcactgcggggtaactgatgagatgttccacactaaacttcaatccacttctaaatgacaacgcatggttttaccttttgggcctagtcactttcatccagaatgaattataaacataaacttcaatctaccacaatggaatcagtttcccaatcacattttatttgccattattttcaaaaccaaacacctcaggctttgtggacctgaaaaaaaagaaactggaaacggacattttctgtaaacaaatcctgcttctggtcccgtgggcgaccacggcaagtccatcagcggatgtgctcagcctctcccagcttggcccagcaccacacatgctgccgatgcccgttagcactcgtgtagctcaggtcatgaagagcacactgaccttgtcatatgtaactgtgagtagatggttgagaggtgagccggggtcatacatgtgtgtgtgca

SEQ ID NO: 818130 - DNA, 585 bp, Homo sapiens
tgtagctgccttctgttgagcacgctctgtgctcggctctgtgtarggagtgtgtatccatgaccctatgggatcctcagaacagcatcgtgggagggctgtgggacccctcacactgaaggtggaaacggatgaggaacaggggttggtgcatgtcagcatggaggctgggccaagcctgccgtctccagcaccctcttcatgaaaggaaggtgtgggcaactggttccagggactccgtgcttgtggggacaggaatgtgactccaagttctttgtgaatgatactcaggcagacaagatgaatggcagtctgccgccattccccttggtgcttttgcactgagacccctccttcctgaggctgaattacaccggccgtgaaccccacgggcagcgactgaagatgactctgcagaccctgcctttcctcagtcatcaccaggtctgcacagacatcgtgggcacttgctctgagccaggcgctcctgatggggtgctggggagactcggtgatgcctcttaccatgcgggaccagcactaatgcccacgggcacccttcaggcaacgtctccctgggcgtta

SEQ ID NO: 818131 - DNA, 613 bp, Homo sapiens
aagacaaggggtctgtggactccccaagcccactaractggctgcctctgcagggaagcagcgggccctgctggggctcctgccttgcgcaggtatgctaggtgcccccacgcctccctcccttaattctcaccatcaccccagaggcagctttagggggggctcgcccagtgtgctgaagatggtccctgggggagtggaacctcacagtcctttcctctgacccgggccttgtgaacccttccccattcaattccgagaatcaggacgcactgcgctcctttgacaaccctgggggcatctgtaccaagtgacacaactagctcaggaatcccaggctggagaaggaggtttgatcccagtgctggctccaagaccagggacacctgccaccagggcctcgcggggctgtagagaggctgctcagcaggatgcctgctcactctgttcttctgattattgtaaaaccacctttaaaaccatgattcccaatgggttggacgcattagcaagtctggattcatttttggacaaggaaacaattccactatttcctgtaacacaaactaacgtattctatgacattccttagatcggacgtctaaattggaaa

SEQ ID NO: 818132 - DNA, 536 bp, Homo sapiens
atattagcaaattaatctaacaatgtacaaaaaaaaagaattatacaccacaatcaagtggaatttatcccaggtatgcaattcttgttcaacattcaaaaatcaattaatataatctaacacatcaataggctaaaaaagaaaaaatatataataataatagatacaaaaacagcatttttacaaaatccaacacctactcatgattttttaaaagaaactcttaagtaggaatagagggagggggacttcatcgacttggtacagaatatctaccaaaaaacctacagctgccatcacacttaatgagcttctcactgaggtcaggaacaaggcagggatattcctcctcaccgctgcttttcaagatcatattcaaaagtcctaactaatgcaataagacaagaaaaggaaataaaaattgtacagattgggaaggaagaaacaaaactgcmtttttctcacgcgtcacatgattatctatgtggaaaatctgaaagaatcaaccaaaaaaaaaaaaaaaccctttgaactat

SEQ ID NO: 818133 - DNA, 640 bp, Homo sapiens
cacattgtccccatggccttcttgcagcttgcctctctcctccagggagtgactgccttggcacactctgttccaaatawgacctgacaaacaagtgtgatggatgtttcctgtctttcctcttcttcctccgttctcctcctttcctttcattctcttttttttaaggccatcatagttgacaccaagatccccctttcaggactgaaggactgagttgtgcctccctccctgttttagtccattttcaagctgctgatcaagacatacccgagactgggaagaaaaagagtgtaattgggagtacagtttcccatggctggggaggcctcagaatcatggcaggaggtgaaaagcactttttacatgccggcggcaagacaaaatgaggaagaagcaaaagtgcaaacccctgataaacccataagatctcatgagacttattcactatcatgaaaatagcacgggaaagactggcccccataattcaattacctccccctgggtccctttctggaaaatacaattcaagttgagatttgggtggagacacaggcaaaccgtatcactccccttctcggctgctgggaaagcttccacaaacagccttcacctcaccacacagcctcttctggaatca

SEQ ID NO: 818134 - DNA, 493 bp, Homo sapiens
aaggctgcagtgagctgggatcgtgccactgcattctagtctgtataacagagcaagactctgtctcaaaaagcaaaaaactaaaaaaaaaaaaaaaagaggaaaaatcttaagcattaataagtacgttgcctctctaccgtttctgaagagtatcttctgttcctttctctgcttgggactggaggcattgaaaaaaacatttttttaccaaaggggttttgattcgatgaccttttttttctgcagatggcctccagctctaaaattttatcctattctgccagtgatacaactgccagagctctggggtcagtcctggagcagaagtgtttaaatgaaatatttccaccaagaatagttyttaaaatcaaaaaggctgccattttcatagctgcccaacaggtaagaaatcagaagcatttttataaagagaactatcgatccagcagggatatctgaagagcagtcaccgatcaaagaaatggaatta

SEQ ID NO: 818135 - DNA, 635 bp, Homo sapiens
ccaaggggacggggatgaagaacctgttggagacctgaacccagtgtaggagagttcagctgaaatcatcggtcccsaggatgacaccacagcatctgcccctgctatatgtggggaaaactcatggtcacgaacattatttatgcttcaggggactacagaaagccagcttcctttgatctatgtgtaaatcagtccttggcagagtgcatataatgtccggataaattacacccctcggtgataagattacatacctccttcataaaaacctgtcatcctgttttgttcttcagctcctcatcaggatcttttcaaactgaggctcattagggaaggaactaggctgtgttcagacttcttttgaagagagagaattttcaagacttcttttcactctttgatttggatctggcaaattggggaggggatgctgggtgggaaacagttatgaaatgccaagaaattctttggctttagaaatttatctttcatgtacccatccgggaacataaaagagaggcatagtgctcattgcaaaaagagaacagatgaagtagctgtgttatgtgctggtatcttgagagttttgccaagaaaatctgggcctacataaaatttgagaattatctgtg

SEQ ID NO: 818136 - DNA, 498 bp, Homo sapiens
tatggtctccattctcataaatcctgagacctattaatagtagcatgtccaggatactgagatttccatatagagtagagatttgaactaggtgaccccagagttctcttctgaaggtctatatatgtatgattccagaaaaacaaaaacaaacaaacacaacacctttgtcttctaataagacaaacactccttttgtgccctctgtgtctggagcttgacactcgtagactgagtgcagaaggaaaaagaaccccaacacatacaaaatcccccctccagcttaaagcaaaagaatttgcctatctccctcattaatcaaatccatcttgtccatgagagctcctgtgggcctctgccagagggaaatgtcaaacacatgctctctctcagggcatgcttactctcaggaaagcatggaagacacyatgtcagaaaatgcaaacctatttccaggaaagtttaccttttggcattttgggaagcatggctctagat

SEQ ID NO: 818137 - DNA, 480 bp, Homo sapiens
tttacttgaccatatattgagaaacttgcttcagaatctgattccaggtcaggggctatagcttgttcataccactctgtgagaggactgcttcactctcaccaccaggctgactagtgctctgtggtcttgatcaattgtcccagcagagttggtgcatgggaaagcctttcttggccttatcagcagctcagcctgggaggttggcccgggggctgaccaagcacaaaatagaaaagccactaataagatccagctggaacaaatagcctctatttattttaggaaactaatgatatgtcatcatgacacatatctaaccttagtatttctgattggacaagccagttatgtgggctatgattcaagccatggttacagctctgctgctggaagaaggattcacctggttttgtggtctcgctcttcargtattccttgcattaagtaatcatgttctacaaaatttcacatctcaag

SEQ ID NO: 818138 - DNA, 600 bp, Homo sapiens
gcaatcctgcatgagcccatgtacatattcttatctatgctggccagtgctgatgtcttgctctctaccaccaccatgcctaaggccctggccaatttgtggctaggttatagccacatttcctttgatggctgcctcactcaaaagttcttcattcacttcctcttcattcactctgctgtcctgctggccatggcctttgaccgctatgtggccatctgctcccccctgcgatatgtcacaatcctcacaagcaaggtcattgggaagatcgtcactgccaccctgagccgcagcttcatcattatgtttccatccatctttctccttgagcacctgcactattgccagatcaacatcattgcacacacattttgtgagcacatgggcattgcccatctgtcctgttctgatatctccatcaatgtctggtatgggttggcagctgctcttctctccacaggcctrgacatcatgcttattactgtttcctacatccacatcctccaagcagtcttccgcctcctttctcaagatgcccgctccaaggccctgagtacctgtggatcccatatctgtgtcatcctactcttctatgtc

SEQ ID NO: 818139 - DNA, 638 bp, Homo sapiens
acaaattcctacacatcttggcatatttgaaacagtatcacattgtaaacacttattaaacaagaactatcataargacttgccaattttttatatgccagaaaaaaaatcttgaataaggggtgcaaatgcctgttgactctggagttttggaggagtctgaggggtgtttgacttttaagaaactaatgtaagggtcttaaattttgtaaaaggatgtcggggccatcttgtatcacattcaacctttcataatgaagaaatgaaggctttaaggggtaagaagcttgctgatatgcacagacaaattatttaaagagttagaaattgtacagagttcaaacagtgttagataattataattatcctgatgcagacccaaattatctgcatttatcttggctgaagagttaatgtgagaacaatatttatttactaagtatctgtgattctgctaggttttttgacacagttagctcatttagttatcagtgaaaaccttatgaatacattttatcatacttgaaagcaatatggaattatttaatggaaaaataagcatacacatttagagcatcagaagagtattcaaattctttataaatatatgtgtgtaatatttgatgccttaaaacaca

SEQ ID NO: 818140 - DNA, 622 bp, Homo sapiens
cttccttttccttccactcatgtttttttttttggttggtgtgtctgctgtcttgtagattttgtcaacacactctttcttctttccctttggcctgatccccaagatttggtgagtattggctgtttgaaggggtttgattgggacaagacttagagaaagtgagtgaaaagccagggctctatttcttagggaccatgggctgggcactataattttctttcctgagcaactcccatttataaactgaggtcctgatctccaatacttgtgtatatgctccactgagtaagcatcaaaagatcagaacagatggacaattacacagctgcgttaagtgtgaccacagttagcagtgttaggaaatttctgtttcagacatgtgacaagagtccataactctaacttaaaatgtagaattaagtgtgctggtatgtgtgtatgcccaggggtgctcctgttaatttttatccatcttgcaatttctgttctcttytccactgcgtggtctggttgttaatgataatactaatgatataaaatataacctaatataaagaagtaaaacttgttacatgcttactatgtttcaggtactatattaaagaatattttttggctg

SEQ ID NO: 818141 - DNA, 622 bp, Homo sapiens
cttccttttccttccactcatgtttttttttttggttggtgtgtctgctgtcttgtagattttgtcaacacactctttcttctttccctttggcctgatccccaagatttggtgagtattggctgtttgaaggggtttgattgggacaagacttagagaaagtgagtgaaaagccagggctctatttcttagggaccatgggctgggcactataattttctttcctgagcaactcccatttataaactgaggtcctgatctccaatacttgtgtatatgctccactgagtaagcatcaaaagatcagaacagatggacaattacacagctgcgttaagtgtgaccacagttagcagtgttaggaaatttctgtttcagacatgtgacaagagtccataactctaacttaaaatgtagaattaagtgtgctggtatgtgtgtatgcccaggggtgctcctgttaatttttatccatcttgcaatttctgttctcttctccactgcrtggtctggttgttaatgataatactaatgatataaaatataacctaatataaagaagtaaaacttgttacatgcttactatgtttcaggtactatattaaagaatattttttggctg

SEQ ID NO: 818142 - DNA, 610 bp, Homo sapiens
ttctggaaatggatcatgaaacaggagctttgagcatctgtcagtgaatggagtagaaaatagccattctattaatatgtttccttcctcctggcttacatatttcctagggtggagggaacacagaggctgtactgtagttggaaggatttggtgtagagaacacgaattacttcctctggcacaagtgattagtaaaaacataccccaatgtctccttgtgcctgggctgatgaagggacattatatccagaggagagggctgttagaagagtatggcctttagtcagatgaatttagattcaaatcctagctcttttgtttaccagctgtgtgacctagagtaagtttattaacctctcaggaacaaaattctttgatctgtcatatggcaatgttagcaaacaaactagactgttagggaattcatagttcactatatgctgaatcctcagaaaagtgcctcccacagagagggcatttggcaaatgctctagcatcctaagccctagcatcaccctcactcatctaaaatctctgtacaattgctggttgcctctcacaggccccatttrtatcctgcagggacacagccagatggaggcaggag

SEQ ID NO: 818143 - DNA, 567 bp, Homo sapiens
taggatgtcatcgtggtgttcaatggacctttgcgcagcaaratatgatagggatgttgctttagttggacctttgtctgccttgtggtcaggtggttaggcaggatgtttctcacagcctgaacccccgtgaaatgtttcactttgaccaaggtctgcaaaatagtgggaagtttacaaaatggtgcagtttggactaacaataaggtagtgaattaactaggatagtggatttccaggtatgatctccaaactgacagcattagcatcacctggaaacttattagaaattagagattttaacccaacggtagacctactgaatctaacacccttggaatgtcgggcagaaatctgtgttttaacacgccctccaggtgatcctggtgcagattctggtgagaatcactggactgggaaaatgcagttagaattactaagacggtaattaaatcttttggtaataagtttaaatgaaactagtcagcacagctgtatgccggtttttgcctaaacagagactaggtgaagagttgagtatcaccatgataagttaactaggcaagt

SEQ ID NO: 818144 - DNA, 631 bp, Homo sapiens
ctgcctggcaggatattgataagatgtgctcatgatgaggcagtttggtccttgtttctgtaggatgtcatcgtggtgttcaatggacctttgcgcagcaagatatgatagggatgttgctttagttggacctttgtctgccttgtggtcaggtggttaggcaggatgtttctcacagcctgaacccccgtgaaatgtttcactttgaccaaggtctgcaaaatagtgggaagtttacaaaatggtgcagtttggactaacaataaggtagtgaattaactaggatagtggatttccaggtatgatctccaaactgacagcattagcatcacctggaaacttattagaaattagagattttaacccaacggtagacctactgaatctaacacccttggaatgtcgggcagaaatctgtgttttaacacgccctccaggtgatcctggtgcagattctggtgagaatcactggactgggaaaatgcagttagaattactaagacggtaattaaatcttttggtaataagtttaaatgaaactagtcagcacagctgtatgccgktttttgcctaaacagagactaggtgaagagttgagtatcaccatgataagttaactaggcaagtatta

SEQ ID NO: 818145 - DNA, 609 bp, Homo sapiens
cctctaagaactggaacaagacaaggatgccaatttttactactcctattcaacatagtactggaagtcatasgcagaaaaatcaggcaggagaaagaaataaaagccatccaaatcagaaaggaagaagtcaaattatctctttatgctaacaacacgattttatatatagaaaaccccaaaattctgtcaaaaaactctagatttaataaatgaattcagtaaagtttcaagatacaaaccaacatacaataatcagtagcatttctatataccaataacaataaagcagagaatcaaatcaagaaggcaatctcacttacactaactaccaaaaaacatgcctaggaatacatttaaccaaggaggttaaatatctctacaagaggaactacaaagcactgatgaaagaaattgtagatgacacaaacaaatgaaaaaataacccatgctcatggatcagaagtatattaatattattagaatttatggatacactaaaagcccgtacttcaccactatgcaatatgtccatgtaataaaagtgcacttgtaccttttgaatttatacaaacaaaaaaatactaacgtagcagctaatattaaaat

SEQ ID NO: 818146 - DNA, 662 bp, Homo sapiens
aaaaactgatggtaatgcaaatgattcttgtccatataaatataaattatgtccaatgcaatgcaactgattattgccctatagatttttttttttttgccagttttgcatctgttkgtaaattcacttcagattcctgatgacctatattatgtgtctacttttgcattctcctttgaattgattgtaacatcttagtggtttcctcattaatgaatgagtgaaataaaacttttgatccaggctcattctatatctgtatgagagtcatgattatacctccttttgattcttttccgtgtacatataaattacctgaagatcttgctaaggcacaaattctgattcaaggtccagagtaggacttgagaatctttctgcaagctcccaggtgatgtccatgctgctggtccacggatgccacttaggtgttaaactgttcttgtggtaattcaacttaaaatagtgatacaatgtttctgaataaataaattattatctatacattaggttttcttcattagcataaggaatgttaaaaggttttttttttttttgtggaattatgttgtaacaggacatgctgtccttggataaataagttatcagaaactggtcaggagatctctggccgtggatcccagcacttccccagggtccca

SEQ ID NO: 818147 - DNA, 385 bp, Homo sapiens
tcagacaattgatttctttggcaaaattattttcactgaaaaggttttcagggaattggtgtttttgtgaattgccttttgacaatggattatcagcaaattgaccaacagccagtaaacaactccctaattctctcctgtcctctctgcctcctcacagcttcactctgttcacataaaggggcctattggcagtcacgtgtttgcattgtttgagcctctcagagtgttctgggctttgagatctaaagcttgtcaattcagatatgttgacctgagtgtgggtcataacaaaggtaaagggtgaacacttttttaatagccrtgaaattttttcttcaaaattattcagaataaaatataaaggagatgaaagtagagaaac

SEQ ID NO: 818148 - DNA, 586 bp, Homo sapiens
tctaaatgtaactaacatacctgccctgctctcagggagctcamaaagtcaaatcctgattatacagtgtaacataagtgatgattgaggggactttcttgggcctcagattcctcatttgtaacagaagaaccccacttacttccacatagtctggctgtgaagaacaaatgagaaaaatggatgttaacattctttataaatgacaaagcacaatgttagcacctgatcgcgatctcatattaggtgtgctcaaggatttgaaccattgtggagaggtcctttaagtaaataaatgtggaagtagggaaatctccttacagcaaaaagctaacaaacgaacgtggaaaggatgatggaaatagaaaacaacaatttggcaaacttcaaaatagtaatcaattcaggataagaatcatcaatgatgataaaactagtagcttaaagtatgaggagtaacagaaatttcacataataaagtacctcttaagatacttattaattacaaagggaaaggttggaaaacgcctttacggcagcatttactgtaactggcagacaccatcttcaccaaataaagtcaaca

SEQ ID NO: 818149 - DNA, 631 bp, Homo sapiens
tttcagactggtctggaatctttgtgacttcataggctcatagataactaggagtcacaactctcattcttattccacctcttaacaactaagttatttggggaagttccttgagccctctgagcctcaagtttctcctctgtgaaatgggagtaacgatacttagaggttcaaatgagtggcacatattgaagtgtggaatgcttatcaactgcaaggtttcattaagccaaagtaggaaaatgctagcatatgtgaaagataaaaatataaattttgactatgtaaaggtttcccagttgaatttgaatttcaaataaacaaataattttatagcagagatatgtcccatgcaatacttaggatagacatacactaaaaatatatttgtcatttatctgaaattcgaatttaaccgggtgtcctacttttatttttttcagaatatggcagttctactcccagccttagcccctcagccacagtcacctggctgaactcagagcttggcaggtatagaatgtgggccaggttggggggtgttggatttctggagctacaagagatttgcyccaggtacctgaggaaaaggtgtccagaaaggtgtgatgaggagaagcacaggagggag

SEQ ID NO: 818150 - DNA, 575 bp, Homo sapiens
acatttccctgatgactaatgtcaaacaccttttcatgtgcttacgaaccatttgtataccttatttggagaaatgtcttttcagatcgtttgcccatttttaattagattatttgtctttttattattgagtttaagagttctttatatagtctagatacaagttttttgtcaaatttatgacttgcaaatattttcttccattcttgtctttgtactttcttgattgtgtcctttagagcatagaagttttttattttgttgaagattcatttatcttatttttcttttgttgctcatgcttttggtgtcgtatctaagaattcattgccaaattagaggtcatgatgatatatttgtacatatcttctaagagttgtatagttttagctcttatgcttagatcctcgatccactttgagttaactttttatatggtgtgagataaggacccaattttacyctttcgagtggggatatccagtattcctatgaaagactactctttctcctattgaatgatctgggcatctttgttgaaaaccagttgattacagatacatggatttatttct

SEQ ID NO: 818151 - DNA, 386 bp, Homo sapiens
cagctcctcacctagccaccatctggtcatcaggtatctcatgacattaccatttagaaggagagaatgacctggccatctgccttatctgaggtctattcacccaagtgatggagaatcccaaataaaaggtaagcaacacgtgtaggcagattgtgagaatctggacatcacgaacctaataatttgcctggccaggtgcagatcccagcactttgggaggccaaggtgggtggatcacctgaggtcaggagttcaagaccagcctgaccaacatggtgaaacccattctctactaaaatmcacacacacacacacacacacacacacacacacacacacacacaaattagccaggtgtggtggtgggcacctgtaatcccagc

SEQ ID NO: 818152 - DNA, 615 bp, Homo sapiens
gaggatcacttgagcccaggagtttgaggttacagygagcagtgattgcgccactgcgctcaagcctgaccctgtctttaaagagaaaagcaaaccaaccaaccaaggaaccaaccaaagcaaccttaggtgatgatgaggccaggtttagagatatacagacttggttttcaaattctaacttaaacttgctagctctgtggccttgacacaatgcatcctttgcccagcttattcgcttttcataatattgagatgttaatttttcctacatcatataattttacagaaagaatctataaaatgctttgcataatactttggcatgtggtgagcattcaataaatgacagttgttgatatgaaaattattactttatcttaaagttagcttaatgttcaccaacatattcttgtaattattattttttaagattttattttttaaggcagttttaggttcacagcaaaattgagagatttctcatatactctgtgcccctacacatccatagcctcctcagttatcaacatccccctccagggtggtacatttgttacaatagatgaaccaatatcgtcacaccataatcgtccaaagtccatagtttgccgt

SEQ ID NO: 818153 - DNA, 583 bp, Homo sapiens
caggggtacatgtgcaggtttgttatacaagtaaattgcatgtcatgagggtttggtgtattgattgttccatcacacaggtaatcagcatagtacccaataggtagtttttggtgagggctctcctcccatcctccaccctcaagtaggccctgatatctgttgttccattctttttgtctatatgtactcaacatttagctccctcttataagtgagaacatgcagtatttggttttctgttcctgtgttagtttgttgggataatggcttccagctccatccattttgcctcaaaggacataatctcattcttttttatggttgtgtagtattccatggtgcatattttcttttttatacatattttatatatattgcatagaaacattgaactattctagcactgttttttggaaaaattaaccttctttactgaatttcctttgcaatgttgtggaaactaggttgacagttgtttaratctatttctaggctctctattctctttcattaatcttatatgcctatcatttttcaataccacactgtcttgatattgtaacgtcactaaaagtcttcc

SEQ ID NO: 818154 - DNA, 602 bp, Homo sapiens
aatttgcatatattaaagttcagttttagtgctgtaaagtgctatgagtttgacaaatgcataatggatccgacaatatcatacagattagttccatcacccagaaatccccctgtactgtcctagtgaaatacygtcttcttacttatcgcaaagacgtaagtatccacttatctcttttctatctctattagtttctcctttgttacagaatgtcattagaattgaatcgtacactatagagccttttgctatagcttctttcacttagcaaaatgcatttgcagtttatgcattttgttatgtgaattattagcccaatggatttcaatttgttatcaatttacctactgaaggacattttgattgcttctaattgctagtaattataaataaatctataaacattcatgtgtgggattttgtgtggatttaaattcttacttcacttgggttaataggtggcaagtacatggctgggttgtatgggaagtctaactttataagaaacatctgaactgccttcccaagtggtcctaacatttttctaggacagcaataaatgaagctgcttcatgctccacatttttcccagcatttgg

SEQ ID NO: 818155 - DNA, 605 bp, Homo sapiens
tgtagtattccagccagggatgcataacctgaatctaaccatgagaaaatattaatcaaatctaagttgaggaatattctattaaataagacctatattcttcaatcaatatcattgtcaagraagacaaaactgggaaactgttccagatcacagaaaactaaaaagagacattacaatgtaatatgtgatcctgttctagattactggactagagagaaaaaaagctggaaggaaccttattgagacaattgtcaaaatatgcactgtagattaaagtattatgtcagtgttaaatctcctgaaattagttaacaatactagagttatacaacagaatagtcttcttcctaggaaatatattctgaagtattaacaagtaaaggggtatgatgcatgcaacttgttcttaaatggttcagaatatatggttagacatataaatttacatatatagagagaataataaagcaaaagtggcaaaatgttaaaaattggtcaatctaagtcaagtctatacagaaattctctgtactatttttccaactgcattaagtcttctagttttttaaataaatttgagattacctcaaaataaatttaaa

SEQ ID NO: 818156 - DNA, 537 bp, Homo sapiens; identical to SEQ ID NO: 818028

SEQ ID NO: 818157 - DNA, 584 bp, Homo sapiens
aacatgaaggtagccagtctttttgtcactgaacagtgaatctgaatgcccatcacactattctccaagttttgtgaatatgcacatctattttatccacaatgcaatgataagtgatgtccctggtatctaccaaaggtgccacaaaatctagaaatgcattttgaaatgtcaaagagaataaattgcattcaatatagttttagtgctagatatattatttgctatatgcattacataatgtgtacacatttgtggtatatgtctctgtatatgtacatagctaatatactagcatcttagctcacctggctactttaaagaattccttctaggtaaaagagtttacaaatatctttttctatcacctaacaaaatgctaacaatcatgcctcctcactttactcaattgattaaaaattacaaatctaattagcattttgagtaatttgactgyttttggcttaaacagttgctggaggagataacttctggttgggaaaagatgggaatgatgtgggcaaaatgtggagaaatctgatagcaaagcaacatattctctattctgctctattaaaagaata

SEQ ID NO: 818158 - DNA, 427 bp, Homo sapiens
acacttgtatatagcctttaaacttacaatcttactccttccatatgaaagatcatatgtatttttaatgaaaagattagaagtctaatgtagatgacccctaatctttgtaagatctctttcaaatcttagaaaattttattctttttttcaaaacacactaaacagtgtatcttaaacaaaatcataaagtgccaataatatcagtaggtgatattgctattctgtctaagcaccaagtaaaaatctcagaatcaaatatgttatttcataacaaaaacttggcttagccaagatttcacagaagtggagtacattygctgtggcagaaacccagtctttagccaaatgtctatttcacaatccaactttacaaatgatattaattcaacatgaaaaacaaatttgacttccatttctagtaagg

SEQ ID NO: 818159 - DNA, 484 bp, Homo sapiens
tagaatgtcataattaagaaagtcagaggaagagaatgtctccaaactaagaagaaatgtccagagcttgaaagaaaacaaggcatgcatagatcacagagagaaaaaacgyggacagagtgttgagaatggaggtagcattgccaaactgtacaagtgagatcaagtaagataaggtctagaaagtgatcttttgagtttttaagtagttgccattgataactttgtcaagggaagttttattacactggtcatttctaagcagattgcagattttgaagagtggatgtttataatagcatataggaaggatttgtggctcacctgttggaatgctggagacaaggttgtggaagatagaggaagacacttgtttatgtcaaggtgtcttttggaactaagataaaatgactagcgttgagatggtgtcttttgtaaatgggatattttccaactacatataggaaatgaataaatactgaga

SEQ ID NO: 818160 - DNA, 502 bp, Homo sapiens
aagtgggacctaaacattgagcacacatggacatggacatagaaacaatagacactgtggacttacttactaratgggggaagaaggaagggggatcatgagttgaaaaactacctgttaggtactgtgctcactacctgggtccaatatactcatgtagtgactctacacatataccacctgtatctaaaataaaagctgaaattaaaaagaaaaaaaaactcagtaaactaacaaccaaaaaggtcatgggttatgatattttaaggaatgtggctttgtaacctttagctgactgacattttgtactaaattttattatataatatttcttctctactgaaacctccctatgtatgtaatgatagatattccaaacccacaagataattcactcaccgattaaaaggcaggtcaatcggctcaatgacttaacagcaattctagagttatgtttagagcaatttatgacactgttggcactcttcccaatatagctcaa

SEQ ID NO: 818161 - DNA, 587 bp, Homo sapiens
atgattttgactaaaactgtwctgctttcttcaggggcaagcacttttgtttgttcttcttaaacccaatgctattacatgttagcattatcagggtccaatataaccaccagatccttttcttgtaataaatgtttatatgggtaaagggacagaactaataacacatcataatttcataatattttatggctagtttagtgatccatataaattgtcctagaggtctaatcatattatttagagagcagatgctgcacaaaaagtgcgacggtttttttttcacagtaagtctccagtgaagctgacttattgtcatagggttcatctctagggaggtctggcattcagtttcaaaacgatttagagtcctaacactgtctacaagggcattaataatttgcatgctgtgggaacttgtctacagtgaactagactgaaaccattctgtatttcacattagtactagagcagctgttgatgttagcagtattaatcacaagcaacttggactggaatcaaagtgacctagaagagctactttctacatcttgctatgaattccctagggcaaagacattatgtgg

SEQ ID NO: 818162 - DNA, 587 bp, Homo sapiens
atgattttgactaaaactgtactgctttcttcaggggcaagcacttttgtttgttcttcttaaacccaatgctattacatgttagcattatcagggtccaatataaccaccagatccttttcttgtaataaatgtttatatgggtaaagggacagaactaataacacatcataatttcataatattttatggctagtttagtgatccatataaattgtcctagaggtctaatcatattatttagagagcagatgctgcacaaaaagtgcgacggtttttttttcacagtaagtctccagtgaagctgacttattgtcatagggttcatctctagggaggtctggcattcagtttcaaaacgatttagagtcctaacactgtctacaagggcattaataatttgcatgctgtgggaacttgtctacagtgaactagactgaaaccattctgtatttcacattagtactagagcagctgttgatgttagcagtattaatcacaagcaacttggactggaatcaaagtgacctagaagagctactttctacatcttgctatsaattccctagggcaaagacattatgtgg

SEQ ID NO: 818163 - DNA, 405 bp, Homo sapiens
tttcttctcactgtgagacactgatgcctctcaaattaatggaagcaaattactatcttaatctgacaaatctatcactgttttatcaaatcagtttgctggctctcaaatagatcgggggaaatagtagaggagtatcaatggacttctttcaaaagagtcgtgggcacccaatactctaaaagaccgtcctgagctctgctgtcttagactcacttcctcagacagaggtctttatgcaaaaatacctgtaggaacaaactctaggcaataccacactcgaagcccacagagggctggacctctgccagcattttctgtctgttgctctaccttttccracataatgaatctgtggcctccagagaacatttacgaggactgtgaacacaggacgcctgtggg

SEQ ID NO: 818164 - DNA, 631 bp, Homo sapiens
tatggcttatgtgtttactatactataatttttattgttatttcagagcatattccttctacttacagaaaaagtcaactgtaaaacagcctcaggcaggtctttcaggagatattccagaaggcattgttatcatacaaaatgatagctccatgagtatcattttccctgaagaccagtgggacaagatgaggagatggaagacagtgatatggatgatcctgaacctgagactgtataggcctaggctaatgcatgtgtttgtgtcttcgtttttaactaaaagcttaaaaagtaagaaaaataaaaataaaacatttgaaaatacaaaaatcatatagaattaaggacataagaatattttcgaacagctgtacaatgtatgtgtgttttaagctaaatgttattgcaaaagagccaaaagtttttttaaaaagtttataaaaacttacaataagctaagattaatttattaatgaagaaataatctttgtatataagtttagtgtagcctaagtgtacagtgtttataaatctacagtaatgtcccagaccttcacattcactcatcactcactcactgactcactcagagcaacttccaytcctgcaagctccatccattgtaagt

SEQ ID NO: 818165 - DNA, 578 bp, Homo sapiens
ggagcacccagattcataaaacaaattctaagacacttatgaagagacttaggtaaccaatagtaggagacttcaacactccayggacagctggacagatcatcaaggcagaatgctaacaaagatatttgggatctaaacttgacacttgaccaaatgaaccttataggcatccacagaacactccacccaacaaaaaacagactatacattcttctcaggtgcatgtggcacattctttaaaactgaccacacacttggccatgaggcaattctcaacaaattcaaaaaaactgaaattataccaaccacattctcagaccacaaggcaataaaaatataaataaataccaagaagagatcttaaaaccatacaattacatggaaattaatctgttcctgactgacttttgggtaaacaatgaaattaatgtagaagtcaagaaattctttgaaactaatgaaaacaaagatacaacatacaataagctctggaacatagctaaaacaatgttaagagaatttatagtgctaaatgtccatatcaaatagctagaaggatctcaaattaacaacct

SEQ ID NO: 818166 - DNA, 715 bp, Homo sapiens
aatctgggagtcgggtgctgtctcctctctctttcctatggccttatagcagcaggaactctggaggagacttccggctggctcaatgccctggagactgtgttggattcaggggccagacctcagaggcatttctcttgtctggagtttggccatgctcttctgagagaactggtgaaggtgactgtagccaccgtcagaagttgtgggcattgttcatatccatttctttacatatatttcttttcatgactaacataaagcatgttgctaagagtaaaagattcatagaggaattgaggggagggatgggctcaaagtgtgtactctttatgtctcaaacattctttctaaagctacaacagttcagtaacatttgagaggagaatttcataatgtaagaagtttaatgaaaatatggttctataaaccaaagggaatataaaaatagaaactttggtttctgttttaaaagcaacaaaatattgtggtatggatgttgtgcattaacatttcctgagcactggaatgtggatgaaatatatggtataattttctcaaacaagataaaagcattgtaaagtactttatttcacacaaatgcatatttactcacttgttctcrtttgtgggatcatatcggggaaatggatcatggtcattatcattaaaatcatagctagcctctggatcctaaagagacaacaaaatataa

SEQ ID NO: 818167 - DNA, 616 bp, Homo sapiens
aatttttctgagtccttgcatatataaaagttcattcattccatctttacacatgaagggttagctgaacatggaattatagtttgaaaataatttctactaaaaatttctcattgctctgttgtcttctagtgctcactgttgctattttgtcggcaagaagatgattctatttttatttttatttttatttttttttttttgagaccaggtctccctctgtcacccaggctggagtgcagtggcacaatcatggctcactgcagcctcaaccttccaggctcaagcaatcctcccacctcagcctctcgagtagctgggactacaggtgtgcaccaccatcctggctgattttttaattaaaaacaatttttttttgagatggagttttgctcttattgtcaggctggagtgcaatggcacgatctcagctcactgcaacctctgcctccgaggttcaagtgattctcctgcttcagccacccaagtagctgggattacaggtgtgcaccaccacacctggctaatttttgtatttttagyagagacaggatttcaccatgttggccacgctggtcttgaactcctgatctcaggtgatctgcctgccatggcc

SEQ ID NO: 818168 - DNA, 593 bp, Homo sapiens
tctgaaatggttcctgtttttctaactttacctctcttttcctcttcatacagtttcttcatagattttaaaaaatcttttctcttctcccagtgttccactcttctattttgggagcatgccacggctcactctggaattcttaagttcccagtcaggtcttgtcctgtaaatttcctcagtcttgtgcattttctgcagatcactggcattcttttttctgctgtttttgatgctgggttctgaacaaaaagaagcccaatgtccatcccatggtacgtgtgaatctgggtaaacccgggggtaatggaggtgaagtgttctacttagaactgcaaaataatctttttcttttgaggcagggtcttactctggcacccaggctggagtgcagtggcagatctgggctcactgcagcctcgacctccaggactcaagcaatcctcacacttcagcctgctgagtagctgggatcataggcatgtgccaccactcctggcyaattttgtttattttttgtagagacggagtctccctatgttacccaggctgttctcaaactcctcagctcaagctcagacttccaaatgata

SEQ ID NO: 818169 - DNA, 679 bp, Homo sapiens
gggtttgggggagaaaaattacagaagtaaagtgcccttttcattgtacatactatcaacaagattgatcrctgatgatgttgaccttgatctcctggctgaagtagtttttgtcaggtttgtccactatgaggttaccctttttccccctttcccatgtgctctttggcaagaagtcgcaatgcacagaacatcctaaggagtgtagagttacgtttccttccctgtagagtggaatatctacataacttacttgaaattcttttgtatgagaaacttgtgtcctctctcattaattaatttatgaaatcgtttatgtgtatcattatggtctcatgaatatctattttatattttagattataatccaatactactttattttttgctcaaattgttccagctttggctactaagagttctttcagttgactcttgcattcttttaacatacatcaatgtgtttgtcatttttttaaaaaaaaaaatttgagcacttctttgtttttgacactacaagttgctaggctgctcaggttcatattgcatattttcttccccagtcctagaaatggccatttcttttctagactcaatcccctgacctcctaaatgatgtttttaatttgcatacatgaaggtttgttctttatgttgtaaagctctacaggttttgaca

SEQ ID NO: 818170 - DNA, 603 bp, Homo sapiens
tctatgcgacatttacaaagatcataaatggtcagaccataaaactaattctcaatggggaataatttactggctataaacaaaccaaaaccaaaattagtaagggcaaaataaaattagaaaaacagagtcagcaaagttctattgttcacttcatgttacttgacctcatgaatcaggaaaatatatttctgtgcttcaactgcccatgtggtgcacttttctgtggatgaagtctgcctggctctggtcagcaaatccacaggacatcttggtgaatcctctgaaactgttaaaagataacgttcagaaaaaggtattaggttggtgcaaagtaattgcggtttggatcactacttttaatggcaaaaatcacaatagctttttccccaacctaatgaaatcatgactcttctatagatacaaaaatgaacatgtgctaaaaaatttattttgcttatatgatactagggaatragaaacatgttataactggtttatttgtctgcttgggatgccacagcaaggtatgacaaactgggtggcttaaacaacggaaatttgttctctcacagttgtcgaggctggaagttccaaatcaag

SEQ ID NO: 818171 - DNA, 622 bp, Homo sapiens
gggcagggctaggtgtgtctgaggccagactctccttgggcgggtcttgctgcggctgctgcyggggatgggggtgagattcccaggtcactggagttgtgtacctaggaggattatggctgcctcttctgagtcatgcaggttgtcaggaaagcaggagaaagccggcagtcacaggccttaccagctcccaggcaaaccaaagtaccagtctcactcccaccatgcctcccacaacagcccaagtctgtttccaggggagggtgagaagggcttgaaaacttgcccaaggctatctgcctcccagctgcaagagaaaaaagctttagttctgcccttgcctgtgaagtctgaacactgattcacgccctccccttagttctggccaggaggcttcttgccctgtttaaattgttacaaagttcaactagagaattccttctccctgtggagttttaccctctgctcctctggccaccctctggatggatccctgtggtgtcaggcaggaatgggctgtctggggatccagcaagctcccaagacctttctgctgcttcctctacccctgtgttttgctcagctctctaacttgactcaggatcatgtaaagtcagaagct

SEQ ID NO: 818172 - DNA, 622 bp, Homo sapiens
gggcagggctaggtgtgtctgaggccagactctccttgggcgggtcttgctgcggctgctgctggggatgggggtgagattcccaggtcactggagttgtgtacctaggaggattatggctgcctcttctgagtcatgcaggttgtcaggaaagcaggagaaagccggcagtcacaggccttaccagctcccaggcaaaccaaagtaccagtctcactcccaccatgcctcccacaacagcccaagtctgtttccaggggagggtgagaagggcttgaaaacttgcccaaggctatctgcctcccagctgcaagagaaaaaagctttagttctgcccttgcctgtgaagtctgaacactgattcacgccctccccttagttctggccaggaggcttcttgccctgtttaaattgttacaaagttcaactagagaattccttctccctgtggagttttaccctctgctcctctggccaccctctggatggatccctgtggtgtcaggcaggaatgggctgtctggggayccagcaagctcccaagacctttctgctgcttcctctacccctgtgttttgctcagctctctaacttgactcaggatcatgtaaagtcagaagct

SEQ ID NO: 818173 - DNA, 622 bp, Homo sapiens
gggcagggctaggtgtgtctgaggccagactctccttgggcgggtcttgctgcggctgctgctggggatgggggtgagattcccaggtcactggagttgtgtacctaggaggattatggctgcctcttctgagtcatgcaggttgtcaggaaagcaggagaaagccggcagtcacaggccttaccagctcccaggcaaaccaaagtaccagtctcactcccaccatgcctcccacaacagcccaagtctgtttccaggggagggtgagaagggcttgaaaacttgcccaaggctatctgcctcccagctgcaagagaaaaaagctttagttctgcccttgcctgtgaagtctgaacactgattcacgccctccccttagttctggccaggaggcttcttgccctgtttaaattgttacaaagttcaactagagaattccttctccctgtggagttttaccctctgctcctctggccaccctctggatggatccctgtggtgtcaggcaggaatgggctgtctggggatccagcaagctcccaagrcctttctgctgcttcctctacccctgtgttttgctcagctctctaacttgactcaggatcatgtaaagtcagaagct

SEQ ID NO: 818174 - DNA, 608 bp, Homo sapiens
aggaactgcagaaccagggaggtgaagctgcctgcccagggtcacacagccaggggcagaaggctcggaccccacagtggcctccagaatgttcgctctgagctccagcgctcagcygataaagacaacgtggtctgtcattcatgcgcactgcccctgctagaccatagccctcggggtcatcaaggtgtcactcgtgcagctcctggggtcccagcacagtgatcaggaggagccacatggtacttgctgcctgggcccgagacagcagcagcaggtgccctgggggtcaaggccccggcctcccgacagtttctcccattcactagggacaggacgtacctccccaagaaggcgcgaggctgggcttggcctctccatgcagtcccatctctgtggaaatgtcccaaccacagtcaagccccctccccatccctggccctgctcactttagccctggccctggaatgccagctccacgagggcaggggcactgggctccttcacagctccggctctagaaagtgcctggtgcgctccctgcctcctatcacacgtgtggatgtgtaaatatgtatttatacacatgcaatccacacatacagaga

SEQ ID NO: 818175 - DNA, 554 bp, Homo sapiens
gttagcaaaagtggatgtttaagttttaaataatgtattctaaagacttgtttccacttaataaaactagattgagaccatgcataattttccatattgagataatttraaattattttgccctactctgaaaagtttaagtctgataggtaaattttatgatatggtgacaagactgtgcaaagtatttaactctaattctctgagccttggttctttgatttgtaaaatagtgataataaacccattttaaaaataggtgaaaagtatttttcattatttctggcacatagtaaatatgcaccagaagtcaggcattaatatttgaatttttaaaaagtactgcaggtaaattatctcagtgtgtttaaataataaaagtatcactaagaacccagcaaaagacaagctatatgttaaagcacaaagtactgaaagaatataactctgaaagaacaagtgtaatatcatataacacatattaattaaaatggaaatgtgtctctttttttactttctctagtttatagaatcattcctcaataatggtttct

SEQ ID NO: 818176 - DNA, 630 bp, Homo sapiens
taggcttagctctttgaggaattacaaagcttctgttccacagygatgcacagatttcaacttgtcctcatccttataataacttggtattttctatttccttttatataatagccttcttaatgtatgaagtgatatctcacttctaattttgacttacaaatttactaatggctagtgatattgggcatcttttttgtgtttactggccacttgtttatcttctttacagaaatgtctttaaagtctttttcccatttttgaatttggttgtattgttgttgttgtgttgtaggagtttttaaaatatattttgtatattaatctcttgtcagatatttgctgtgcaaatattttctctcattcccttggttgtactttcattctgcttatagttaagttttgataaacaaaagtccttaattttgatgaagaccaatttatctaattttttgttgttgttgcctttgcttttaggtgtcatgtctaagcaatcattcgcaaatccaatgtcatgaaaattttcttctaaaagttttaagcttataactcttttgtttaggtatttgatccattttaaattaatttttgtatgtggtattaaatgagccctactatattttttgcatg

SEQ ID NO: 818177 - DNA, 577 bp, Homo sapiens
taataatctatattaatatgcatgcgataaccaagatgatttatgtagtacggggaagaaatttcaactctactctttgaaaagatatcaaactctttgcttgtcattggacatgtttttcagaaatactcatgcagactttgtcaaagtcattgaaaaacagaaatgtttgctaaagctttcttgcgtagaatgtgcatttttcaaaagatgtcagacaataagctgggtcagaggaaataatgaaagctgaatgtggcatcaactccagttatagaataaaagccactgttttagtctttatagtgcaacagttgcgagtaatacaaaatgaatttaatggagcaccaaaatgtaacaacttgaataaaatgtatttttgttgatgaaaaaaggaaacaatcttgtgggtcacaattacttgatcctgtgaattcagatccctttgaagggtacaatattgatttgtggagtgtcttgttattactgaaggctattctctttactgggatgcttttcccttgcaaaaagaaattagattatacagctgatatcrttaaagcaagaggaaaattgc

SEQ ID NO: 818178 - DNA, 625 bp, Homo sapiens
ttttcagatcagaatcttatttccagctcatattacaacaaacatgaaacgtgtgcagcagtcattcagatttgtgaacagactgagaataaatacatcactagcccactcttcttcccctcctttattctgyatcaaacacaacagacccttctgttctcaaagacaatatacccactatcatctcagatattgccacttgctaaaatattcttttctcagatacaatttacagctatcctccaaagccaccctatctgacatcgcaactctatgttttcgcgattttattttttcctttgcactcaccattatctacaattgttttgtccctgctctaccctctgcatctaaaatagtgcttggcacaaagtaagaacccatgaattcttgttaaataagtgaatgaaaaatggcccgaatgaaaatctcttgttaacttctattaaaaaatatctagtccaatttatttcacagcaaacaaatctacatacgaagtgagaaataaaaataataccctaagtctctaagccaaggggacctagagtaaccttaaaaattgagttcctggccgtgatgggataggtgctcaccatgcctcagtattctcttttcatattaacct

SEQ ID NO: 818179 - DNA, 356 bp, Homo sapiens
agtttaccctctctgagtgtgtttccctcactctattttgccgtgtgactgtgggtaggtaggcagcttaccctctctgagtgtgtttccctctctccattttgctgtgtgactgtgggtaggtaggcagcttaccctctctgagtgtgtttccctcactctattttgccgtgtgactgtgggtaggtaggcagcttaccctctctgagtgtctgtttccctcactctattttgcygtgtgactgtgggtaggtaggcagcttaccctctctgagtgtctgtttccctcactctattttgccgtgtgactgtgggtaggtaggcagcttaccctctctgagtgtctgtttccctca

SEQ ID NO: 818180 - DNA, 587 bp, Homo sapiens
atgctccgagcccaccctttgcccctcagttcctgtggtgcctccttcctcttgccatactttcttcttactttccccttaggtcagttgacccatctcacctcctccaggaagcctcgctgctccagccctcccacactgccaggcctccaaccaccagccctggctcttacaacctggacaatcttgcttttttctggccctggaactttgcccacaagaccacgtaagacacagtcttcccccaagttctctcctttccatttctgtgctgaaatgaacccccctcagagggccagctacacgtcaccatctttagcaaatacacactgaacacgaaggcacgagatcggtgctgggaagagggagagagaaaaggttcctgttctcaagattttcctggtttaatagcagtagtgtttcctcggctatgtgcagggcacagttctgagcactgcttatgggctgactgcktaatttgcacaataatctctgcaacaagagtgctactgctgtccccattccacagaggacaaaaacaaggcttcttttatcagctagcagaaccggggttgaatccagccagc

SEQ ID NO: 818181 - DNA, 550 bp, Homo sapiens
tgtaccctgcagggaactgtcactctagaaatgtcattgattatgtcaatacggttggaaggaaaaaggaagagaagtattggagagtgaagatgtggcaatagggttgagggcaaaggagaaactaattggctggctttgatattctcattgtgcattgacatggcacaatgtgggggatagatgaatgacatctcatctctctctagctttaaggatcctaagcatccatgtaacaaggatcaccccacaacacccaccgcaaccacccttagcaatgccaggcccaccaccacccaccactcctcaatagggtcaacaccattgttactcccccaagccaaacacacacacacacacacacacacacacacacacacctccctttgagttgactttgcaaacacacatacctctctttgmgttgactttgatatccagattttctttcctctgagttaaaaagacactcttttcctccaaagacattagcctagagggaagcgtgatcaggactgggtgatatgcaggagtattttgagttttactc

SEQ ID NO: 818182 - DNA, 570 bp, Homo sapiens
ccagcctggccaacatagcgagaccccatctctactaaaaagaataataataataataccaaaaagagcatgcatgtgataagtacagaaaaaaagcaattgttttatttattactcctttcaatccacactaagtatcaatgctatagtaggcatttcctatcacttaatccagatattccaatagaaatgctctatgaaaagaaacgtgtccaaggataagctttccctggtatggaaggaacagaacttggcatcttttaaactaaaccagacactgtgttgagcacttaggctttctttacaaatagtcctacagctggttggaagcacttgggaaaggcaatgcaaatctaattaggctatgccatgtggccagcattagtagcaatttttgaaaagagcccaggagacaacttacagaaagtgatttttttccctttaagggttgtctttctctgttgcttgcacacacacacacacacacacacacayacacacacacaatctcattttctgggtgcaaatataagacatgctggggaccatacagattcttactgacctggt

SEQ ID NO: 818183 - DNA, 533 bp, Homo sapiens
aggcttcaatttactcagaaatgtgtcttcaaagattctacaacaaaagtgtttccagcctggtgaatcaaaatatgggttccattcattgtaatgaatccacatatcacaaagcattttcccagatascttgtttgtagtttttatcatggaatattcaatttttcaatatagagctcaaagggctcaaaaatatccctttgcagattctacaaaaagagtcttcccaacttgttgaaacaaaacaaagatttaagtccctgagatgaatccacacatcacaaagcattttcacagataccttgtttcttgtttttctcacaggaaattcggtttttccctatatgcctcaatgtgctcagaaatgttcctttgtagattccacaaaaagagtgctttgaacctgtgttccatttgctgtgatgaatccacatattacaaagtatttccatagatagcttgtttccagtttttaaggtgggatattcggtttttcactataggcctcaatgggctcagaaatgtcccttcgt

SEQ ID NO: 818184 - DNA, 596 bp, Homo sapiens
atgcagtgtttatataaggaaagattttttttttttttgagagagggtagggtattgctctgtcacccaggctgtggtgcagtggtgagatcttagctcactgcaaactccgcctcccaggttcaagtgattctcctgcctcagcctcccaagtagctagaattacaggcatgcaccaccacacccagctaatttttgtatatatatatattttttttaggagggatggggtttcactatgttggccaggctggtctcaaactgctgacctcaagtgatccacccactttggcttcccaaagtgctgggattacaggcgtgagccaccacacccagccaagggaagaaaattttaaggtgcttacattatatagctcaatgagaaaaccaaagtattatccctttcagacaatacatatataattcacttatttccataacaaattattcagtaaacaattagtcatatgggaacacttccaggaggtgccaartgccatctcagaaaatgtagcattaaattcagaaatcaagataacagaataaagaacagaggtgttcactgtctcaaattaaccctgcagaaagagaaactc

SEQ ID NO: 818185 - DNA, 612 bp, Homo sapiens
tccatttggtgagattaatccacacatcacaaataatttttacttatagcttgtttctagtttttatcgtgggacatttagtttttcatgaaaggcctcaatttgctctaaaatattcctytgttgattgttcaaaaagtgtttccaacctgttgaatcaaaacaaatattttattctttgtggtaaatccacacatcacaaatcatttttgccaatagtttttttgtagtttttattctgggaaattcagttatttcctgttgacctcaaattgctcagaaatgtcccttcatagattccacaaaatgagtgtttacaacctgtggattaaaaaagggtttatttctgtgagatacatttacacattgcaaagtattttcccagatagcttgtttctagtttttatcacaggaaattcagtttttcattataggcttcaatgagctaagaaacgtttcttcgtagattctacaaaaagagtgtttccaacctggtaaatcaaaaaacaggtttcattcagtgagattaatccacatatcacaacgcattttcacagatagcttctttttactttttatcaggagatattcagtttttttatcataggcctc

SEQ ID NO: 818186 - DNA, 619 bp, Homo sapiens
tacttataatctgtaagttatatttcgataaaagctttatctaagaatataaacaataaacagatagctgattatgggcaaaatatggctcaatgttgaaatctttaattttttttaaagaatgtgtatctyatctgtgcatgtgtcggtgagatccatgctgctattctcatcctgcagtaactagaagcagtgtaattactttttgaaaattttgaacatactcttctggaagcatgcagaatccactgttggaaaatacttatttgtagaggtcacaccttaattatttggggccaaaatccactgtacttttggtattatttaataataatattgcttttctgttgagaaaggttggacactgctaattaaatagaattagactcaatgtttccccatctctgctgtcaaaatccattcactctctatgaaaagattcatgaaacagcaactagtcttcactaacttattttgttcaattaaaattaaattacacaattgaactttttcttgtctttttaatataacattttagttaattgcttaattaaaactgaagcctgacatttgtttcttcctctttagaaaaaaagaaaaaaaaaagaaaacatgttta

SEQ ID NO: 818187 - DNA, 626 bp, Homo sapiens
agtaatgtttatccatcaaaaatatgagacaacggggactagaccttagagtaaaacatacgaattttaatttcakactatgtaacggagaactgttgaatagttcatgagaatgtatgttagttttgataagctactgcaatttacattgtattttatttgggacttctcagtattcaaaaatgactccttactgaagctttctgtatgagtgacatcttttctggaacattcactccataacctttaattaatgtgtccttttgtcacttaaaatataatctaaatggttttttttgtttgtttgtttgtttgcttttttggtggggggatagtttaaaccaaagaggaacaaaaataaacactggactcatttttatcatcttgccaagagacacaactatagataagcatccatgggtatgataagcaagaactgaatctcaaatcccattcagggtgctgaaaattccacccttaatatatttgtaaacacattgtcataaaatcaaacggcttgcctgatgttgatgctacaccacttggaaattgtgcaggggacctgaatctaggaaatgtaatttccctgttgcttaccttgtgaaaaaccctatttttaatatcat

SEQ ID NO: 818188 - DNA, 616 bp, Homo sapiens
agagaaaatgagatttgatctgggcccttagaaataattagcacttgtcytggaacagaaaagataaaaaggcatcacatgtggaagtaacatggataaattttgagccctaagtgtttgtgaagttctaggtatttcgtatgataatttatgtacctgttataacaccagtatgagaatggtaataatatctctattttaaatcaaaaataaaatagagagctaatttaacatgttcaaggtaatagacctattaaacaatgaaacgaaatataaccgaggccactaatagcacacgtctctcacccatcccaagctccccaggtattgggggctatataatttattatcagttaggtctgttggaggacatttgttttcctaggatccagtttactttgttatcctcgttcttattattcagtcagaaaaagaaaaagagagcgaaaaagaaaagagaaggaagaaagactcaccagcagtgaacttagtgcaaggcatggctctatacactgtgataaagtatatataacctgtgattatgggtgctttattatatccctttattcaagaagcaggaacccagccatggtggccctgttaaccatgtagaaaa

SEQ ID NO: 818189 - DNA, 525 bp, Homo sapiens
cttggacaaatgatctcacaattttaaatgtcggatcttactgtagaaaatccttctaaagattacttttaaaggataaatggtagaattttaccttgtcaagacaataaaaatataccttcagaataatttttaaaattctagaatgatatgtgaacaggtacttgcaactggagataaagtttgtactgacagtgtcatatatgagttcaaaatgaattcaaacaactttgatagaagctgtgctatggaagattgaggaagatgactcttaaggggactctggtgatggggatgtcacaagtgttagagatcatgtgaagagtgataaaagtatttcataaaattcatgtgtgggaaaatcttataaattcacatgattttgtaaattattgaatgtaaattgtatatcactaaattaaatattatagtgatttgactctttaatstacttgcttcaaagtttatatattcaaactgtcccccccatccctcaaactctttcaactgggaaaatgaggagtt

SEQ ID NO: 818190 - DNA, 552 bp, Homo sapiens
aagagaaccaggaagtcctagccagagcaatcaggcaagagaaagaagtaaaaggcacccaaacaggaaaataagtcaaactgtctctcttcactgataatacaattctatacctagaaaaccctgaaggctctgccaaaaggctcctggaattgataaacaactttagtaaagttttagtacaataatcagtagcatatctatacaccaataaagttcaagctgaaatcaagaaggcaatcctatttacaatagacacacacacacacacacacacacacacacacacacacacaaataaaatacccagaaatacatctaactaaggaagtgaaagacctctacaaggagaactaaaaaacactgctgaaagaaattgtagatgacacaaacaaatggaaaagcatcccatcctcatggattggataaatcaatatcattaaaatggctawactgtccaaagcaatttacagattcaacactattcctatcaaactaccaatgtcatttttcacagaattagaaaaaaactattctaaaatacatatggaa

SEQ ID NO: 818191 - DNA, 617 bp, Homo sapiens
gtgtgtatatcatttcacacaatttctgagagttaaaagttcaggagtggcttggcttgatggttgtggctcagagtctccacagggttgcagccaagctgttggccaggaatactgtcatctgaaggcttgacaggggctggagctctttccatgctcactcacttggttgctggaaggcgttctcagtttcttgttagctattgtggcatgagacttacgccatatgcagtctgtgctcgtcacctcttcaagattttgcagacaataagagggtacttcatttagcattaattgccctgggattagggccaaagtcaggaaaaattataaaatggacaaaggttatgtattacttctttaagtctagtttgttgttgttgagtttctaatattcatctttattaattttatcagcaacgcacacatgaaacattatggatcagagacagatttcttatgaattacctcacagtaaataataagtgcattggtcttcttgcctcaggacttatccctgggacacagtgatgaaaaccaagtcaaataccctrtgtgagtagccagacactccataggttagaaatgaggcaaaaggatttttctgtgcttataaa

SEQ ID NO: 818192 - DNA, 615 bp, Homo sapiens
gtctcgctctgtcgcccagactgragtgcagtggcgcaatctcggctcactgcaacctctacctcccgggttgaagcgaatctcctgcctcagcctcccggtagctgggactataagcgtgcaccaccacgtccggctaattcttgtgtttttagtaaagacagggtttccccatgttggccaggctggtctcaaactcctggccacaactgatccgcccacctctgcttctcaaagtgctgggattacagatgtgagccaccgcgcctggcctatctattcaatttctgaaaagcacttttaacaccacgaagataaaaaaatttaaactgccaatttaaaagattcaccagcctttgtctagcttttcttcagtcattacccatagccgaagaaaaagaatcctaaaaagtaaaaaggtctcggtttcaaatctaaaagcagtatgatttggaataaccatccttgatttcaaacagactaaatgaattcttaaaattcattaatcatttttaaatgatgcttaagtgtggctgcaatgtatagttcaaaatctacctatgtaagcctgtatggtaagtatgttttttaaatcaacagataaggaatgtctct

SEQ ID NO: 818193 - DNA, 524 bp, Homo sapiens
gcacacaaaaaggatgcgccttgatgtttttgacttcatttttcaaattcaggggtgggcagagccaggaagatggattaagtgttgatgaggcaggggagaaagaatgccagccctcctgccaccagcttgtagaaattggaaagagtgcctactactcctcccagggagaaaaaaaggggatttttcagtagagcagctaacagcaggttccgggctcgtgggaaggaactaaggagaaactggaggtgctgttaaaaactctgcgggctcagaaacgaactttctgtagttcccagaaagagaggaacgagggtgaagattccgagggcaaacctttttggctcactgcaaggtgaggtaacccttgaaatggaaggcagtcctgggcattagcagagtgtgtgagcaagaagccagtctgtgtagggaccaaattcgaaacactggagagayagaggaacttgtaaagtcacaggaaattttcccttacttatgtaacacaaaaacaaaggatcaaaaca

SEQ ID NO: 818194 - DNA, 626 bp, Homo sapiens
gtggtgaaaggctggaaacggggtcgtctgttaggtcctttctcagctagggaggttccaagctgattaggtgcgcattatgttgagtcatatgaaattgccaattttcaattgtttatgacctgcaaaaacaacagtttcatatagttcagtctaatactgtatgttcccatcttacagatgacaaaagtgaggtccaggacaggtatggctgttggtcaaggtcatatactaataagccttgaagccatgactcgaacatgtccttctccctcagcagtttccaagccccaggacgcagggctcctggacttccatcctggtacttcccttgcccactgctctaatccttgttcttaagtgtaaaaggccaaggaggtgactttggggatcagagggctttgtaaaagggacaagcctgtcagggtgaggatggtcataatttttctcctggtaggagtgaagctgagctctgtcttcccaagtcattttctgtagcctctgcttgatctgagtcctcaggacagagttcagatgcctttcagttaaggctgtccacccacscccaaaccctccaagtggagaatggccttttacagaaacatggcccgtgcttggagccaggt

SEQ ID NO: 818195 - DNA, 353 bp, Homo sapiens
cctgttccctctttaaatccaaggcccaggagcagaatggagcccctgaaattaagggttgtggaacagcaaagtgaagggaaggggagaaacttgtcctcgcgttttatggaggagataagagtatggactatctggctggcttttgcagcacagccaggttttccaagagtggcatgagagagagaatggaaagagagaggaaaaagtagagtggcagaagaggagctcgagagccttccagccaccgcatggtgcagggaaacccttgctaccctcatttatsccccgtcagggagggcctcagtgccgagtgcggcggaggatggatccctcccactgccgcaggttgc

SEQ ID NO: 818196 - DNA, 604 bp, Homo sapiens
cagctaacttgatgtttagaaaagaaaaaaacctcctgttcagcaatcattaagatctagagctgtggtaattccctctaataaaataatttatgattttcttggagttgaaaaaaggatggtgcacctgagcttctgatttataaaaaatgcatttcaggctctttttttttaactgcatctttatttcagttttacagttcctccgtcaaagcaaataataatagtaagtgctttacaagaaggtaaaggccacagaaggaggaaagacagatacaataaattgaaaagagaaaggggtggacttctggaatcatcttggagagctctcagatgtgacacagtggccttccctgaccacccaacctgaagtgttcccccagcatcccccaatcattccattttaattgttgaaagataactcacctgtttcttcctatgcattatctgtcctcaactctaggagtcccaaagacaaggaccmatctctttggtttgccagtgtcctcacagtgacaggaatgacacccagcaaagagcagctgctgaatacaaatttgctgaatgaataaatgcattaaatattttaatttttttcctcttg

SEQ ID NO: 818197 - DNA, 310 bp, Homo sapiens
gcacagaacacaaagaaacgattacgacctttattgacctctattgacctggtcctaaatcccattagatggccttaaaaatacattctctgattgagcagccataaaagaaaaagtatacatactttcaatgtaaggataagatccattgagtatacacaaaataattcaaaaaaggttaattttaggacatcaagcaaataaatcagataacgtaaaaattatcttgccataaaacacacagatactctgtttaaaayatcacaaggattattttaaatgtgtatctgagctcacaagaaaataatga

SEQ ID NO: 818198 - DNA, 595 bp, Homo sapiens
ccttctgtgggcatgccccaggcaaggagaggagtcacatcatcccgggtgatagatccagggttatgtaacaatatgtgttatgggcaactctcaggtaagagaggagagttgcatcaaatagatgatggacccagaggtatgttacgatgccttctgtgaactcgatccaggcagaagattcacatcatcaacttggtgctaagcccagcaacgtgtcacaatccgttgtgtgtaaagggaccaggcaggagaagagaatcacattaccaggctgatgagcacagagatatgtcacaatgcccctgtaaggcagggcccaagctgttgggttacatagcctgagtagtggacccagcaatataacacagtgtcccatatgggcagtgcacaagccggagagtcacataacctggatgcgaggccaagctatatataacaacgcttcctgagggcagcgccaaggyagaagaggagactcacatctccgggtgcaaggtctagcgatatgtcaaaatgctcactgtgggcagtgacaaggaaggagaatagagttacaccctcaatgtgctggatccagcaatatgttaatatc

SEQ ID NO: 818199 - DNA, 454 bp, Homo sapiens
gtgctggatccagcaatatgttaatatcccatctgtgggctgggtccatgtgagaccatcaaktcactcaggtgctaggcaccggcaaatttcaccatgaaagctgcagaatggtccaggaattagattaacaatcccacaactgtctcagttgtaggcatgacattcaacacctcctgtatgttgggtctaagctcacgaataaccctctcaacaccagactggatttgtgcatgagagtctcaattcctctgcagactgacctgtgttcccgtgagaggatgacaatagttactgttggctgggtgtgcatatgagtgtcacaatctcacctgtgtgctcggcccagttagcacgctctgtgtactacccaatggccctatacactatgcatgagagtcgtaatcaactttgacaccttcctaatggtagggacccatgatcgtacttgtag

SEQ ID NO: 818200 - DNA, 390 bp, Homo sapiens
tctgtaatgaacatgggaatgcaaatatctttttgacacagtaatatcctttcttttggatatacacccagaagtaaaattgctggatcatataatagatatatttttaatttctttcagaaacctccatagtattttctataatggccatactaatttacaattccaccaacaaggtatacatccactcttttttatatcctcattagttcttgatttatttatttatttatttttattatagccattctaatgggaatgaggyggtacttcattgcagtttggatttgcatttccttggtgattagtaatgtagagcatctttttgtgttccagttagccatttttgtatctctttttgacaaacatctattaagatcttttgtattt

SEQ ID NO: 818201 - DNA, 646 bp, Homo sapiens
aaaacatgagtatgaggtggattccctaggttagacccaaactgaggatcctgaagctcctgctgggggatttggggctgggggcaccctggggagctgctgccaaggcaatccaccgtccctacaggccgcctcccttcccggcctgtgatggaaaggagaaggggtatgtgaacagctgtggaagtcagactctcgggaactgaatcaggccccagcccatgccccccagcccagtccagccaacgtgcccgctgtcttcccacccagccagccgagccctcaggattgttagatggaaccaggctccatcaccacccaggcatggagggaagatgtcctggtccttagcaagcaaggcctggtttccaaagtgctctccgaagaggcctcatgtttgtgacatcttagaaggtacctttctgctgttcttgcacccagcatgttggcaagtcaagttcccccactgagttctccacacataaggagggagtcaacaccattgctaagtcggrtcagctcaagggtctccagtatcagttttatcagatcccagggacctgtctgctcccagaggtgacagagaaaaatcaaggaatgatctgtatggtcactgacatggatgaaacccttgtgcatagctcca

SEQ ID NO: 818202 - DNA, 530 bp, Homo sapiens
aacaacagatgctggtgaggctgtggaggaatagaaacacttttacactgctggagggastgtaaattagttcaaccattatggaagacagtgtggtgattcctcaaggatctagaaccagaaataccatttgatccagcaatctcattactgggtatatacccaaaggaatataaatcattctagcataaagacacatgcactcatatgtctattgcaccactgtttgcaatagcaaagacttggaaccaaccctaatgctcatcattgatagattggaaaaagaaaatgtggcacatctacaccatgaaataataagcagccataaaaagaatgagttcatgtcctttgcagggacgtgaatgaagctggaaaccattaacctcagcaaactaacacgggaacaggaaagcaaacaccatatgctctcactcatatgtgggagttgaaaaatgagaacacatggacaccgggaaccaaagatcacacactggggcctgttaaggggttgaggtcaaggggagggagaa

SEQ ID NO: 818203 - DNA, 490 bp, Homo sapiens
agcgctgtttcagataaatctctatttcaatttattcctatatgttagttactgaaaaacaacagacaatcacaaaaaacaagttgaccttttttttttccttgagcccagaaatgaagggccctcctgactggatgtcatgccagataactcattacaaaaagagctagggttccagactgtgccaaaacttcatgagatctcttctcatctgttcacggacaagtggccaactctggagcccagtctgttgcttcgcagtctggtggtgaatcctccatagtctgatgagtgtaaatatatatatctcttttcccttctctccgtcccattgcaacttgcttattatatcatttgcttattatatctgcattgccatatatgtgggatacagtttgtttacccttaaargtattgtgtgtgtgtgtgtgtgtgtgtgtgtgtgtgtgtgtgtgtgtttccttctctccttgagcatttcctgcgcaga

SEQ ID NO: 818204 - DNA, 179 bp, Homo sapiens
aaggacctgcacaaactgtaaagttccttgkcatcctatggaatgcagggaaacagtccattttaccaaaggctaaggctaaaatacgagaatttgcagccctaccactgaaaaggaggtccaaaattgtattggtttgtttggattctggagacatcatattccccacttgggtaaca

SEQ ID NO: 818205 - DNA, 540 bp, Homo sapiens
  misc_feature 9, 10, 14: n = A,T,C or G
tttttaatnnatcngccaagggacttgggggggggcgcatcataaagatgcttcaatgagcaattwtgaattcccttaaagcaaataaaaaaaaattgaaactctcggcagagaaatagaacttataaaagaagaactaaatgaaaattatagaaaggaaaaatacaataacacataaaaataccagctggatggatgcaacagtagagcagaaatgacataagatagaattagagaacttgaagaaacatcaatagaatttacccaacccaacctggtcaacagagagaaagtagactgaacaaattaacagagtctcaggatctgggcaacaataacagaagaactaacatgtgtataattggagctccagaaagaggaggcagagactggtccccaacaacactgaaaaagtaaaaactaaaaactttctaaatttggcaaaagatataaacctagagattcaagaagcagagtgaatcccaaataggataaagccaaagaaattcatgacagacacatcataattaaacttgtgaa

SEQ ID NO: 818206 - DNA, 556 bp, Homo sapiens
ttaaacttgtgaaaactaaagataaaaaaaaatcttgaaggtatccagaagcaacacattatctctaggaaaacaccaatttaaacaacagagaatrtctcatcagaaatcacggaggcaaggaggaagtattgcaacatttttcgagtactgtaagaaaataattgtcaactgcaaattatataggcaaagaaaatattcttcaggaattaagggggaaataataaaattctcaaatgagggaaaagtaagagaacttttgtcagcacacttaccttaagaatggtttaagaaattgctctaaataggaagtgataacagaacaagtattggaacttcagaaaagaaaaacaaacaatgtaatgagtaaagataacagaggatcctccttctcatgagtttcttaaataatatttgatggtagaagcaaaaattataccaccatctaatgtggtgctccatgtatgtagagaaaatgcttacaaaaatagtaggaatggtaaatagacccaaatgtaagtaagatttctaaacttaactcgtgtagtaaaatgtc

SEQ ID NO: 818207 - DNA, 530 bp, Homo sapiens
agggttttactggttaattctaccaaacacttaatgaagaagtaataccaatcgkctacaatctcttcctgaaaataaaagcagatggaacacttcctaactcattctacaggctagcattactccagtaccaaaaccagataaatacattataagtaaagaaaactacagaccaatatgtttcacaaatattatgtgtggaaatccacataatattagcaaatcagagccaacaatgtataaaaagaagtacatgccacaaccaagtaattcaagtatgcaaggctgcttcagtatttaaaagatcactccatgtaatttattaaccatatcaacaggctaaagaagaacatttacagcatattaattgatacaaaaagcattttacaaaatttaacacccattcatgatttgaaaaaaattcctagcaaactagaaactataactagcaaactagaaatattggcaaaaatttctaaacttcataaagaacatctaaaaaaaacttaataacaaacatcatatttaat

SEQ ID NO: 818208 - DNA, 530 bp, Homo sapiens
agggttttactggttaattctaccaaacacttaatgaagaagtaataccaatcgtctacaatctcttcctgaaaataaaagcagatggaacacttcctaactcattctacaggctagcattactccagtaccaaaaccagataaatacattataagtaaagaaaactacagaccaatatgtttcacaaatattatgtgtggaaatccacataatattagcaaatcagagccaacaatgtataaaaagaagtacatgccacaaccaagtaattcaagtatgcaaggctgcttcagtatttaaaagatcactccatgtaatttattaaccatatcaacaggctaaagaagaacatttacagcatattaattgatacaaaaagcattttacaaaatttaacacccattcatgatttgaaaaaaattcctagcaaactagaaactataactagcaaactagaaatattggcaaaaatttctaaacttcataaagaacatctamaaaaaacttaataacaaacatcatatttaat

SEQ ID NO: 818209 - DNA, 641 bp, Homo sapiens
attgctgaatggtattccgttgtatgcatgcaccacaatttattcattcacgtattaaggacatcttgggttctggtaattatgaataatgctgatataagcatttttgtgcaattatttgtgttgacgttaagttttcacgtgtttggtcagctggaccatgtaagactaggtttaactttataagaagttgccaaactgtttccaaagtggctgtaccattttgcatccctaccatcaatgtgtgaaagatctagttgcatcctcaccagtaattgatattttagccctactaatatgtgtgtactagtaaataattgtcttagtttgtatttccttaatgaaaaactatgttgtgcatcctttcatatgcctgtttgccatagaaaaatcttcttttgtgaaatatgttttcatatattttacctatttaaaaaataacgttgtgtatcagtatcctaggacaactataacaaactgagtgacttacaacaaaataaatatattctcccrcagatacggaggccagaagtctgaaatcaaggtgtcagaaatgttgattctttctggaggctctcagaaagaatccatttaatgcctttctcctaccttctgatggctacccagcaattcttcacatt

SEQ ID NO: 818210 - DNA, 563 bp, Homo sapiens
atgtgggtttgcaaatgtatctataataatgttcaaagttgcaaagtgagctttgttgattggcagttgcsgtaacagtgtgtctgtgagaacagcacactcggttcgtgctccggaatgctgggatgagcagtggcggggcacagtcagagccctgtggccgccatgatgttttggtgacccacacggttgggcactctcctgatcctcccactctgacctgtggctgcccctgtccctgacgattgcctctgcagtccaggtggatgcatctgtggtcccctgacctccctgcgaggagctctcccaggcactttgcatcccccaagcacaggtggacgacctcgtctccccccaccctcagcaggtcacgacacatgccacaggtcactcaacaccgcagcccctcaggctcccgcccacagtgctgaggcttgaacgtgcaggcgcccctggctgtttgccctggacaggcagggcccgtgggctccgtctgcagaggccacccctttgcatggccatcacttcctaagagctcccaccgccccctctgaggctctcac

SEQ ID NO: 818211 - DNA, 565 bp, Homo sapiens
atatatatttgtgtatttacacacacgcatgtgtgtatgtgtataccataatgtcaaaagacaaatgaaaaactgggaggccagtcacagtggctgatgcctgtagtcccagcactctgaggcgggagaatcactggaaccaggctgcagtgacgcgggatcacagcactgcactccagcctgggtgacagagtaagaccctgtctcaaaaaaaggggggggggattatctgcagtatgcatatcagtcaaagggccaatgtctgtttttttttttgttttgttttgttttgtttttgagatggagcctcactgtcgcccaggctgaagtgcactggtgcgatctcggctcactgcaacctccaccttccgggttcaagtgattctcatgcctcagcctccctagtagctgggattacaggtgcgcgtcaccacatccggctaatttttgtatttttaatagagatggggtttcaccatgttggccaggctggtctcaaattgctggcctcaaacaatccacccaactcakcctcccaaagtgctgggtttacaggcatcagcca

SEQ ID NO: 818212 - DNA, 584 bp, Homo sapiens
tcatgatattccttttaatctttttattagccatgttaccagtagtgatgcccctcctttatttctgatgtttggaatttgtgtctcttttcttttcctcttgtttagcctggctaaagttttattgattttattgatttttttttttcaaagaaccagcttttgatgtttaaaattttctctgatttcctgttttcaatttcattaatttctgttctaatgttgattattaattttttgttaagtttcctaatgttgaagcttgtagattttggatctttcttcttttctaatctatgtagtcaatactataaatttccctctaagcactgcttttcctgcatcccacaagatttgataagttatattttttgtttagcttaaaatatttttatgcctcttgagacttctttggttcatgtgttatttagtagtgttttgtttaatctccaaatattttgggattttccagttaacttkgttatttatttatttctagtttaattctactgtggtctgaaagagtacttggtatgatttctattctttgaaaaggtgctaaggtgtattttatggcccagaat

SEQ ID NO: 818213 - DNA, 548 bp, Homo sapiens
cctttccatggcaatgacccgatcgcctacaagttacatccttctcctagaaatttctgcataaaccaccccttaatctgcatgcaattaaatctgccctgagctactcctctccgcctaacrgggcagccccgctctgcaggggcagtcagggagctgtagcctcttcaatgaagctgtttcttccgcctcctgcttgcccttgaattccttcctgggcaaagccaagagctctccaggctcttgccccactgtggggtcaccggccctgcatctgcagatgggtaagagtcgctcaaccctgctaggtgtctgctcaggaacaggaaggctctcctgcaaagctgacttgggcctgaccatctctgtattactcggaacactgtatttggaggagttaaggaaacagctctgacaagaaatatttcaacaacactcaggcgggccatttgatgtcagcactaaaaccacaaaaatactttagctcgtaacgggaaatccaaacgccacatctgaatacgcagccctggccatggccctgagcccac

SEQ ID NO: 818214 - DNA, 531 bp, Homo sapiens
ttcacctgtcctcacatgtcctctgtgtatctgcaaagcctctgcctcagtctcctcttctggaaagtgggattggaaaccacatctgcttctctcccaggacttctaggaagacaagattagatggcaggtgagagctctttgaaaatgaaaacattctgctatttgaatgcaaagtgttcttctttgcctgtgatgtttcctaatctgtgaaatcatactggacctcgaagctgtgtattaaaaaaaaaaaaaatagcaaagtggctgggcagggtggctcatgcctgtagtcctagcactttgagaggctgagggggttggatcacttgaggccaggagttcgataccagcctggccaatatgtgaaaccccatctctactaaaaatacaaaaattagccaggtgtggtggcrtctgcctgtagttccagctactcaggaggctgaggcacaagaatcatttgagctcaggaggcagaggttgcagtgagccgagatggcaccactgcactccagcctgggcgacaga

SEQ ID NO: 818215 - DNA, 604 bp, Homo sapiens
ttgttttacaacatgaaaatctagctttcaatacggtattcaggtctggggattgggaaccatgatccctctacttgttcctcatctttcccctcttccttgagaaaccctctcctctgcttttcttttcttttcttttgcttctggccagagaaagcatccactaaacaaaacggcatgctatttaaaagtaatatctatatacattttaaagaaagtaatttttacatctgcactggagagagattagaaatctctggcaagcaagaagaaaaaacaaaaccttgagtaatcttactacctagagctgcccaaatcactgctgaagatgtaatggtgtctatccttccagaatttgctctacatatatatattaacaaagtgtttgaatgaagactctggattccggttgctgagtttgaattctggcttcgccacttactagctgggtgacctgggtcataatgcttaacctctctgtgcctcagcttcctcacagctctgcagagttcacagaaagacttagagcatggcgctgctgtgaraatgagatactataccatgcgtttacaacagtgcctgctgcatagtaagcaagaattta

SEQ ID NO: 818216 - DNA, 609 bp, Homo sapiens
tgctaaacatgtcctcaatgtaacttgtgcatatagtttttctcacaagacaggaaacgtatttcttcttcctttgcctatgaacttctttaagttggatttggggctttaacacatcccctcaaacagactcaacccataaagtattaacgaatgatgcagagctgactatgatttcatggggagatggaggagaaagctacatgagaccacatgtaccaagaccacaaagaccaggattttcaccttctctcctcaaggtcctctttagccatggacctctgggtctctttctgcttctctttctctctgaactcttccccaaatattcactgaatacctccttctttctgttacaaagaaattcagttctcttctgaattttccagttaaaggcaccagctgatactaatgcccagtaaagccagcatctttttcaacaaaagtgaatttctttctattggggaaggtactgcgaagagaaggaaggtctcctccaagtcgttctgccaagytatttcacaaggattggttttgtcccttcaaccagtttgatgacaaggaccctgacttgcatttgttttatgtctcatctcagctgccttttct

SEQ ID NO: 818217 - DNA, 523 bp, Homo sapiens
cagagcagcagcattgataggagtttgtgatcagttagacactgtgcagaagggggcggtatccaagatgactctgctccaagatgactctgagaacggatgactctaagctcagtgcctggcacacagtggataagaaacaattgtcttgaactgaattatgcggcaaaaagacaatggagtagatcatcactgggaggaaaggatgatgccaatgaatatgaatagtggaggaaaataaatagaagaataagtgtgtgtgtgtgtgtgtgtgtgtgtgcatgtgtgtgtgcgcatgcccctgcagggtgctgggaaaagaggatgtaaaacatgtgcccggttatcctgtgtgactttttcctgctcaatttaagcttttgctctttaagctagaaccatgtttagagagtgaattcagaaaactgtgtaacaacctcgaagatgccagatttctctcaatggcaagcttaccaactgttttgatckgaaatcaagggttttgagaaggggagggagaaca

SEQ ID NO: 818218 - DNA, 617 bp, Homo sapiens
ctctggggtgcaatggggtcttagccctagacattagccttacatgaacctctgaagatgctctttttgcaaagggcacaaaaaccattcaagccattgtgtcttcttactttgcctttctcatcaccaacagcgatattccaatcatttgatcaatatttactgcctgcttataatatgtaaggcatggtgcttggtgcagctttgattcatggctggtggattgaattttagatcttcaaaaggtccaagtgaaatcaacaaccaagctaaaactccatttctacgtatatgtagaaatctcccacatctttctcttccctttctgttacaatgttcttctcttgctcagtataagagagactccatgtttaactgcccaagcaggactcatgattagggccctagtagttcaccctatcagaaatctacactattatcctgagaggtggcttgaagtacgacctccactaaccaggaaaacatatttccaccmatagctgggactttgcacttacgtggcagcctctggagtgggcttagatatgaaaatgtcaatctctagtcatcaagacaattgctcaaaatcctaaatttagtcacagccaacttaattg

SEQ ID NO: 818219 - DNA, 595 bp, Homo sapiens
acctatgtaacaaacctacacgttctgcacatgtatcccagaacttaaagtataataaaaaaaattttaaaaaaggatgataataatagttrcctcttaacacttcaagaggattaaatgggacaatacttgcacaatgtctggcaagcatataaagattataaagaatattatgtattggtatgatttttgctgccccgaatatacaaaacagtgctcttatactcaaaagtgcttctagaagcttgtcaagtttccagggctctagtgtcatgtcaatattccaccagaaaagaggaaaaaatccacagaaatagaaagatgctggatgctgtgactttactaggaccctttgccaaataatgaagtggaattgaaagggttgagtcttgctcagcatagattttaattcaagttagaaaactcaaatttctttttaaaaattgaaatcatatatttttaagatgcacagtgtgaggttttgatatacatatacatagtgagttgatttaaaaatcaagataattaatatatgcatgtcttcacatagttaccttatttgtgtgtggtgagaacacttaagacctactctctt

SEQ ID NO: 818220 - DNA, 627 bp, Homo sapiens
acaagagataccttgacatttcagaaacaaaggtcaaagcttgaacaggtccaagagcatgcacaattcttgtgcacacatgtcaagttcccgacatgaggttagtattatgttgtgccttcttatgttggtatctttatgttgtcttacacagcataaaaagaaattatgggatattttaagcaaaacaacaacaacaatatgaatgttgccttacttacctggatgtttcaagcaaaactaaaatttggcttgccataccaattgtcctttatcaatccataactttaatttcatagctcatacttcatccgtatgggtccttttctcacattagtgaaacccgtttccccagggtgtgatttgctacattaaacttcttttcattcatcacgccaatttatttttctgaaatatttgccccccgtttttccctggaaatttataataatcagattttaattatatcccactcttttttctgccagcacatacttgttygatatgttttatgctatattattttgtgcttgctgatatatcacttcataatttttcatgggcatgtgatttgcccaactagatggtaaactgaatggcaggagcttctctatacatacaaattta

SEQ ID NO: 818221 - DNA, 644 bp, Homo sapiens
attattagagttaattacatcaattgcaatataattgagtcttaaatactatgtagaaacctcatacaattatggaaaaacaaaagttatctagacatctcaaatcaaaaaagatttggaattcctgcacatttaatttctgataatcactagtcagtttggacattaagattgcatggtgtcttgttttctatttggtaggttttgacagaattgatagttttacaacatttaactcaatatgcatagaaatataagattaaagctgtgagtgcacatttttttttttctaaaaaaagatcactccatggcttaaaagctgaaatgtgttacctgcctaacattgacagaaacaaactcaagggaaaatcaaaagtagatttgatgttgacttttagaaatctcttctctgctggtgtaaagattcctgtgggtcttaggatttgttacctgggggctttaaaatatgacaaggggatgaattgtgtaaaggggccaaaaaaaaaaaccctcccattttattacctagatataggctatgtgttcttatgtcaaaaccactggttgaaaagtgaaacatcattaatatctggtttytgatgtcatatagatgaaaataaatccctgtaatggagttatcggaa

SEQ ID NO: 818222 - DNA, 644 bp, Homo sapiens
attattagagttaattacatcaattgcaatataattgagtcttaaatactatgtagaaacctcatacaattatggaaaaacaaaagttatctagacatctcaaatcaaaaaagatttggaattcctgcacatttaatttctgataatcactagtcagtttggacattaagattgcatggtgtcttgttttctatttggtaggttttgacagaattgatagttttacaacatttaactcaatatgcatagaaatataagattaaagctgtgagtgcacatttttttttttctaaaaaaagatcactccatggcttaaaagctgaaatgtgttacctgcctaacattgacagaaacaaactcaagggaaaatcaaaagtagatttgatgttgacttttagaaatctcttctctgctggtgtaaagattcctgtgggtcttaggatttgttacctgggggctttaaaatatgacaaggggatgaattgtgtaaaggggccaaaaaaaaaaaccctcccattttattacctagatataggctatgtgttcttatgtcaaaaccactggttgaaaagtgaaacatcattaatatctggtttctgatgtcatatagatgaaaakaaatccctgtaatggagttatcggaa

SEQ ID NO: 818223 - DNA, 555 bp, Homo sapiens
ctcaattttcagctaaagatagttactgccttttgaacaatggtatagttaatagtccagcaattcaaagtagatcagtccataaatgaggattaattgaactataagcagtggtcattaaaccataataaattctgcagaacaatggaacttccttcagtttttgtaattaatataagctatatagacttagtgtgtctaaaactctcatggcagagtcaacagtcatgggtacggataaaaagattagtctattaaaacatacattcatagtgtcatcatctgtaaacctcaatcagcgaactgtttctatcaaatgatccatgaatatttattgaattttttttgcctaacatagtatcagacaaatttaataaattattaactgaatagatatttgttgaataactgctctcttgaaggctatatcactggatttgatctggcagagactggatgactttcacagggaacagcaaggatgaattgcataggatttcctcaatcttaagagttgatggcaaagtggwtccagttttcaaagaccttagaata

SEQ ID NO: 818224 - DNA, 643 bp, Homo sapiens
ctgccattatactagcctgactcttgagagaaaatctgaactgctgctttactatttctgaactgtcaaaggcttaattcctttctactttcagaattaatgtttctgctgtggttgtaaaaccaaggtgttgtcaggagagaggttccagaatccatgtgttctggctttttagctctttcttgttgagaagcttggtcaggttgcgggagatgatcttttctagcctgctgtagtgtgacagcaaatgccacaaaaacaaacacctgaaaatgacagaaaatatgctctaccacagaacaaaatccaaaagctatgttgttgtggaccagctacttggataggctccacatgctaacctccctggtattatttgtatcttaaaacagcgaaggaaaagaacccacgtttgcattttcccctgtggtgtatcttttcaacagccccatgctctccctgctgcttgaaaggatcagtaaaagagcttagtcatactgggtggtaacttgatatgattacaaggtccagtgcctttgatgtccatggagctgccaggtagggtgatgctaaaataytcttttttaaaaagtcccagacagggtattcttgttaactggatcccttattacatttggaaggctgc

SEQ ID NO: 818225 - DNA, 610 bp, Homo sapiens
aggaaaccaagtcacaaggctggtaaatgtgaaaggggccctgtgtgcttcaaactcattttcttttycactatgcagtatggctttcccaagacttctttactatctgctcttaactgttaaactgtgaagacatctggtaacagtcctaaaatcagcagtttacagaacactcggtatttggtgcctctatccaggacagttcatctgtacgttggcttcctattgctgctgtaaaaaattaccacaaacttggtggcttaaaacaacacaaacttactctcttatagttctggagatcagaagtcccaactcaatctcacctagctaaattcaggggaaccgcaggcctgcgtgccctctggagatcaaggggagggtctctttgtcttttctggcttctacaggccatatgcttccttggctcatggccccttcctccatcttcctcccactgctaattctgtcccttcatcctctctctctgactcagaccctcctgcctccctcttctaaggaccactgtgactacctcaagcctacctggataatccaggatcatttccccctctcagaagccctcatcacatcagtaaagacccttttatgc

SEQ ID NO: 818226 - DNA, 589 bp, Homo sapiens
tagctgttttttaaccgttttgttagataaattttctccatcactaaaaccaaagagtgggatttttttgttctagattacatgagcaacagtctcgcgatttccccaagctctctccttctctttgagaattaccacagggtgcacacatgcaacaagaatccctgcctgtttgtatatggaccgaggatttccgagtgttcctagtttacaggtgggctttgtgagaaaagtccatcggtcacagtctcacttttggaacctaacattcagagaacaactatttctaccatgtatgcagccctctgagaggtataagacctatggactgtcacgcggtcacgccaagagatggaactttacctgtttctgagagattgaccaaaatgtgcagcaggaagtataccgagcactaccagacaaaaccttgacttcagtgaggcccagattactttccaggtcaggaggtgacacraatttggatctgacttccctagaacaactgtctctcctgtcacatgcttggatctcctttaggaagtaccaacactgcagttacaaaacaacaaatttattctcttacaagttt

SEQ ID NO: 818227 - DNA, 509 bp, Homo sapiens
aataaaatattcatcagtgaatttcctcattgtggttgtagtttgaataactctgattactaatgtaattgagcatctttggccattttgttatagttyatgtgaaatgcatgtttaattatcttgcctacttttcttttggttgatttttccttattgatgtgtagaagtatattatatattcagatatgagccctttgtggctagagcatttcaaataatcctttttccattttgtgatttgcctttttgttcccttaatgatgtcttctgatacacacataaaaattatctcttgatttagtccaatatatcaatctttcttttttgtcttatttaaaaagtctttccctgtaccaaaatcttggagatttttctccagtattatcttccaagagatttatttttttatttctcattaaaatataataatcaatctgaattgatttttaagtatggggaaaagtaaatgacatgacaattttttcatgtggatatctcctaattat

SEQ ID NO: 818228 - DNA, 632 bp, Homo sapiens
tttgctctttttatttctaatatttactcactttactcatactctgtacaaatatatattaaaatttataaatgtatgcactaaaatttattagtattaygcattaataaatactaaaaatcaagataaattactagaagtcgtatgcattctgattcatgtaccctaaaatataaacacatacatgtatatatataaatgttatagcttgtgtgaatcaaaatgatccagtacttgctaatttatcttattatttaatattcattaatacatattttattcctctaaatgctgggagctaactgattgttgtatcttcagagagcactggagtcagttccataaccagaaagcaaagagtgtgacatttattcatcggactctgaaatggatctgtagcattatggaattaaataaagccatggtatccagaggtgtaaaaaacaaaaactgagtggcagacacagtggcttaggagaacttaacggtaccatctttttttattacctttgctctggtgtcaagggtaagttaaccttctttttaaactctttaccttcacttcagtgtcttcctcctatcctgggcagccagcactctccttttgcctattgtctcttgtaaaaggaaat

SEQ ID NO: 818229 - DNA, 552 bp, Homo sapiens
actgagttatcacctcactttatgaccatgctttcaatggttagacctttagattgtgactgcaaagcaattagacctttgattcttctttttgaagccgcagtgaaacacctataaacaaaatggtccttaggcatttaaccttgcagcccccatgggggtatatttaaagtgataagaccttctttatgaaggtgagattgatggtggaggaaagtcaaaagacattgaaattgcacctgccaaataaagtgattctacttttcataaactaactccagaagccatttttttgtctcttaggaaagttagaagatagtggaaaatgtctatttacttgtaatgaagaatcatgaatatcccaactcatctcctatcagaacttacacccactaaggaaaacgcacttctgttccaaccttttctacacaatttaaaatatcaattaattaactgagtcaacaaatatttattaggagtgtctgattttctasgcaatattgtgggaatacgagtgagaacaaaaatttttgattatgattgatgcatctc

SEQ ID NO: 818230 - DNA, 536 bp, Homo sapiens
gattcaatatccttttcttggatacaacaaaaacagtagttataattaggacttctctttggtaaaattttgaattaggtgaagcttgtatacagtggctgtgggctcatgttctctccctattacccaaccctgtttttatactttatctcaaaattacattttcttgttttcctatatgaagtgccctaccctcacattgtctgtctactacctttttcacccttacaggatcattgttcactggcctgcccttaactgtgaagaaaaaaaaaaaagatctaataaaattacaccaccacaatgagaatcctgcccacctccatgagacagctgggatttgaaatgggacacttagagaaacaatgccttaattataacttcataatttataatgggccattcacatacattatctaatttgatatttaaaacactcttcaagataattattatatatacatcagttttacatgtagagaaactatggctygggaaaaagaggaaatttagggtaagacagtgggcagtggggt

SEQ ID NO: 818231 - DNA, 650 bp, Homo sapiens
ctatcaattaatatttttgaatactaattttttttaactgaagacaattgactgatgaaagatttagctgatttamtttggctgagtacttcagttgtgtatgtagattgttgtggttttcaaagaccaaatatgtcagggaaacatctttaaatagtagaaatacactggatgctagatctgggttttgttgcaaatttgtggtgtgattctggcagagtcgactttcataaggtttgtaaatcagactcttgtaaaggaagctagacaggaagtcaagagttctagaattctagtctttgccctatctattcagggcctacttctcttcacataaaatatgacaaatttatatcagtgtcttctgaagttagcaaacccaaattttaggcttctgtcccataagccatcaattattcaggctgtggttcttgggcagtgacatcacaggctctcttgaccttcagaagaatgttttacattttggtgattgtaaataaaggcatctctgtgtgtgagcatactattttccatatggagtaagagtggtgctgatctatattagggagaaaaagtactcctcagtaaacacaacatgctgatatagaatagttcagggttttttgttttgttttcttttgctttgttcc

SEQ ID NO: 818232 - DNA, 551 bp, Homo sapiens
cacagagcctgcctagattaaggagaaaggktatagattactgtatcttgacagtatcttgacaggaatcatgtcaaatagtttgtgacagacctctttaatcttccaacctggagtacctcagaatttccctctgctctcctgtctcatctccagccttcagtgtatgatttccatgcactcagtgaaggtccatgggaaacactcagcagatgagtgtggaaatcatttcttggggctccttgtgattctaatctgccataccagccctcacttgccattatgagttctcaaaaagtttggctaatgtcttcctactggtgtgtacaaccagtaagttatattggttatttcttctctggcagctccactagggatgaaaaacagtcatgttccttctctcctaggaagagcttgtcacttatggaatttagttcatttagatttatttgcgtccttggctttctgatgaattttttttaaaagtatgattttgtagcttatctggcttgttctcattgttagtagggtaactgacaatctccaatgat

SEQ ID NO: 818233 - DNA, 551 bp, Homo sapiens
cacagagcctgcctagattaaggagaaaggttatagattactgtatcttgacagtatcttgacaggaatcatgtcaaatagtttgtgacagacctctttaatcttccaacctggagtacctcagaatttccctctgctctcctgtctcatctccagccttcagtgtatgatttccatgcactcagtgaaggtccatgggaaacactcagcagatgagtgtggaaatcatttcttggggctccttgtgattctaatctgccataccagccctcacttgccattatgagttctcaaaaagtttggctaatgtcttcctactggtgtgtacaaccagtaagttatattggttatttcttctctggcagctccactagggatgaaaaacagtcatgttccttctctcctaggaagagcttgtcacttatggaatttagttcatttagatttatttgcrtccttggctttctgatgaattttttttaaaagtatgattttgtagcttatctggcttgttctcattgttagtagggtaactgacaatctccaatgat

SEQ ID NO: 818234 - DNA, 585 bp, Homo sapiens
ctctgattttatattagtaaaaacatatatagaaatagatttatgtattaattcactttgctacccaaaagataaaagtctgaaaaaaaaaataggagacaaacatttcctgctttcctatagctcttattctgtcctctgttcttttgtgattatccaaaccagacaacttcttggcaagcttattaaagatttagataatgaaagaaattcctcagttccatgaacagcattgtgctgctcaattttttggtctctgagtttcagctgccagctactgctgtcttttggctgactgcaattgcatgtgtgtgttgcaaaattattcagcagaggcatgtccttgtggatgaggactctttacatttccatcggaagcactgtccgcttcagctgaacttggacaatttgtatttgtcattacataaaaagtcacttaagaaaatcttactcagcaagcctcccatttctgatggattmtacagatattctaatgcctccatatcagcgcttcaggtaacagtctagatggcctacccctcgtcggattttgtatctggcatttagcaactcttctttctggtg

SEQ ID NO: 818235 - DNA, 641 bp, Homo sapiens
cttgagataagaatcaaagcctggaaatactggccacagagcaaatgcaactggagccctcattggagaaatgtccatttatgtggttattcagccaytgtgaagacttaatggcttatatagatttgtgtccaacgtgaattggtgtgataactaagactggaaaggacttgtgttatcagaggtcaactggattctccttcattgagtttccagaaaatggacatttattacaacagaaaacttagcaatgctcatgaatgttccatgggttttactggccttttcatgccatcaaaaagagacctatacattttccctttgctcagagacatgtatgttaagacttctgctgggaggccacttattttatttggaaatgtatgaacgaaaagggcagattggagttttctagacaaaacattggaatgttttgggtcatacctgctttcatgatgttgctaatgtccttggcttcattattcacacctccaaaacaatgctttaagccaatttgaaatgttcctgggggtagaaaagattgatagttctgttttctttcaaaaaacatttagcaattttagaaatctttctttccaacatgtcatagcacaccgcatcttgcctttcacataaaacat

SEQ ID NO: 818236 - DNA, 661 bp, Homo sapiens
gccagtcacgggccaaccttgtaagccttttttttttttttttctggatatcagtctcaggcctgctwcattaacttctttctgcacacctgttcatttatttgtgtatacatgtagtcatataattagaagaatagccattgaatttgtattatagtttcaatttatgttaaagaatactggatcttccctataatatataaaacaaatttaatacctatttttagtggtatgctggagctattctgtaactgcatgttagagccaattattaaatctccaggaattttgtgagctactcacttgcaatcacctataacaggaatattcacaccaaagaaattggcaagttctgcagatcaggacttccccgtctccatgaagagctggttattaaacattgaacagcatacctttgctgttgaaaggaaagagtgagaaagtaaaaagaataaactttcacacctaataaataaaatccctattcagatttatttattcattcatttaaatttatttaataaatgtgaaatacagaagaagttctgcagctaaattcactgactatatggagcttacaatctagtaggagagccagatgatacacacaaacatagtggagcaaaatattctcatcttagtctgtcatttccttcactac

SEQ ID NO: 818237 - DNA, 525 bp, Homo sapiens
ttaaaatttttttaggaactttattcattatcaacaaaaatgtattgaaccctagatgtattgaaccctagcgtgctgaggggactgggctagctactgtagaggatgtcatataccattctccccttcttcagtatgctccaaccatatttacagtctttcagttccatatctctgcaaggtatttcttgcctcaaatccacatacacgctgttcactctgcctgtgtgcacgtcccctccttgtttattcccacaaatagacatttgttattcccagctgactcttccttatccttaaggcctcagattaaatgtaccttcttcagagaggtggtctctcatcaccaaatataagttcttcttcctggcacccactgcctttattgtacatcataatctgtgattattcatttaattgttttcttgtttaatttctctctcccacaaaactataagyttcacaagggcaaggaccaagtctgttctgttaaccactgtgcaaccagggtttctagtgcagggt

SEQ ID NO: 818238 - DNA, 589 bp, Homo sapiens
taatgtattgatctatttttccataaatacaaggccatctttagggtaagtgtctagataaacaatttcattaaaactatttaaaagtccactggtgcatacaacgtataactatttwtaaatgatgacataaaataatagattaacatggtggcaggcacctgtaatcccagctacttgggaggctgaggcaggagaatctcttgaacccagatagcgaagtttgaacaatggattaaaatgtacttattggtatattcattttccaggactcccatatatatatatatatacatacacacacacacactcgcacatatacatacatataaatatatacataaaatatctgtggaaaaaaaaaagaaaatctcaggatgccaaatttactatgccaaaaggaaaaagttaagcccagaagctaaattacacacacacacatctgcctttccttttgtttctaaacatagttacagaaagaaggctatatgtctccacagaaggcctccctcaccctgacaatgtaaattaacagcctgtcttcacaggtccatgttaagaggaaactagaaatcatccccccatccac

SEQ ID NO: 818239 - DNA, 600 bp, Homo sapiens
aaaaacataacataacaccactacatatatgtcagagtggctaaaattggagacaatactaagtgttagtgatgatgcagatactaaaattctcatgcactgcttgtgggagggttgtttgctatatccttacaaaaacctttttggtcatgtatgttaaaactgcattccttatgaactagaaattttatttcttgataaaccccaacagaaatgtgttcatgggcttacaaagggaatatgcaagaaagtttacaataacaatatttgtagtaattcaaaattgaaaaataaaaacaaaatgaccaacaatagtcaacaaactaataagttgatgtatacccacaaatggaattctatgcaatgatgataatgagaaaaactactacatatagcaacatggatgaatatacaatcactcatttcaacattgagtaaaaaactcaaggagcaaaaatgtatgtacagtttaattcaatttatacaaagttcagttactggaaaaaaatacggtgcttcagtwaggaggctggttgccattgaggaggttttgacttgaaggagagatgtcagtaatgctctgtgtcttaagcttggtga

SEQ ID NO: 818240 - DNA, 591 bp, Homo sapiens
tgctatatccttacaaaaacctttttggtcatgtatgttaaaactgcattccttatgaactagaaattttatttcttgataaaccccaacagaaatgtgttcatgggcttacaaagggaatatgcaagaaagtttacaataacaatatttgtagtaattcaaaattgaaaaataaaaacaaaatgaccaacaatagtcaacaaactaataagttgatgtatacccacaaatggaattctatgcaatgatgataatgagaaaaactactacatatagcaacatggatgaatatacaatcactcatttcaacattgagtaaaaaactcaaggagcaaaaatgtatgtacagtttaattcaatttatacaaagttcagttactggaaaaaaatacggtgcttcagtaaggaggctggttgccattgaggaggttttgacttgaaggagagatgtcagtaatgctctstgtcttaagcttggtgatggttaatggttctattccgtttgctaggattcattaagctaaggaatatgttgaacaacttgaaaacaataaatttgaaaacttagatgaaatttgacattttcttaaa

SEQ ID NO: 818241 - DNA, 495 bp, Homo sapiens
tccatcaataaaagagaaattcaagtaaaagtttaaatatatgtatgacttttcagccagcaggcatagtgaagctggtttgattctatcttactctgagccatttcagagtttgagaaataccagaaacctttggaggtcatctatgttcacatttatgtctccagacagagaaaagtcattctgcctacctagtgagaggttgcaatcatagtattccatcccatttattttctcactttcaaaatatagtccttgcatattatattttggatatgggtaagaggcaagtgtataaggtatgaggaaaaaaaataaataaaagcacatcatgactcacacccaagaaatggaattgctgcatcatcagagctcacaagcctagcacagatttggaacttagtaaagtctgctcaatacatgttgaataaatgtatgagtgaatggatwaaaagagatgaaatgcaatagggattacacagaatagtttttagt

SEQ ID NO: 818242 - DNA, 626 bp, Homo sapiens
attaggttgaataactgttcattcaaattaattttactccctttttattgcagtttttctagtcattgtgaaayagaagggatagctgttgtgaggttggctccagtagcaaaagctagattatgttaattctgactcattatttagatgctttagatagaaaatcagttaattatataagtttaattatgttattctaattcattatgcaaagtatagtttttgagcattttctctgtcaagttttattctgtaaaacacttaaccttattgtgaatgctatttttaattcagttaagaagttcagcattaaagatacagattttcatgtagcaatagtatgaatgcatattttgtttttagaggacagcaatatgataaaaacaatcaatgttcttgtaaaattgagaaacgttttgttcaaaaatgtacttggaataatcttggtgtgaacataatttatgactatatacagataattctttcaatttctttgatttatatatacatttatagtaaccaaattaggacattttgtggcaaagattatattaattttaaaagtaaaaacatcactattaaagtacagttttttgttgttgttgatcatcttcaatcagattcta

SEQ ID NO: 818243 - DNA, 660 bp, Homo sapiens
gtaacttattttgctaaaagtagaaactacatacttaacatactaaccatttaatttttatgagrtgttaaaggaagctgatattctaggctatttttgattttaagaagagtaacaaaaaccttgggacaaagggatcatggcatcctggaattcctagtaaagagaaaagaaagacaatataaaactggaagtaccaaatgtggtggggcaaagtgaaagtaaaagtacatcagaatcactcagagggcatagtagaccacacatacatttctcttgcttaactgataatatatctgaatttctgggttgtcaaagggcaaaagaaagacttgaaggtgagttctttctcccttagagattccacaatgccagatctctctgtcttacttattgaagctacaacaagcacttgcttggagatacctagctttagattcctgtacaaacaaaataaacaaaagaaacaatgtcagcattaggttttattagattccaatgggagtgcaagttggaatgatccactttttggacattcaatacccttgggcatttttaaactattcagtaggaaaagggaaccttaaaactgaaatactgaatttctttctatgcaagcatgttggaagtctttaggatcctctctatttgaacatattt

SEQ ID NO: 818244 - DNA, 518 bp, Homo sapiens
tatctgaaaaacataggggaaagagaaagrcccagaagacaaaatgagaaagattttcaatgttcatcctaacaagaagaactgagtctatagaaacttgacttggaatggtctgaccaccctacaaatgcccatgtttaatttcttatgataacaataaattcaacactatgcagcaacattaacatagcaggtgcattactgataactttcttctctcatgttgggaatacaaccactcctgtaagtgtagcagtgataaatcgcatggtagaggaaggtgatgcttgggtcatctagcaaggtgagttctctcacgtttgtccatccacttctgacgagacaccatgcggacctagatcttaagagcctgcttttctttaactgctgctttcaacaagatacgattatgttcatgcacatgtacataggcatccatggaaaacgtatggtttgctttcataaagtcttaaaattgacattgagaatagattaaacatgattctgcaatgttcatg

SEQ ID NO: 818245 - DNA, 626 bp, Homo sapiens
cattcttcccttccaacaaagttatacttataatcccgttccagagttggttctttttcaaggactcagagagccgtaggttgcgtatcaaagaggactaaagcaaaamataaagatgacatgtaaacttgcttctaattcctgagagtgactttgatgatcataggaattccaactttcagtatttaattataaaaaaaattcctccctgcctggggaaaactgtttttttcattggttttgcaaacctgctgtcacagttatgtgacttccttctcaagctttggagtggtaataatatagtgaaggatgagtatatgcaacactttgacttggcactggccggtactcccacccagatgcgctctttggtgggactccttcaactgggcctttagctattttaatagtgtgagaggaagaaagacattctgggcaacagagatattataccagaacaaggcattgccttgcaaggaagcaaaatatctctgggcattcagaaataatgactttgaatttatccttcacatttgaatctgtctccacttctctttattccttgggatactaccaaaagccctataccatgtaagattcactagtccaaatagagcctccagtgg

SEQ ID NO: 818246 - DNA, 468 bp, Homo sapiens
actacatcctatatcatgtgacagcaaatcagatttgggtrgctccaatattaaaccaacacctgttctcaccacttctactttagccttgtctgtgaacaagagttttaattgtatcctaacatttacaaatttgagtacaaaaatggaaatagccagttatgaaacaatcataaatgttctctaatgaaaaccacactctcccacctgaattatacacataggtggttttacccagagaaatttaggactaacttagttatactgcaagattgtattaaaaataaatattttaataagcttacattgattaccccgtatgtaatatttttaaaaaattgaaaatgcaaatagttttgacacttacctgtaggaggaccttcctcccatccttctgctctcttaattcgatgtgcagtgaatcctaagcagatattgactccaacggcaaaagtgaacagggatatt

SEQ ID NO: 818247 - DNA, 538 bp, Homo sapiens
ttcaatccactgtttgtaggaatctttgaaakactgttgtctattttgtagtgtttaattaaaacagatgatacagaccagacatggtggctcatgcctgtaatcccagcactgtgggaggccgaggcgggcggatcacttgaagtcaggagagaccagcctggccaacatggcaaaacccatccctactaaaaattcaaaaattagctgggcatggtggcatgagcctgtagtcccagctactcaggaggctgaggcaggagaatcacttgaacctgggaggtggaggttgcaagtgagccaagatcgcaccactgcactccagcctgggtgacagagtgagactcttaaaaaaaaaaaaaaaaagtagatgataggccaagtgcagtggctcatgcctgtactcccagcactttccaaggccaaggcaggaggattgcttgagtccaggagttcaagacaagtctgggcaacatagagactccttgtctctacaaaaagtttttaaaaaattagccaagcatgaggcacatgctgt

SEQ ID NO: 818248 - DNA, 634 bp, Homo sapiens
cattttacccagctcctattcaagatggttcacacacctttgacactttggccaggtgttcgtttacttgtagctgaacacattcctagctgctacaggaattacccatcgccagatgaagaaactgaggcccagagattttaaataatttgtctgattgacacagcaggtcagtgatggaattggatgtcagccccacaaggctgacttcagatcctgcattattaaccacttaccttgtgttgtttggtaggatgaaatgaaattacttctataaagcactttggcattagcatgatgtctggcatgtggtacatgcttattaaactgttaagacctttcccacagtcacagctttgtgttagtgcttaacaatgtgtttcccatgggaaacaatgagatgcaaaccagagctgtccatgcttaaacaatccagcttaatggctatagtaggtgctcagtatgtttgctgagtgagtaaatgagtaattctcttaaataaagaaaattttctaagcatcacccttaggaggttactgtatgcattttttatgaggatgctaaaattttgttacgtattagsgtagatcagaagttcggtgtgtgaaccctaaatatctgagataggtctcaa

SEQ ID NO: 818249 - DNA, 611 bp, Homo sapiens
agttcgaggattattttttattttttttgtttttttaatgaaccctctcgttttacttggatgtgatcagctgtaagtaaaataaaagcaaaacaaaaaagaggcgaagatcgagtaggaactgcaggggaaatggaaagtaagttttttctttaacttttattgagtagtttctgttaaatttaggtcgagtatcgattatctttccagcctgatcttgcacaatctttgatatttcgctccctctctctccctctccgcctctcttcctctctacccctacctcgctcgctcctgctcgctgtcgcacacatcccctcatcccgaccatctcttccgctctgccccccttttctatctctttccccttttttttggctcaaggttttgctccgctgagggagggagggggcactgagggacctgattttccactttctttaggggggctgcgtttttccggatttaacttttggattaagtggcggaggatcatctacgtttgctygggcagttttctctccttttccctgtcttttcgggttttgccttccccgcgagccccgggcattctagtggctgggggaagctgtcagctccgcaacggcgcg

SEQ ID NO: 818250 - DNA, 586 bp, Homo sapiens
gcctaggtgtagcgtagactcttggaaatactgtggttagcattctgtgttttctgtagyatagtttcagtgatgcctgtttagatagtttatcagatctaggtactagtgttatgtcagcgaaacactgtttagctgcacgcggtgcatgtaatactttgttcattgatatttgtttaaatcaatcagtgtttaccagaactagatatgtgagttactgagaatagcctaatctctgaaaatgttttccagcctatggtgcatgtaatatactcttctatggtacctctttccgatgtttttattgtggcaaaatatacataacagattataccatttttaagtgtagaatttagtggtagtaagtatagagagaaccttaaaagcagcaagagaaaagtgacttctcatgtgcaagggagcctctagaagattatcagtggatatttcagcagaaaccctgcaggccagaaggtggtgggatgatacattgaaagtactgaaagagtaaagcctgccaactgagaatactatatttgacaaaactgtccttcaaaagtgaaggagaaattaagacattcccaga

SEQ ID NO: 818251 - DNA, 510 bp, Homo sapiens
agaattagataccatgaacaaagcaataayaagaatcaagatgcaagatttaaatggtaatttaaaaattatcaacaaaaaatgttcgggaccagatggattcacagcagaattctaccagccattcaaagaagaattggtaccaatcttattaacactattccacaagatagagaaagagagaaccctccttaaataattctatgaagccagtatcatcctaataccaaaaccaggaaaggacataaccaaaaaagaaaactacagaccaatatccctaatgaacatagatgctaaaatccttaacaaaatactagctaactgaatccaacaacatgttaaaaggataaatcaccatgatcaagtgggtttcataccagggatgcagggatggtttaacatacacaagtcaataaatgtgataccccacataaacagaatttaaaacaaaaatcacatgatcctctcaatagatgcagaaaaagcactcaatgaaatccagcatgactt

SEQ ID NO: 818252 - DNA, 554 bp, Homo sapiens
ctggaaagatacaaccctcctagcttaaattaggaagaattagataccatgaacaaagcaataacaagaatcaagatgcaagatttaaatggtaatttaaaaattatcaacaaaaaatgttcgggaccagatggattcacagcagaattctaccagccattcaaagaagaattggtaccaatcttattaacactattccacaagatagagaaagagagaaccctccttaaataattctatgaagccagtatcatcctaataccaaaaccaggaaaggacataaccaaaaaagaaaactacagaccaatatccctaatgaacatagatgctaaaatccttaacaaaatactagctaactgaatccaacaacatgttaaaaggataaatcaccatgatcaagtgggtttcataccagggatgcagggatggtttaacatacacaagtcaataaatgtgataccccacataaacagaatttaaaacaaaaatcacatgatcctctcaatagatgcagaaaaagcactcratgaaatccagcatgactttatgattac

SEQ ID NO: 818253 - DNA, 673 bp, Homo sapiens
ggctggctttttatggatctgtgagttcccagaagtcatatgcaaaattctgtttaatcctcatacgtatatggggaggtatttctttcttttyttttttttttttgtgacagagtctcattctgtcacccagtatggaatatagtggtgtgatcttggttcactgcaacctccacctcctgggctcaagtgattctcctgcctcagccttcagagtagctggaactacaggtgtgcaccaccacacctggctaatttttttgtatttttagtagagatggggtttcaccatgttggccaggctggtgtcgagctccttacctcaggtgatccgcccacctcggcctcccaaagtgctgtgattagaggcgtgagccaccacacccggcaggatccatagtttcaatctgactcatggacctgaaaaagttaagatccactgctgcttcttatttctctttaaaaatggctacgaggaattaggggtaacatggagtgggaaataaggggcaggagacaccaaagctcttccagtattaattagcctctttccgtccaaggctccatgtatccctccacctcccttcatcctttccacctcactaaaccatggacagcactctaaagtttagactgtttcaacaatatagctgaacaaaaactaattcctgga

SEQ ID NO: 818254 - DNA, 586 bp, Homo sapiens
ttacacttcacccttaacttattatttattggatattgacaataccagttaaaaacaggttgcatttttgaggcagaaattaagcagatakatgttgtagtaaaaaaaatatataaataaaaagggctaataattacttttaacatcttttaaaaggaggataagaagaaaattaagtaagaaaaaaatttaaaaattttttataaatatttgaggattgcctgtatatttgagagattttgtctacctagtattacatgtctacgtggtagcaaacttcttgtaaactaaatgtaaaagtggtcaaatgacaaaaaattaacaaaactatgattgataattttattttactttttcaccaattagtttgataatatgtaattaaataaactgacaaatgcttagtcattataaaaatgttagcccagatttttaaactaagtttctggttcaatagttgaaattactggagtacattagttactggcatgatcactgggtccaaatcctggatccagttgggatttgtagtgtgtgtatgagtttgggaaatggattaatctcttggtgctttagtttcttgaaa

SEQ ID NO: 818255 - DNA, 661 bp, Homo sapiens
aagttcatttaccattttggaaatcctagggccctttaaattatgctaaatctactctgcctgcactctataaatggaacaacaaagcctggatgacagcttatccctttatatcatggtttgctgagtactttaagcccactgttaagacctactgctataaaaaaaaatgattcctttcaaaatactactgctcattgacaagggacctggttacccaggagcactgatggaaatgtgcaaaaagattaatgttgtttttatgcctgctgacacaacatttattctgcagcccatggatcaaggagtcatttcaactttcaagtattattacttaagaaatacattttataaggctttagctggcatagatagtgatttctctgatagatctgggcaaagtaaattaatacccttctggacaggattcatgattctggatgtcattaaaaacgtgtgattgatgaaaagagatcaaaatggcaatattaccaataattttgtaaaagttgattccagctctcatagatgactttgaagggttcatgacttcagagaagggagtcastacagacatggtaaaaacagcaggagaattagaattagaaggagagtctgaagatgtgactgaattgctgtgatctcataatttgaatgcatg

SEQ ID NO: 818256 - DNA, 625 bp, Homo sapiens
tattagatgctctgttccaaagaaacaattgactaatgaactggggggttcacacttcgtcccgtctcatctctgacactaccttactgtgtggtctcagatcagcgcgaacaccctctgggcttccactttcctatatgggaaatgatgtggaacagcttgaatctaagaatctttctacttgtgacattcaaagtcttcacaatttacccatctgatatctaaggtaaaagctagaatccccttcctttttacatccctccagattcctttccacactccttcactcctctacccacacaggaaggctgacctgcagagactttttttttttttttgagttggagtctcgctgtcacccaggctggagtacaatggtgtgatcttggctcactgcaacctctgcctctcaggttcaagcaattctcctatctcagcttcccgagtagctgggactacaggcacctgccaccacgcctggctaatttttgtatttttacgagagacggggtttcaccatattggccaggctagtctcaaactcctgacyttgtgatccgcctgccttggcctcccaaagtgctgggattacaggcatgagccaccacacccggcccctgcagag

SEQ ID NO: 818257 - DNA, 458 bp, Homo sapiens
tcacaccaagaagttgacattttactgtagcagtcatcaaagagttgtcagctgaagggcaataagatcagatttgtgagcttttttgttttgctttgttttgttttgtttttgaggcagggtctcgctgtgtcacccaagctggaatgcagtgtcacaatcacagctcactgcaacctcagcctcccgggctcaagcaatcctcccacctcagcctcccaagcagctaggactacaggcacatgccaccatgcccagctaaattttttctattttttgtaaagatggggtctcactatgttgcccaagctggcagatttgggttttagaaaggacattctggcagcagtgggtgaagtgggtcaagagatggaggcagrgagatcacgtaggaggacattaaagcaatcctggtgagaaatcaagaaggcctgaattaatggagagggagaagagat

SEQ ID NO: 818258 - DNA, 546 bp, Homo sapiens
atatgactaatttagaaccagactcacctgggacttctgacttcagtgcaccaggtttattggtattattcctgcaatatgcctcactgactgcctgtmtcatcaccatgagaaacacaccatcctcgcccatcccaaattcataccaggatcttattttctagtagccaggtaaaattattttggtaacaggcatgtatcaattttcatgagttaatattcaacaagacaagaatattgtatcctgaagtttttaaaccaaagttgtttttttttttttttttttaagccaaggaaacctcagaagaaatcttcctaggaagctcaaagtaggaagggaggatgggaaagaaaggaacagctctacttcaatacaaggttacagagcccaaccgcaagttaccaaagaacaacagcattccatgagagatatattccttggcaatcaatagacatgccccccaagagagcttccaggaataacctggaatgcctcatgaggaggtaggcagattaccaagggtacaagtggctctggacacacgg

SEQ ID NO: 818259 - DNA, 630 bp, Homo sapiens
catcctttgagtattttgtatctgcagtttgagatactctgtgtagtttacaaacacttaaaaaggaggaayaaattaacatttattgagcacttgcactcatgatgtatgtgaagttatttaatattcataataatactataataaaaaattgctatctctagtttgctgctgaggaaaattcaattcagtgttagtaacctgcccaagattacgagactgagaaatgacagaaatattacctgacctaaatccaatggtatagcagcccattcttttcactacaaattggaggtgtagtaaacaaaaaattgctatcagagaatctttcagagaatctaaaaactgcaagtgacagtaaaaaagtagagtttacattctgtatagaaaaacaaaagtcctttttacaagtatctctgttaaatgattcctctcctaggctacaggatatgtgcaacaggtacacacagtgggcacatggaaagaaaatatgtatacttaccattggtagacaataaaaactgagcagcatttttctggggtaaccacctaattttgttgatcttttcttctatttctaaacttttcaagtagtcaaactctggttcatggctctggaaggtgctgtaa

SEQ ID NO: 818260 - DNA, 560 bp, Homo sapiens
tccaagtggactcctgacttgtctacgagagagtctccctgccagcccattccaggaggatcatctcatttacctgcagtccatgagttgtcccgccatggtcccgtcaactgtgacctgagatggtgctagctgagccctgcccttctgcagaagggattctcaggagaagggggcatgaagtgagcaggcacctaaaaatattacgtcgttccccaaagctgcccttaatggatttgtttcaaagtttggaggcagatgactcagcaggagggtctgtggtccaaacatgctcccagtgcatgccctgtcctggatgagacaggctgtgggctcctgggagaaacagaggtccccatctgagcccatcatatggcgacctgatccacatgggagaggaggctgccactgccaagtccaggcactttcytcctgtgagtcacgtaagtaaggtgcagaaattcaaacctcacaaatgtgtccagactttggcatctgaaataccgagagctttgcttgagctctaaggaaacggggatgatgtcaaatacaagctggac

SEQ ID NO: 818261 - DNA, 608 bp, Homo sapiens
aaaatgaaacaaaacaaaaaagttgttaccaaccattccttgcctccttgcaaaaaggactgccttcttcaatgagtggagtggaatggagaaaaagacagcaattttctcwcggtttctcctggtcataactgtaaactggccataggcttctctgcatgctttcagactgaaaagacttgagtgaaggaattcaatctaaggtatgaaaaatggagaaaagctttagaattagttctctgtggatctaagagatccctatgcagcagcagattttcagatactctagtaggtccctgtatttgggggatcttgacttttcatctttcagctcacagcaggcacttgactctctgtgctactaacacttaaggtccagccacttttcacagcttgtcccaaagtcagtaatttccctggtgaccagcaagggctctaggggctgagatgagcaacttatgacctgtgtgaatggtcccagagtgggagggggcatgggaagacctgcagaagggcctgctcacatgtctcctcctgtccttctcagacccccacctgcactgaggaacacctcttttcccacccctctgttccattcatttaatgga

SEQ ID NO: 818262 - DNA, 597 bp, Homo sapiens
tgcaggtgcatcctgagttttccccaggctgctctatttttgcctgtagctgcgatttttcaggcaggctgcctctccgaggaccagccttaactgtttacctaactgatttttccttttcttctccctcattactttcaaacttcttatacagaaccagaagtctcaattttctttttaaagaggctaaaaattaagaacagggtgttttatatttactcacacttttcccattttggtgctctttattcctttgcataggtaaaaatgtcaggctgggcttggtggctcgcgtgtgtaatcccagcactttgggaggccgaggcgggctgatcacgaggtcaggagatcaagaccatcctggccaacatggtgaaacgctgtctctactaaaaatacaaaaaattagctgggcgtggtggcaggcgcctgtagtcctagcttctcgggtggctgaggcaggagaatcgcttgaacctcagaggaagaggctgcagtgagctgagaccccgccmctgcactccagcctgggtgacaaagagatacttagtctccaaaaaaaaaaaaaaaaaaaaaagaaagaaagaaagtcagcct

SEQ ID NO: 818263 - DNA, 633 bp, Homo sapiens
ccagaggagacatttgttggagatgaaatagagcctttcttaaaagtagaagggaaataaacctgtcttggagggctgccacaggggtccactctgctggaccttggcagtgagagcagtgtccaaatactgtggccctgcacagctgggctgcccctttcctggtccttgcagggcatgtggttagccgggaccagaatggccacatctggaccaggtcaggagaccttcctgattgggccagaaagactatgtatcagaggaggaagaagtggcattgcatccaccaagtcctcttccagccaagtgttcgaaaactctgaacaggtctggtggaattgttggagttaatattgctgtgctttgcctttattcaccagagaagcaaagagaggaccatcaagatcacttgaacggggatgtgctggctgcttgcctcctccttgctactaactgacaccaaagacattgtacatgtctgtgctaaaatcctgtgtcctataaatggaggtgtccagagaaagccaccaacttccrttagagctgttaaggaaacctttgatgggctttgcgggcatgagtcatccagggaatcgaccttcacatcaaaatctgtcatttcttctttcctga

SEQ ID NO: 818264 - DNA, 581 bp, Homo sapiens
ttgagcccaggagttcaagacaagcctgagtaacagggagagcctcatctctatagaaaatttaaaaatttaattagcctatcatggtggytcacacctgtaatcccagatacttgggaggcttttttgaggttatagtgagttatgatccagctactgtactccagcctggtgacagaacggcatcttctctctataaaaataaaaataaaaataaaatctatgacatttaactgattacttatttaatcaattaattggaataaatgatatcctgattatgacatttcaatagacatattattatttattttaatatttgaatagagtaaataaagacctatttttctttcaatttgtcatttattttatgttgctttgaatagaaaactaatgctgcaattgtgtacaccattaaatcattaggttctaatttccttgatctattacgaaaagtgattttcaatttgaatatcaagggcattatttgcagaatattgttattctgcaaatatattctgcaaatacattctgtaatatttaaatatcataatcaagcaaactcttaaatgtgacacctg

SEQ ID NO: 818265 - DNA, 641 bp, Homo sapiens
cacaccattgcctgcctctaccataggacaaatcataacattattttgcttcttattctctttcttcccatcttatttctttctgtcaacctaatatttatgacaatattttagatagcattctaaaacattattctgattatagcagttcagtaattaaaaatccttcatgtcaccaaatcttctcaggatgttgtgatagattacttatacaatagtcctaattataaattcttttcttgttactctctctctgtaattcagacttccattctctcagaatgtcttagattctgctcctccccaggcattctctattagagaaatgaaatatgtatattccagttgttcacatcagaaaggtgggatcaagttcaattcctctctttccttcacacctgaaaaatcagtctttcttaatgcactgtgggcttgatttcaataaatattctaaattgaaacactttgccacctccattgccaccattttattccaaaacctcatcattctgacctgtcatgtaaactactatgataacctcctaggtggtatccatacttccactctttctcattcagaatwcattttccacagagtccaagtcatccttgcccaacacaaaattcgatgcctttccaat

SEQ ID NO: 818266 - DNA, 604 bp, Homo sapiens
taaactctacagagatgtaaatgaagtaaaaaaaaaatggaaggtaccaacatgctgttacctatacaaagacataatcttcaaatatatttattttatttcaattaaattgcatatttaaagctatcccaatataaatcctgacaatattatttttaggactagaaataaaccaccaaagtttcaccacacagagacattaaacaggtaagaaattacagcaaaagcaaaatagctatgtctaactaagttatcttaatacgttctaaagataaagtgatgtaaatcatcaccattttgtttaggaaggatgggtcagtaaagtacagaaagaagtctttaaatagactaaaatacatggatgaatttattgcataatgttgttcagatttcatgttatgaaagaaaatgaaattatttaataaataaaggacagccaaatcttattgcgatttgcaaagatataacaaatcacaacmttaattaaaacatcaaagtattttctaagtgactcaaaggtatgaattttaatgttatactacaatgatactctaaaaaaccatgatactaaaaataatacaagattctacaaacattccttaaa

SEQ ID NO: 818267 - DNA, 584 bp, Homo sapiens
aaaattgaacacaaaattcctaatwttatataagcaagctgattacaaaaaaaataaagataaaatgagtttttattactctctcctctacaatttttcggaagactttgagaaggaatagtattagttcttatctaaatgtttggtagaattcagtatgaagattttgggcttttgttttatgagaggctttttattactgattctattttcttactcattactgatctcttcagatcttctatgtcttcatgattcagtcttggtagtttgtatgttcccaggaatttatctttttcttccaagttatccaaactttagtgtataattgttcatattagactcttgtaatcttttgtacttctgtaatttcagttgtaatatctttgctttcatttgtaattttatttgtttgtgccttctctcttttattcttagtctatcattatcctaatatcaaaactagacaaagatactagaaaaaaggaaattacaggccaatatctctaataaaaatagatgcaacaattctcaacaaaatactactaaatcaaattaagcagcacattaaaaggatcactcac

SEQ ID NO: 818268 - DNA, 439 bp, Homo sapiens
gcaatgtgtatatgtgaaaattaaggacaactaaaaatgcttatgactgaaatttctatttcaattggcctattcatgacaatgtctttccattgattttggactattaaggttaatacccagtattcttatcataaaaaggaaaaatcaaggaatattatgaacaatttggaagttattttatatcattttttaaaatttgtcattatattgatccttctctgatgcctaaattctggcaactcctttgagatatcattgctattataaagcctacgccacatctgttaataagttcccagtagaaaaatacagaatctcattcaaaagtatctagtcatgaattcatgctatttctgaaagttgactttttarcagaggtatcaatattaaaattcttttctttagactagcctgtgtgttataaagaaaagaaaac

SEQ ID NO: 818269 - DNA, 550 bp, Homo sapiens
atcccatgcctataaagacctgagactcagccagtagtgaggagaagcagctggatgttggatagagtcaacttgactttagagatgagggctgatgttggagaaaggcaacttgactttggagggagagaggcagagagcctctgaagcccttgacttcaggggagagcgacccacccttcctgtccccttttcagctcccctctccaatgagagccactttcatggctcaataaaattctccatattcactgtccttcaatttgttcatgtaacctcattcttatcgggcactggacaagaattcagaacctaccaagtgtgagtacccaaaaaggctgtcacactggccttttgccctcactgggggagggcagtcaccacacacaaagaggcggggggcccactgagcagataatacactgctcttcgtggaccgtggagctaggaaagcatwgtagcatgccttctgtggccttgggattgcaggcaccccaaccaggacgccgctgtagggcctgcacgaagtttgctcctgctagtgccaatg

SEQ ID NO: 818270 - DNA, 487 bp, Homo sapiens
ccttaggtaaatattatatatccacaaaaaaaaactttattggaaggtctctgcaatttatccctaaagctcttctatctcaaaaaaatgagtctgaatgtgtttcccagtaccaggatccactgcatttccaaagatgctcaaacctatacctctgtcatttctccactgtttaaataattatctattgagtaatcaccatccacaaacaactttttaaaagaaaaattgtgttatccataatatgagtaattgaaattttaggacgcatcaaaattttcaatttctagatttcccttatcttggaatgttttcttagcataaaatccccagatatgtactacagtgtcaaataatatcagcctcatgcccaatgttgcmttttacttttaatgaatgtctccaaaagtttgattaacaccagcaatatatgcttcttgaaatcctattaatattgggtatttttaaagttcctagcttgatttgt

SEQ ID NO: 818271 - DNA, 227 bp, Homo sapiens
agcccaggtctatcttgttggtcggtggaatactcctctgagagattttatttggaagtaggaaaacttcagtgagtmtcacagcagttagattttcaagtatggtcagcagagtatgcagttagaaaactgtacttctcaaaatttttcctagagtgagaaagtgactgccagaagttccactgtctagaatttgcagttggagttgaaatgaggaatacacagaa

SEQ ID NO: 818272 - DNA, 538 bp, Homo sapiens
aatttctaatgtctagtatagcacctagcacacagtaaatgtccaaagcccgtttgtgttatttcattatttttctctcttctttgtttgtagtttttgttttgtttttaatttcttttggcaagggrtgaggacagaaccacacagtggtggtgggggaagggccagggagatgagagagctggggaagagaaaagaaaatgcaagaaacagggagtgcagctgggtgcaggggctcacgcctgtaatcccagaactttggaaggcggacgcaggaggattgtttgagtccaggagtttgagaccagcctggacaacataatgagactctgtccctacaaaaaaatacaaaaattagctgggtgtggtggcatgtgcctgccgtctcaactactcaggaggctgaggtgggaggatcacttgagcccaggaggttgaggctacaatgagctgtgatcacgccactgcattccagcctgagtgacaaagtgataccctgtctcaaaaaaaaaaaaaaatcgggatggcgatcaacatg

SEQ ID NO: 818273 - DNA, 556 bp, Homo sapiens
gtctttggccctgatctcagtcctgagcccacagcctctatatccagttccctcctcgggraggccgaggcaggaaaatggactcaggaatgacccacgacaagccccatgaccaaaatccctcccaccctgcccctccacccctcagtcccgaccatctgcccacctgggcatcattctagacaccctttcacacacacaatcaaagccaccaactgcccggctctgcctcgggtggcctatcacagcctcacattccggatctctctgtgagccccaatgtgtagacgctgaagtctctgtgcacattacaggtgattcctggactcgtttaaattctggggtcctcagaataggggcagcctctaacttgcttcccataccagggcccccagaactccctctgcatgaagtggtgactcagccccttccccatggactcgctgccccagaaccggcctgcagtaacccatgccagcatgccaggactatccatttctatcccaggtagataatctgttaaccataatctcagatgaaaggaagattattgccc

SEQ ID NO: 818274 - DNA, 616 bp, Homo sapiens
ttactgtagactaagcattgggttgtgtcctcccaacaagccaatggcacaggtattatcacacccatctgtgagatgagaakagtgaggctcagaacttgcctgagctccctctgtgtaggtggagggcagttcgaggtggagctgagactcaattcccgatgtcctgcctcctcatcccgtcctcttcctacctcaacctcccacccctgcggtctcatcagtgggtggactcaggaattctgccccctcccaccccaatgccacagacccgcctgtggctcccccaccataatcttctttatcatggtcttcttttctccttctgcctccagcagatcctggctcttctgaagggtggtgacattctcaacctaggggacagcagagggcaaaacctcagagtgagagactcactgagcccagtcctcaggggttgcccatacagcactgttaaccacccgacacctacaggcaagccagcattggtgcaagagaaatgagaggtccccacaaggggaacttggggtggggtaaagattggagaatattgaggggttggaggagttaatcctgaatgccagcatttggaagaggaccagatatgagggactgc

SEQ ID NO: 818275 - DNA, 555 bp, Homo sapiens
tagtagtgaaagcaagggcttaataaatgggtttttttcaggtaccattttcattttgccttgttcaaatgcaagtcattcttctctggattaattcacaacgtraagagaaaagataatcaccaactttttaaaattttataaattataatgaattttataatttgttacttagtccctattaagttcttagaacaacacctgatacatagtacatacccaataatgttatcatttacctagtaaatattaggtatcacttgtgaacaactgtcacatcagggaactgaattcaaattattgttctctttcacattgttataagataatggcagatgttttctgaacgctgtctttattttctggtcctactgtggctttcaggaagtaccctagttaatgggttagaagtgttttttaaaagttagacccaaaaggaaatttctataaattatgaccaattttctcatttgacttatttgagaaacatgttcttatatgatccgtattttctactttatatgtatgtcagtataacttaggatagatcctaaa

SEQ ID NO: 818276 - DNA, 619 bp, Homo sapiens
tggcctcaaaaaaaaaaaaaaaaagtctgggcgcagtggctcacgcctgtaatgccagcactttgggaggccgaggtgggcggatcacaaggtcaggagatcgagaccatcctaactarcacagtgaaaccccgtctctactaaaaatgcaaaaaaagattagctgggcgtggtgttgggcacctgtagtcccagctacttgggaggctgaggcaggagaatggtgtgaacctgggaggcagagctttcagtgagccaagattgtgccactgcactccagcctgggtgacagaacgaggctccatctcaaaagaaaaagaatttttttcttttgttttaagaatgtagagttttggggagggctgaatgagattttaattcttctttggagagagtgagatttctcgtttaatatttacttggcaatctgatttgaaatcactttaataatattgtctacacacttggtctttaaatatagccatatttttatcctaaaatgttaagccaaataattattctgttatagtcagagttttaactggttatataaaaactcagtttttatttgaaattgttgaattttccttaattcttttcaggataagaatgcattaca

SEQ ID NO: 818277 - DNA, 528 bp, Homo sapiens
agactcatggcttcgaggggacattgatgccccatcagctccctttggggaacgtggctttgcaggcccaygttcacagaggaaaggacacgtcacagacatgactgcaggcaaagcttctggttccttggaccataaagagggagggattctctctggtaaagttcatagaaggttacacaggttcagttctagtacttggcctgtcctttgaatacatcgagatggctgatgaagattaggaaaaatccttcttgttttcagactcagctggtcttctaaagcatggccaggaagacccagtttgggttaaggttatacagaagcaaaatgtaagccaggaagatcacatgggcctagcacaccccaccctgcttgttaggctgttttacagaaaacttaaggtgtattagagaaatcacaacaaataatctaacaatgtcactgcatttaaccaatgagttcatcccctgagagttagctgtctaaggaggcaaacaaccgaaaggtcattggacagaattcagt

SEQ ID NO: 818278 - DNA, 638 bp, Homo sapiens
attcaggtaatgacatagcaactctcatttttttaagggaaaaaatatatttggcatatttatggttttatatgtacatagtatatctgtttgtggcatgatggcttatgcttgacctgatggattgtcaaataatgcccagtaaaaaccaaagtatccccaaacaccaaacttaacttatgagacaaattgaaggaaaaatgtaggcagattgtataaatatgtcctaggagattttgattaaaatagatctaatgattatctaatgataatccagctgtcaagtgttaagtgtaaatggtaattagctcatggatgaaattgtatatacatatgattactaggtaattaatcttgatctagaaacttaaaaattttaatggatcccaaactaatattagtaaaagcagtaggacaactatttttcttgaatccaacatgactgtcatccaacaaaaaatgagcattagtctttgaagagcattgtggaatttaatttgactgaacaaactgtgtagcactcactctgaactagagactgtgccaggtcctgaggacacagagmtgagtgacacatgaccctgccctccaggaacctacagtaaagaaaggggtccttcgcagacaaaggttggctt

SEQ ID NO: 818279 - DNA, 502 bp, Homo sapiens
cctcctgctgttttttgcgatgaacgcaagtgttgctgatgaatagcctctctccagtaaactgtgtatcacagtaaaaagtgatctttcttgtttactgmatattttccactgtgtttaagtgcaatattgtaaactttgaataacattgtgggacccacacgaagggccactaatgatgctggaaatactcccaagaagcagagaaaaatcatgatattacaagggaaaattgaattacttgataggcaccatagattgaggtctgcagatgtggttgcccatcttttcaaaataaatgaatccagcatagggaccattgtaaaaaaggaaaacgaaattcatgaagccatcactgcagctatgccagcaggtgtgaaaacctggcactttttgtggaatatctttttatctcatattgaaaacacagcttttttttttttctttgagccagagtctcactctgtcgccaggctggagtgcagtggcgcaatcctggctt

SEQ ID NO: 818280 - DNA, 502 bp, Homo sapiens
cctcctgctgttttttgcgatgaacgcaagtgttgctgatgaatagcctctctccagtaaactgtgtatcacagtaaaaagtgatctttcttgtttactgaatattttccactgtgtttaagtgcaatattgtaaactttgaataacattgtgggacccacacgaagggccactaatgatgctggaaatactcccaagaagcagagaaaaatcatgatattacaagggaaaattgaattacttgataggcaccatagattgaggtctgcagatgtggttgcccatcttttcaaaataaatgaatccagcatagggaccattgtaaaaaaggaaaacgaaattcatgaagccatcactgcagctatgccagcaggtgtgaaaacctggcactttttgtggaatatctttttatctcatattgaaaacacagcttttttttttttctttgagccagagtctcactctgtcrccaggctggagtgcagtggcgcaatcctggctt

SEQ ID NO: 818281 - DNA, 572 bp, Homo sapiens
caggtgatttatgagaaaatatttttaaaattcattaaatattgcaatgtcatttaaggaattcttcctatccatggtcttttggtaaaataattttcaatccccagcttgacaacaatgatcttgttaygatctgtctgcaaaagtcctgctttctgggtgactgcattgtttgtggtggagaaaaacattttatttttaagaaatattatttaaacatgtctgattattttaaatggcaagacatccttggatttatctgatgatcaattgtctaactaaagtttgtgattgaacttctggggtggtggataaatcttatttcaaagagaagagacaaactattactttttgttctcttactggtttatactagagactgttccaaatgaactgtggtattttgactactgccattatagtagaacaaacagcattctttattccttatgctattagggtgtgtttggtaaaggaagaaatgaatagcagttttctctgaatatatttaaaaaatacatagaaggtactctgccaatagaatgagcactaaaatgcctactcatttagtt

SEQ ID NO: 818282 - DNA, 631 bp, Homo sapiens
gaataacatttctgaaacaattttatccgtcaacatgttatttttgtattttgtttgttcaacttatcagaygttcactcatcttgatccttggttgtaattatggagcaactgtgctgttttttctttaactttattttcactaacttattttctaatatttcttttgttctatcttgttttggtttactttaataactctgtaatacttaatttgactgcttggctcagataccttttagtgttcttgttttctaataggaacactttaaggctatgcattttcctctagtactattttggctgtatctcataagttttgggatatgggctttttattgttattcatttccaaatagtctaatttcaattaagtttcctcttcaacacaggttagttagaagaaactggtttttgattcatgagtttttaatttccaattagagaatttggcttttttgattcctacttttgggaatgtttttaaaattattttcttttttgttcttgttggaaccaggatttgagccaaaggctctgtctccacagcccaggtgcctgacactgacactgagttaggccacaccttacacaggtctcagcttggccactaatgagggctggccaacca

SEQ ID NO: 818283 - DNA, 610 bp, Homo sapiens
tatgtttggagtcagacacacctgggtgtttagatctaacttctggttctttattaactaatttagggatatggggcamatggcttaacttctttgcaccttgtattacttacctctaaatagagaatgatccctaatgtcactgctcatctgagctaaattgataatacatatgtaaaagttatttaatcctttatgggtatgtggtaatcagtagcttcatttcataaactttgttgaatgaattgatttaaaaatcctaataataatgatgggccaggcacagtgactcatgcttgtaatcctagcaatttgggaggccaatgcgggcagatcacttcaggccaggagttccagaccagcctggccaacgtggtgaaaccttgtctctactaaaaaatacaaaaattagccaagcatgatggtgtacacctgtaatcccagctacttgggtggctgaggtacaagaataacttgaacctgggaggtggaagttatagtgagccaagatcccactgctgcactccagcctgggctacacagtgagaccctgtctcaaaacaaacaacaaaccctaagtaataatgatgacaaacatttaaaaaatacc

SEQ ID NO: 818284 - DNA, 541 bp, Homo sapiens
agaagaatcacaatttcttggcaagatttccaaatatgtgttgaggttcttcaccttggcttcttctcctccctcaacccctttctctcaacacaggktgccatttgttgcaaattatttgcaagtccagaaatgtggctctgacaccttagttcttttcccagtcagacatgatgatgctaccatttcaagtgagtaattaccaggcacgtaatattatcagcgtggtgaataccttatgaaaatcagactagtcacaaagctcaggtcttcctgaagccatttttggaaacttagaagtttggccatttggtaaaaacacgtgaacaaatcattcttgaacccaactgtttttgttcccatattgtttgagttgcagaaaacatagctgggaaaagaactgatctggcttgcatagagacaccatctggaaagcctgtttcatgcagtcccacctagagcccagtaaattggctattttgtgcctcttcccaaagcacagtcacctctttgcatttccaaaatgatcctgcttcaacat

SEQ ID NO: 818285 - DNA, 581 bp, Homo sapiens
gcttctgtttagttttgtgctctagaggctggctgtttcgttatttaaccccaggctgttgcctcaaataggctctgcaatcttttgtgggatccaagttyagcaagcatactcattgtgtgaacaccaataatatttttcaggtgcacctagagaaagggagagaacaaaagagggctataaaactatttggaggtcttcatcaatgtaagtgcttagttaaataagcaataattgcaattattgttttagcattccctgaagacagaaaattaactttcaaatgtcttaatacctattatttcacaacagattatgtacacatagatatacttttccattggtatttagttataaactatgagtaacaatctatgtctatgggccaaatatagccagtggctcgtttttgtatggttttaaagctaagaatggttttacacttataaagggcggttaaaacacctacatacagaaaaatctgtgagactccatgtggcctacaaatctgaaaatagttactattcttaccaataaaagttggctgaccccaaagtatgatggtatacctataaaaacta

SEQ ID NO: 818286 - DNA, 506 bp, Homo sapiens
catatcaaggttttcatatataaatagtagggaaaagggactttttttttttttttaaattttttgagagggagtttcgctcttgttgcctaggctggaatgcagtggcgcgatctcagctcactacaacctctgcctcccgagttcatgtgattctcctgcctcagcctcccaagtagttgggattacaggcgcccgccaccacgcccagctaattttttatattttcagtagacacggggtttcaccatgttggccaggctggtcttgaactcctgacctcaagtgatccacccgccttggcctcctgaagtgctgggattacaggtgtgagccaccgtgcccggccagggacgttttttctttattaagacttttttcttctgttgatttttgttttctttttctttttcttcttyttttttttttttttttgagacagagtctcgctctgtcacctaggctggagtagagtggtgcaatattggctccctgcaacctctgcc

SEQ ID NO: 818287 - DNA, 553 bp, Homo sapiens
agaaaactaagtacttcaaatcaaggatccgagcagtgyctgtgcattctgtttgctggcaccacagcttggaatcagaaacttcactcacttattagaatgccttcataaaacaaaaagattagatgatcatctgtcaagtggaggtttattactaccttttgccaataatgaatgaaactatctctagctcacagaagagatatacagcgctttccatttctgtttgtccaaaggctagttttgtttcaagagaaagtctcccagtttggagggaaagtagctttcatttttcctgcggtgacagtgaagttgaaattttaagactggattacaagttctattcactagaatgtccagttttcacagtttacaaaaattccccctgtaattattgggattgttcttttaggtattctctataaacaggtgaccattaaaatcctgaataacacattcagggtgacataatccattattaaaaatataactataggaccatataaaatttcatttactggcacatatgaaatttacatgatcttaaaggatc

SEQ ID NO: 818288 - DNA, 484 bp, Homo sapiens
tgtacacccctgctatattgggagtgatatcatcctctctgtccctggatatwaggaacaataaccctagggagtgtacacctcctgcaatattcagactaatatcatcctctcgccccctggatattaggatcaatatcacaggggtggtgagcaccccggcgaaattggaagaaatatcctctccacctttggatgttcggaacagtatcacgggggaggtctccgcccactgcgattttgggagtcgtaacatccgctcccacccaggatattaggaacaagatgaccgaagggatgtacacccactgcgatattttccataatgtcattctctaccccctggctattaggagtaacatcgtagaggagtgtaacgctttctgcgatattgggagtcatatcctctcccccacagatatcaggaacagttttattaattattaatattaataaatataataacaattaatagtaatcattg

SEQ ID NO: 818289 - DNA, 484 bp, Homo sapiens
tgtacacccctgctatattgggagtgatatcatcctctctgtccctggatataaggaacaataaccctagggagtgtacacctcctgcaatattcagactaatatcatcctctcgccccctggatattaggatcaatatcacaggggtggtgagcaccccggcgaaattggaagaaatatcctctccacctttggatgttcggaacagtatcacgggggaggtctccgcccactgcgattttgggagtcgtaacatccgctcccacccaggatattaggaacaagatgaccgaagggatgtacacccactgcgatattttccataatgtcattctctaccccctggctattaggagtaacatcgtagaggagtgtaacgctttctgcgatattgggagtmatatcctctcccccacagatatcaggaacagttttattaattattaatattaataaatataataacaattaatagtaatcattg

SEQ ID NO: 818290 - DNA, 484 bp, Homo sapiens
tgtacacccctgctatattgggagtgatatcatcctctctgtccctggatataaggaacaataaccctagggagtgtacacctcctgcaatattcagactaatatcatcctctcgccccctggatattaggatcaatatcacaggggtggtgagcaccccggcgaaattggaagaaatatcctctccacctttggatgttcggaacagtatcacgggggaggtctccgcccactgcgattttgggagtcgtaacatccgctcccacccaggatattaggaacaagatgaccgaagggatgtacacccactgcgatattttccataatgtcattctctaccccctggctattaggagtaacatcgtagaggagtgtaacgctttctgcgatattgggagtcatatcctctcccccacrgatatcaggaacagttttattaattattaatattaataaatataataacaattaatagtaatcattg

SEQ ID NO: 818291 - DNA, 484 bp, Homo sapiens
tgtacacccctgctatattgggagtgatatcatcctctctgtccctggatataaggaacaataaccctagggagtgtacacctcctgcaatattcagactaatatcatcctctcgccccctggatattaggatcaatatcacaggggtggtgagcaccccggcgaaattggaagaaatatcctctccacctttggatgttcggaacagtatcacgggggaggtctccgcccactgcgattttgggagtcgtaacatccgctcccacccaggatattaggaacaagatgaccgaagggatgtacacccactgcgatattttccataatgtcattctctaccccctggctattaggagtaacatcgtagaggagtgtaacgctttctgcgatattgggagtcatatcctctcccccacagatatcrggaacagttttattaattattaatattaataaatataataacaattaatagtaatcattg

SEQ ID NO: 818292 - DNA, 603 bp, Homo sapiens
gtgtgtaccccttctgtgttattattcataatatcctagggggatgtttctcttaatgtcacaaagagtgtacaaaatgtcacaggaggtgtacacgttgtgacgtyatctgtaataccctagaaggatgttactcgtaatatgtcacaggggtgtacatgctttgatgttatttataatctcatagagcgatatgacttcaaatatcacagtggatgttcacacatagtgtataccctgtgacagtattcataatatagtagggagacacaactcctgatatcacagtgcgtgtaccccgtgtgtgtacacccttgatatgagtcgcgatatccagggtaaatatgactcctcatatcacacagtgtgcacaccctgtgatatttttcatcctactttagggagatattgcttctaatatcacagtgggtgtaccccacgtgtgtgtactctgtgacagtatattctatatcctagggaggtattactcgtaatgtcacagtgggtgttcaccctgtgatatcattcttgtttgaccttgctgccttttttaacccacactacaaaaggaatggaacagataagaaggtcttgagattagac

SEQ ID NO: 818293 - DNA, 628 bp, Homo sapiens
tcactcaggagtaggttgttcaatttccatgtgattgcatggttttgagtgagtttcttcatcctaagttctcatttgattgcactgtggtctgagagactgttatgrtttcagttcttttgcatttgccaaggagtgttttacttccaattatgtggtcaattttataataagtgccatgtggcactgagaagaatgtatattctgttcatttggggtgcagagttctgtagatgtctattaggtacacttgatccagagctgagttcagtcctgaatatctttgttaattttctgtcttgttgatctctctaatattgacagtggggtgttaaagtctctcactattattgtgtgtagagacctattagtttctttgtaggtctctaagaacttgttttatgaatccggtgctcttgtattgggtgcatatatatttagaatagttagcttttcttgttgaattgtacccttcaccattatgtaatgcccttgtcatttttgatcttgtaggtttaaagtctgttttgtcaaagactaggtttgcaacccctgctttttttgctttccatttgcttggtaagttttccaccattcctttattttgagcctatgtgtgtctttgcat

SEQ ID NO: 818294 - DNA, 624 bp, Homo sapiens
ttataagtgagagtgttaggttttggaggaaaatgagaagtactttctcatacatctgatatttgaggtgatggcagaactcccaacagatcatgtccagtgtacagctgtagtaagggccagcttcttagagggtcgggattggacatggtactttggttctctttcacaagcaggtgatagtagagagtagttgagccctctaagaaagagttgttgagaggactactgagaacagggagcagggccttgagatataccaacttactgaggtagatccaggaagaagaactgggcaagtgaagggaaggaggagtatgaatagaaccacagtaaagcagggttttgtaaagcataggggaggcttaacttagtcagcgggtggtaaattgtgttcaaaacacacagagctcaaagaggatgaatactgaataaaaacgatggtcaagaatgtagaacgttccaggagactagagataacatgactgttttttttcaggaaaagaataaaatccatttcctgtgttaagccctctaaaaatctgatttgattaagtgcattttggatactcactttctartcaattcataatataaagctaaggattattatctttgccctgc

SEQ ID NO: 818295 - DNA, 624 bp, Homo sapiens
gatttgcttaattactagtactgcaaagccattgcttcttactgtttttatgtcatttctctttgggtttaaatgaatgttgaagggctagcctgggaactgactcacgtytataccatgctcctgagagaaaatataatccaaattgcactgaaaactttggaacatagttctttttcagatagggacaacctatactggagtgattaaaaaaaataaaagcaggtcctcatttatcataaagcctcattactccaaaacctcggtttctactcaagctgtgccgaagattacctttgtcctattatgaagacttgctacacaattccccataataattgatttagaattggcatgttcaatttaattctgggtttgcagaaacttcaacacattaatgcagatggattttgttaattgccacggaattttcatgtgttcataaaagtagtgctggcaaccagggcctctgtttggaaaccctcttcagaaaaatgcctaagaaaggatttttttccccactgtctccacattgagcaagttagtgttgttctgagaagagagaaaagagttagttattgatgggggcattgatccaagtccttcttctcacttcaatattaa

SEQ ID NO: 818296 - DNA, 638 bp, Homo sapiens
gaggagactgagtcatgggaaggctaatccttgcccagagtcacattgttagtgagaggaagaactgagattggagcctgggctcataatcactctgctgtcactttcaatggtggccatattacaaggcagtgttagagtggctattagacaggatgtgggaacagcttcattacatgagagtgcacgtttaatgatacttataaaaatgagattctagtcatacaaaccaacttcctgctgcatcagaaaaattcctgtaggaccagtggtaattaatgaaaggaatctttagattccttcactaagcagtgtggtgggaatgttctagggtacacatggcatatattaatacttgccgtagaatttagacaactgtcagcccatgtgggagctcatatttaaactaatttaaaataaatgagtaattaacatttcatgagctaatgaatcaaacattttgctaaatgaaaaaaaaaatcatgtctgcaattcagcctttaatcttgactacaattcctgtaattcaattaaaraaaagctcttcagcctttgcttgattaaataacacctttttgtttttcctctaaaactatctagatttccatcacacactacccaccttaatacccacttgg

SEQ ID NO: 818297 - DNA, 337 bp, Homo sapiens
tgtaatttttttgcaaatcttttctggctgctatttaacattttgttaaaattgtatcagttgtaacagtgggatcaattataacaattgcatcaattttaataattgtatccactgatactgatacagaccccttccagatacaatgcatacctcttcctggattactatattgtcaatatgaaaaaggctcttgaaaataatctttaaagataaaattatacaaacagctcagaatcactgccatttgtagccacagcatgtctaaggttgatttgattartcaaactgcaaccgtttcaacttacaatctttagacctatgttcatgacctgtg

SEQ ID NO: 818298 - DNA, 683 bp, Homo sapiens
ctcctccagcagtgctgtgctcattctgcagcaaaacctggcagagatttctgtgctgggttagaagcagcagcaactttcctggatttgtcatattggaagcagaagaattttatcagccatccaagaaatgtgttcctgctaccccagcacattctcctagttctaaagttacgtctaacaccatttctctttcttttgtgtcaatcaaatatctaacaaacctatattggtgtggccagccttatgccatatggtttggccgatgcgttgccttgcatgtgtgcatatgtgcgtgtgggagtggtgatgggtgcgggggggttgggtcaaaggggacggggagaggaatagggttgaagtagcaagggtggtccttagtgcatgctgaactggggaaagaaccctggccagtaaatcgcagaggaagtaactcacataaaattccaaataaggcaagtgcaatgcacgttgaggctctgtaggaagagagaggtccctgtgtcttgggaggggctgtggtggtgtggtaatgtctaggctggaccttgaagatgagggtggaggaaggaggggaatgaaggaaccctgatggtaggggaaatgttggcctctatagaggatgctgtagtgcaccatccatatacgygctataggactggggatctttatggctagcagct

SEQ ID NO: 818299 - DNA, 541 bp, Homo sapiens
gatacatgtaatttctaggtatagaaattaatatacatacctgtatatatgatacagacacatacacacatacatttcttaccactgagaagaagtggtagcagtgatacctcaataacaatgaacacacctaaactgatatcttggtatctaaacatcattcttcaccaaaaggaaccatggctccttggagaaatagctgattctagggctgagatagggaaagtactagatgagctaaaacatatttttgtgccagaaaataaagaggtgctcagtgaatgatgaaacatgtcaaaaggacacaggacccagcttgaaagagctccttttggtcaaatctaggacaatttgagcaacaaaatatgtaaggatagcaaaagattataacccaatgaataaaatatattcttgaatctgtcctgatatagatataygaatggagagaagagaaaatgtttccttacagtgaagtggcaactgataaatgttgaaggaattatggagtttgaaagtcaccatatagcaacaatcattgcat

SEQ ID NO: 818300 - DNA, 379 bp, Homo sapiens
tgaacctgagagatggaggttgcaatgagcctagatcgcaccactgcactccagcctgggcgacaagagtgaagttccatcttaaaaaaagagtataagacaagaatacaggytaaaaaaacttcactgatgaacacagatgcaaaaaaaaactaaaagaaaaatatagcataatataaaaagaacactatattatgatctcagaatggtatctaaaattataaggttaatttgccaataaaaaaatcagttactctaactcaccttactaaagattaaatgaaagaagtcacaatttctccataaaatgcaaaaaaaaaaaaaaaatctggtgaaagcatatattaatgattctttaaaaaaagaacttttactaata

SEQ ID NO: 818301 - DNA, 653 bp, Homo sapiens
aataacatcctttacacctaataaaacacttctataatgcaaaatatttttaaaaagctaagtccaaagacaaaactaggaacaaacattttaacttatgccaaaaatatacacaaatatgtaatgattttctataaattgatttttaagaccaacaactcaatatgaacaggctgttcacagtaatggaaatagtttccttctttcttctttcttcttctttcgtctttcttcttctttttttggtgtcacccaggctggagtgcaggagtgcagtggtgcaatctctgctcactgcaacctccacctctggggttcaagcgattctcctgtcagcctcctgagtagctgggactacaggcatgcgccactatgctgggctaatttttgtgtttttcaaagagaggaggtttccccattttggccaggctggtcttgaactcttggcctcaagtgatccacccgcctctgtctcccaaaatgctgggattacaggcgtgatccactgcacctggacagkaaatgcaattttcttttaaacatacaaaaaaattatgattaacctattataaatatgctaatgtataataaaataattgcaaattaaaacttcactgaatcatttgggatccctctgttctctgctccaattt

SEQ ID NO: 818302 - DNA, 552 bp, Homo sapiens
tactggatcccctccccacacccccacattcatcttcatggtttggtcyagggccttcagtatagggaatgtgattaaatctctcatcttttgtacagagtgttccttttttcgttttcttttctttgcttgccatgtctgtgaactctgtagggcctgagtcattgtaagccttacaacgctgtgatcacggatggagagatggaaaacatgcattttacagaagtttcttgagtatatatatatatatatatatatagaaaacaaaacctcctgtgtcgctaaaattcttagagtgttgactccagtatttctaaacttaaatatctgccgcctggataatgtagcttaaatcagtgataacttttgagatgtcatcatgagactttttgggcttcatattttaaaatcactgatttcttaactttattagtgagggcttatgtaataacacatttttagcttaaagagggattaattatagaatattccctatatggaattaaatgtatttgcttttctagcatatggacttcagaaccctaaagttgg

SEQ ID NO: 818303 - DNA, 619 bp, Homo sapiens
taacatttttcaaaattacttattttaaaatattctagcattaatataattcacttcttttccattttaagtagaaggtggaattcaggtaaggtttcactcatgaaaacttttgaggactacacatatgaaaacttttgaggactacacatcttactgagatactgtgaatgttaacctaggccaatgtaagttttttaatcaaaatagtctcctcctgagctttgcaaatatgaacccattaatttaaggcagtaaattccaagtcattaaaaatgtccacatttttaaaagatcccctaaaatttgctttttctatttgacctttcccatgcttcatgagatatggctagacatgcatgtcatctttcacttgaaaatctttcctcagctcatgtaactcatgtcccccaactctcccttcatcctattaactgtctcagtaactaccaactacctacttaattttttttcttctttcttcaaataraggttaactgatagagaatatggaagaagtgtgaaagatgaaaaaatatgagatgatttcagcagcgtcagacaaaatataagagaaactgccactacacaatattacgcatttcaaccgaattttaca

SEQ ID NO: 818304 - DNA, 522 bp, Homo sapiens
tactccttgacctttaaggttttttgtttgtttgtttgtttgagacagggtcttactctgtcaccctggctagagtgcagtggcatgatcttggctcactgcagtctccaccttccaggttcaagtgatcctccctcttcagcctctcgagtagctgggactacaggtgcatgccaccatgcctggctaatttttgtgtgtgtttttgtttttgtttttttgagacagggtctcattctgccacccaggctggagtgcactggtgcaatcttgacttactgcaacctccgcctcctgggttgaagcgatccacctgcctcagccttgcaaagtgctggaattacaggtgtgagtaactgcacctggccaaccttcaagttatatcaggcatgtttaacccaaggaaacacagcttagacagacagmcatatgcaagtatgttcattgtgtcagtgcttgtgaaagggaaaaaagttgacaacaacctaaatgtctgtcagtggggaaggtcacaccagttag

SEQ ID NO: 818305 - DNA, 614 bp, Homo sapiens
tatttagctctccttttcgttaatccactgttttttacattatgcatgagtagaaaatactgygtagcatactgggttacggggattaggatagtcaggttcaacctgcccaggccatagccagccatcatgaggtccagccacgttgtgcatgccaccacgccctgctaatttttgtattaaaaaattttttttttactattatttttttgagatggagtttcacctttgttgcccaggctggagtgcagtggttcagtctcactgcaacttctgcctccttagttcaagcaattctcctgcctcagcctcccaagtagctggaattacaggcacacaccaccatgcccagctaattttgtatttttagtagagacaaggtttcgccatgttggtcaggctggtctcgaactcctgacctcaggtgatctgccctcctcagcctcccaaagtgctgggattacaggcgtgagccaccatgcttggcagtatgagctttatgttgacttcagattactttttatctgcttcttgctttttactgcaaggatcctctgatgcccagtttgcaaagatctcctaaacaagtatggtatcttcttagctcatgtagg

SEQ ID NO: 818306 - DNA, 614 bp, Homo sapiens
tatttagctctccttttcgttaatccactgttttttacattatgcatgagtagaaaatactgtgtagcatactgggttacggggattaggatagtcaggttcaacctgcccaggccatagccagccatcatgaggtccagccacgttgtgcatgccaccacgccctgctaatttttgtattaaaaaattttttttttactattatttttttgagatggagtttcacctttgttgcccaggctggagtgcagtggttcagtctcactgcaacttctgcctccttagttcaagcaattctcctgcctcagcctcccaagtagctggaattacaggcacacaccaccatgcccagctaattttgtatttttagtagagacaaggtttcgccatgttggtcaggctggtctcgaactcctgacctcaggtgatctgccctcctcagcctcccaaagtgctgggattacaggcgtgagccaccatgcttggcagtatgagctttatgttgacttcagattactttttatctgcttcttgctytttactgcaaggatcctctgatgcccagtttgcaaagatctcctaaacaagtatggtatcttcttagctcatgtagg

SEQ ID NO: 818307 - DNA, 566 bp, Homo sapiens
cttgagctggagggaagtttttagccccacaaatgggatactcctcagtctccccgaaagaccttgtgtcccagatgctttttcagggtttgtcctttccagcctcccctctctggcagatwttcagggcattccctgtaattacccccacctgagctatgtggtcgtaaagatttaaatccaacaaacatggtgtgtacctatcatgttctgtaataatacctgctagcattattaagcacttaaatatgacaagcattttacccgcattgttaacattcagttcctccaaaagccctgtatagtagcttgtattacaacctccttttgtgattgaagacaggctctcagaggtcaaccaactcactcttaagtcacacagctaggaagagagcagaacctagatttgagcctggttctgtgagtccagagcctgaatgcttaactaccatacaaactacaacccacctagcttcatttgtccattctttccccaaatcatagtccagtgatatttattgagcacttactatgaaccaggcattgtccaaggtactgagattcaa

SEQ ID NO: 818308 - DNA, 605 bp, Homo sapiens
caactatttattgagcatctacctatatgctaggcattttgctaaacactggggaaacagtggtgaagaagagatattcataacctctggtcaatcacatagaattaacaacttattaccgccactttatagacatgcaaacaatataattttataaatgacttaaaatatattcagagatggattgtatttgagaacatttgactatttgtccaataccttaaagcagtagcccctccccgccaaaaaaaggttgccagtggctgtctaggtcactaaagttatccatccatccatctatccacccacccatccatctatccatccatccatccatccatccatccatccatccatccatccaaccatccatccatccaaccatccaaccatccatccaacaaatactgtactctattatgtgctagacactgtggcaggcaccaggttttttagcactgaacaaagcagacaaagtccctgcctttgtggaaactacattctggtctgattatsgcatcttcatggaaaactgcctgacctgtgaagtagatatgccacacccaaaacacagaaaaaagctacaagaacctttcagccaaaat

SEQ ID NO: 818309 - DNA, 493 bp, Homo sapiens
acaggcgtgaaccaccgcgcccggccccaccctccttctttacattggctcatatggaaraccaaaggcacttggattatacatcgcagacagaagcagccaaaacctacatggcaaccagttgcgacaaatttccaaggtaaaccacaaccgctgggggcctgggtggttttcagctcaaagcgatgaccccaggaacgacaagcggccgccgctagggggcgccgccacttccctgccaggcgaccacccgcggaggcgcgcgcgctaggcctcccaccgcgcctgcgctgaggatggacactagctcgcctttcctcgacgcccagccgtccgggccggggtgaaaaactgcgtgacacgcagtgagcgtggcggccatcttcgtcttctgggcacgtcagctgagccggttagggctgaagaggagcgttgcgcaagcgcacccaagacggtcacaggtaactcccatctgacgagcgaggcgtcgccg

SEQ ID NO: 818310 - DNA, 515 bp, Homo sapiens
cacagaattttgactataattaataataacataataygtatttcaaacttgctaaaatagattttagggccgggtgcagtggctcacactcgtaatcccaggaccttgagcagccaaggtgggagggtaacttcaggcctggagttggaaaccagcctgggcaagatggtgagacctccatctctacaaaataatacaaaaataagctgggcatggtggtgtgcgcctgtagtcccagctacttaggaggcttagtgtgaggatctcttgagcccaggagttcaaggctgcagtgagctatgatcatgccactacattccagcctggatgacagagcaagacactgtctctcttttatttatttatttttaaagtagattttaaatgttcttaccacaaaaagaagataagtatgtcaggtgatggctatgttaattagcttgatctaattgttacacaacttaaacatatatcaaaacatttcatcataccctttacatatatacaattatcgt

SEQ ID NO: 818311 - DNA, 628 bp, Homo sapiens
acaggaatagtctcaattcaatactgggacactcaggcagggataactagattgtgttatacyttacaggtcaatatcaaaggaaatgtatttcagatgattctaagttcagtattttatttcatattcagcaaactaaggctaggtcagagtcagttttcaggaagtaacctaacacccctcctttgccctaaaatgggagttcacaaactttttctgtgaagaggcagataggaaatataggctttgtgggccatagggtctcttattgcaatgacttaactctgccttaaaatgtgaaagcaaccatagacaacacatgaaatgaatgaatgtggttgtgttccaataaaactttacttatggatgctgaaatctggatttcatatcattttcacatgtcataaaatactattattctgattttttttcaatcatttaaacatgtaaaaaccatccttagcttgtggataatacgaaaacaggtcatgggctggatttggccggtggattgtaatttgccaccctttgccctaaagcattagagattcctctaatgtattccaggtatgcgtgcaattgttttccagtatgtgagccatccttttctgccaaagtccgtctacct

SEQ ID NO: 818312 - DNA, 464 bp, Homo sapiens
tgcattctagtctgtataacagagcaagactctgtctcaaaaagcaaaaaactaaaaaaaaaaaaaaaaaaaaaaaaaggaaaaatcttaagcattaataagtacgttgcctctctaccgtttctgaagagtatcttctgttcctttctctgcttgggactggaggcattgaaaaaaacatttttttaccaaaggggttttgattcgatgaccttttttttctgcagatggcctccagctctaaaattttatcctattctgccagtgatacaactgccagagctctggggtcagtcctggagcagaagtgtttaaatgaaatatttccaccaagaatagttyttaaaatcaaaaaggctgccattttcatagctgcccaacaggtaagaaatcagaagcatttttataaagagaactatcgatccagcagggatatctgaagagcagtcacccatcaaagaaat

SEQ ID NO: 818313 - DNA, 609 bp, Homo sapiens
agtaaatgagtccatgatgggaattgtagggttctcaaaagacaatgtaatgatgtcgattggcaaggtcgtcggtggtttatagcaagaatgccagtatgataaataatgcggctttaatgaagggaagaaacagggggtgtcattaaaaagccattggaagcagcaaactaaacatttttcctggttatgagtaaagtgatttgagtatatttggacttacagaaatgactacaggagaagtaataataatagatcaaatccttaatgtgtgccagaggctttacaagcaggagagcaaattgaacagtagaggcattgccttggttttgtgggaatatcattctcctatccccccactccaggcaaagacttaccttgtatctggaattaggtctatcatgttggcctcccctctaactctagcaaaggtcttgcaaataaactatggcactgagttgtagctttcaggatagacttgaaaggmtttttaattgaattgggtaattaaaaagagtcagttttttaaaaaaaattttgttttaggttatattttctttttgcctggagaaacctttccttttctcactttttacatatgccatttag

SEQ ID NO: 818314 - DNA, 590 bp, Homo sapiens
ttgatgaaaaagatggttgaaagtgctgtccctggttaaataaataatacattcatgcactggaataataagtaaatatagaaaggattgatgaagcatcttacatattgatgtattaagtcaaacaagcaaagtgcagaaaaactgatagacagatgacagatagatagatagatagatagatagatagatagatgatagatagagtctcttgacaacagtgacagtgatgtttctttggaaaaagcaataggaggccgggtgcattggctcatgccagtaatcccagcactttgggaggcggaggcgggcagatcacctgagctcaagagtttgagaccagcctggctaacatgatgaaaccccatctctactaaatacaaaaaaaaaaaaaaaaaattagccaagcgtagtggcacgtgcctgtaatcccagctactcgtgagactgaggcaggagaatcacttgaacccaggaggcagaggttgcagtgagccaagattgcaccactacactccagacygggtgacaaagtgagactgtctcaaaaaaaaaaaaaaaaaggataattattgtctaggtcaccagcc

SEQ ID NO: 818315 - DNA, 612 bp, Homo sapiens
aggaatgatctcatcaaccaagtagtgagcatagtacccaataggtagtttttcagcccttgccccctgatatggttgggctgtgtccacccaaatttcatcttgaactgyagttcccataattcccacgtgtcatggaggtacccagtaggaggtaatttaatcatgggggcggttaccctcatgctgtcctcaagacagtgagtgagttctcatgagatctgatggttttacaaggggcttaaactcttttgcttggcacttccccttgctactgccacatgaaaagaatgtgtttgcttccccttctgccatgattgtaagtttcctgaggccttcccagctgtgctgaactgtgaggtaattaaacctttttcctttataaattactcattctcgggtgtgtctttatcagcagcgtgagaacgggctaatacacccacttccttctttcctccccctagcagtccccagtgcctattgttgccacctttatgttcatgtgtacctgtaagtagcggctcctacttatatatgagaacatgcggtatttgattttttgttcctgtgttaattcatttaggataatggcctccagccgcatctatgttg

SEQ ID NO: 818316 - DNA, 308 bp, Homo sapiens
ctcagagagttggtgtgaaggttatatcagatcatatatttaagtacttacttaagacagtacctggaacatagtaagtacttactacatttcaactattgttcttaactaaataagttttaacttcatagtaacaataaggggtttttaaatagaaaagtggaatctttttaaaaatacttttcaccatatttcaaagccattcttttaacataaattattactctttttgcacacarctatatacgttatccactgaaattagtatttgcaggtaactacccttttgcggaggcctacttaaaaac

SEQ ID NO: 818317 - DNA, 667 bp, Homo sapiens
gctgttcctgcagcctcattttctcagccacttagggagcttgagctgggttggtcattgctgttgggatattcctgttttctattggacagccttccttccctgcctgtgggtttgcctttaaggaaggggtagaacctttcccagggaggcctccttgggttgaaccaccccttttttggaggcaggaagggaaaaggcatcatcacttgcagaactggtggtgtgggaggccacaggagtgtgggaggccttggtccttcaggatcacctggctcctcagggctgagcagctgctgaggaggcggcagggctgggagtgccctagtttttccatttatctcgctggggaccactcccgtgcagatgcgagaggagacttgcatttccctcctttggtccaccaggttcaaggcactatattttggcgatgtcctttcctattctccttgctcttaggcatggaggaagcttgttccctgaacaagacaaaatgaggtgacaggagacagtgcacagccagggaaatccagtactactagaaatcggctccaaacacttgtttcacagtcttggttcagcgtaccaagtgtgtgatttggggtttcactgaaatcgtttgccacraaagtaatttccacaggctgcttgggatttaggcccttgt

SEQ ID NO: 818318 - DNA, 532 bp, Homo sapiens
aaacaaagttcagataagccaaattaataaacatgtttccataaattcccattgacatttgctctccctaagcccaataagattggatataatgcaagctccttaatcaaaattwaaaaaaaaatcatttttcttcaaaacacattgataagcccccagaaaactctacttattcaatacaagttttggatctcaatcatgaaaatatcaaattatttcaatataaattcaggaaaaagtatactgaaattgcacaaaaaatgtgaatctacctaatgcttatacacttagaaatggttatgtacttaagtgtacttacacacttaaaaatggttaaattgtaacttttatgttatgtatattttaacacacagggaaaaaatgcacactgaagcattgtacaaaaatttaaaagtgagtaaaggaaataccaagcccaagcttccctgcctttgacctcatgagcatatttaaatatctaattatatcatcacatatactttttggtgttttggcaagttttttttaagca

SEQ ID NO: 818319 - DNA, 547 bp, Homo sapiens
tcagcaagtaaattgtttttcatgacatctgtcccgtgttacacaattccaagggcacaattcaccctgccttctacgtgcatggcattccctacagccaatgacagttgtactacatctggtctagatatgtccttttaccaaggacatttattctttattctctgctaaatcataatgcttttaaagaggctgaaattgtcctctttgagagtgaatcatggcatgtgtacggctggcccatcccatagccttgtagccacccttctatgctggcatgagttccaggttctgtgttagctgaagtggccaaagagttattagcaagatatttctaaaggggcaacttcttccaccctccgcccaatgagtcaggttttaatgaatgaggctaaggcagctataaaataaaacatgctacttcttagttaaatcaaggatgtggccaactcagcttcctccayaatgactggtttggagatttggtcattaatgagatattcactctcggtgccccagattcagcaaagcattcatttaaacacca

SEQ ID NO: 818320 - DNA, 623 bp, Homo sapiens
taagcacagtggctgcagtctagtggaaatattttggggtcacaggtagttctgtattcaaatctcagctctggctctttctagctgggagacttgagcaaattatttaacttcctgatctatagcttcctcgactctaaaatgggggtaataaaactttgtttacaggattgtgtgaggattgagactgacacaggtaaggcgtcttctaccatggctggcacttagtctgttttgcttattacttagggctcaactttgaacgaacttgaggttacaaagctcagtatcaggttatcctcgggttgtttcctctgtaatcctcatttccctcagagcatggtgagagtcttgaagacatgaaacattttatgcttttctaccttccttgtgccttgcagagtcctcagtatccagtcagcacttaatgcttatactgccacttctggactgcctttcaacaaatttctcaaagttagagaccatgaagggcatggagactggtgcttttcatgccgtgcttctgcagattttggtgggsaggcggtaataggggaatgaaggtggagccatatgaaataaactcttaaaggcatgatagtgaccaggaaaataatatgtac

SEQ ID NO: 818321 - DNA, 509 bp, Homo sapiens
atatcagttggccagtttgacagataggaaattatttggaattaaaaattccccttctagyttttcccctaaaaagtccctgcttaattcatgattgttctctcctttgcctcttctttcctaattctttatcttctcccatatccaaaagaacatctggcaactatctctttagaggcatctatgatcctggattgaatttgttatccagtcagcaccttcgtgagctgtgtttgattttctgaaattgggtttccgcaaatggtcatatttcaaagtgctatgccatataattatttgaagggaaaacattttaacgtggtacaacgacaacgtaaagaatgaaaattgtgctaagtgagttctgtctctttcaagttcaaattggtaggttttcctggcttgaacacaaaatgaagtcaaattgaagggtcagagatacaagaaaattataaggagaacaaactcattagaaagggaactgaaaaatggataacaagaggaacaaa

SEQ ID NO: 818322 - DNA, 467 bp, Homo sapiens
taaccgcatggaagtcaagatttaaaaagaggaaatgggaggcattgtgtaatttaacatgtctggaatccaaagatacatattcaattgtcaaagagcttcaagctcagaggmatgacccaaacggcacattgtacaggaagtacaaccgttatgactctttacagaaacaggatgattacttagagcagtctggaattaaaagtgcatatgtctttccatgaagaaagatggttagggaattaaactgatacagtcacaatggtatcaacttaggagaaatgacagccgagccccagagcaatggaaagggctgtccacaggaccagacagccacagtgggctggggccagagaggggaagttccagggtccccacctagttgtgcatattggagtcacctgccagggatttccaccagcgggtttatttggtggttaagtgtctgtgcagttggattttttttg

SEQ ID NO: 818323 - DNA, 530 bp, Homo sapiens
atcattgctcagaattaaatatggatccagatttttacattacccatccccttttgttccttctgagctgcagttggagatggctggttggttcacaggaataagcagggttagtctaaaatgtaggcaaaacgcaaaaacaacgaatgagtctagagtttaatgacaaacgtatgataagttttgaaacataatgtctctctccagtcctcatttttaaaaacaaatcatgataggactgagttgtttgcaaaacagactttagtcttatacttggcctgattatttgcataaagagcagcaagcataattattttaacgtgggccttttagatttacatgggctttgatggaactctgtttcacaaggaatctcagataggcctttctaaagctgagattgtaccmtcaaatacttgtaagctgggtaaacaactctcttcttgaggtcccaatagcatggagttcctggacctgttagaaagtgacatgctttactcaccacaggttaggaaccctgtatggggact

SEQ ID NO: 818324 - DNA, 569 bp, Homo sapiens
tgcttattctatgtgtgatagttacatacaggtctctgcttgtagaactctaaacttttatgtactgctacacaattgcttcaacatttcctcctctgtttcttggtttgcaccatttattgctatttagtgtttctccttgtcatctttgtatatctgcatctgtgatatgcatttgccacaaataacctacgttttattattaggtaaaatgttaatgcaaacactataaaggaaatgattgtatcacatttatttagccacctactctaccctttagaaaacttttaataaatgttctctgagttgctgattatttatttatttacaaatacatttcatatactagtcagttgattttgttagctgctgaagattttctaggtgtggaaaaaagaaaaacaggatggcgcctctgcctagaggatgcttattccttggataaagtggtgatctactcttatttgattaggctatttcaaggattcttgactgtcarttggaattttaattggagactttaacagcaaataacctttatagcatatgatttacataaatagatattc

SEQ ID NO: 818325 - DNA, 578 bp, Homo sapiens
accttcacatttgaagaagtagggactcatttcagtctttgcagactggctttgtctgggaaagccctttatcattcagcttgtccagaggttatgggcagactatctgccatgattcatagatggacttgctgctggagtcatcaggcaggctggcccagtaccaaggtcaataggtgagtgggcttggcacccgggtatgcagagatggccttagagcctgggtaaactgtgccagaagttttgattgggtctgtaatggtgtgtctggagactggttccttgaggctggctggagcctgtatccataaagtctgaactgaagcctgggtccacaggaacttctgtgggtactgacctggtgctagagtaaggctacacatgagtcttctaaatagaccctgagataagcctgggtctgcagaggctatcctggagttttggtccwtagggtctggcctgatacgaggatttactggtgggggcatggaccctggggccactggagcctggaaccgtggggactggcctggagccagtggccagccagctgctggggatggcatggaacctgggtc

SEQ ID NO: 818326 - DNA, 567 bp, Homo sapiens
gccatgcattgttaccttcacatttgaagaagtagggactcatttcagtctttgcagactggctttgtctgggaaagccctttatcattcagcttgtccagaggttatgggcagactatctgccatgattcatagatggacttgctgctggagtcatcaggcaggctggcccagtaccaaggtcaataggtgagtgggcttggcacccgggtatgcagagatggccttagagcctgggtaaactgtgccagaagttttgattgggtctgtaatggtgtgtctggagactggttccttgaggctggctggagcctgtatccataaagtctgaactgaagcctgggtccacaggaacttctgtgggtactgacctggtgctagagtaaggctacacatgagtcttctaaatagaccctgagataagcctgggtctgcagaggctatcctggagttttggtccttagggtctggcctgatacsaggatttactggtgggggcatggaccctggggccactggagcctggaaccgtggggactggcctggagccagtggccagccagctgc

SEQ ID NO: 818327 - DNA, 629 bp, Homo sapiens
ggtatgcccagatgaggtaggggtacgcacaggtaaggtggaggtacttacaggtgaggtaagagtgtgaggcaagggtgtgcccaggtgagatgagggtgtgcacaggtgaagttgcccacaagtgagatgcccaggtaagggaggatgtgcacaggtgaggatgaactatatgcccaggtgaggtagagtgtgcccagatgagatgggggtgtgcacaggtgctatagaatgtacacaggtggccgggcgcagtggctcatgcctgtaatcccagcactttgggaggccaaggtgggtggaccatgaggacaggagttcaagaccagcctggccaaggtggtgaaaccctgtctctactaaaaatacaaaaaaaaattaaccagatgtggtggcgtgcacctgtgatcccagctacttgggaggctgaggcaggagaatcacttgaacctgggaggcagaggttgcagtgagccgagatcatgccactacactccagcctgggtgacagaccgagactttttgtctcaaaaaaaaaaaaaagaatgtgcacatgtgaggcagagtgtgcacaggtcaggtgggggacatatgggcagggatcckaggtctgatgatgatgtcagctc

SEQ ID NO: 818328 - DNA, 505 bp, Homo sapiens
ggacctccctcccccaaccagagagtgaggagaataagacaccyccctccctccccaactctggacccagccccagcccagccccagcgctgcacaggagcgttctgtggcctctgctgccccccagaggcgttcactggaaacatgccctcctgacgcggcttcccagtggctggagacagtccagtcgctcctccttcctgccctcattcctgccaggaccccgctcaaatcccctcctggggtgcacctgtggctcacaggtgtgtctgtccaacgctaacctccctggctacaactactgcaagtatttttccttattttccctttttatttcttttttggttgtaaaaataaaatgttagctatagccgggcacagtggctcacacctgtaatcccagcactttgggaggctgaggcgggaagatttcttgagcctgagagttcaaggctgcactgagcagagatcttgccactgcactccagactgggcgacggagcaa

SEQ ID NO: 818329 - DNA, 625 bp, Homo sapiens
gaggcggaggcaggggaattgcttgaacccagagggyggaggttgcagtgagctgaaatcacgccattgtactccagcctgggcgacagagcgagactccgtctcaaaaaaaaaaaaaaaaaaaagaaggctgccctgggctgcaggtgcctgctctcaaattcactgccaggaggaaaggtgggtgctggtgacaggacagcctcccaggctggatgtgctgggcaaagaactggccgggcagggagacactgcggtcccatctggaacctacgctcttctcagcagggcaccccttctctaagcctcagtttccctttctgttcagtgagaggcaagctgctctgatgtcccgggattccgcagcccccactctgaagaccctcacacggagctcccacccctccaggatccaggcttgccgctgcgtttggccaggcccatggcggagttcaggctgccgacctatgggctccaggggcgggaataaacgcactcagcctttttctaactgtggcttagaaaagttttctggctgtggtttccccatcttcaaaaagtcatgaatgccaggcacagtggctcacatctgtcatcccagcactttgggaggccgaggcaggag

SEQ ID NO: 818330 - DNA, 578 bp, Homo sapiens
ttgtttttgagatggagtttcgctcttgtcgcccaggctggagtgcagtggcgtaatctcggctcactgcaacctccaccacccgggttyaagagattctcctgcctcagcctcctgagtagctgggattacaggcacccgccaccacgcccggctaatttgtgtatgtttagtagagatggggtgtcaccatgttggccaggctggtctcgaactcctgacctcaggagatccacctgccttggcctcccaaagtgcttggattacaggcatgagccactgtgcccagcccctgatttatttattttttttggtagagatggagtcttgctaggtcgccttggctggtcttgaactcctggcctgaagcaatcctcctgcctgggcctgccaaagtgctgggattgcaggtgagagccactgtacccggtcgccatgtgattactgagttggaaccttcactccactccacctacccactcccgaactccagggatggggagctgaagatagggttaaatcacaacggccagtggtttaaccaagcatgcgtatgtcatgagacctggatactgaac

SEQ ID NO: 818331 - DNA, 578 bp, Homo sapiens
ttgtttttgagatggagtttcgctcttgtcgcccaggctggagtgcagtggcgtaatctcggctcactgcaacctccaccacccgggttcaagagattctcctgcctcagcctccygagtagctgggattacaggcacccgccaccacgcccggctaatttgtgtatgtttagtagagatggggtgtcaccatgttggccaggctggtctcgaactcctgacctcaggagatccacctgccttggcctcccaaagtgcttggattacaggcatgagccactgtgcccagcccctgatttatttattttttttggtagagatggagtcttgctaggtcgccttggctggtcttgaactcctggcctgaagcaatcctcctgcctgggcctgccaaagtgctgggattgcaggtgagagccactgtacccggtcgccatgtgattactgagttggaaccttcactccactccacctacccactcccgaactccagggatggggagctgaagatagggttaaatcacaacggccagtggtttaaccaagcatgcgtatgtcatgagacctggatactgaac

SEQ ID NO: 818332 - DNA, 489 bp, Homo sapiens
atgattctgtccacatggtagtgaacattacatcagttgcagatctctcccctgctgttcatagagtttaaagtccaagtttgtgggtgtgtttagccattaaaggattttacaatatggaacaaaaaggatgaaatctcaattgccagaataatttaagagctcttcacaccacttgagctaaacaccctttctctcaatgataagctttagggcagttaattaaaaccttcaccttttcaatcttgactggcattgagtcccagaatatttctttcccaaaggaattaactttatgggctgggggaggggtgtggggggtggagaaggcaacaagaatcatattatagtccagttaaaaaatatatatgtatagatttttataacaaaagacagtttcaaaataaaktagtgactttaagaaatgtgtagagtctacttattaaattaggaggaaaacaaaattgatgttagtttgaattttaaatg

SEQ ID NO: 818333 - DNA, 635 bp, Homo sapiens
tcatctatgaaaagattaccttaattttaaagtaagcaaatgagctggccatagtagtgtatgcctgtaatcccagttactcaggagggataggtggaaggactgcttgagcccaggaatttcagaccagtctgggaaacatagtgagacccgcctttcaggaaaaagagagaaagagagagaaatttaaaaatataaataaaataagctaaagaatcaagggaatttgatctgatatagatgatatcaagcttgtttaaaaatttttactaggatttgtcgttccaaaatggcaatatagaagcaagctgtcttcattctccccacaaaagcaaacgaaaagaaaatatgtggtgtcaagtttattaccagaaatctcccagaactcatacatgacaatgagacaaatccccaagccacagagaagtgaaaacaattccatgtggttggtaagagaattgaatttccaagtccatgatgcctttgccccaattctgtctggcaggaarcttgtggaaaaatttcccacaactcactgtttctacactaaaaacagatttaaatgtataatgagctttttcattaccttgttttccctggcagaagacccattactgctttaactcacagaagca

SEQ ID NO: 818334 - DNA, 603 bp, Homo sapiens
aaaaagatattccatgcaactggaaaccaaaaaaagggcaagagtagcaatattttagataaaatagactgcatatctaggactgtaaaaagagataaagaaggtcagtataaactgagaaaggkatcagttcagcaagaggagatagcaattataaatatctatacacccaacagcagagtgcgcaagtatataaagcaaatatgaatagatttaaaggagagataaattccaatattgccatagtagaagactgtaatacttcattctaaataacggacagataacctagtcagaaaatcaacaaagaaacatcataaactacacactagatcaaacaggtctcactgacatttgcaaaacatttcacccaactgctatagaatacatattattttcaccagtgcacagagcattctccagaatacactgtaactttggctacaaaatatgtctgagtacattttaaaaagtagaaattacatcaagcatctttcctttattccacaatggactaaaactagaaatcgataataagagaaatttcagaaatttcacaaacacatgaaaattgaacaatatgctcctggatgaccaatggat

SEQ ID NO: 818335 - DNA, 561 bp, Homo sapiens
cactgggagctgtagactggagctgttcctrttcggccatcttgcaaataatcgcaaaagaattttcaaaaacaggcctttgttgctaaggggcttcccaatgtcagggacaaaccatcatgaaaccaatgcagaaaacgtgttcatagctgggcgtagtggatcaagcttgtaatcttagtgctttgagaggtcaaggtgggaggattgcttgaggctgggagtttgaggtcagtctgagcaacatatcaagatcccatctctacaaaaaaaaatgttaactaggcatagtagtgtgtgcttgtggtcctagctcattaggaggctgaggcaagaggatcacttgaaccaaggagtataaggttaccgtgagctatgatgctatgatcgtgtcaatgcactccagtctgggtgacagagggacaacttatcttcaaacacttttaatttatttatttattttttttaagaaaaagtgttcaggccttcttgttgttgaaacagcactggtgtctatcttttcttttcaaggcctgcgggctagtagatttataggtgagg

SEQ ID NO: 818336 - DNA, 559 bp, Homo sapiens
ttattcaataatccttttgagtccaacaactgatctgagtagagtgaaatggacaaatgttcataatttgacatattcagatgtttcacatggatgagasattaaaatctagaaataatcatttgatattttaaatctcagtgctgatctttctatccaaggaattaatagtccctgaaaatgtaaattggtctcacagttgtgcaaagttcagtatcatttctggatatttacagcatactttaaggaattttttaaatatgtcttttagaggagactttaattcaaagtctcacaagcagtaataatagctcactgccttccatctggcataagaacacaatagtgattatttggtgaaattattttagtatatttaattttcttatatttcacctcccaggttactaaggaaaatttggtgatgttcttgtccacctcaataaagagcttaaaataagttagagaggatttaaagtaaaccagacaatgggtgttaaaaggaaattgaatatatttgacaccttagtttttcatttccttttgttgtcctttgaag

SEQ ID NO: 818337 - DNA, 624 bp, Homo sapiens
gtaatgacagctatttggagcagatactgaatacagcttggctgtgttacatttgtaaataagttttctcactttctcacaggcaagttggccagttttccatttgttactgatttaacctttgctccaaagcaaaattctatgttctatacagacagtgtgcaagaacaaaatcttaaccaacaattcttcaataagccctttttaatagggtttctggcttgacttaatttattcccactgtctccttttttttaacatttagttgtggaaaatttcaaacataaagaaaatagtataaagaactatgatgtaatcatctcacatcaacaagtaacaatattgctctatctgtggccctcttttctttccccctcccctaagtaatttggaaacaaattccagatgttttatttcatccacatacctgagcatgtatctttaaaatgcaaattctcactttctattttttgacatagccatagttgcaagttttcacctaacaatttaacagktctttagtattccttcactctcactctcttttctttttttcatcttagttgttttaaaaactagtggtttttccttcagtttcccacggactgaaattattgattaaat

SEQ ID NO: 818338 - DNA, 623 bp, Homo sapiens
tccttacctcaggtgatacgcccgccttggcctcccaaagttctaggattacaggcttgaaccactgcgcccagcctgtcacagcattattgacagcttttcatttcctgattcatgtgtgatgtggcctctatcatatatcaggcttctgtgtgcaggcatctgatggttgaccgtattctgtttcactggtctgtgatcctgtccgttttctggtattttgtagataaacatgttgttttcaaaatgttctgggttcttcttgccttttgattttctgcatgaattttgggtgaaacttgtcatgtttcataaaatctcattcaaaattcatttagaattacttggaatttatagattatcttacagagaattggtatctttatgatattgactctgccaacaggtaaacattccttagctccctattcttctttgttgcagatttacccaattttttcaaacaaacatatttacttcactcttttactattttcttggcagttgtacatrgacttttagttttagaatataaggagctgccttataagaagcttacaaagcacttacatgtacatgtaaaatattgaatacttgcttctgtcagcagacataacatttac

SEQ ID NO: 818339 - DNA, 594 bp, Homo sapiens
tgcatagcacttcctccttccctttttttctctctctctctctctctctctctctttctctcttcctcttgctctckctctcttctgttggccatgtaagaagtgctggcttccccttcttccaccatgattattagtaccctgaggtcccttgagccatgcctcctgtacagggtgcagaactgtgggtcaattaaacctcttttttaaaatagattacccagtctcaggtaattctttatagcagtgtgagaatggactaatacagaaaattggtaccacagaagtgggtgatttctataaagatacctgaaaatgtggaggcagctttgaaactgagtaatgggtagaggttggaacagtttggagggatcagaagaagacaggaagttgagggaaagtttggaacttcctagagacttattgaatggtttcgaccaaaatgctgatagtattatggacaatgaagtccaggctcaggatgtctcagatgaagatgaggaacttattgggaactggaatgaaggtcactcctgctattctttagtaaagagactggcagcattgtgctcatgctcttggcacctatggaac

SEQ ID NO: 818340 - DNA, 661 bp, Homo sapiens
gttttgttttcccctctgtatcttcacagtctcctttttcttcttcagtcactggggaggaagcaacccttaaatatctctgatatttcctttgcaccccccactcaccttggacacattttcagtctcatattcacatgcacacacacatttttagtatcctatttaacacacagacacaaacatctcaacatgtatctttaatttgtaataaattcaaatatttatttccaaacatcattactgcataagtcttacaccacccacttccaattcttcatctccttaactgctcacatcacttatgtgaaactgcactcccaaagggcacaaatatccttactctcagaagttgatggattttttctgtccttgtttttcttttttttacagcagggttccctgctcattaactttggtttctatgccctgtcactgtcttggctgccttccttattcgaaatttaaaatgtagaaattcccaaatgcctgaaattgattctcttctcttttgtatattccctccattgttgatgttacccaattctttggtaccatttcctttttgcaaatgactcccacatctctatccctaactatggcctttcttctaactccwtccttgataggaatgccccatgagaatattagaataagcaaa

SEQ ID NO: 818341 - DNA, 577 bp, Homo sapiens
gctgaaccctgcaaagccacaggggcagagctgcacaaggccttgggaactcatcccttgcaccagtgtgccctggatgtgggacatgcagtcaaaggagattattttggagcattaagatttgatcactgccctgctggggtctgaacttgcatggggcctgtagtccctttcatttgactgagttctctttttttggaatgggaatgtttacgcaatgcctatacctcctttgtacagaaaactatacaagggagtaactacttgcttttttattttacttggaagtaaccagcttgttttttattttacaggcttattggtggaagagatttgacttatgtcagatgagattatgaactgtagacttttgagttaagctggaatgagttaagattttgggagaccattgagaaggcatgattatgttttgcagtgtgagaaggacatgaaatttgggggacccagargcagaatactacagtttggatatttgtcccacacaaatctcatgttgaaatgtaatccccaatgttggaagtggggcttgttgcgaggtgtttgggaaatgggggtg

SEQ ID NO: 818342 - DNA, 606 bp, Homo sapiens
gagtttacaatataatttgggtaacaagatcagcatagaagaaaaaaaaagtccaggtgtggtagctcatgcctgtaaccccagcactttgggaggttgaggtgggtggaccacttgaggtcaggagtttgagaccagcctgaccaacatggtgaaaccctatctctactcaaaatacaaaaattagccaggtgtggtggtgcatgcctatagtcccagctactcgggaggctgaggcaggagaatagcttgaaagcttgaacctgggaggcggaggttgcagtgagctgagatcgcgccaattgcactccaccctaggcgacagagtgagagtttgtctaaagaaaaaaaaaaagaaagaggtaccaagtgaccagtattagaatacatataattatgttttagattgtgtggtctttactcctggggcaacatgtcagatgacactgaatccagaaaaacttcctagatgccatgcacctgggttaagtgtcagtcataggtgctctgctggcatcctgcatttactctrtaaaaagttgttcatttttatgtagctgtaatgggattcatgtcgtgtaatgtaatatttctcactagaccata

SEQ ID NO: 818343 - DNA, 568 bp, Homo sapiens
catgtaatataatattgagggctatatgcaatgactaaaggtgtgtgtcctgaagttgtctggtcgttgctggatatgtaggttgcttggaataaaggtgatgaaataaatagaattaaccatgaagatatcccaaagaactagcatgtgaaatgttatctgggcccagaaagctattgcatggggtttacaacaagtattgcctgtaaaatgcattaattatatgacacatatatatttttatgtcttgtacactttttcaaaattcaggaagtatatgaattactttaaaaatattacccaatttctagttactttttgtcattgtgtatttccttaatgaaaaataataagagtagaattgttattatggaatctttaaattttttaatgttgaactcgtctttacgaactcatcagaatgtctaaaatttgaaagcctgataacatctatgttgttgaggatgtggagcaactaaaattctrtgtgttggtaggaatataaaatggtataacagctttggaagaagatttggcagtttcttataaaactaattgcgcacctact

SEQ ID NO: 818344 - DNA, 602 bp, Homo sapiens
ccagcttttatttctgagaacagccttctaggtgtggtccccatggccaaacgtarcagtggggcatgggaggagcactgtagtcagagccaggaaacatggaaaccactccttttgtttccaatctcaagtcttgattataatggaagtgctgccagacccttaattatgaaagtacaacagggcattaatataattcatcacctgttagaaggagcacttctgggctatttactagaaatctattaaatatgacatgaagacagattgcactccatttcttaacatgacattataatcaggatgtatgctcagtaaaatggtttatagaactcttggctgtgtgtcctatcaattaacctaaaatctccataaatgaagtgtagctaagcagcacctttagcaaatggttgcatgtttttcctctggttctcagtagcggaaagttttgttctgaaatatcattgttatttttatagcaagttcattgctatgtggttttttttgttttttttttaaagcattgagaaaagcctcataaagcaaagagtactcacttcatagttctgttactgaatattgaaggattttttaaatgaacc

SEQ ID NO: 818345 - DNA, 648 bp, Homo sapiens
tagtgaaaatcttacacatgcatggagttttaagaagagaacaggctcaagtgttatacttaggaaagcacaaacagtggctttggaccctgggaatacatgaaaaaatcctgaggtagaactataccatatcattaagttagcccacctgccaggtattatgtggtaatgccaaataatggaaacttcaacctccctccatctcctgctttttcattccttacggtttctagtatgctgacaaagaagaatacttgaaggagttttttctcagctatctaatgtagggcttcccaaactgtgctttctagagcatctctggcagttctgcaagatgttaataagcatccgtgaactcctgtgtcaaaaactgaaatatgaaacatttcttaattgcaggccttctcaaaacctttataatataggccagggatttccgagagggggtgtagttagtagctccttcttgtgctttttttgccccccaaaccacagaccccttttcctcatggactacctattratacctcaacgttttttgaaaaatactcatcttttgattagagaaattaatgtcatcttcatagtcatttgggattttaatctttgagggtcttttgtacgtgaaaggcatactcatagttactg

SEQ ID NO: 818346 - DNA, 552 bp, Homo sapiens
gcttttttttttttaagtacaaaaaatgaagcctagagagcttaaatcactaaaagaaacccaaacctgtaacaacaaaagtcatggttttaattaaatatatatacctgtgaaaatactgaggattcttggacctagatatcagtttatatacttctcttgacgagtaacaaaattgtggagagtagaaataggtactagtgcattcttgtcataatccagttacgagtaatggtggcataacaaaaatgagctctaacaaagcctaattttacagacctgactattcgtttaatacttttaaatatcaaaattataaaaatattgagtgggaaaaagtgttgtcagggtcaacttttgaacgatttgtgactgtggttgagagggccagagaaagggcagcctgtggatggggtctggccagggcagcaggaaaggctggttctggaaatgagscttgtgctcattttctctcttctcttcctcttctcttttgccaaaggcataaatcatctcattggtactaagagaaatgtggataattatttgtaa

SEQ ID NO: 818347 - DNA, 314 bp, Homo sapiens
attctaataaaacattccattggggcwtaaaaaacagggtgggatttacttcttaccaactaatcaccactgtgtattcccttatattctcagagcagcaagagaccactttttcatcaaaacacaaatttttgctacagaggaaatttcaaacactgattgatcagtaagaaaaaaataattattatagtatttgttataattatgaatgctaattattatatggctacagtaattatggtttcattataacttatagctttctcttataatttctaaaaattatctcaataaatgtaaaggctaaatttcag

SEQ ID NO: 818348 - DNA, 632 bp, Homo sapiens
tctaatatctgaactggggaggcagttaaaccaggaggcatttagtgtgactgccatgtttcataggttatggaackgaggcccagagagggaaagttatcagccaaaggtcacttagagtattcatggcaggtctgagtctgcaacttgggtctcctgattcccagtacagtgttctttctactccccttcggcttctcaaacctcacccctaactctggtccacagctgaatggattcttcccatggatccaggagttcttgagtcatcacagaccaccatcactatgggagaatgcaccatgttggtggaggcagccacactctcttaatacaaaggacaggatgcattagtcagtaatggccacaacagtgctatgtaacaaaccaccctggaactcaggggcttacaatagcaaggatataacctcatgttcatgggtctgcagattaacagagaattgggtgacccaggctggacttggctggacaggcctcctttggaatgctggttggctgaggttggctccaggatgaggattggaatgcaagtggcttaacatgtgttcaatctgtaactcaagctagagcctagaagtctcttattgcaaatcaaggaagcacacaataat

SEQ ID NO: 818349 - DNA, 623 bp, Homo sapiens
aatcctccaactccctccaaactgtctctcccacgtcttctccctcagtttcttcccatgcccatacccctgagttcagccacataggtctcctattcattatctgtacaagtcagaagcttccatgaagtctkgcctgaccccactctaattttggcccctgcctccagcacttcatcaccacttccttcatattgtcacaacattgtcacaaatgtttaatctagtgtttaatatatttcattgtgatttttctaatctgtgttagataataacctatgtaggacactggcctaataaattagatttattgggctctcattcccacctgttactgcaggaccatcaggccaccttccctccaatacttccctagtaatttctgaagtcatcagagtatagctcatgtgcagtcaccaaaaacatttattggagaggaatctcctttctctgacccctgcttccatgcagagggacctccgctagcataataagcttatcatctcttcatcttatgagtgagtgagaaggaactgggcatgcagggaatctccttttacttcccttttcttctgctgccttgacatctgctatatacagagagcacattttctcctccaagc

SEQ ID NO: 818350 - DNA, 657 bp, Homo sapiens
gctaagcattattgtgcctatattacctcctatatttacaggagaggaaatcgagcttcagtggggtcacttggtcaggatctctcaaagtgttaagtggcggagctgaactatgaygctgggtaattctgacttcaatagcagcaatctctctccctcacacatggtgggtgtgactccttattccagcaaactaagtgtatcttcatcaagtatctcaaaaagagtaatttggagcaaataagcgagctcatagatagcaggatcttaaagctgactgttttgtcccagaaatctcaactttaggaatctatcctaaaaaaaaaaggcaatccaaaaaaaaaaaaaaaaaaaagaaacactgcagataagagtttatatgaagagatgttcaacaaagatgctatttataacaacaaaacctgggaaaagaattcaaacacccagtaacacagtagtagagaattaagttatagttataactatatgatggaatattaggcaactgtgaacaataatatcaatgaagtgtttgtaataacactgaagagccttaaaacctaacggagagtaaggcaagatacaaacgtctgtgtaagttagaactcatttatgtaaactaatatttatggaaagagagatgtagaccaaaatagt

SEQ ID NO: 818351 - DNA, 621 bp, Homo sapiens
attgtgcctatattacctcctatatttacaggagaggaaatcgagcttcagtggggtcacttggtcaggatctctcaaagtgttaagtggcggagctgaactatgacrctgggtaattctgacttcaatagcagcaatctctctccctcacacatggtgggtgtgactccttattccagcaaactaagtgtatcttcatcaagtatctcaaaaagagtaatttggagcaaataagcgagctcatagatagcaggatcttaaagctgactgttttgtcccagaaatctcaactttaggaatctatcctaaaaaaaaaaggcaatccaaaaaaaaaaaaaaaaaaaagaaacactgcagataagagtttatatgaagagatgttcaacaaagatgctatttataacaacaaaacctgggaaaagaattcaaacacccagtaacacagtagtagagaattaagttatagttataactatatgatggaatattaggcaactgtgaacaataatatcaatgaagtgtttgtaataacactgaagagccttaaaacctaacggagagtaaggcaagatacaaacgtctgtgtaagttagaactcatttatgtaaactaatatttatg

SEQ ID NO: 818352 - DNA, 621 bp, Homo sapiens
attgtgcctatattacctcctatatttacaggagaggaaatcgagcttcagtggggtcacttggtcaggatctctcaaagtgttaagtggcggagctgaactatgacgctgrgtaattctgacttcaatagcagcaatctctctccctcacacatggtgggtgtgactccttattccagcaaactaagtgtatcttcatcaagtatctcaaaaagagtaatttggagcaaataagcgagctcatagatagcaggatcttaaagctgactgttttgtcccagaaatctcaactttaggaatctatcctaaaaaaaaaaggcaatccaaaaaaaaaaaaaaaaaaaagaaacactgcagataagagtttatatgaagagatgttcaacaaagatgctatttataacaacaaaacctgggaaaagaattcaaacacccagtaacacagtagtagagaattaagttatagttataactatatgatggaatattaggcaactgtgaacaataatatcaatgaagtgtttgtaataacactgaagagccttaaaacctaacggagagtaaggcaagatacaaacgtctgtgtaagttagaactcatttatgtaaactaatatttatg

SEQ ID NO: 818353 - DNA, 600 bp, Homo sapiens
ctgataagagatcttctcacattctcttcccctgttgctgtggcggaggagaagtgtgtttcasgtgaaacaatttcaagattatggggatctctgtcagtcacgttccctgaaggactacatggaagagatctctgcctttgaacctgtgaaaaacatataagggataagaaataaacttttgctgagtcctgatatttgggggttgatttttttttttttaggagtttaggagtttaggagtggaggtttaatagggaaaagaaaaagaaagaaagagaaaggaaaacagctctctctttaatctgggggttgatttttactgcagaatatcttatcctcactaatacatagactgtatgaggctactcttcctttccttgccttcccttcctcccttccattctttctccctcccttcttcccttcctcccttaatttttcttattttctttatgtttttcttttaaattgaagaaaagaagcccaagctcactgtttgaaattattaaaagtcttgataattggaagaagaaaacctttggcatcaactcacccaatccccaacctcaacctctattttaaagtttcagacgtgga

SEQ ID NO: 818354 - DNA, 600 bp, Homo sapiens
ctgataagagatcttctcacattctcttcccctgttgctgtggcggaggagaagtgtgtttcacgtgaaacaatttcaagattatggggatctctgtcagtcasgttccctgaaggactacatggaagagatctctgcctttgaacctgtgaaaaacatataagggataagaaataaacttttgctgagtcctgatatttgggggttgatttttttttttttaggagtttaggagtttaggagtggaggtttaatagggaaaagaaaaagaaagaaagagaaaggaaaacagctctctctttaatctgggggttgatttttactgcagaatatcttatcctcactaatacatagactgtatgaggctactcttcctttccttgccttcccttcctcccttccattctttctccctcccttcttcccttcctcccttaatttttcttattttctttatgtttttcttttaaattgaagaaaagaagcccaagctcactgtttgaaattattaaaagtcttgataattggaagaagaaaacctttggcatcaactcacccaatccccaacctcaacctctattttaaagtttcagacgtgga

SEQ ID NO: 818355 - DNA, 622 bp, Homo sapiens
gcagattgcctttggacttgaattgcaactcttccctgattctccagcctactgcatcagatttaagactcaccaagccattttactgtgtgagccaattccttaaaataagtcaatctctctccctctctctctttctggtatatgcaatatagattattctcaaaaacatcacactaagcaaaaggagactgatacaaaagaatatacactgtgtgattccattatataaatttcaagaaaaaataaaactatactgaaagaaaaaataatagtagttgtctactgtgtgggtcagggtgataggtggattgactgcaaagtaggatgtaacaacttctatgtgtgctggaaatattctatatcatgattggggtgattgttacagagatatatatatattttcaaaactcatcaaactgtacagtaaaactgatgatttaaaaatcatacctcaatgaagtcgatttttttaaacattttctaaagagtgtcccactgctgctccacactgtgtgagacctcctgcacactataagccccaaatgaaagctcatgcgaagttmtgattctgaggatcagcacacacatctcccagcccttgtgtgctccaccaggagaa

SEQ ID NO: 818356 - DNA, 567 bp, Homo sapiens
caaagtaaattgaaaactttatggaaaggagtcaccattctagatgccattaagaatatttattattcatgagaggaggtaaaaatatcaatattcacaagagtttggaaraagttgaatgcaactcatggatgactttaaggggttcaagacttcagtggaggaagtaactgctgatgcggtagacatagcaagacaattcaaattagaagtggagcctgaagatgtgactgaattgctgcaacctcatgataaaatttgaatagatgagaagttccttattgtggataagcaaagaaagtgctttctttttttattatttgttatttttgtagagatgggatcttgttatttttcccaggctggtctcaaacttctggcctcaagcaattctcccactcagcctcccaaagtgctggaattacaggtgtgagccactgtgcccagcccagaaaatgctttcttgagatgcagtctactactggtgaacatgctgtgaacattgttgaaataacaacagaggatttggaatagtacataaacttaggtgacaaagcagtggcaaag

SEQ ID NO: 818357 - DNA, 669 bp, Homo sapiens
tgccctgtatactgactctctaaatgttatttaccttttataataaaactattattcaatgttctctttttccttttaggtttgccttctccaktgactgttacagtttgatttcctaattaggcaacatttaagttaaagaatatgaaaaatgcaaaagcattttggaaactctggcatcataaaaatgtaagagatttttaatgtgaagcttatttcctcttctgtactctctgtgccatgcctagattctcaagaggtttggcacaaagacattctaaatgcacagtattctctgcctaggtagaactgtatctgaagtccctactctgtagcttgagatgagcaagtttcatatgtgatgtttagtttccctttgtcttttctaattcagggctgagggtgaagttacaagtggagcgatagatacatcaggggaaaaaaaatcttgccggactattttccttaatgctagttttaagcaggctgctgaggtattttactatatatactagattttgctaatgaccgtttctcaaagtatttaaagtaaaacatatctcctttttattgttgtttaaattagggtgctatcggaaggtagaattcataccagatggctcaaattaagggactctaatggtttgagtgtattcagatgtgtgagca

SEQ ID NO: 818358 - DNA, 524 bp, Homo sapiens
gcaaagtcttcttaatttatctttactgtgctggtgctcagatagggtaatagtgggtcaccaagagtaccattgtgaccttgtattggcctcactgtcaaaagccagacctggtccctgggtatagagattaggaccaatcatgaagaaaagggagatgattatgttatccacagactggtccaagaacacagtagagagttttcagtttcttctctaaattgtgggccagcatcccttccttcctgaactgctctcctccatcctgtgtggtttcattgtgacaatcttttgtggtgccaggagctgatatgcaacacaagtggggctaatcaccacagttttccttaagtgataacaaaagactattttatgcttttttgaagtcaaagtgctggggtggagatgtgaatactccactgctgattgtccttacccttactatatgsagagatcctgtctgcaaaaataaagccacatatgaaaggaaataaagctaagtgacagagggaaagtcagatagc

SEQ ID NO: 818359 - DNA, 576 bp, Homo sapiens
atagggataaagcttaactytatgaaagttaattcttttggaaatgtttctagcatttgttttcttgttggacatctacaagcaagtctgcatttcagccgtgttagaaagaaatacttatggggagaaaggattagagttgtctattccctacagatacatttttttgctgttccttaagatatcaatgccatatttttgtagttatgcagaagtgtgatgctttctgagtggattggttataaggaataatgtcctgtgtagtaaagaacaaaataaaccaagagggaacatcaagactttgaagagccgtgatggagaagaaacacacttattttatacaactcagtagggcagaacccaagctggtagccaaattgtaagcaggctatggcttatactagcaaaaggatgtttcaattgaacattctaaggacatagctgctgcagaaggagatagctcctcatcccttcctttgagaattctgctgggcattggcagttgagaaaacttgtctgcagtctgaggcaacctgtctaccatctaggaatatgtattcccagctcaggaacaac

SEQ ID NO: 818360 - DNA, 538 bp, Homo sapiens
aggagagcaaggggaatggagaggaaacaaagttaaagaactttagatctgatgtattgagtgttaggacaccctgtaggtgtctgagttagggccctagtgtgtgaataaacatttttaaaatgtaatactaacatattgcaaaaataggttgattagatatatctttattgggatgataattatttatggtatttggtaattttgtgtcaatatatgagttaaaaatagacgaaaaaaacaaattgtgtgacattttgattcttgtctacataaaatggaggagaaatatgtcttctaagcacccagacttccttttctctactctcttcctttgtggatgagccatgaccctcgcttccccattacaatgcacgctccctggaaagggactcatttaagccattcaaatgttaatatggttaagcccagggccccttgctctagaagcttgatckctcatgaagaacaggccttgtaataggtggggcaatgtcattcattgggaatagagggaaataaggatgttggtgggtca

SEQ ID NO: 818361 - DNA, 497 bp, Homo sapiens
ctgtaatttacccgtttaattctggcaattttgaattttgtatttcactagttgttctttgtgatgccttcctactggaacacagcttataacatttcatcaattaagagaaagcagacatttgggcatgtaatacacacttggaggatacaagaaaaaatatttttctactcataacacttctgaccacaaatatgtgggttttccacaccagttctctgtggacaccatctgggtgtccagcaatttaattcaattctggaaccacactaaataccctgagttagtgcagacctcacaggttaagggctaagtcccacaagaatgtcccccacttgagatgctggttacaagtattgggtgcccagggtattcccatttccgtccaacttggstgtagagttcctgcaaccttctcctcagtttctgtaacttgctatataatagctcatagaacttatggaaacactttacttagtttaccagtttattataaa

SEQ ID NO: 818362 - DNA, 497 bp, Homo sapiens
ctgtaatttacccgtttaattctggcaattttgaattttgtatttcactagttgttctttgtgatgccttcctactggaacacagcttataacatttcatcaattaagagaaagcagacatttgggcatgtaatacacacttggaggatacaagaaaaaatatttttctactcataacacttctgaccacaaatatgtgggttttccacaccagttctctgtggacaccatctgggtgtccagcaatttaattcaattctggaaccacactaaataccctgagttagtgcagacctcacaggttaagggctaagtcccacaagaatgtcccccacttgagatgctggttacaagtattgggtgcccagggtattcccatttccgtccaacttgggtgtagagttcctgcaaccttctcctcagtttctrtaacttgctatataatagctcatagaacttatggaaacactttacttagtttaccagtttattataaa

SEQ ID NO: 818363 - DNA, 580 bp, Homo sapiens
aaggcaagtttcagagcaggagtggaagtttactaaaaagctttagaacagtaaggaaaggaaagaaaggaaggaaagttctcttggaagagagccaagcaggcagcttcagaaaccaagtgtgttgaccacttgacttggggtttcatacattggcatacttctgggatcttgcgtaacttctccccactcttgagatcttattgggaagctgctgatcagtttcaggtgttttctatctctagctattaggagactgcctttccctggtgccagctgtgatcaattattactttagaggaacaattaacaatcgcctgaccatcacctgatggctgcccaacacttccggtgtgtgttggttggagagccttctcctgccctgcttatacctgactagctacctactgtaacaggtttggtcccaaagactgcccctacttcagacaccagtctcaagcccsggcctcccagttttctgaccaactggcttcatgattaatttgctaaagaggctcacagaactcaaggaaacacttacatttgctagttcattataaaggatatcacaaaggataca

SEQ ID NO: 818364 - DNA, 634 bp, Homo sapiens
tcagagtagaatttaatatcactgtattagtatgcaaagaggcattgcctattaataggatatcaaatcaacaggaagatataacagtcataaatgtgtatactacaaaatacaygaagcaaaaattgacagaatataagggagaaagaaacaatttccatatgagaatttccattctcagagatggatattttaacagacctctttcagcaactgatacaataactagaccaaagaaatcagtaaaaatatacatgatatgaacaataccattatcaaccactttgacctaattgatatttgtagatcactgcacctagcaactgtagaatacacacattctttctgagcatactgaggatgttcaagatacactatatgctggaccataagacagttttaatacatttaaagagcttgaaatcattgaaaatatgtcctctgaagacagtgggatgaagttagaactcaatattatgtatctacaaattcacaaagaaatgagaaaatattttgaactgaaaagtattttcaatgaaaatatagcatcaggaaacaacagatgttggcaaggatgtggagaaataggaacgcttttacactgcaggtgggagtgtaaattagttcaaccatt

SEQ ID NO: 818365 - DNA, 637 bp, Homo sapiens
aactttaaactatattacagggctacgataaccaaaacagcatggtactggtacgaaaacagacacatagacgaatggaacagaatagagagcccagaaataaggccacacacctacaactatctgatmttcgacaaacctgacaaaaacaagcaatggggaaaggattccctattgaatgaatagtgatgcaatacctggctagccatatacagaagatttaaactggacccattccttataccatgtacaaaaattaactcaagatggatcaaagacttaaatgtaaaatccgaaactaaaaaccctggaagacaacctaggcaataccattcaggacacaggcaaagatcttatgatgaagacaccgaaagcaattgcaacaaaagcaaaaactaacaaatggtatctcattaaactgaagagctattgcacagaaaaagaaactatcaagagagtaaacagataacctacagaatgggagaaaacttttgcaaactatgcatctgacaaaggcctaatacctggcatctataaggaacttttttttaataaggaacttaaatttacaagataaaaaccaataaccccattacaaagtgggcaaagggcaagaacagacacttttgtaaagaag

SEQ ID NO: 818366 - DNA, 467 bp, Homo sapiens
ggtgctctcttgcaagtgccacctcctggctagaggccaaacacctcaggccattacagtaactcatgacagagtaaccctgctccaaggaaggagaaaacaacagttaatcccaccgcctgcaacattctggctaaccagaggccctgagtctgatcacatggcaacttcactaattttattaccagcatttaagaaagccagcacacaaaaacatatctacaaccagggcctctcctctgccacctccatcagagcaggtgctggtatccatggctgggagaccagaacatggaccacatcacgggatgctttgcagacccccccccagcactagcctggagcytggtagcccttctgggtggctagatccagaagagcaataacaaccactgcagcctggctcttaggaagccccatccctaggggaaggaggagagcacctcatcaagcaccacatctgtaag

SEQ ID NO: 818367 - DNA, 599 bp, Homo sapiens
agataacattctggaaaaggcaaaactatagagacagtaaaaggataagtgattgccaggggttgsggggaggaagggatgaataggtagagtacaagatttctagggcagcgaaaccattctatatgatagattatagtaaccgataggcatcattatacatttgtccaaaaccacagaatgtacaacagcaagcatgaaccctcatgtaaaatggactttggttgataatcatgccagtgtaggttcatcgatttaacaacataccactgtattttgggatgttgacagtgggggaaggtgagcatgcagagaggtacgtgggaattctctatactttgttcaatttggctgtgaatctaaaactgcgctaaaaaataaattctattttttaaaaagcagtgactaatttgtcaggcctactgcttttaaatggatgtttatggtttcaaattagttccttggcagatcatgttcttattccattgctcaaaaaacttctgaaactcttattataaaattgtattcaatatagattaatgaccacagtcttcccccaagctgcatttacaaaaataatcgtggtagaaaactggtac

SEQ ID NO: 818368 - DNA, 426 bp, Homo sapiens
gtatgtagacaagtggaggctgagcaaagtgaagaggagctttactgagaaggaggagctttactgagcaacagaatagctcagaggagaccctggagtgggtagctcctctctgcaggcagcttgtcccatcatcgctgcagctgtcagcaaagaggaggccctgaagtgggtagctcctctctgcaggttggtcctcctgttgtctctgcagctctcagcagaaaagaggccctggagtaggtagctcctctctgctggcaggtcttctcccccagtctggctgagtccagggaattttatgggcctcagagaggaagaagtgcmtgctgattggtccattggtggccatgggcaggtccaagaaaaagcaccaccagttccccctccagtcagggggactggtggcctggccattaggcttca

SEQ ID NO: 818369 - DNA, 610 bp, Homo sapiens
atgactgaatatcctgcctgaatgtaacatgtctcaaactaatcttacacattcctttcccttacctgctctcttgcgtgaatcttcactctaatggaacaaggcamttacctaactcagattcctacacaaagatcagggaatcaagccataagcaaacgttggcatccctactgcctaaatatgtccctaacctgagcactgacctccattttcactgcttcctcactgatccattgttttttggatgtgtttcagcagcttctgaattggtctctcttcttccactctgtatttctgtctctgtagataaattttagaaatgtgctgaagttccaccaagggtgttccattgcacttgaaataagccacttttaggctcaacattcttaccgtctttccccacatctcccactgactcttctccttcagtcactccagccacatggattcgtgttttgttcttggacatgttgaatgtgcttcagcctcatccttttgcattttctgttccctctacctgaaatgctcttcccatgttttttcacgtttaggttctcattatttagagcccaacatctgttacctcccaaaagaggaataagtagcc

SEQ ID NO: 818370 - DNA, 536 bp, Homo sapiens
tgctccagaagtagacattgtctttatctttcaaggtaattgctatacaaacatccaygcataaacatgagaaatccatggataattgtcttccaacaatattaacaataataacaactgctaccattcattgagtgttcaacgagggtacccatagataaaagctaacttctggaatatgtaataaataatacgtaaaccatagacaaaaactagagaaaaatccatttcaagtgaccattgcaattataaaggaatttgatgtgtcccttgtcatatatatgtgaattccatcaaaagatgtgaaccaaacaatgtccattttaatgggtttatatttggtggaactaaatagctcaaagtattgatatcagactggaaagaggttccaaatggtgtccttgaaaaggtctctgcccttgccctgttcttgtgttgcaaagttatcaatggttagaatgagaacataaatggcaagcatatcagatttagggaggagaaaagaccggaagagatagccaatgtttggagggaag

SEQ ID NO: 818371 - DNA, 588 bp, Homo sapiens
aaaacttctaatgaatatgtatgactgtaggaacatgaaattcagtcattattaagtacttgctatacttgactacacaccaattgaaatstgtcaaagaattccctgtaaataaaatctcagcatgttttctaagaagctttctgtttggggaattcaaaaatgggcactaatgacttttgagcagtgctttccaggaggtcaaaggcctgtttcctcatacataatggtcatagcactctttttgtgatttaacaatctacacacttttataaataaatattatgtttcatttagtactttatcatccataatatcttactctctaatccacataatggagttgtgccagactccaaactgaacataatatttatatatacatatatatttatatatatacacacatacataaactataaacctgaatatcttagcatacaaaacttatctaacaactaataatttaggattcctttgagagggaggggttagaagaaactcttcttagtctttgaaatagtcctgacagtaagcaataaacaacattattaatttctgggttctcatttattcaagtgaaagaca

SEQ ID NO: 818372 - DNA, 588 bp, Homo sapiens
aaaacttctaatgaatatgtatgactgtaggaacatgaaattcagtcattattaagtacttgctatacttgactacacaccaattgaaatgtgtcaaagaattccctgtaaataaaatctcagcrtgttttctaagaagctttctgtttggggaattcaaaaatgggcactaatgacttttgagcagtgctttccaggaggtcaaaggcctgtttcctcatacataatggtcatagcactctttttgtgatttaacaatctacacacttttataaataaatattatgtttcatttagtactttatcatccataatatcttactctctaatccacataatggagttgtgccagactccaaactgaacataatatttatatatacatatatatttatatatatacacacatacataaactataaacctgaatatcttagcatacaaaacttatctaacaactaataatttaggattcctttgagagggaggggttagaagaaactcttcttagtctttgaaatagtcctgacagtaagcaataaacaacattattaatttctgggttctcatttattcaagtgaaagaca

SEQ ID NO: 818373 - DNA, 483 bp, Homo sapiens
gctttatcttcagtgtgggcctttgggaatgccatttcttttgccaaaaacactctccttttcctcctgttcttctccatctctcaactctgtagcttgggttggctaataccaatttgagcaatgggagagagacaatatacacaaagtaaatatgtttagtattttagaagtgaaaatatacacgtaatatacaatatacacaaattacacaaaaagatggattttcttccctctaactaccctttattctttcttccctctaactaccctttcttccctctaacctggtcctttattccaaatgccccatttcagtgatgttacccgtaactaaacatagtgtcacagatgtggaccaatgtgcaractgcagtgggaagatcattttccttgtttggggtcttataaatccatcagtacaattatctagggttgttagctcatagtaagctcataatcatttttcatttcccagaatat

SEQ ID NO: 818374 - DNA, 595 bp, Homo sapiens
gcaaatattgctatttctgactgattgcattattaaagcaaagagaaatataattatatacgtgtattatatttcagtggagtcaaatgtaattttyttcatcttgctgtgaaataatatactgtgctttcttggagttacattttattcttttcttttggatgtaaaataattcattttgttttatttccacagtgaataatgtaaagaaaaggttttgccatgttcattcattgtatattatgtataatataaggtattggtactgtttttcagagagttcaaacatcatgctaaacttgcaaatcaaggccaaaagaacattagaaaattttcatctgtcataccaattcaaactgttcaaagataatctaacttccatatctttgcactaatattgtcatcatagtgatttaatagactaattaaccttttccaacaggaaaacatttaagcaagaggtgccataaagaattgaagttgctggaaaatgaaatctgcaagtattcaacttcaaatcatctacttagtcttactttcatgcttagtcttactttcattgactattaacagtttattggcattatctattaca

SEQ ID NO: 818375 - DNA, 613 bp, Homo sapiens
tagtatgactattcttgtatatctctatttactgatgaggatcttactcttttagtataaagagtactactgacttccaatcaattagttttgacatctgaaaaagagtaattaacctaatactagccctagtaatcaacaccctattagccttatcactaatagttattacattatggctcccacaacttaatatttatatagaaaaatccagcccctacaaatgcagatttgacccattatcctccgcctgcattccctcccccataaaattttttctagtagccatcacattcctcctatttgacttagaaatcgccctattacccttgccatgagctcttcaaacaaacaacctgacactaacaatcagcacagcccttatactagttatcattttagtactagggttaacttatgaatgaactcaaaaaggattagactgaactgaattggtagatagtttaagccaaaataaatgattctgactcattagattataatagaacatatttaccaaatgctttctakttatatcaatatcatattagcatataccatatcacttctggggatattaacctatcgatcccacctgatagcatccctaata

SEQ ID NO: 818376 - DNA, 604 bp, Homo sapiens
tcctttaactttagccaatatgttaacacaaagaatttcttttacaagatttaattttttgcaaacctttcacaacttggttaaaccttcagctctataatttaggccaaaagtaatccacattcccatgacttctcgtaatcttttaccaaaaacacattttacttttttctacatacctagcatgtaaaactatttttatttcccaaagattactaaagtcatataaactaaaacatgactttagtaaaatacaccacggtttctatttttctgataaaatattttctttaagctcttattatttttaaacaaattattcaaagctctttcatattgcacacacaacacatataaatacatagttggaagaagaagatcaagtacctttaagatttttcctttgtcagttttttaattggattaccaccctggctttagggtggatgcctcagagaaacagggccaggaaagcaaaaaacaagcagtttctacagcctagtaagtaggcacagctggaaggcaaaacacatccctccaaattaagacttatttttatrctagaacctggatcccaaaaagagaaaattagcccatcttccat

SEQ ID NO: 818377 - DNA, 634 bp, Homo sapiens
ctcctgcctgggccccgccttcaggagaaatttttacatatctctgggccaatcacctagtgatgtgactctccctttctttctaggctcaacttatagaaggcattgtgacagatctctgggttcatcacctaggagatgtgactctacactcccagctgggccaagccccactgaagattgtgacatattaatgagcccataaactatgtgacatgactctgctccctggcctaagccaagattaaaggggacattgagacataatgctttgcctagcacctacatgatgttgactctcttttcctgcctgggctcggcctacagaagaaattgttcatatcactgagccaagatcccagttgatgtaactctcctcctgggccctgctcacaagggaaatattggcatattccttgcctagcactaaggtgatgtgaacttctgcctggtccctgcccatatgtgagattgtgacatacacttaagcccaactcacaggcataatgatgactctcttacctggaccaagacaatagaaaagattttgactcttccaaatagtcttatggtaataggcaatctactgggtcttttacttgtagwaaggtcagagattacaacactcatatgc

SEQ ID NO: 818378 - DNA, 615 bp, Homo sapiens
gccatctactctatttgatgatcaggatgggcatccaattcaaactatgcactaatyggtgcattacaagctgtcgcccgaacaatttcatatgaagtcaccctaaccatcatcctgttatcagtcctactgagaagcggctcattcaatttatatacactcatcacaacacaagagtccctctgactgctcctaccatcatgacccctagccataatatgatttatctccacattagcagaaactaactgagccccttctgacctaacagaaggagaatcagagttagtctcaggtttcaacatcgaatatactgcaggtccatttgccctcttctttataacagaatatatgaatattatcgtaataaatgccctaactactacattttttctaggaacattacacactatatattcaccaaactctatactacatatttcattaccaagaccttcctcttaacctatttttatgaattcaaacagcatatccctgtttccgcaacgatcaactcatacacctcttacaaaaaaaactttctaccacttacactagtattctgtatatgacatatctcaatacccatcctaatctccagcatcccaccccaaa

SEQ ID NO: 818379 - DNA, 613 bp, Homo sapiens
tcaaagagaaaaatgaaaaaaatcactcaaaattctacatactgcattgatttgttcacgtgatgttatggaaaaggcaatggggttggggagtgaaccaggggtttcctggggttaagagttggggaagagtttgactacaaaaaggtaccacaaggggatgtttctgggcgatggaactgttgtgaatcttgattgtggtggtgaagtctacatgacaatgcaattgtcaaaactcagaaatgtacaccaaaaagaataaatttctactataagtagataagttaaaaaataaatgttaaaaaattaaataaggctgttctacaggtacttgtcaaacttttaagtgcacagcaatcaccagctccagtaaaagtgaagcagaaaaagcatttgacaaaatacaacatccactcatgacagaacttttgcagactaaaaatataatggaacttataaaaatgctttcccctatgatcaggaacaaggcagagatgtgtactcttgacataactattcaacactgtactgaaaatcagccagtgtartgaggcaaggaaaagaaataaaaagcatacagattagaaaggaagaaataaaactgaccctatta

SEQ ID NO: 818380 - DNA, 598 bp, Homo sapiens
ataatatctgctttagctgcatctcttacattttgatatgttgcatttaagtcttgattccatttaaaatatgctctaatttattttctaagaagcatttccacttcactgcatctaatttcttttgtractaatttcattggttgcttagaagtatgctgcttaatttccaaacatttggagattgtccagatattttttcttgttcatttctactttaaatctgttatagttagagaaaatactttgatttgaattcttaggaaattaagatttgttttatgaaaaagataacatctgaagtaaaaaaaaattattcgatgggctcagtagcagactggagatgacagaaaaaagaatcagtgaacttgaagataggttagtataaaaatgcaatttgagcaacagagagaaaaaaaattgaaaaataaatgagcagagccttcggaacctgtgggacaatatcagaagtctaatattcctgtctttggagtctcaggaggagaggagagaagtgtttgtttggaagtactagctgaaaattgcccaaatttggtgagagacataaatttacagattccagaaactcgttgaatac

SEQ ID NO: 818381 - DNA, 516 bp, Homo sapiens
gacataatctacatctcaattatgctggaaaagaggctacagaattgctgartaagggagcaatctcagggctgggcacagtggctcacacctgtaatcccagcactttgggaacccgagacgggtggatcacttgaggccaggagttcgagaccagcctggacaacatggtgaaaccctgtctctactaaaaatacaaaattagctgggtgtggtggcggatgcctgtaatcccagctactcaggaggctgaggcaggacaatcacttgggaggcagaggctgcagtgagctgtgattgcaccactgcactccagcctgggcaacagagacagactttgtctcaaaagagaaaaaaaaaaaaaacagaggaaaaaaaaaagagagagcaatctcaggatgacagggaccttctgctatttccactttcgcatgcaagacttgatcttgtatggccaagcctgtggtctaaagaacatgccgttagccaaaatatacaaattaaatcccaattttt

SEQ ID NO: 818382 - DNA, 496 bp, Homo sapiens
agtgagatgggcaatcggcaggccaatattgatgaaaacaattgccatttattaatcacctagtatgtgccaggtgttaacattcatgatttcatctcatctttgcaaacatcctgtgctatttacagatgaagaaatgagactcagaaatgaattcacttgtccagggtcacatggccgcagtgagtcaaggggctctaagtgaaagccgggtttctggttgccaaagctcttttctctggtctgtgcctctattctgggaggaaagaaacacaaagccatatttgatccattatcctaactgacattgtcatcatggccaacatttactgatcactttccatggttccaaacaaacactatatatatagaaaatgaatacatgtatgtttaatctttcyagaagccctataaaccctattgttcccattttacaaaagagacaactgaagcctagagaggttaagtagcatgcccaaagtcacactgctgaaat

SEQ ID NO: 818383 - DNA, 616 bp, Homo sapiens
aagtattgggactacaggcgtcagccaccacgcccagccactgggcactgttcttaagtttcattcctgcagttgaactcagggcatcctcaaaaccacctgtattagtcagggttctctagagggacagaactaatagaatggatatatatatatgtgtgtgtgtgtgtgtgtgtgtgtgtgtrtatatatatatatatatgagtttattaagtataaactcacacatgatcacaaggtcccacaataggccatctgcaagctgaggagcaaggaaggccatttcgagtctcaaaactgaagaacttggagtctgatggtcaagggcaagaagcatccagcatgggagaaagatgtaggctgggaggctaagccagtctagccttttcacatctttctgcctgctttatattctggctatgctggcagctgattaggtggtgcccacccagattaggggtgggtctgcctttcccagcccctggactcaaatgttaatctcctttggcagcaccctcacagacacactcaggatcaatactttgcatccttcagtccaatcaagttgacactcaatgttaaccatcacaccatcctatgaagtagataccactgc

SEQ ID NO: 818384 - DNA, 593 bp, Homo sapiens
aagtgctgagattacaggcgtgagccactgtgcccagccaactccatgttttttaacttggtggcagggggtgagggagtgaggatatctccgatgttctgaggaagcctcagacaacactgtcaactggggtgtgtggttactgacatttaaagattttcctgcccgtcctgtagatgcaatgcagggacaagagcatatttctgcttctcccccagtagtagagaggctcctagtccatgtttttaactcccagtggaagtggttctgcaacagtgctctgtaaattaacggtttagtttatttgttgttgttttgagacagggtcttactttgtcacccaggctggagtgcagtggcacaatctcggcttactgcagtctctaccttctgggctcaagcaatcctgccacctcagcctgccaagtagctgcgactacaggcatgtgccacaatgcccagttattttttgaattttttgtagagacaagatttcgccatattgcttgtcttgaactcctggsctcaattaataagcccacctcggcctctcagagtgctagaattataggcataagccaccgcacctggct

SEQ ID NO: 818385 - DNA, 631 bp, Homo sapiens
gcagagggaatagcacaaaccaaggcaggaagatatggaaggatgtggcatgtgtagaggagtggaggcaatgcagttaagaggagcaagttgagacagcaggggacacagtcaggaaagatcacggagggccctgtgtgtcatgccagggaatgggtgtctagctgcagggggaagacatcttaaatcatgggagattatcacaaggagtgggtggcaaagggaatcctggagatagagattactgtgcccggacctgaaagagctttggggttccaggtggctcaggagcattgcaaaccttctatgactgttctgctgtaagggggaatatactatagcacatccagctgcccatgctctcccaggtctgtgtatgtctgtctctccactggctaataacatgttttgtgcccttagttcaaagtcctcagatgacaaacttgtagttgcctactcatcttttctattaacagcagccacaatgtatggacagctggcagcccagatgattctctctggagctgggtgtycctgcctggttcaatcagctgagccttggttagagggaagggcccagcagggactgtggaaggggtggctcctttataggaaaaataaaaggatctac

SEQ ID NO: 818386 - DNA, 620 bp, Homo sapiens
ttatcacttttgggattacagaggttttaggagctaggtgctaagaactaggacaaagacgaaatatatatctcctactgtattgctctgtaaccagtattttctttaatatcatctctcactaccaccctattctctacactgtctacaattgttcacattgcttctctgagcactattgctctcccctccttgttcttggttctacccacagcagttcttacagagggccccttcctttggtggggtgaaaatttgctggcattgtttgtgctctgcctctgctagaaaatctcactcccagttctttcctacaacacctgccatcatccaacactgtttgtcaaccccctgctattcttcttgtttcaaatgttcttcccctaacttatattttattcagtttgtggatttttcttggtcttctagtttttttgaaggctgtggagagttgtatcgttgttcttgttgtctctattataattcagaattcctctagttctaakttcaagttattatttctgttttcttatcttgtattatccaggagacttcagaatagtttcataaaactaagggctagatctctggtagattgtagaaaactaagggaagcatct

SEQ ID NO: 818387 - DNA, 620 bp, Homo sapiens
ttatcacttttgggattacagaggttttaggagctaggtgctaagaactaggacaaagacgaaatatatatctcctactgtattgctctgtaaccagtattttctttaatatcatctctcactaccaccctattctctacactgtctacaattgttcacattgcttctctgagcactattgctctcccctccttgttcttggttctacccacagcagttcttacagagggccccttcctttggtggggtgaaaatttgctggcattgtttgtgctctgcctctgctagaaaatctcactcccagttctttcctacaacacctgccatcatccaacactgtttgtcaaccccctgctattcttcttgtttcaaatgttcttcccctaacttatattttattcagtttgtggatttttcttggtcttctagtttttttgaaggctgtggagagttgtatcgttgttcttgttgtctctattataattcagaattcctctagttctaatttcaagttattatttctgttttcttatcttgtatkatccaggagacttcagaatagtttcataaaactaagggctagatctctggtagattgtagaaaactaagggaagcatct

SEQ ID NO: 818388 - DNA, 647 bp, Homo sapiens
aggtattatgaaagaggtacatcaatgatgtgagacaccactacccaagtttttacacaagttctgggatagacttgactaactttttccaaatagatttttaattttcaactgagagagataaactctttgaagtctagcccgtggactaacacagaaacataacaagccagttaagatacactggtcggccgggcatggtggctcacacctgtaatcccagcattttgggaggtcaaggcaggagaatcacttgagtccaagagttcaagaccagcctgggcaacatggtgaaactctgtctctacaaaaaaataccaaaattggccagctgcagtggcacacacctgttgtcccagctacttgggaggctgaggcaggaggatcacttcagcccaggaggcagaggtcacagtgagctgagaccacgccactgcactccagcctgggcaatagaccgagaccctgcctcaaaagaagacacagtggccggtggcctacttgtaacactttagaaagcytaatttaaattataaaaaattatttaaaatattcaattatttaaaaaatattatcttaataaaaaatgattctaacataaaagacttaaaatataaaacacactttaaaaaacaaaaaaattgaga

SEQ ID NO: 818389 - DNA, 647 bp, Homo sapiens
aggtattatgaaagaggtacatcaatgatgtgagacaccactacccaagtttttacacaagttctgggatagacttgactaactttttccaaatagatttttaattttcaactgagagagataaactctttgaagtctagcccgtggactaacacagaaacataacaagccagttaagatacactggtcggccgggcatggtggctcacacctgtaatcccagcattttgggaggtcaaggcaggagaatcacttgagtccaagagttcaagaccagcctgggcaacatggtgaaactctgtctctacaaaaaaataccaaaattggccagctgcagtggcacacacctgttgtcccagctacttgggaggctgaggcaggaggatcacttcagcccaggaggcagaggtcacagtgagctgagaccacgccactgcactccagcctgggcaatagaccgagaccctgcctcaaaagaagacacagtggccggtggcctacttgtaacactttagaaagcctaatttaaattataaaaaattatttaaaatattcaattatttaaaaaatattatcttaataaaaaatgattctaacataaaagacttaaaatataaaacacaytttaaaaaacaaaaaaattgaga

SEQ ID NO: 818390 - DNA, 608 bp, Homo sapiens
tattaaagggagctttgaggcctatggtgaaaaaggaaatatcttcacataaaaactagagagaaactttctgagaaacttctttgtgctgtgtgcatacatctcacagagttgaaactttcttttgatggaacagtttggacacagtctttttgtagaatctgcaaagggatattttggagtggtttgaggactatgatgaaacaggaaatatcttcacataaaaactagactgaaattttctgagaaacttccttgtgatgtgtgcattcatctcacagagttgaatctttttttattgagcagtatggagacattctttttgtaggatatgtaaagggatatttggaagctctttgaggcctatggtgaaaaaggaaatatcttcatataaaaactagacagaaactttctcagaaacttctttgggatgcgtacattaatctcacagatttgaacatttcttttgattgagaagcttggaaaccatctatttgtagaatctgcaaatggatatttcagagcggatcrtggcatactttgaaaaaggaaatatcatcacatggaaactagacagaagctttctgagaaacttcctagtgatgtga

SEQ ID NO: 818391 - DNA, 503 bp, Homo sapiens
ttccattgcatgcattcatctcacagagttgaaactttgttttgattgagcagtttggaaacatcctttttgtaraatctgcaaagggatatttgggagacatttgaggtcaatggtgaaaaaggaaatatcttcacataaaaactagacagaagatttctgagtaaattatttgtgatgcttgcattcctttcacagagttgaaccttgcttttgattgaggagtttggaaaccatctttttgtagcatctgcacagggataattgggatacctttgaggcccatggtgagaaagggaatatcttcatataaaaactagaaagaagatttctgagaaactactttgtgatgtgtgctttcacctcacagagttcaacctttcttttcattgagcagcttggaaacaatcattttgttgaatcagcaaagggatatttgaggaggctttgaggtctatactaaaatgtaaatatcttcacataaaaactagagagaagctttc

SEQ ID NO: 818392 - DNA, 607 bp, Homo sapiens
tcaactcgtcaaagtcattctccattcagctttgttccattgctggtgaggaactgcattcctttggaggaggagaggcactctgctttatagagtttccagtttttctgctctgtttttaccccatctttgtggttttatctacttttggtctttgatgatggtgatgtacagatgggtttttggtgtggatgtcctttctgtttgttagttttccttctaacagtcaggaccctcagctgcaggtctgttggagtttgctagaggtccactccagaccctgtttgcctgggtatcagcagcagtggctgcagaacaacagattttcatgaaccacaaattctgttgtgtgatcactcctctggaagttttgtctcagaggattacccggccatgtgaggtgtcagtcttgcccctactgagaggtgcctcccagttaggctgctcggaggtcaggggtcagggacccacttgaggaggcagtctgctcrttctcagatctccagctgtttgctgggagaaccactgctcccttaaaagctgtcagaaagggacatttaagcctgcagaggttactgttgtctttttgtttgtctgtaccctgccc

SEQ ID NO: 818393 - DNA, 190 bp, Homo sapiens
ctgtctcaggttttttgaagatattccatttttcaccatagtcctcaaagggataaaatatatccctttgcagattctacaaaaagagttttttttttttcaccataggctttccgagaaacttcattgtaatgagygcattcatctcgcagagtggaacgtttcttttgattgagcagtttggaaacac

SEQ ID NO: 818394 - DNA, 578 bp, Homo sapiens
aatctgcaaagggatatttttgagggatttgaggactacagtgaataaggaaatatcttctaagaaaaactacacagaagctttcagggaaaattgtttgtgatgtgtgcattcaactyaaggaattaaaatttttatttgattgagcagttaggaaacagtcttttggtagaacatgcaaattgatatttgggagtcctttgagggcctatggtgaaaaaggaaatatgttcacataaatactagacacaagctttcagagaagcttctttttgatgtgtgcattcaactcacagagttgaaccttactttcgattgagcagttttgaaagtctttttgtagaatctgcaaagggatatttgggatacctttgaggaccatggtgaaaaagggaatatcttcacaaaaaaactagacagaagctttctgggaaacgtctttgtgacgtgtctattcatctcactgagttgaacctttcttttgtttgagcagttgggaaacagtcttcttgtaaattctgcaaagggatatttggagccctttgaggcctacggtgaaaaagcaaatatcttcacgt

SEQ ID NO: 818395 - DNA, 611 bp, Homo sapiens
ctttcagagaagcttctttttgatgtgtgcattcaactcacagagttgaaccttactttcgattgagcagttttgaaagtctttttgtagaatctgcaaaggratatttgggatacctttgaggaccatggtgaaaaagggaatatcttcacaaaaaaactagacagaagctttctgggaaacgtctttgtgacgtgtctattcatctcactgagttgaacctttcttttgtttgagcagttgggaaacagtcttcttgtaaattctgcaaagggatatttggagccctttgaggcctacggtgaaaaagcaaatatcttcacgtaaaaactagtcagaagctttctgagaaacttctttgtgatgtgtaaattcatctgccagagttgaacctttattttgattgagcagtttggaaacagttttcttgtaggatttgcaaaaggatatttgggagccctttgaagctcatggtgaaaaaggaaatatgttcacataaaaattgtacagaagttttctgagaaacttctttgtgatgcgtgtattcatctgacagagttcaacctttgttttgattgagtagtttggaatcagtctttttgtagaatctg

SEQ ID NO: 818396 - DNA, 578 bp, Homo sapiens
aatctgcaaagggatatttttgagggatttgaggactacagtgaataaggaaatatcttctaagaaaaactacacagaagctttcagggaaaattgtttgtgatgtgtgcattcaactcaaggaattaaaatttttatttgattgagcagttaggaaacagtcttttggtagaacatgcaaattgatatttgggagtcctttgagggcctatggtgaaaaaggaaatatgttcacataaatactagacacaagctttcagagaagcttctttttgatgtgtgcattcaactcacagagttgaaccttactttcgattgagcagttttgaaagtctttttgtagaatctgcaaagggatatttgggatacctttgaggaccatggtgaaaaagggaatatcttcacaaaaaaactagacagaagctttctgggaaacgtctttgtgaygtgtctattcatctcactgagttgaacctttcttttgtttgagcagttgggaaacagtcttcttgtaaattctgcaaagggatatttggagccctttgaggcctacggtgaaaaagcaaatatcttcacgt

SEQ ID NO: 818397 - DNA, 578 bp, Homo sapiens
aatctgcaaagggatatttttgagggatttgaggactacagtgaataaggaaatatcttctaagaaaaactacacagaagctttcagggaaaattgtttgtgatgtgtgcattcaactcaaggaattaaaatttttatttgattgagcagttaggaaacagtcttttggtagaacatgcaaattgatatttgggagtcctttgagggcctatggtgaaaaaggaaatatgttcacataaatactagacacaagctttcagagaagcttctttttgatgtgtgcattcaactcacagagttgaaccttactttcgattgagcagttttgaaagtctttttgtagaatctgcaaagggatatttgggatacctttgaggaccatggtgaaaaagggaatatcttcacaaaaaaactagacagaagctttctgggaaacgtctttgtgacgtgtctattcatctcactgagttgaacctttcttttgtttgagcagttgggaaacagtcttyttgtaaattctgcaaagggatatttggagccctttgaggcctacggtgaaaaagcaaatatcttcacgt

SEQ ID NO: 818398 - DNA, 575 bp, Homo sapiens
catggcaccctaaaaaactgacagtatttgggttcatactcagtatgtggctcatgaccatgtccctagcacgagtccatctttttgaaagatctagatctagagacaaaacagcaagatgcatgaggcatgatctgcatttctatcatattttaatgacccttcaaatcatccttaaatgatctttcccagacttggtcccagagaagcaaagaaaaatttagcacttaatttgtgaaaagatggcaagcatttgagaagtccaaagaattagggagacaggaaaattgcaccatagaagaaaaaaaaaaatgggaagtgaaaaatgaagggagggtgatggagagaaaagaaagtgagcaaaagcgatcatttacacactaaggaataaacttgtttcacaaaatacttgtttttctccctttgtttattagacatattggtaaagaacaatttgagacaattagtaatttcaagtatcttaaattacagattgaaacaaaaktaatctatagctggttttggcaaatactttttgtaaaggaacagcgtaaatatgttaggctttctggccc

SEQ ID NO: 818399 - DNA, 513 bp, Homo sapiens
actaataagcatgtgttgtactaataatatgtaataaatataactgttaaatttagagacaaagtacrtacatttattcaattaaagtgtttagaccatctattatttattaaatatcactaaatcttagcctaagttaatgatatatgactcaatccccagaggaaaataatataatctagtagaagaattcacagattctaaaattttcagatactgctctaaaacatcaatgacattttcctaaaattaaataatagctcttcccaagtataacactttaaaaaatatgaatcttaatatgatcccaaagaacttatcagactactgagagaggaaaatggcagatagaaggcaggactaaattgcagctcccactgggacagatagagcaacatgtggaaacacatacatctagaacttttactccaggaactgcagaaacacaccaggaaggctgagagaatccacagactctttgaaggaagtggattgctcctacaggccccagga

SEQ ID NO: 818400 - DNA, 452 bp, Homo sapiens
gatgtcttttagtctgggccgaaaattttttatgtgttattcacatttaatttctcagaaagagttcctcaagcttttacccctttgtaaagtggaaccaagtaaggcgaatgataccaattttaggttgtactagcaaatttataagtcacaaaataagttttaaagaagtctctatatgattatgtataaatgttacatcgtgtggtagggaataccagatgactacttcaacagccacatgaatttttatacacgaagatataaaactatgaaaattaaattttaaacattaacatcagtgacatatttaaaattgtttttcacccaatgaagaaataaatatgtaattaactacatagtacttcataaaattacacattctataaaacccaaatatkaaacatttcaaataagtacccatcttcacctgcacattaactaatatgtgc

SEQ ID NO: 818401 - DNA, 642 bp, Homo sapiens
agaaaatatattactaaggattatgctaaattattcgctgaatatactgtatctaccttttagtaatgtgtaaactataaaatgactcctggccaggaaaytattttttaatagtactgattgtataactactgacttaacttatgtgggtagctgaataaagggtcacttaaattaggatgaaataggtaataaatagatctatctttggcaaactcaaattaccaggattatgacatttttaaagtgagaagaaaattaaggctgtctgtatttgcagagtgaagattctagacaaatattttgctatacatagaataatatataattgaaatggctattttcatttttaggatacaaatattttcttaattaaatattgtctctctctctctccaagtggatatatctcatcaatgaaaagaggcaacacactattttccagatatttgaaaatacatatcagctgaaattatcatttatcacataatattgtaaacaatatgctgtttataccattctatttatagtatccagtgtttataataccataatatgtgtgatcatttaataaattctatacagtaatacatttgaatttaaatttaaaaaatatatttaagagcttagaaatgatacgga

SEQ ID NO: 818402 - DNA, 488 bp, Homo sapiens
aaagcatttgataaaattcaacacacttttatgataaaaatacccagcaaaataaaaatgaatgatagcttccttaatgtgataaagaatatttatgaaaatcccwcagttaacatcatactcaatggtaaaagattgaaagcttttctcctaatgtcagaaaagagacaattttgcccactttcaccactgctagtcaacattatactgcaagtcatacatgaaaacagttagtcaagaaaaaaaaacgtacaaaaggaaataactatttctctaatttttagtgatttgattatatatatgtatttttgtaggtacatgtatatatttattttgaatatacatattgtgtatatacatatatgtgtacatatatatagtccaaagaatgcacactcacacacaccactgctagagataataaaaaaaatcagcatagatgcaggataaaagatcaacacacaaaaattagtggtgcttctatacac

SEQ ID NO: 818403 - DNA, 614 bp, Homo sapiens
tgctgcagaggacttgatttcattcatttttatgaaatactgcatagtatttcacggtatatatgtaccacatttttttaaatccagtcaaccattggaggacattcaggttgactccatgactttgctattgtgaatagtgctgcaataaacataggaatgcaggtgtcttttcaatataatgatttcctttcttttgggtagatagatacccagtagtggggttgatgggtcaaatggtagttctacttttagttctttgaagtatctccatactgctttccatagtggttgaactaatttacatccccaccaacactgtataagtgttccctttcctctgcatccatgccaacatcttgttttttgactttttagtaatagccattctgactggtgtaagatggtattttattgtggttttaatttgcatttatccgatgcttagtgatgttaaacattttttcatgtatttttttttgccacttgtatgtcttcttttgagaaacatttttcatgtcctttgtcgagttcaataaaatgtatttaatgccacyatacataagtgtttttcaaatgcccttattgatggtcatttaatcatacatcttctg

SEQ ID NO: 818404 - DNA, 620 bp, Homo sapiens
ggtactagtctagttctagagattcactagtacaaatacacttacacacaccacattagaacatagtacatttaaagagccgtgattattgtaaatacaggggcattttttaagactttggtttttagtgttttaggcttacaaaattgaccagaacttatagagttccaatataccctttttccccaacacatgcagctcttccccagctatcgacatcccacatcatagttacaatcgatgaacaaatattgaataccattatcactccagatccatagtttaacttatgctactttagatacattaaagttcttgatgttgtacattctatgggttctgacaattgtataatgacatttatctaccattatactataatttacagaatagttttactgccctaaaaatcctctgtactccatctattcatcactttctcctgtaacccttggcaaccactgattttttttatgctttccacagttttatcttttctagaatgatagttggaatcatacagcatgtagatttttttcaaattggcttctttcacttagtaatatgaatgtatgtttccagcatgtcttttcatgacytgatagctcacttctttttag

SEQ ID NO: 818405 - DNA, 608 bp, Homo sapiens
tacccattctcatcacttaattctagtgggggagaaggactgctctacctacctgtttccaaattaataatgtgcttcattcctgttatgcttcagaaacaaagccaccgtaacatttccagctgtttggggaagaattttaatattctcaatgctaatataaacagaaccttattaactaagtcccagagatgccccgtttgggatgtaatccaagccctggtaccaatgccaacgttaacatttgaaaatacctcatgtgcatacttcatttgaacaattacagcaatataagctttcctctagaaaaatggaaagaaaaagcaaagataatgctgcaccacactgagaaagactgcttaatcccaacttggataatggctacagtaaacggtacacactgtctcttcttcatcattttcataccaatactctatcaactctgaggggcctatactaaaaatacacccagctytattccatgcaggggaaaataaaatgagaaaacaaaacccatgagacttaaatgcacattgaaactgcaccccagcaagccacacaactctcagtccaaccgaggcccagatgtggcactggtaccaagtctc

SEQ ID NO: 818406 - DNA, 519 bp, Homo sapiens
gttaacaaaattactattacttactgctatgaaccagacattgtattatctcaacttatctccccaacctataaaaaagagattatttttatttctattttacaaaggaaaaaaactgaagcttggaggggagatatatgttggccaaagtcacagagctggcaagtggtgcagccagaattgaaacccaagtttgtctgaatcaaatacagagcccacctccctagagtaccaatgccaaggcacaataaaaaacatccagacaccagaaagtgatgtcacttctacaaggctgaatccccccttacagaagcatgtggctccatcattcatttagaaagaaaggatcatgtttatctgcttcaccagtatttctctacagccaagcagacttgtggcacattgcaatcactcaacaacaacgatgtcagatgactgattgaataagcatgtatcagtagctgtggtctatamcttcaaaccaattgggataaataataagacaaaggcatgaaaaga

SEQ ID NO: 818407 - DNA, 617 bp, Homo sapiens
tagcattttggctataatatacctaagtgcagatttctttgtatatatccttctttgagtttgctgagcttgctgtatctataaattaatgttctcgccagttttaggaaatgttaggccattatttcttcaaatatttttcctgtccgactttcctcttctttctctgggattcctattacacatatattagaccactttatattgtcctggaggaccctgatactctgttgacttttttcctacttttttctctttttcagattgggtaagtttttattgatgtaagtctagattgagtgactttttcttctgccatttccaaactactctggactccatctgataaaattttcatttcagatagaattttcatttttaaaatagtttccatttttctgctcagaatccccaatttgcgtattatgtctccatttcctttaggtctctgaacatatttataacatggttttgaagtacttgtctcctaattctcacatctggatcatttcagggtcagtttcatctaattgtctaataaccatgacctagacactcctgtttcttcacatrcctagcgatttgtattgtatagaacatactgttggccacaaaga

SEQ ID NO: 818408 - DNA, 567 bp, Homo sapiens
tatattacatatattttatatatatctctctaatatattatatatctctaatatatattacatattatataatatatatatctaatatayaatatatataatattcctagagtatatatatctctaatatataatatatacgctattcctagagaatggataatttggaggtgggaaaatacttcaaagaatatcaacatcagaagtagttacatgaggcaagaaaatacagacttcttaaaatgggatcacttctactttaaatattccaggccatatatatatatgggatatggggcatggaacatgtcagttgaaatgcagcagtaaacctaatgctttacacaaactatactcagggcatcccatgttgcccaggagcctctaaactctctctccaggtaaggctgactaccttgcctgccaacatgaccccacacttgggtttctttgggctccaacggaagtaattgcttaggctataaaatcatcattgctttcatctacacattttttatgatttatattttgtgtcatgcttcccctggtttttgtcttacttgtaac

SEQ ID NO: 818409 - DNA, 618 bp, Homo sapiens
tacaggttttgcacctccttggttacatctattccccaagtattttatttcttttgatgctgttgtaaatgggattgttttctttatttcatatttgaattgttcattgctagtgtatacaaatgccactaatttttggtggggttatcttgtatctacaactttgctgaatttgattattagctctaattttttttgtgcattctttagaattgtctatatataggatcacgttatttgtgaacagagataatcttacttttcctttcccaatttggatgccatttatatccatttcttgcctaattgctctggatagaacttccagtacaccgttgaatagaagtggcagaagtgcacatctttgtcttattcctgatctcaggatgaaagctttcagtctttcaccattgaaggtaatgttagtgtaatttatgcaattttaataagtgccctttaaacgactaagttccctctattcatagttytttgcatttttaaaaaaatcataaataggtgttagatttggttaaatgcttttggtgtatcaattgagatgattatgtgcgattttctcccttttattctattaatgcagtgtattacattgattggttt

SEQ ID NO: 818410 - DNA, 581 bp, Homo sapiens
gggaacattctaagtatgctcctatgatgcatattgtacctaacaagcagtggattaaggggcttcattaggaagacatggccaattcataggaggcattaacacatctctacttgtctttgtaaggaacattttgataaattgcttaggatgaggggcagagtaaatacttcactgccccccaacctcaaacaaagggtaggcccaaggaacgacagatgacagatgaccagtaatttgccatcaaggggatgggactggcaggtccacctatccatcaagtggctatttcactgcatggtctgtgcctatttggagcagaattgctgaagatgatagagaggagaaagactgagatcaaccaggagcaccatccttttcctctgtttcctcataagtgcatggccttttcacttaataaatgctgttcaaatttgcaaagaagatttgcttgataaaattccaaattactacattttttargatactcttatgtcttggtctggttctgaccacagaatacattttcctggggctgaatgttaccccgtcatattacctagttctgctagttctaggct

SEQ ID NO: 818411 - DNA, 464 bp, Homo sapiens
agtgcatgtcattactttagggactgagtcaatcagatttgtagttgagatgatctgagcattgttagattcagtttagcacaggcttcaagtaattcgaatgtatgatcagacctcctacatatctgagtgtctggaggttttcctgtcctgctatcagatttcggcagactcttctacgttggaccccacagagggctctttcagttcccctgcttctgcccagatacctgctgctgataatcagtctaaagcccagagtgctcgggctttttactcagttctccttctcttcccttagacttcaacaggtccaaagcacctgtccctcamggggaagcagatctctctcagcactcctgccactatctcatgtttgtggtatcggtgccgcagagggaagtcttttttggctcttttgttctgccccaaaactttcttgagtacacatgatgaaggcctat

SEQ ID NO: 818412 - DNA, 464 bp, Homo sapiens
agtgcatgtcattactttagggactgagtcaatcagatttgtagttgagatgatctgagcattgttagattcagtttagcacaggcttcaagtaattcgaatgtatgatcagacctcctacatatctgagtgtctggaggttttcctgtcctgctatcagatttcggcagactcttctacgttggaccccacagagggctctttcagttcccctgcttctgcccagatacctgctgctgataatcagtctaaagcccagagtgctcgggctttttactcagttctccttctcttcccttagacttcaacaggtccaaagcacctgtccctcacggggaagcagatctctctcagcactcctgccactatctcatgtttgtrgtatcggtgccgcagagggaagtcttttttggctcttttgttctgccccaaaactttcttgagtacacatgatgaaggcctat

SEQ ID NO: 818413 - DNA, 622 bp, Homo sapiens
aatatgaatgttaaataggagtggctttgttgtatttttgagacttctgaaccacttttcggmttcactcacaatcagttaatacactaatcagttgtattttgagacatctaatatgtatgggagaagcaaaatccctgtgcaatcaaattgggtcatcttgaaatataaaatataaacaagtgttaaatggtgtcatgaatcaggaagtactaaatgaattcagaggagtaagtcagctacaacacttgtagagacttcaagatcacctgtttttgatgagtgggcaaaaaagatattggaaggaaagaaagaaatttcaggtggaggaagaggctgagccttggagacataggcctggttaagaatattctccagaagtgaaagggattgttctctctagagtttaatgggaaatgattttagattgtttgagtgagggcagagaatgaaggactttgaaatcctggtagtgaagggatctataatagtagcctcttaaagtgaactcttgtaaaatcttcagcaggtacatgaaaactgtatgtgagaaatcttgacatattggattggaattaagagaaactaaggtcataggacctcacagtcaggcagaggattg

SEQ ID NO: 818414 - DNA, 589 bp, Homo sapiens
agagagattatgcaatatagaataaaataaaaagaaatatcaggggtcmcactgaaggtcacagtggtttcctctaaccatcttcttccttagaccccctgtgctctgtaataagaaaaaattcagggcctacaatggaggcataactcaatcatttaacattataggttgagtactttctatgcactaggcttggtattagtcaacacagctaaaacataatttggatatcatctctgtcttgaagttgttcataatatagagatattagcagttgtggtcacaaaatgtgacaccacaaagagaaaattctaaatgttatggcatcgtcagcaataggcaagcagtagaaacaaagactgcatcacagtgtccagattgaagaatcagaaaggaagtttgcattaaaaaccaagtagagcagttttctacttatcagaaagcctgcagtactgctcaacttttaattgaaatgtctgttttcagcatcactctccatatagcgggaattctccctgaaggaagtatgaaatcaaagtttagatttaaaaaaaaaatcaagaattcccatggaagagatatagtactc

SEQ ID NO: 818415 - DNA, 608 bp, Homo sapiens
aggtgctttaaatttaataacaagttgtgaaatataatagagattgaaatgttggttgtatgtggtaaatgtaagagtaatacagtctcttgtactttcctcactgttttgggtactgcatattattgaatggcccctatcattcatgacatcttgagttttcttgaaaagacaatagagtgtaacaaatattttgtcagaaatcccattatcaaatcatgagttgaaagattttgactattgaaaaccaaattctagaacttactatcagtattcttattttcaaaggaaataattttctaaatatttgattttcagaatcagttttttaatagtaaagttaacataccatatagattttttttttacttttatattctactctgaagttattttatgcttttcttatcaatttcaaatctcaaaaatcacagctcttatctagagtatcataatattgctatatttgttcatatgtggagtgacaaattttgaaaagtagagtgmttccttttttattgagatgtgacagtctttacatggttaggaataagtgacagttaagtgaatatcacaattactagtatgttggtttttctgcttcattc

SEQ ID NO: 818416 - DNA, 543 bp, Homo sapiens
tatattcctttaggtatatacccagcaatggggttgctgggtcaaatggyatttcttttgttaggtctttgaggaattgctgcactgtcttccacagtggttgaactgatttacactcccaccaatggtgtataagctttctttttttctccacaaccttgccaccgtctgttattttttgactttttaatagtagccattctgactggtgtgagatggtatctcattgtagtttcgatttgcatttctctaatgatcattgatgttgagctttttttcatatgattgttggctgcatgtattgtcttattttgaaaagtgtctgtttgtgtcctttgcccactttttaatggggttgctttttgcttataaatttaagtttcttgtagacgccagacattagatctttgtcagatacatagtttgcaaaaattttctcccattctgtaggttgtctcttcactctattaatagtttcttttgctgtgcagaggctctttagtttaattagatcctgtttgtcaatttttgcttttgttgcaa

SEQ ID NO: 818417 - DNA, 528 bp, Homo sapiens
ttcgtgaagccaaaaatgttctgcgcaggaaatgctcaaggagagaaggaaacacacacacacacacacacacacacacacacacacacacacaatacytttaagggtaaacaaactgtatcccacgtaaatggcaatgcagatataataagcaaatgatataataagcaagttgcaatgggacggagagaagggaaaagagatatatatatttacactcatcagactatggaggattcaccaccagactgcgaagcaacagactgggctccagagttggccacttgtccgtgaacagatgagaagagatctcatgaagttttggcacagtctggaactctagctctttttgtaatgagttatctggcatgacgtccagtcaggagggcccttcatttctgggctcaaggaaaagaaaaaggtcaacttgtttttttgattgtctgttgtttttcagtaactaacatataggaataaattgaaatagagatttatccgaaacagcgctggatgaaagcctcaaggggc

SEQ ID NO: 818418 - DNA, 393 bp, Homo sapiens
aatttaaaaaatgcaaaagatcttaatagatgtttgtcaaaaagagatacaaaaatggctaactggaacataaaaagatgctctacattactaatcaccaaggaaatgcaaatccaaactgcaatgaagtaccrcctcattcccattagaatggctataataaaaataaataaataaataaatcaagaactaatgaggatataaaaaagagtggatgtataccttgttggtggaattgtaaattagtatggccattatagaaaatagtatggaggtttctgaaagaaattaaaaatatatctattatatgatccagcaattttacttctgggtgtatatccaaaagaaaggatattactgtgtcaaaaagatatttgcattcccatgttcatt

SEQ ID NO: 818419 - DNA, 462 bp, Homo sapiens
gaagggtgaagcttcattacaactggtcgtggcaataatttgggggacgtarcatcaacggatgagacaacaaaagcaagggaatacacatggtactgaatcagtgtatgaaaaatatcccaaacagacaaagcagaacatggaatagatatatgcacattgtagtattactcacaaacatgttacctggaagcaaatgtacccttaaggatgagtagattcagcaaacaaggcacgtacaatcactgggatagcattcagccttaaaaataaggaaatcttgaaaagtactacaataaggacaaatcttcaaaacattctgttaagtaaaataagacagtcaaaaaggaaagctgtataattacactcatgtaaaacatttagtcaaactcaaagaaaccaagtgtcgtagtctcagcagtgcaccaagatgtaacagtctctcgtagtctgagataacat

SEQ ID NO: 818420 - DNA, 462 bp, Homo sapiens
gaagggtgaagcttcattacaactggtcgtggcaataatttgggggacgtagcatcaacggatgagacaacaaaagcaagggaatacacatggtactgaatcagtgtatgaaaaatatcccaaacagacaaagcagaacatggaatagatatatgcacattgtagtattactcacaaacatgttacctggaagcaaatgtacccttaaggatgagtagattcagcaaacaaggcacgtacaatcactgggatagcattcagccttaaaaataaggaaatcttgaaaagtactacaataaggacaaatcttcaaaacattctgttaagtaaaataagacagtcaaaaaggaaagctgtataattacactcatgtaaaayatttagtcaaactcaaagaaaccaagtgtcgtagtctcagcagtgcaccaagatgtaacagtctctcgtagtctgagataacat

SEQ ID NO: 818421 - DNA, 639 bp, Homo sapiens
ttgtttgcagatgacctgatcctacatctagaaaacctcattgtctcaggcccaaagcttcttaaggtgataagcaacagtagcaaaatctcaggatataaaatcaatgtgcaaaagtagctagcattcccatrcacaaacaacaggcaagcagggagacaaatcatgaatgaactttcattcacatttgctacaaagagaaaaaaatacctaggaatacagctaagaaagaaagtgaaggacctcttcaaggagaaccacaaacaactgctcagagaaatcagagtggacacaaaacagatggagaaatattccatgctcatggagaggaagaatcagtatcatgaatatgggcatatggccctaagtaattcatagattcaatgctattcccattgaactactgacattcttcagagaattagaaaaataaaaacttttaaagttcatatggaaccaaaaaagagcccaaatagccaagccaaccttaagaaaaaaaaaaaaagctggaagtgtcactctacctaacttcaaactatactagaagagtacagtaacaaaaacagcatggtactggtatagaaacagacacatagacaaatgaaacaaagtagagaacctagaaataaagccaaaaac

SEQ ID NO: 818422 - DNA, 639 bp, Homo sapiens
ttgtttgcagatgacctgatcctacatctagaaaacctcattgtctcaggcccaaagcttcttaaggtgataagcaacagtagcaaaatctcaggatataaaatcaatgtgcaaaagtagctagcattcccatgcacaaacaacaggcaagcagggagacaaatcatgaatgaactttcattcacatttgctacaaagagaaaaaaatacctaggaatacagctaagaaagaaagtgaaggacctcttcaaggagaaccacaaacaactgctcagagaaatcagagtggacacaaaacagatggagaaatattccatgctcatggagaggaagaatcagtatcatgaatatgggcatatggccctaagtaattcatagattcaatgctattcccattgaactactgacattcttcagagaattagaaaaataaaaacttttaaagttcatatggaaccaaaaaagagcccaaatagccaagccaaccttaagaaaaaaaaaaaaagctggaagygtcactctacctaacttcaaactatactagaagagtacagtaacaaaaacagcatggtactggtatagaaacagacacatagacaaatgaaacaaagtagagaacctagaaataaagccaaaaac

SEQ ID NO: 818423 - DNA, 454 bp, Homo sapiens
atgccatttttaataaatctgttgtgcttcaattcagaagtgtgtgaggggagttgtggaggaattggcatttgggttagaaattccaggaacaacagagacagatgacacctgttttctgcttcataatgtcaagttttatgaaggctaaaacctaattctacaaaaaaaattagactgaaaaactttataggcaaaaattatcttattaaataggaaaatctaattattttattttaaaattttcttttccttagtaggacctaatcatagaaatttaaacactgtatgccaacagcctctactgtaggatggtttattgtaagtactcattttacagatttcttacaraaactttttccgtaagagaaattagaatattgttcaacatatattgaattcacaattattaccttatttctcacttattattttatgattctgttttctttaa

SEQ ID NO: 818424 - DNA, 634 bp, Homo sapiens
ctgttataaccacattcaaaaccacttgagtagtaactccttacatacacgatgtacataagcacactctagaacccagcaactctgctastaggtatatacacccaatagaattgccagcatattttccaatgtagtaaagtgctcgaagtagcattatttggtacttttccaaactgaaaaaaactcaaatgtgcatcaataataaaataaataactaaaacagctacatattcctttataaggggacattatacagatataaaattaattggagacatattaaaatatacaaaaatctaacaaatacaatttaattagatttaaaagtcctatccagagcaatcggccaatagaaaagaaaaaggcatacaaatagaaaaagaaattgaattctctttctccatttgcaatatgagtcactacgtagagaatgctaaagcctctccaaaactacttttggggaaaacttgaaaagcctcctgaaacggataagcaagtaaagttttaggacacaaaaccaatgtacaaaaatcagtagcatttctatgcatcaacaactttgaattcctgaacatcttctggttttattgcattttcaattttttccctccattaactatacattttttct

SEQ ID NO: 818425 - DNA, 614 bp, Homo sapiens
gtcagttttcaaaaatgttaatgattgcatagtggtattcaattgtagttttcatatgcattgttctggtgcataaggatgtggatgtgttcatctacttgttggcccttcggttctgtatgtggaactccwagtcacatgtttgccaattttgttcaatgtattgcatctttgtttattaattgatgggatttagttaaataaactagataaaagtcttttgccacataaatatatgacatatgttgatttccactttgttcttgcctttcagctctcctgaagctttttttttatgaagagaaggttttaattctaataaagtccaatttgtcatatttttgtcttgagaattaatgcattttgtgtcccgagaaatctgggcctgtgccagtcatggacatatttatctatgttatctactagaaatattgttttcagctttgaccttaaaatttaaaatccacttttcattggaatttgttaataatataagataggagtgttttttctcacataaataactggttgactcaaggctatttaccgagaagactgtcttcactcctcttctgtgccttttttgtaatatacaaaatgtccaaatgtgtgag

SEQ ID NO: 818426 - DNA, 614 bp, Homo sapiens
gtcagttttcaaaaatgttaatgattgcatagtggtattcaattgtagttttcatatgcattgttctggtgcataaggatgtggatgtgttcatctacttgttggcccttcggttctgtatgtggaactccaagtcacatgtttgccaattttgttcaatgtattgcatctttgtttattaattgatgggatttagttaaataaactagataaaagtcttttgccacataaatatatgacatatgttgatttccactttgttcttgcctttcagctctcctgaagctttttttttatgaagagaaggttttaattctaataaagtccaatttgtcatatttttgtcttgagaattaatgcattttgtgtcccgagaaatctgggcctgtgccagtcatggacatatttatctatgttatctactagaaatattgttttcagctttgaccttaaaatttaaaatccacttttcattggaatttgttaataatataagataggagtgttttttctcacataaataactggttgactcaaggctatttaccgagaagactgtcttcactcctcttctgtgccwtttttgtaatatacaaaatgtccaaatgtgtgag

SEQ ID NO: 818427 - DNA, 377 bp, Homo sapiens
ggattcagataagaggatctttacttggctgtaaactgggttcagaaataagtcactatcccmactgtgactggatgttcacatgtggtagttacaattccagctgtggacggcattcaggtatgaggtttagacctccctaatcacctctgttcctgtgtaggaatgacaattctgatgattggtgggtgtgcacacagagaacacaatctcacctgtgttctgggccctgtgatgacactgtaccatctgagtgctttacaggatatgcaagagtgcttattttctctgaccttcatagtaagagaagacccataattttgcacattttgtaaagcctggatatgagacaaagtatctctcctattggttggttt

SEQ ID NO: 818428 - DNA, 445 bp, Homo sapiens
tctttacttggctgtaaactgggttcagaaataagtcactatcccaactgtgactggatgttcacatgtggtagttacarttccagctgtggacggcattcaggtatgaggtttagacctccctaatcacctctgttcctgtgtaggaatgacaattctgatgattggtgggtgtgcacacagagaacacaatctcacctgtgttctgggccctgtgatgacactgtaccatctgagtgctttacaggatatgcaagagtgcttattttctctgaccttcatagtaagagaagacccataattttgcacattttgtaaagcctggatatgagacaaagtatctctcctattggttggtttaaggtatgaatgtcatcatcacacctacatgttaggccaaaatatatgtgacaatctcacatttgagtagtcagcaagcaggagg

SEQ ID NO: 818429 - DNA, 377 bp, Homo sapiens
ggattcagataagaggatctttacttggctgtaaactgggttcagaaataagtcactatcccaactgtgactggatgttcacatgtggtagttacaattccarctgtggacggcattcaggtatgaggtttagacctccctaatcacctctgttcctgtgtaggaatgacaattctgatgattggtgggtgtgcacacagagaacacaatctcacctgtgttctgggccctgtgatgacactgtaccatctgagtgctttacaggatatgcaagagtgcttattttctctgaccttcatagtaagagaagacccataattttgcacattttgtaaagcctggatatgagacaaagtatctctcctattggttggttt

SEQ ID NO: 818430 - DNA, 630 bp, Homo sapiens
ggattcagataagaggatctttacttggctgtaaactgggttcagaaataagtcactatcccaactgtgactggatgttcacatgtggtagttacaattccagctgtggacggcattcaggtatgagrtttagacctccctaatcacctctgttcctgtgtaggaatgacaattctgatgattggtgggtgtgcacacagagaacacaatctcacctgtgttctgggccctgtgatgacactgtaccatctgagtgctttacaggatatgcaagagtgcttattttctctgaccttcatagtaagagaagacccataattttgcacattttgtaaagcctggatatgagacaaagtatctctcctattggttggtttaaggtatgaatgtcatcatcacacctacatgttaggccaaaatatatgtgacaatctcacatttgagtagtcagcaagcaggagggtctcatcacctgggtcattgtcagggatacgtcacattctcccctgaggacagggacaaggcaagaaagtcacatccctaggtattctgccagggatatgttcttgttccctcctgaaagcatgacacatgcagcagagtcacctcacctgggttctgggtccagcg

SEQ ID NO: 818431 - DNA, 427 bp, Homo sapiens
aagcccaggtatgagagtcaacatctctccagctggctggattcagataagaggatctttacttggctgtaaactgggttcagaaataagtcactatcccaactgtgactggatgttcacatgtggtagttacaattccagctgtggacggcattcaggtatgaggtttagacctccctaatcacctctgttcctgtgtaggaatgacaattctgatgattggtgggtgtgcacacagagaacacaatctcacctgtgttctgggccctgtgatgacactgtaccatctgagtgctttayaggatatgcaagagtgcttattttctctgaccttcatagtaagagaagacccataattttgcacattttgtaaagcctggatatgagacaaagtatctctcctattggttggtttaaggtatgaatg

SEQ ID NO: 818432 - DNA, 427 bp, Homo sapiens
aagcccaggtatgagagtcaacatctctccagctggctggattcagataagaggatctttacttggctgtaaactgggttcagaaataagtcactatcccaactgtgactggatgttcacatgtggtagttacaattccagctgtggacggcattcaggtatgaggtttagacctccctaatcacctctgttcctgtgtaggaatgacaattctgatgattggtgggtgtgcacacagagaacacaatctcacctgtgttctgggccctgtgatgacactgtaccatctgagtgctttacaggatatgcaagagtgcttaytttctctgaccttcatagtaagagaagacccataattttgcacattttgtaaagcctggatatgagacaaagtatctctcctattggttggtttaaggtatgaatg

SEQ ID NO: 818433 - DNA, 548 bp, Homo sapiens
aaggtaaggtgcctacatagggtaataccctcctcaatgctcagccmagacctgtcctccaggtccacctctgtactcactctctgtggcaaagagtcggcatagcataagaactcagcaatgctttggacactgggaagtccacaccgctctgtccctccctccaggtctatgcaccccggatcccggtatatgctgagattatggttctgaagcccaccgacaaataggctgagagcagttaacggactacagctcccagcatattaggtggggcatgtacaactttgccccttcttccagggctatgccttaccccggagactggcgcatgctgggattgtagtcctgtagccatttgaccaaagggctgggagtgtttatgagaatacaactcccagcaatcctagggaggagcacacagccccgcctcttcccccagtgatacgcattgtccctgagacaggtgcatgctaagattgtagtcctgaagctctgcgaccaaagggctgggagtgtttatgagcatatatctcccagcaagccta

SEQ ID NO: 818434 - DNA, 535 bp, Homo sapiens
taatccatcttgaattaatttttgtgtaacgtgtaaggaagggatccattttcagctttctacatatggctagccagttttcccagcaccatttattaaatagggaatcctttccccatttcttgttttwgtcaggtttgtcaaagatcagatagttgcagatgtgtggcactatttctgagggctctgttctgctccatttggtaccagtaccacgtactctgatttggtaccagtaccatgatgtgctgctataaagacacatgcacacgtgtgttcattgtggcattattcacaatagcaaagacttggaaccaacccaaatgtccaataatcatagattggattaagaaaatgtggcacatatacaccatggaatactatgcaaccataaaaaatgatgagttcatgtcctttgtaaggacatggatgaagctggaaatcatcattctcagcaaactatcgcaagaacaaaaaaccaaacatggcatgttctcactcctaggtgggaactgaacaatgagaacacttggac

SEQ ID NO: 818435 - DNA, 593 bp, Homo sapiens
atttattcattgatgataattcaaacaacacgggtaattcacaaaccttttgggtgatgtgagtaatgctgccatgagcctaggtgtacgtgtattattttgtgtctttgctttcacatcttttgctayatacccagatgtgaaattgtgggatcatatggtgacttttggtgtacattttttagttattatactgttattttatagcagctgcaacattttacatttccaacaacagtgtacaagggttctaattgctccacgtcctcaccaacacttgtgattttctgttttgttttgtttcttttggtagtaactatgctgatgtgtattaagtgatatatcatttggagttatatttgcattttactaatgattagttttgttgagcaccttttcatggacttattagccatttcacataatttttaaagaaatgtctgtttaagtattttgcccatattttaaacaagtattttgttttattattgctgaattgttctttgtatattctggatagagtcctctttatttttcttttgtttcttgcattttttgtgtcctgttaaaaaaaatcactgcgaaatccagcg

SEQ ID NO: 818436 - DNA, 509 bp, Homo sapiens
ttttccgatttttttgcaggatcacatttgaaatcataggactgaaaattatgaagcagaaacatttgtccttggtgtttctgaaatatgtgaaccaaaccccaatgcctgcacttttactctcacaaacttctgacatgaggaacagatttttacaaaatagcttaatatagaagtctcgcaaaatgtgcagatttccccagatcccccaaaacaatggaaaagcactcagaccacaaggccttcaagggaataacagaaagaagaggagaacttcggctgtcactgtgaatgccctggaatgttagtggagggacaggaggagccttagaagatttaggagcataataagcatagggtaggaaatgtccatctgtggcagcaaaagaagtaaatctaggatyttccagaaccaatttcattgaagcgaacttcccacatcacatttttaaagtttcctccttggcctttgcacctctcatctttgttatttgttcattattgcctat

SEQ ID NO: 818437 - DNA, 343 bp, Homo sapiens
gtctgcttacggaagctctgaaagactagggtgtgatttattaacgcccaacttctattattgtgtgttaagtttttcatctgtgcatcaaatcacaaagaataaatagaacttttccctttatcagtcccttargcacagcaggtcctgaacaccctgcttatatgttgcatcagcagttcaaatatgaaaataaaaaccatgaagaggaaatccgcatcctgtgactggagtcccttcagtctacagggactggttaccgctttttgctaataggaagattacattactagaaaatgtggagtaaactgtttgcctgtggtaaacacctgcatgcaaagga

SEQ ID NO: 818438 - DNA, 678 bp, Homo sapiens
catgataagaatctcaccacatatgtgctggcctaagtgatacatcatcatccccactgtggacaggtcgcagtaagaacaggagagtcacatcattcttataatgggctcagatatacatcacaatgactcccctgggcagaaagaagggataagagtcacatcacctgtgggctaggcccagagatgtcactcttacttctgtgggcatgtctcaggctggagaggagaatcacattacctaagcactggaccaagaaatacgtcacagactttctcatgggcaaagtccaggtaagagaatagagccacatcaaatagttcatgggctcagagatatgtcactatgctccctgtgggcagggttcaggtaggacccttacattaccttggtgctggttcagcaatatgtcccaatgccttctaaggacagaacaaagacaaaagagtaaaatcattttggtgttttacccatcgatatgtcacaatcttccccgtgggcagaacctgaaaaaagggaagagtcatattagctaaatgctgcgcctagcgataagtcamaattcaccctgtaagcagggactagacagaagatagagttacatcatctggtggctggtgcagggatacgccaccatgccctctctaggcaggatccagacaggagagctatgttgc

SEQ ID NO: 818439 - DNA, 599 bp, Homo sapiens
tttgttagagtaattgcagagattttgcaactgtttatacagcatttgaaatcctagacttttactcccatgagactaccatagtcagactgtttacgtctcttagcagtagarcgagagtcactttattatcttaaatgtgagctcccctcatcttgccctatttcctgatcaccaagcttcaccaagagattggaagagacattaacaattgaggagactggggaattttaggtagcccattgtcactaaggtatagctattttccagaaaaaaaaaattctaaagaagcaaaatatctttaacaaacttattcatgcttacaccaaattaaaggggggaccatggcaaattctattctacagttcgttgtcccagagccttgacaatttggaatgcaggctgtgcccggatggcaggaatttggaatcagtttacaatgtgtgatatgataacacatgttctggatcagcggcaggggaatgtttggagccgtaattctgtccgtctccccattagcaggaagccatgctaaactcacagctggagaagtgcctaaaaagaactaggttctttgtgtgtgtgagagagtgtattta

SEQ ID NO: 818440 - DNA, 515 bp, Homo sapiens
ggtggctcatgcctgtaatcccagcactttgggaggctgaggcgggtggatcacctgaggtcaggagtttgagaccagcctgaccaacagggtgaaaccccatccctactaaaaatacaaaaattaaccaggyatggtggtgggtgcctgtaatcccaactactcaggaggttgaggcacgagaattgcttgaacccaggggactgaggttgcaggtgagcggagatcgcaccactgcacttcctcctgggtgacagagcgaaaaaaaaagcacacatgcaaatttcagaataatgggatcaaaatgccttccaaaaatttcggaagctttttctctgacaatactgaacaaggccaagtccaagtggtatgaagcaactctcaataagatgcctggcacaggaccagccgttgcttccttcctaatgtctatactcatcaagccacatgaacttgtggcttgatacttgaataactatttttaaattatttttgacctgcaggtaaaacaataa

SEQ ID NO: 818441 - DNA, 645 bp, Homo sapiens
tgtcagggtgaaagatattgtggataatcagggttttaggtaatatatcgcccattcactatatcttggggaatgtttgataaaggagttgaaataaacaacaaattagaagagagacttcaggtcagggagatrtaaggaaaacaagatatggtattgtgtaatagccctcataaaatatgtagaagttttcttaatcaatattcacataatcagcttattggatttaccagtagtctccactcccttgaacatctgtagtggaaactttgagtacatgaatctgtagcagctagggttctttggttgcaagtaacagaaaccaactctttcttgctaacttaagcaaaacgggagatttttggaaggcagcaggacagcaaaaacaataggctcagagaccaaactcagaaatggctggagcaccaggctttgcaccagggaacacttatggatctttatggtgtcaggaacacccagctttcttttctgggagctactccttgttaaaatgggtctactctttttcaatctgtttgtctttctggtcaaggccaaaagtgtagggagggagcccatagatccccagttcatgtgcctgctccttgactgagggagagtggcacaacttgatcaaagtcctac

SEQ ID NO: 818442 - DNA, 441 bp, Homo sapiens
atctcttaacttctgtagtcttgtgatcttccccctttttctacccccaccccccacattccttgttgcagtacatggcactacctccatccccattttcctctaaaaatatgcaaatggtcctcccccagcctctccccgatacttgatccacatgcaggtgccgtcaattttgcctccaatatcacttatctctatccatctctcttccccttgacttccaggctccactctatgttgagccctgataacctgcttgctgttctcccaggctaataacaccaacctccagggccttttgacaaggcaaatccaaccatctcgtttctctacttaarccctttggtaattccttaaggcggcttgtaatgcagttctctttgaatttcttaaaaaccacaaggtttttccatccttaaaagcttttgcatgggcaatctg

SEQ ID NO: 818443 - DNA, 640 bp, Homo sapiens
cttcatccctgttgttacatgggtcagaacttcattctttttatggccaaataaaataattgcattgtatgtacatatcacatgttgttttatccattcatttgcggttggacccttacatkgtttccacctttgggcatcgtgaatagtgctggggagcatattggccaaaaaagcatctggtcaagtccctgcctttatttccttaggatgtgtaatgaagagtagaatcactggttcatatggtaattctgtgtttaacattttgaggaaataccaaactgttttccacagtggctgtaccattttacatgccagccagcaatgtacaagagttccaatttctccaagtgttagtttccttaaaaaaaaaattactgtagccactctagtaggtatacagtagcatcccattgaggttttcaattcactttttcctagtgacaggggatgtcgggcgtcctgtcatgtacttattgactacgtatatatcttgtttgtagaaatgtctatatttatcccaacacatcctttgcccacttttgagttgtccttttgttgttgagttttaggagttatttatatattctagatattaagctcctctgagatacacaatttgcaaatattttatttcatt

SEQ ID NO: 818444 - DNA, 640 bp, Homo sapiens
cttcatccctgttgttacatgggtcagaacttcattctttttatggccaaataaaataattgcattgtatgtacatatcacatgttgttttatccattcatttgcggttggacccttacattgtttccacctttgggcatcgtgaatagtgctggggagcatattggccaaaaaagcatctggtcaagtccctgcctttatttccttaggatgtgtaatgaagagtagaatcactggttcatatggtaattctgtgtttaacattttgaggaaataccaaactgttttccacagtggctgtaccattttacatgccagccagcaatgtacaagagttccaatttctccaagtgttagtttccttaaaaaaaaaattactgtagccactctagtaggtatacagtagcatcccattgaggttttcaattcactttttcctagtgacaggggatgtcgggcgtcctgtcatgtacttattgactacgtatatatcttgtttgtagaaatgtctatatttatcccaacacatcctttgcccacttttgwgttgtccttttgttgttgagttttaggagttatttatatattctagatattaagctcctctgagatacacaatttgcaaatattttatttcatt

SEQ ID NO: 818445 - DNA, 289 bp, Homo sapiens
ttttctaattcaatcattcctttttcattttctagttggcattcttctgtaaaaaggagttttccctttttctcctctccctttttttaattgaaatttttattgagatatggattcacatgaagctctaagaaataaatatacacacctactgtgtacccacaaaaataaaaatttttaaaaaagaaatagtactgagagatcccttgtacacttttcctagtttcccccaatggtagcattytacaaaactatagtataaaatcaaaatcaggatactgccattgac

SEQ ID NO: 818446 - DNA, 612 bp, Homo sapiens
gaaaaagtaattttttcattttttgtgtgcacataatctgtttaaggagtaaaacacagttttaagaaaaactggaataaggagcaatgaataatggagcaatggaggagartaacttgctggtttttcctccaatgtcaatgtaaaataaaagaaaatcaaaagaccatataatcaggccctaaaaatccttttacaaccatgaaatcaaaatagcacatcctcacccttcaaagtggaaaaagaaaagcaaaggataacagtgaatggacttcctgtcatcttttccatgcttccaaactgaaagcagatacagacacacagtcatgtaatctgataggcaggtatgtcagcctgactgcaacagaatcttaatttttatccaactacaggcactactaaatatgcctcttactttagttctcttaagcagagggtggacactctaaaaatctggacttaccccacagctaatagatttcaaagtaatcaatcactaatcatgactgcatttaactagaaaatgtagagtaactcacctgtaaatcatatggctttccagccctcactaaaaaactcagtaatatactggtatgtgcaaaatggacattc

SEQ ID NO: 818447 - DNA, 623 bp, Homo sapiens
acgttcggatgatagttgttatattctgcttttttaataatagccctcttagtctttcttgctscaagtcatcctcctttaccttcatatctacttcatttccttctccctcctctttgctttcttaagagctgtaatgtaaaacagttagtatttgttatctatatgttaacatataattttatgttttaaaaaaattaaattttattttaatttctgtctatagtatttaaagtactaaattgattttttaatttttttgtgctcttcgagtttaaaatatttttttaaacttacgtggaaccctaggaaagacactaatacagcctcaccacctaggcctgtcatcagctgtcactccccacagcaatagatataagcagtgaggaaaagagaaatgattttcactttttaagctgttccttaggccgctgagagagcctcatcaagacagaagctcataaaaacaaatgggtgctgggtgaggtggcccacgcctgtaatcccaacactttgggaggctgaggcaggcagattgtttgagtccaggagttgagactagcctaggcaacatggcaaaaccccatctctacaaaaaagacaaaaaaaaattaaccaagtgt

SEQ ID NO: 818448 - DNA, 563 bp, Homo sapiens
cacccaaagttgttttcttttttctttctttttttttttttttttttttttttgagacaagagtctcactctgttgcacaggctggagtgcagtagtgcgatctcagctcattgcaacctccgcctcctaggttcaagtgattctcctgcttaagtctcgagtcgctggtattacaggtgcccatcaccatgcccagctaatttttgtgtttttaacagagatggggttttgccatgttggccaagctggtctcgaactcctgacgtcaggcaatcctcttgctttggcctcccaaagtgctgggattacaggtgtgagccaccacacctggccatctacccaaagatttctaatggcagtaattgggtaaagctttaagacttttaagcctatgagcttctttttcttttttgagatggagtctcgctctgtcacycaggctggagtgcagtggtacgatctcggcccactgcaacctctgcctcctgagttcaagggattcttatgcctcagcctcccgagtagctgggattatgggcatccactaccacacttggctaat

SEQ ID NO: 818449 - DNA, 525 bp, Homo sapiens
aattatatttagaggaagctgtattcatttcccaaatattcaccagggcagtgaatatgagccaggtgttggggatccaycaatggtccagcggggcaaggtgccaaggccccatggaagttagcagaaccaagacttgccccaggttctccctgccagcccagggcatgcttctcttgaccttatccccagagctgggctccagagcaggcaggccagtgccacaaggaatctaaaaggcttgtctctaccacccagcacttctttggtgtgttagtttgagctgctccagaagcagataccaagagcaagaggtttactaggggaagcatctgtgagggaaagtggggaggaagctgaggaggctgggacagctgacagatcacatgtaaggaaggaaggaaagttgggagaaagagtcttaacccacagcacggttctaagaaagtttgccaggatggggtatcttaaagccaaggtaaccatcagaggagtcccagatctcccaagagtgtgcccacctta

SEQ ID NO: 818450 - DNA, 615 bp, Homo sapiens
gttcttttgctctctgataagcttggtccccaaaattgtgaaaagatgtgaaaaacaaccatgtgcatccaactgaataatgaaacactatcttctccagcaggataactagagtttgtgagggctttaaaaaaaagccatacctcaaaatggtcacagagtatattaacagacctaaattagttagccctggtgatcattgtatactcctgagtatctaacaaatctttgaattcttattttaaaaattattttcaatcttagttcttgaaaacaaatctggattgctgtcagcctttatccattttaagaattgattttaagtgatgataaaagaaaaattttagctgaattaaatttaagggagtttgattgagcaatgaacacttcacaaattgggcagcctcctgagccaggggagtggaagaagatttattgacagaaaaaggaaagtgatgtacataaaacagaagtgaggtacagaaacagctggattggttagctgagcgtttgcgttayctgaacatggtttgaacagttggctatatttgattggcaaaattcagtgattggcataagggtaggctaaggtctgtttacacctccacttgttat

SEQ ID NO: 818451 - DNA, 634 bp, Homo sapiens
accttgacagtaaaagcagctgacaccattgggctcacaactctacactttttttttttctccatgaaatgttggcttcgcaaatccttcctatctgattagccctgcaatctaaattttatcatgatcctacartaatgacaacagcactgctcatctcctctgcctctttgaagtcactttctgttggcttcccagtctttgttatctacagcagtcagggattggtgaatgttttaaggaaaagagccacaacaggccagcttacctcaataagactttcctctgtccatgactttggttcttccagtctcagccatctttgtaattctatttagtcttcaaaatcttttatatctttgttttcatttaattcagactgtctgttttttctctgtaaaagatttagtctgttacaagctattttgccattaccagaaaggaaactcctattcaatgacatttaaaacaaaatttccaacaaatccagtgagtcaggctctgtgtttagaaaggattgtttggatccctgatagcttcctttttatcaaagtttggatatgaggtctggtccaaaattttatataagttaggttcagacaagaggaggaaaaagtaattcaggttcttttct

SEQ ID NO: 818452 - DNA, 574 bp, Homo sapiens
gatgtttccattcaactcacggagttgaacatacttttttatagarcagttttgaaacactcttttcgtaggatctgcaagtggatatttgaacttcttttaggccttctttaaaaaagggaataacttcaattaaaaattagaagcattctaagaaacttctttgtgacgtgtgcattgaacccacagagttgaaactttcttttaatggagcagttttgaaacactctttctgtagaatctgcaagtggactttaggagagctgtgaggactttggtggaaaatgaaatatattcataaaaactagacagaagcattcacagaagtttctttgtgatgtttgcattcaaccgacagcgttaaacataccttttcatagagcagttttgaaactctcttttcgtagaatctgcaattggatatttggactgtttgaggtgtttgttgtaaaagagaatatctttacataaaaactagacagaagcattctcagaaacttccttgtgatgtgtgcattcaacgcagacagttgaacctttcttttgatagaacagttttgaaactctcattttc

SEQ ID NO: 818453 - DNA, 517 bp, Homo sapiens
aaccacgacctaggagggcatgatgccagagacacctggaccccacgctaggctcagtgcttgttatactcttgggacccagtgctttccctctccatcatgtggcatacttggcgttrtttcttgtttaaaatattgtccttagttttcacctttcctaggagacactggcagaccctgtgacactacagtgtctggcacacagtaggtgcatcacaaacatctgccgagttcacacactcttgccttctcaaaacttcttgtcaagtcttcagtgaaaaggaattgctgattgagcaagaattaaacttctagagactcctggatccactgaagtttgagacaaagtgagatttgtttgctgtcatattcctagctcatagcatactgtagtcaattaaaaaatgttcgttgaatcagtgagtgaattgattcttacgtcatacttagctatatattttctgagtaaaattgataaatttaatagtttacttctagtataattttactttactta

SEQ ID NO: 818454 - DNA, 611 bp, Homo sapiens
aagcgtccttgaatggtacataaacgtgtttggacttttcactcagggctgttgaagttcttgaagctcagttgtctcasagtttcggtgttttcaagccctgctaagcactttctttctagctgatgattggccaccattactgatcatctattggctctgtctgattcaccaatcccaccactgagtatttatgcaaaggaaaagaaatcaatgtatgagaaagataactgtacttgtgtatttgttgcaacactattcacagtagcagagatataaaatcaaactaaatgtccatcaacaaatgattggagaaagaaaatgtagaaaatatacacaatgaaatactattcaggcgtaaaaagcaatagaatcataacttttgaagacacatggatggaactggaggccattgttgtaagtgaagcaagccagacacagagtaaacatcgtattttatcactcataagcgggtgctaaaaggtgtgtagatattgatgtagagaatggaatgataatggagactcagcagggtgaggggatggaagaggtgaatagtgagaaatttcttaatgggtacaatgtgcattattctggtgatggatacctaa

SEQ ID NO: 818455 - DNA, 313 bp, Homo sapiens
catcttgaagactatcatatcacaccattattccaactaatgaacatgatgttttggatgggtagtactagctactcatctctcccccagaaacccaactaagcatggacatattgaagagaatgtcagcaccattaaaaaaaattctagaaaaatcacatgtgatgactgaggttaattcagtctgtcaattacatcaatataattcccttcttgtaaccctaaatatggtgaagcagaattgaattctacaaaagtctttcatctgttttcctrtggaataattaacaaacccaatgaatgtataaataac

SEQ ID NO: 818456 - DNA, 588 bp, Homo sapiens
aatcctcaccaaaaacttgagaactaaagcccagttgagtgacactgccctggcttatatagcccataggtgtcagagccaggacttaaaccacagccagctcaccccagaactcatgctccttaatcacttarcaccgacaatgggaaatgttaattaaataccagcacatgctataaggatcctgccacctcactattaataactcagcagccaatttgcaaaaaacattcaagtggattctgttaattgcaaacttatgctccttcctctatacaactaagggaacacctgaccatagaacacagtgcagggtcactgagtaggtggcacagggagtatggcacaatccaacatgaccactgtggccagagaatgctccatgttggaccaccatttctcctttacagaccaaatgtccacgcatggttagtcccctcccaagtaccagtcaagggggtgagaaaatcaaagcacaagcctctcctacacaagagtgaataaaaatgctgggagagcagggctcagctgtacaaagggcatacagggcccacacatacagctattgtacttctatccatagtctct

SEQ ID NO: 818457 - DNA, 574 bp, Homo sapiens
actcatccctgttcccttccctacggcaagcaagaagtcagccctccaactgaagagattctttggcaatagttatcagaagaaaatttttcatagccaatacatctgagtagtctctcattttctctcagtcacattctaggttttatttcctccttagtcatttgtttacatggctgctgtctgccttctcaccctcactaaaatgccagccccacaaaggcagggcttttcacccctgtccccagtaccaacatatagtagatgctcaatacatatttaatgaataaataaaaccaacatgacaaccaagacaggtgatttttcatcagtccataagtcttctaatagggaaatgaagatacgtacataaaattgttaagtacattaaaccaattttgtctccagtcttgatgaatactgatatttatatattgtccactccccatrccaggaaactatttttctcaagggaagccactagatattattactacatatactataggtaacataaaacatgttatgttttatatgtaatttctagtatgaaccacagtatataagaagagtt

SEQ ID NO: 818458 - DNA, 596 bp, Homo sapiens
tggcatctgcccttggaaatgtctggaaatgctttcaacactgcctttgtatacagtgaagtgtcctggtaatcagtcttaygagatactgggaactatttcagcaaaaaataaaaaaaataaagagaaggtattattcctctggaaaacctttgttcttccataagattagttcctttccctcatacctccttgggataagagttttctcaattagaaatgtttttatctgcaatttttaagggaatggcttcctggcactcttgcaggtctccacacaggccctggaggtgaggctcagctgcagcctgacttggcttggtgaacgaacaccttgtcatgttctcaggaatttggcatgagtggcagttccgtgcggtgctgtcaaggctgttgccattcacctccctaccttgtgggaggttgtcacaaggtcatttcccatctgttttcctggttctggtgaggtatgggactttccatctgtcccccttcttcaggaactgttgcagactataaaagtgcttggctggagcctagagttgttgacttctcagtcacagggtgaggagtgacccactgcttgtgctccccat

SEQ ID NO: 818459 - DNA, 590 bp, Homo sapiens
tattctaggattcctttatattctttaaaattattgggatcctcaaagacctttttcttaaaaattatatctattttcacttttcatattacaacttaaaactgacaarttaaaaatatattaatttatcaaaaatagattaatcacatgtcaacactaatttgtagtactgacactacattttacatttcataaaataacatattttatgaaaaacaaatatccaaaatttaaaaagtatgatattaatattatgtttttgtagttctcttgaaagtctagtttaatggaagctggttaaattatcttatttgtttgcattcaatttgctgtgatttattgttttgattgaagtatatgaagaaaatttggtattacatgaatatatagctgagagaaaaaggaatattttaatagcctttttggatgatagtggatattctcttttaatattacaccaaaacttgtagagtggtagctttttaaaggttaatggtaatgtgaaattttaaagtgtatcagtgaatttttacattcaattacattaaatctgtcttgcttttggaatgcatattttaccaatgcatttt

SEQ ID NO: 818460 - DNA, 592 bp, Homo sapiens
actgaaaagaattaggaaattatgaaacaggtaccctctataatgtcttccccagttgtcctaggtccctaatatttacatggcatccaaagatggcaatgaagagaatggctcacctggttcctgaatttccacaccaagtacagagctcagaacagaggagagagctgtgaagagtatgattggaggatcggacccctcccagcatggccaggaggaaaagctgggccagggagaaagaggccatgttaagctttattttgcattttagttggtggtctaggctctgaggacttgtccccagacctcactgtggccatctgtccagatcccagatctacatgctcaaatccaaagacataagctcacagacaaattaagcaaatattttaaaatatcatacaagctacagttttatgaccttaaaatatctagcagagatagtataaacttgtctgaccagcaaacacagacaaaaatgtccaaattatgaagctcttcctattttattttaccaacaatttttaaaytatctttatttaccaaagattactaaaatcgtgtgaatttgaaaagcatttggtctagttat

SEQ ID NO: 818461 - DNA, 607 bp, Homo sapiens
agacaatcatttacaagttaatttctgtctcttgggcccattcattctccctaataaacattttactgcctcctacattccccacctctcccatcgcctatgaagaagggtatataagtatctggacctcactgaattattgggtaatcactctcccatgattttgccccgtgcacattcaataaattttgtatgctttgtctccttattaatctgcctattgcaagttcattttcagcaacccttcaaagggaaaaggacaggctttctctcttagagcctacatcttcgttaattagaatagttgtaactggctcaacgaaattctggtcctgaatacacacaggaaataaaagaaactctccctgataaaataatccttaaatacatgccatgttcacaagctgctatttaggaaaggtaaatatcccaggaggattcagtctgtcaatagtcatacttcaagataaattactcttaacagctggaaagctgatgtattagagtaaawttccagtttctgctgtgtgactttggtcaaggtaattaatatctgagattctcaggttctgcatttttgacttgcaacataaaagtacctactaat

SEQ ID NO: 818462 - DNA, 652 bp, Homo sapiens
acaatggttgaaataattaaaagcagcaatttttatagtgtactgctcagattccttggtcrtagctgattgatccaggtgtaacaatagaaccaagcctaccaatcagatgctttcccctgctaatttgggacatttcctaagaaactcagatattgaagctcattggctctgaatattattaattgttcaagtttcaagagtttccctggttcctcgccttcctgaaattcatgtcttcttaggatttcattagctactatagtatccaatgactcctcagttttgtttaaattaactgttattttttaaaacaataaaagcaaatcttatgaactttcactttatgaaatgtatattttacttctatgaacaaaaataatcaagcttaggcatatttacttactacttgtcaatatcaagagatggaattaacagccctttggaatcagttaatcctgaatatcgcatattaattggtttctggtgttttaagatgcattgaaataacattattcacctcattgtgtcttgctagtcccaaagcaataagaatatggaaagtactggtacaaagagaagcacagttattatggaacaaaaagttgagttaataagaattggaaagttatgaaaaattaagtatgttgca

SEQ ID NO: 818463 - DNA, 257 bp, Homo sapiens
accatccccatcgtgggcatcattgctggcctggttctccttggagctgtgatcactggagctgtggtcgctgcygtgatgtggaggaggaagagctcaggtggagaaggggtgaagggtggggtctgagatttcttgtctcactgagggttccaagccccagctagaaatgtgccctgtctcattactgggaagcaccttccacaatcatgggccgacccagcctgggccctgtgtgccagcacttactcttttgt

SEQ ID NO: 818464 - DNA, 257 bp, Homo sapiens
accatccccatcgtgggcatcattgctggcctggttctccttggagctgtgatcactggagctgtggtcgctgccgtgatgtggaggaggaagagctcaggtggagaaggggtgaagggtggggtctgagatttcttgtctcactgagggttccaagccccagctagaaatgtgccctgtctcattactgggaagcaccwtccacaatcatgggccgacccagcctgggccctgtgtgccagcacttactcttttgt

SEQ ID NO: 818465 - DNA, 608 bp, Homo sapiens
taatttctttacattaaattataaactcatgatcagcgatgctgtggacactttgatcaaagtgattgatcaaagtgattatctaggattactttttaaagtaatacttagaaaaatttagcttgttagttccagcttaatagaaagtgaagtccatgctgcttattggtgaacatgtagctatatgtctttgaatacgtttcttaatattggccattaactattaaattgacttctcaaaatgttaaaatggacaaagtccctgtttcttgttataattagctttctgttcctgcttttgattgttattctccaagatgactgagttaattatacaaatatggtgaacacaaaacatattacctcaaagggatatctccttaaagaatatgcaaatgaccctccacttttgaataaattcaaatattgacattaatctccttagaatcccagtgctttaacttgagagcattgctgagtttaatactacttataaaacttacgttattttgaccattttgaaatatagtttttcatgtattaaaaaattagagatcaartgacaggattattcatattatccagatttgtatggtgtgttgtaagct

SEQ ID NO: 818466 - DNA, 666 bp, Homo sapiens
cctgcccatattacactgacatcattaaaactatactgtcaccaagtactctaacagtaacctaagattccatgcaggcctaaaactaatgctaaattctcagaagccataggggtgagctgatrtcagaacagtctacatccatgtgataagtgcagtggacataataagcttcaagtttaattatttaatactaataatattgggtttgactaatccactgttggaccaactttagccatgtgttaagtacaattttgaatacaaaaactacttcagtttcttaagtaaatgcaaaagaaaacagcttttcaaaagaaagcaaagatgaaaatatatattgtatatatacataaatgataatatggcagagttcacagtatagcattgaagaaaaaaataactagggctaagaaagaacagttctcggtatctaattcactagaattaaaaggcagtctcttcaggatgatgggagaaaaattaacccgaaaaacttttcatctttttgtcactcaagggacaagtttaggacatatgaaatctcattggtcaaggttggattctgtgcccacctcttgcacaaggcaaatggcatcttgtttcatagaccaactaagagaactgtcatggttccacaaaagctgagctaatgttacagaagaa

SEQ ID NO: 818467 - DNA, 517 bp, Homo sapiens
atgagtgaagtcactgccactcagatgtgaagaaattgcagattgccgtgcttattgttgggaaaagctaaagcctacgtacaaattccaaagggcagaaccaacgtcrgatcctacgtcttccatcatcctctgcccctgaagtataaagaaacaacgctatctgaagcttcctaaccatcttaccttcattgtcttcacttgcttctcctccttcctccactgcaataaaatgcatctgaaatgaataagctgccacttatttaaagcctcacttttgaacacaaagggaatattcaccatggtccctctatgtgattataaatacctgtgtccctgttctagttaagaaagggagactctgttttgtgattcctatactgaaatactcaaaatattatattgcttagtctttcaatcaagtgtaactaaagtcagtataaaggatctatcctgtttctaaaggaaggatcaaggctacagaaacagaaagtcaacttgacatgttgataactct

SEQ ID NO: 818468 - DNA, 556 bp, Homo sapiens
gaaaaaggtcccgcagatcttggccttaggtcacgcttcgagtagtgggagttttggtgacagatagcgtttcccttgctacaggtttatttattcaccttgtttcaaagagaataaaatatgcataattataataccatgtgctgacgtggagggacatccatcacatgaaaaacaagttgcaaaacaaatggataataggatcctactgagcttaaatacacatacacaggcacaactagacaaataggcagatagatagataataggtaggtaggtaggtagagagagaggaatttaaaaatatctagaatacgtagcagacagctgagattggggagtagaggaggtgaagatgtttgcttttaatcttcaccacttgatactctcattttttaacagagtataaatttcttttgaaattaaaaaaattatcgtacttttagtggaataaaagcagcatcaggcacatagtaggtaattaatcaatatttgttaaatgaatgmgtgaatgcaaaatatatgcctttctaccatcagaagtatagctctattc

SEQ ID NO: 818469 - DNA, 657 bp, Homo sapiens
cccagctaatcaggaggctgaggcaggggaatcacttgaacccggaaggtggatgttgcagtgagcctagatcrtgccaccgcactccagcctggggggcagagcgagactctgtctcaaaaaaaaaaaacaaaaaacaaaaacaaacaaacaaagaaaattggaatctaaagtgattcctgagtggggcagcaaggatggctgctgatgtgctgtgtggtctgggagaagtggggcagtaggagaggtggacggaaaacctgatggcgtcttccatggcgtatttactctttacttggtgccagaacaaatgaaacaagccctcgtacaagctgttattaattgcctttaaaaatcttttccattttttccccaggtacttaaaatacaagtgccagtaagcagttcttatgtatttttggggaaaaaaatttattttccttttcttctgatattttaaaaattcattgatctttcaagatgaaccaaagtttcttaaaagaattatagtacacacttcattctttataaaactttctataatgccttatttaaatgttaatcgtacgtgctttctaaaaatgttgtgaactaccaaacttgtggattatcactaggttatcaggcatacattagtctttatcagaataaaatgaa

SEQ ID NO: 818470 - DNA, 529 bp, Homo sapiens
gttacaactcctaggcttaagggaagtaatcttcgatataagaagttattgtggaaagtcattaagctgtcatgctcaaaccaaatgtgcataccccactccttatcaaagagcaccagaaaatgcacccacatatgatcgcctgcaagcagagaccatatgcttcgttgaaacggttgagctaagagatcaaagaagctttaatacaaaaccaaagccacgctcaaaccatcctgcagctaaaacagaatctcagcatgtcaaagcagaaaggtaacatcagcatgaaaagatattttatggccgggtgcggtggctcacgcctgtcatcccagcactttgggaggccgagacaggcggatcaccagttcaggggatcgagaccatcctggctaacacggtgaaaccccatctctactaaaaatacaaaaaattagctgggtgtggtggcgggtgcctgtagtcccagctactygggaggctgaggcaggagaatggcgtgaacccgggaggcggagcttgcagtgag

SEQ ID NO: 818471 - DNA, 552 bp, Homo sapiens
cctatatggtctgaaagggggaggatcccttagttctaggaattgcccccccgctttcctagaaaactcatgaayagtccaccccttatttagcatataatcaagaaataaccataaaatagccaacgagtagcccatggtgctgctctgcctatggagtagccgttctttattcctttactttttttttttttttttttttgagatggagtcttgctctgtcgccaggctggagtgcagtggcatgatctcagctcactgcaacctccacctcccaggttcaagtgattctcctgcctcagcctccccagtagctgggactacaggcacgcaccaccactcctggctaattttttgtattttagtagagatggggtttcaccatgttggccaggatggtctcaatctgctgaccttgtgatccacccgcctcggcctcccaaagtgctgggattacgggcataatctgtgagccacccagcccggcctattcctttgctttcttaataaacttgcttttgttgcaggacttttccttagttcagctaaaga

SEQ ID NO: 818472 - DNA, 593 bp, Homo sapiens
tgcacatagagttgaggcctggattcagaaacctattttttcatattctactagctttgtgaccttgaaagtaaattaatctctacactttatcagaagtaatgcctacctgagatggttgtttaagaattagatgaagtgctttggggtgtgaccatgactaagtcaagattttagcagattccatttctcttatcaattagtcacttaagtttttatttgccttttataaagaatctttttaaggaagagacattaaaaatattgaaatctatttagaagcttttgcaaatcaatagatatccctggatgagcctaattcattgcatttcactttaaaagtgcacttcttaaagtacagtactgttcatttgaatattttactgtaattttaaacaacctttagtaagattgcatcatttctgtaagaatttgctgcttctgggacctaatgcctacccatgaaaaggtaagtattgccagaaggtggaatactcagtttttcagaagttaaggatcccattttyacattgaatcttggctttggctctcaggttcccttgatcaacttagtcagtaatttctttcctacc

SEQ ID NO: 818473 - DNA, 475 bp, Homo sapiens
cattaataagaaccatcataaagttcagaaatcaatgacaaggattttttggtttacatgatgcaaacagaaagataaacctagaaaataaatgattggtgataatttttttctgctatggagaagttcaccaaatggagctggcaatatggtgttgaaggctgtttttttgtttgtttgtttgagatggagtctcactctgttacccaggctggagtgcagtggcatgatctcagctcactgcaacctcagcctcctgggttcaagcaattctcctgcctcattctcccaagtagctggggctacaggtgcactccaccacgcccagctaatttttgtattgttagtagagacggggtttcaccatgttgacctctcaaactcctgacctyttaaactcctgacctcttgatctgcctgcctcagcctcccaaagtgctgggattacaggcgtaagccaccatgtcgggccaag

SEQ ID NO: 818474 - DNA, 586 bp, Homo sapiens
ataaatgttatgagttgttaagtactgaattcacattcaatgttgcactcaaatatgtgtactgaaaaaaatttagttcagggatagcttataagggtggtaattggttacacttatataacaaatatattgaaaaagagtatttagatgacaattggaaacttttgttaaatattggaagggttttcatgtgcaaaatacagtagcactattttgggtaacgcctaagaagaagccagaacaacaaaattgcagggaagttcaggatgactttcatcaaagaaaaaatatctgtatctatatttatgtatgtagcagtcagatacattcaaaagtaaactgagatgtcttaactgatagggagatctctgttcccaatggatttaagagcaaagctcaagttatgaaatatatcgagtcttgcaaaattaatttcttagtaaattggagtcacttccctatttaactaccagtggtttctttaattcacaggggaaaaacagatctctgttaatagatgcaatagtttgctrgttctgccataacaaaataacacaaactgggtcacttaaacaagaaagtttat

SEQ ID NO: 818475 - DNA, 575 bp, Homo sapiens
aattgaatcatacaatacttattcctttgtgaaagcttctttcacttagtatgttttcaaggttcatcaacgttmtagcatagatcaatgtatttcattcctttctgtggctgaataatttttgttgagccattcatcaattgaaagacatttgaattgtttccactttttggtcattatgagtagtgcttcttgcatgaacagtcacgtacacgtttgtgtgtgaacatacatttttgattctcttggatgcttacctagaaatgcaattaccaggccagatggtaactcagttgaggaactgccaaagtgttttcaaagaagccattccctgggtgttgatatttctcattttcatacatttctttgtacttttctctgtgttggtatttctttttcttttttaaaatattttcttagagagtttatttctgaaataattttttttattatactttaagatctgggatacatgtgcagaacgtgcagatttgttacatatgtatacatgagacttgatggtttgctgcacacatcaacccatcatctacattaggtatgtctcctaatatccc

SEQ ID NO: 818476 - DNA, 575 bp, Homo sapiens
aattgaatcatacaatacttattcctttgtgaaagcttctttcacttagtatgttttcaaggttcatcaacgttatagcatagatcaatgtatttcattcctttctgtggctgaataatttttgttgagccattcatcaattgaaagacatttgaattgtttccactttttggtcattatgagtagtgcttcttgcatgaacagtcacgtacacgtttgtgtgtgaacatacatttttgattctcttggatgcttacctagaaatgcaattaccaggccagatggtaactcagttgaggaactgccaaagtgttttcaaagaagccattccctgggtgttgatatttctcattttcatacatttctttgtacttttctctgtgttggtatttctttttcttttttaaaatattttcttagagagtttatttctgaaataattttttttattrtactttaagatctgggatacatgtgcagaacgtgcagatttgttacatatgtatacatgagacttgatggtttgctgcacacatcaacccatcatctacattaggtatgtctcctaatatccc

SEQ ID NO: 818477 - DNA, 490 bp, Homo sapiens
agcatgcttctaaccttgtttagtaaagaaatacttgctctttccatcctcttccctacccctcatcacaacgaatggaggagccagtgattagaagaggatgtagtgttcattttatagtccaagtctttcttcgttcatccattctgaaaagccatgaactccacttcagtatgtaattagggagaggagaaatcaagctttaaatacagattgacattaaattaaaaacaaaataaaatgaggagaatgtgtcttaattatcataatgagatatgagtgatgcaaaagctatgcatccaacccagatgtcactaaagagccgccaaatgttattttacccaagagagttgtaatgatggctattggaagaaagaaaccctagatgtttataaatcaatgaattgggatggttcaaccttatagctacagtgagatttaggttttgtttagacagcctctctctcagyaaataaaacatctaattgca

SEQ ID NO: 818478 - DNA, 603 bp, Homo sapiens
aagattaatcaagaataaaaaaagagaagatccaaataatctcaattagatacaaaatgggagatattatgactaataccacagaaatrcaaaggatcattcaaggctactgtgaatgcctttatacacacaactagataatctataaaacatggttaaattcctggaaatatacatttctccaagactaaatgaggaagaaatagaaactctgatcaaaacaataacaagcagtgaaaatggttcagtattaaaaatattgccagcaaaaatgtccaggaccagatagattcaccgctgatttctattaaacattcaaggaagaattggtaccaatattactgaaactattctaaaagataggaaaagagggagtcctccctaaaccattttgtgatgccagtatcaccctaatacaaaaatcaggaaggaatatatctacagtacagaacaatattcctgatgatcatagatgcagaaatattcaacaaaatactagctaaccaaatgctgttggcagcatattaaaaagataatacatcataatcaaacgagtttcttatcagtatacagggatagtttaatgtacacaagtcaataaat

SEQ ID NO: 818479 - DNA, 570 bp, Homo sapiens
cacaagcataaagcctagatcagaaagaaaaaggtcaaacttcctatgggaaaaatttagcattttttaccagaatgatagattggcatctgctttccaatcaattttaccctgtttaaatacaactttgtccactttgcagacgcccactgccactgcccctgcccctgtccctgctaggcagaagatggtgaagaaaaacaaactcagcatcgttagtctcactggaaattctggaccactaacctcaaatgggccaatggtgctatacccattctagcacattcttctggttccattaactctttcattctcctacatgactacttcacaccttttcctctctcttctaaacctccagcaccttcttcccaattcttactcccagttgctggatgaacttgattcctatttcactgagaaaatagaaacaatcagcacaccaacarccttccaccaacacatctgaccacttaactgatatgtatacccaccttcaccaatatgatagtccctactgttgaatacttgaaaactggctagttcaaactgaaatgtgctgttagtgta

SEQ ID NO: 818480 - DNA, 576 bp, Homo sapiens
tcagccttaaaaagaaaagaaattmcggcatatgctgcaacataaatgaacctccagggacttttgcttagtgaaataagtcaattacaaaaatacaaatactatatgattttgcttatataaagtacctagagtactcagatttttggagatggagatgagaatggtggttggcagggactacaggaaaggggaagtggagaattattgtttaatgggtacacagtttaagtttgggaaaagaaaaaaatttccctagatgtttggtggtggttgggttttcctctagtttggtcttgaagtctgtctagagagagtggctataaactctagccctgccctgatgggactccaggtgtgtggttgtctttcatgggatagttttttttttttttaatcatggtgaatggcccaatgcctacatgtccaacctgtcatcatgtgtccctctcacaggaaacctgtttaaactgacagatacccttgtggctcttgtgtgacctatgcccagtttattcctaccaagacagccactgtataggagaacgctgatcagaacagaagttaggtttgggt

SEQ ID NO: 818481 - DNA, 576 bp, Homo sapiens
tcagccttaaaaagaaaagaaattccggcatatgctgcaacataaatgaacctccagggacttttgcttagtgaaataagtcaattacaaaaatacaaatactatatgattttgcttatataaagtacctagagtactcagatttttggagatggagatgagaatggtggttggcagggactacaggaaaggggaagtggagaattattgtttaatgggtacacagtttaagtttgggaaaagaaaaaaatttccctagatgtttggtggtggttgggttttcctctagtttggtcttgaagtctgtctagagagagtggctataaactctagccctgccctgatgggactccaggtgtgtggttgtctttcatgggatagttttttttttttttaatcatggtgaatggcccaatgcctacatgtccaacctgtcatcatgtgtccctctcacaggaaacctgtttaaactgacagayacccttgtggctcttgtgtgacctatgcccagtttattcctaccaagacagccactgtataggagaacgctgatcagaacagaagttaggtttgggt

SEQ ID NO: 818482 - DNA, 631 bp, Homo sapiens
tttgtattaaagagagatcattttgccgatattttgaatagtggattggaagatagaaaggtagaagrcaacagttaggaagttaatgcaaaatccaggtagaggtaatgatgatctctgctagaaaatggcaacagaatgaaaaagaaaagccaataaataggaaagtaattaaggacaccaaatccttgggctggacttgattaagaggagagtggtttattataaagagaaaatgaggtttcacagacaactcccacatttttgacttatgatctaacatttttaaattaatagattggagtatttaggacagttttagatttatagaaaaatcaaacagatggcccagagagttcctatagtccccccgcctcctggtttcctcaattattaacatattagcatggtgcatttgtagttcatgaaacaatattgattcattatcattaattaaagtgtataatttacattaatattcactcttcttgtattctatggagattgaaaaacacagaatgtaatctatacacaattatgatttaatatagaatagtttcactgccctaaaaacccctctgaccactattctgttccattgagctgcccattctttgccacactatattac

SEQ ID NO: 818483 - DNA, 631 bp, Homo sapiens
tttgtattaaagagagatcattttgccgatattttgaatagtggattggaagatagaaaggtagaaggcaacagttaggaagttaatgcaaaatccaggtagaggtaatgatgatctctgctagaaaatggcaacagaatgaaaaagaaaagccaataaataggaaagtaattaaggacaccaaatccttgggctggacttgattaagaggagagtggtttattataaagagaaaatgaggtttcacagacaactcccacatttttgacttatgatctaacatttttaaattaatagattggagtatttaggacagttttagatttatagaaaaatcaaacagatggcccagagagttcctatagtccccccgcctcctggtttcctcaattattaacatattagcatggtgcatttgtagttcatgaaacaatattgattcattatcattaattaaagtgtataatttacattaatattcactcttcttgtattctatggagattgaaaaacacagaatgtaatctatacacaattatgatttaatatagaatagtttcactgccctaaaaacccctctgaccactattctgttccaytgagctgcccattctttgccacactatattac

SEQ ID NO: 818484 - DNA, 603 bp, Homo sapiens
cagagaggagtaataaataaatccagagaaagctaacttgtgagaagcaaaagcagagagatttttctttctttcttttttctttttttttttttttaagagactgagtctctcttgcccaggccggagtgcagtgggatgatctcagctcactgcaacctccacctcccaggttctagcaattctcctgtctcagcctcccgagtagctatgattacaggcgcatggcactatgccaggctaattttttgtattttagtagagacatggtttcactgtattgcccaggctggtctcgaacgcctgagctgaggcaattcacctgcctcggcctcccaaagtgctaggattacaggcgtaagccaccgtgcccaaccgcagagaaatttttcaaaggatacatctgcactacttcctgccccattcctgcagctgctccattgctggaagagcaaatgaaaattcccaaaggcccctatataaatccctttcattctggggtcatccatcagtctctgcaacccaggagaagccaccactggctgctcgctgtgtgcttctgtktatatgagtttttatcctgttgctgagaaccctgtcaga

SEQ ID NO: 818485 - DNA, 597 bp, Homo sapiens
cctcactggtgctggcatggcagctatcactgggaggatgcactgagcccctgctttgtgacagagccagctgccsaaggcacagccaacagcttctaatcaaagggaattctgaagaaaaaaaaaaaccttcagcaatcttctggggattcttcctatcaaagtccttggcaataaataatacatgaaaagagatccgctcatgcgaaggtggacttcaaagcgggtggggtaacagtgctcaaacccaccacttggcgtctgtgctgtctgctcattccagaagttaattcacagagaatagcatgagggaatgcctgcctccctgcagctgattcatgggaactccgagcctgcattaacaggagggaagggcagcttgctagtctttcaagagcattttcccagccccaagccttagagctaggccttggactgctgctgtgacatgtgttctgagctagtcccaaacaagcacaaacacaatagcctccactgatcaatgcagcagggctgaaggatggaatccaaagcatgaaccctgagaacagaaagtcccagcactcgctctgtgcaagttgccatgaactccagcca

SEQ ID NO: 818486 - DNA, 616 bp, Homo sapiens
cctttctaattatctcacttagaaaacataaacacaggcttttaaaaaatgcagttataggcaaaacaaatttcttagcacctccacaatatctagcaagtataagtgcggtgcgtaactggtataatcagaaatctttgaaaagcaggaagacgcgacttttgcgtgtcccttcccagttacaaagcagattcttccgttctgtaataaagttcatttgtgtatctagtctgtgatgtctgtgcatagcacattccagacctactagagacataaaaagaaataagaaagggtctgctagccttgaggatctcctaggctattagaggaagagagacatattagtagaccctgataattgagtgtgataagtgctaaagatagatgcaaactcagggtgctgctatgggagcctcacgggggcagccagctcctggaggggtgggtgaggtgtaccagctagggtcccagggaaggcttccttgaagatgggaggcgtgactgaaaaatragctggagttacacatgtgaagagaggggaaaaaaagagagagaaacctggacatgggctgggggtgagaaagagcctagtgaagaaatggtgagtccctctgtg

SEQ ID NO: 818487 - DNA, 594 bp, Homo sapiens
ctacctggccttatgttatttccctctgctgaatctccaagtatatctttggccttaaatcagaatttccacactttcttggtaatacacactttgattcttcataaaaatatgggaaacatggtgtggggctctacccaccccaagcccagagcagttagcacattttatttctgtttctttgagacttttacaattattttttgttaaagaaaatcctcaatgtgagatttcttttttttttttttaagagtcctagtttcatggagaacccatagtttcatctccatgatttaaatagacctgcagttaggtacctgtgaatctatcatagctttataagcattgaagacttagcttgttattcccagggcctacatccagtggcactgttcttctgggtccatcaccatcagctagaattgattactttggctttgagtttacttttcattttagcatctggaacttttgtctttttgttaaattttacttttaatttaaattatttttctttgtttttaatayatttttatcctctcttcctaagtgtttgtagtggaggagactgtttgtattaaattattcctccag

SEQ ID NO: 818488 - DNA, 610 bp, Homo sapiens
ttacaattttactgtattttggcatttaagttgtttataagttttgtactcctgtaaataatgctatagtaaatatttttgtctctttttttggctttttagattatttcctgaggactgagtctaggagtgaaaattctaagcattttacaacaatttttaataagtactattgatggaataggcatgtgtttatataaattaagatttcaaataatgtgaagagaatggcttagatatataccacagatgatggccagaagacataattagctctaaaacatcatttcccaacaggtggccatttctgccttgagtaggtactcaagtgacagtgattgtacaccctttcttggtagctcatttcattacttaattttccaacattactgttataaagattttcataatatttaatataaatgacctccaagctataaatatgtatctgtgtcctctcacctgcttaataattaagagctaattggtatctatgttaaaaagtgtagctcatagacamaaaaaaattgttcagatttcttcacatatagaaatgaaagcttcaagaaatgaaacaggaaatgtagcccagaaatagtatcagagaacc

SEQ ID NO: 818489 - DNA, 635 bp, Homo sapiens
aacatgggattctctaatttaagaaataaacaagcaaagactatttctgtcacttcaatgtgcagcaaagaccatcacccacaagccctaccgagaagcacagacttccattccattgttaatttccacactcttctatgtgaaggaaaaaaaaaaaagccaaggaccagtaggttcttaaggaaaatctttaatatgaaaaagaacaaaacaaagaaacagaaaatgcatcttagtaaaacagagtctgtgcgggagaaaaaatattcgaaaataaagccatttattgacaaaactgagaaaggagatatttcagccatggggagggtgaggcgtagtgtttcccagcgggtactaagagtagacaggagtgcagtagagtagctgtgcagtagagtagctgctagccacgtgcagctatttaaattaaaattaattgaaattagactaaattacaagttcatttcctcatttgcactagccgtatttcaagggctcaacagtcacatgtgtactatattgggcagtgcagacagaacatttcatcattgcaggatgttctaccgggaagastttgagggggaacttgggctacaaacaacagtgaaaaatatattaatatttcttcttaaatg

SEQ ID NO: 818490 - DNA, 539 bp, Homo sapiens
gcacatttattctcttagtaaaatacttactaaatgctttctatgtataaggtgctaggttggcaatgtgaatgaaaagtgactaagattttgttcctgtttttgagaagtttgtagaatagtgagggagataaaaatgcaaatatagggtttggaatttttgataggtgctgagatagaagtagaaaaggtgaaaagtagaaaagattgacaaagtgcagcaagaagaggaaagttcacgttggctgaatctcagtaagttaagccttgcatgaaaaataataattaaggggaactaatgccagttattagatcgtgcaacaactcaagtacctggataaagagattctattgagataactcctaattcataagatggtaatttaaaatttcagaaaatatcaggaataactgcagatgaaaygtctccttcaagaagttcttgattagggtattcataaattccttaaaatggcaggtaacaaactgtacacataatctgaagagcattgttacaggtaaagcgtctatagcttaga

SEQ ID NO: 818491 - DNA, 394 bp, Homo sapiens
aaaatatttcactgtaatcaatatttctgacagattttgatttgagtctgttgctgatttttgtactttctcagtttgttattgaatttttaaaaatctacagttttttcaagcatatataacttgagaggcttatcattaaaacaagttttttatgccagaaataattttgtcaacttttaatgatactaaagaaagagtacttgctatgtgtttgtgctatacaaactcaacttagacatataattgaaacaaaagatttatcacttctaagttttaaatgacagatgtaaagagatyctgttacatcataacacaatttaaagtgatctttgaatttcatggtgagttttactcctgcagtctgaggggggagtccacagaagaaacatag

SEQ ID NO: 818492 - DNA, 607 bp, Homo sapiens
ttaaaataaaaataaaatgtaaaagcatgtttgtatatgcayctgtaggaaaaacactggtgagtgctagaccagagcttgaacagtgattgttttcactttttaaatttttgctggtctgtattttctactttttctataaaatgacctctctaaaaggcagatgtatcacacagaatcctccttacaacagttcttccatggcttcccattgccaaaagaataaatgctcccagcaacttttcctggatccacctcctctccagcctttcttcccactcatcttaaagccagaactccagccatgccctgcactcacagactggctgatgcaccaagccattccaggatttcttggttttgttcttcccactccctgagccaggaatgccctttttctcatgaaccagggacataatcagccccctctttctgagcatcccttccctggggagaaagtaccactctttcctttgtgtttcctctgatactgacttctatcctagtacacaatacacgtcactccttgatcaggttactggactgtgccctaaaagattaacacatatgcccgtttatctctggacatcccttcttggcacccagc

SEQ ID NO: 818493 - DNA, 661 bp, Homo sapiens
atcatatatatgtatgtatagtgtatatacttatattcacatatgtttattcacacacgtatataaaattttgtatcttatttggtacatgttttrtatatgattgggtatatgttttcttgtcgtcaaatgttttctaaaacattttaatgactaatgtagcaattgctgggtctacaaaaacatatttgatgatttttatattatttagatttagtttattttcagattatatttaattaagtacatgtacatatttactttaataattaacactgaaatggaatgttttccaccaaaatcctcgtgggcatttctgattatttccctgggatcaattcttagatgtcaaattacagggctagattttgaacacttttaaagttgtagctagattttagtagacacacaaaatgaatttagaagatgaagatttgtcagcatgaaaagctaactgctgaacggagacacagatgaagtctataaaagcgcaaaaggctttaattggtcaagtagagatttgctaaccaaacccagaaatattgcaaatacacagcaatttttggaattccatgagggtagctttggagccaatgcaaagaaggtgtgatttgcttggcagagagaagatctgtgcatctttttgccttgaaaagtggca

SEQ ID NO: 818494 - DNA, 523 bp, Homo sapiens
cattctttgtttatactgagcttgaaattgctaaccagtaaaaccacagctggtgtggaaggaaagcaacccgagcaccattaaacagcagagyactttattcagatgccacagcatgagaagaccttgagagagtgctctgccttggggaagaagggcaacatttttatagacctttagcaagaaaagtccgctgaagctcagctaattttgataacagttgatcaaagatggttctcacaagaggaagaattgatcttgtagtttaccatccattggatgagaaatctgagttttgccaaggagggtgggagaaacagctgcaaggggtcacagcagaacattgtcagtcatttagggcctcttatctcttggtcaatagagaggccaagtctcataatttgatcagattttggtttgttcgctcctccaaatacataactgatgtcagttgcagactcaggctcattggcaatgactcctattggatgtgctggtgatttttgccttcatagctgaattt

SEQ ID NO: 818495 - DNA, 516 bp, Homo sapiens
acactttattcatattagcccatttaatcctcataacaaccttatgacataggtacctgtcttacagattagtaaactgaggcagaagatggttaaataactgtccaagattacacagctagtaagtggcwgaatcatgaatagacccagacagcctggctctcagggtctctgctcttaaataataagtcgtgctggttcatagcaagtgctccataacaatatttgttactttgaaaacatctctgaggtgttgccgctgagttgaaacaagagttacatagaagatcatccaatttatgaaaacaaaaaggtaactaagtataaaataagctaatactttgtgtgttctgcaagagacaacttaattcaagtttaggtaattaaagctttcataatttttttaaaaatacagtgcattcatttatgcaaatctactccagagcatgatttttgcaagatgctatgtgtctcacttatcacaaaaaatgacttctgagtctccctaagaagtga

SEQ ID NO: 818496 - DNA, 606 bp, Homo sapiens
aacaaatagacagatgacctatcatcagaaatgacactttaaaaaacaatgaaactacatcttcaaaattaaaaaaaaaactgtcaactccaaattctataactagaaaaagtaattcttgagaaaataaagatttattcagataaaagaaagcttcgaacaattgtcattagcagacctagatacaagaaatgcaaacggaaattttttaggctaaagaaagataacaacagatggaaattctgacctacaggaagcaaggagaagctctaggaatggcatgtgcataaacatgaaaaactaaggcttttttcttttagttttataacaaacaactgatggcttaaataaaaaattaagtgtactattgataatgtatgtagagtaaaatattctaaattaatagctctgacaggagactaaacgcaaaaattttaccacaacttttctttatgttacatgaaaacgttgactattaacagtaagtsgactgtgataagcccaggatgtttattataatccctagagaaccaccacattatatgaagatattcttctaaaatgccaataaaggaattaaaatggaaccctgaatattgttcagtt

SEQ ID NO: 818497 - DNA, 595 bp, Homo sapiens
ggaacatacctcaacacaataaaggccatatattatacaaacacacagctaacatctactgaatagggaaaagcagaaagcttttcctttaagacctgggaaagacaaggacrcccgctcttgccactcttattcatcataatatttgaagttctagctatagcaaatagccaagagaaagaaataaagggcatccaaattgaagagggggagataaaattgtccctgctttcaaattacatgattttatgtaccgaaaaccctaaacgtcccatcaaaaaactgttagaacttattaacatattcaacaatatggagaatacaaaatcaatatacaaaatcaatgaattagctgaaaaagaaatcaagaaagtaattccatttacagtagctaccaaaatatatacctaggaacaaatttaacaaaggaggtgacgaatctctacaaggaaaactataaaatactgatgaaagaaattgaccacacacaatacacacacacacacacacacacacacacacacacacacacacacacacagaaagactttgcatgttcgtggattggcagaatgaatattgagaaaatgaacat

SEQ ID NO: 818498 - DNA, 648 bp, Homo sapiens
gaaattaggcaaacaatcccatttatgatagcaccaaaaagaataaaatatttaggaataaacgtaaccaaggaggtgagtgaaaggctagtacattggaaactataaaacactaatgaaaaaaattaaagtagatgcaaataaatggaaagatatcctgtgttcatagactgaaagaactaatattgttaaaatatcatactatcaaaagtgatctacaaattctatgtaagccctatcaaaattctaatgtcagtcttaacaaaaatagaaaaaaatcctaaagttcatatgtatccacagaagacccaaatagacaatgcagttttgagaaagaagaataaaggtggaagcatcatgcttcctgatttcacaatatattacgaagctacaatcatcaaaacagtgtggtgctggcataaaaacagatgtatagagggttggaatagaaaagaaaggccataaataaacccacacatatattatgatcaaatgatcttcagcaaaggccaagaatatacagtaagaaaaagatagcctcgccaataaatgttgttgggaaaastggatatctacatgcaaaagaataaaattggatcctcaccttataccatacacaaaaatcaattaaatggattaaagacttga

SEQ ID NO: 818499 - DNA, 595 bp, Homo sapiens
tctacctaacatcctaaacagacaagcagaaaatactgtgagatgcctaactgggaaagaggaaaaaaatttctatatamgtgttaacatctgagttaacctgggacagagttaaatttttattttttaatttaagaaacgataaaaacggaagattctggaatatatacaatatataaccttctttagaaataatttttagtccatcatacccaccctacaacttcccattaagcatccaaaaaagacttgtttcaattgaatccaccatttactgagcagctcctctacaacaagcctatggcatatgctgcagggatcatcactcacacatagcatgcctttctgattgtttgttgattgttttgcaatgcatctttgtcaaagatccactagcttgaaggatgcctggcttttcacctctaaaatcaagaaaatagaggaatattaagtttgggcatggattctatatagataaagagatgtcctccagttactaaagcaagaaataatgatttttttcaaagtatccttttaaacaatctaaacaaattgataaaagttacattttatttaaaaattcttgaaaaaggga

SEQ ID NO: 818500 - DNA, 560 bp, Homo sapiens
gtttattttagcatccatggatacttgggttgcctctaccttatggtgattttgagtaatgctgctgtgaacatgggtgtttggtttaagtatctgcttttgattctttttttttttgtttttttttttttttkttgtttgttttgagatggagtttcactcttgttgcccaggctggagtgcaatggcacaatctcggctcactgcaacctctatctcctgggttcaagtgattctcctgcctcagcctcccaagtagctgagattacaggcatgcaccaccacccctggctaattttttgtgtttagtagagttggggtttcaccatgttggtcaggctggtctcgaactcctgacctcgggtgatccacccacctcggcctcccaaagtgctgggattacaggcgtgtgccactgcgcccggctgctttcgattcttctgggtatgctcagaggtggaatttctggatcatatggtaattctgtgtttaatttttaaggaactgccacactgctttctccggtgactgtaccattttacattcccggacaaattcac

SEQ ID NO: 818501 - DNA, 613 bp, Homo sapiens
ccttttaggctttctgttccagtctagttttagtgtggcattgtatttaacttgccttagaaactcataggtttatgccctcttgtggtctgtcaccaatataaatagcacaaatraaaattttaagtactggagatcttactgcatgttactgctctcctttataaaataatttttaaaaagcagcttctgaggaacaacagctaagaaattattattcctgtcttccatataatgtgtggagcttaaaagttaccaaatgttattttaacccttggtaacaaaatgtatgtgtatgttaggtggacactaatgaacagaaaaatatttttggatgggctgtccatcattgtccttctaggtgtctaaccctattaatttataagtgtcttaaaaatatgatgaggtgtgatagtaattgtagggctagcacattacccttctaccttcacctaaacatacacagatatactagtaaatgatgcttgggaaatgtgtttatacttgtttcatctgaaagggtcaggagctgtaggaggcattggaagaaataaggattataatgttagtgaattggtgaacttaagcttacagaatttgcttttactgacat

SEQ ID NO: 818502 - DNA, 647 bp, Homo sapiens
aattgaaatcattatgccaaagaaatatctgcaaagaattcttctcattcagagcctgactggaagatgtgatcagtaatgggactgacacattgtactgggaatgactgagggatttgagagatacacaaccactggaggaacttctacttttccaggcatcagggagagagaaattagggctacgttaaatagctctgtagagtgttctgtgccaaaaagtgattaaaggatcgagaatataacacaaggtttgttgtttagcatagttataagaaataaagaaaaatagaagcttttttttcataaatatatcacatgacgttagaaaaatgcaaaatagcttgtgtttttaagctggaaattatcctgttactttcatatcacttgacagacttagtctgctgtgaacattgctgcaatttgtgtgatttaaacagagaaatgacattgtttggcaagtgggaaaatgtatggctaatagataactcaccatcaaaatttataaagaatctaatccagaacattttattttcgcccttagatcatgagtaaaataagcctttataaaacagcaattttgagtagagcattgactatgtaggrtatagtagtggttcttataattggtgagtttatttgttatc

SEQ ID NO: 818503 - DNA, 611 bp, Homo sapiens
tttaatcagatgccccttccttagtgtgccctagttcatccacagagagaacaccagggaagccacagcacagcaagtctggctgcattcatgagagggatgggctggtgacagagtagctgctgccctgggagattcatatttcactacagttcatgattcccatctgctataaaaatatatgatgagagacaattcatattttagatggtttagataaagttagaattagagactttctaatatagattttagattatcccatgttttagagtggaaagaatacctagaacttggaaagatttataaaagaattatccaactacatgatactcaagaaacaggttatgttgcaaacgctaattctcttctcccatggatttagctagaaaaatctgggttcaatttattgatgacagaagtttgggaaaaaaatcatcaaaatgaaattcacatttgtgtaatgaacagtccatttatttgagtgagtcaatataaaaatatttacagtatgtcttcrtagatcaattttgattcaaaatacagatggaaatattggcaactttaaattgtgtatacaggcagtaggcagcaatgagaattatgtgaat

SEQ ID NO: 818504 - DNA, 611 bp, Homo sapiens
tttaatcagatgccccttccttagtgtgccctagttcatccacagagagaacaccagggaagccacagcacagcaagtctggctgcattcatgagagggatgggctggtgacagagtagctgctgccctgggagattcatatttcactacagttcatgattcccatctgctataaaaatatatgatgagagacaattcatattttagatggtttagataaagttagaattagagactttctaatatagattttagattatcccatgttttagagtggaaagaatacctagaacttggaaagatttataaaagaattatccaactacatgatactcaagaaacaggttatgttgcaaacgctaattctcttctcccatggatttagctagaaaaatctgggttcaatttattgatgacagaagtttgggaaaaaaatcatcaaaatgaaattcacatttgtgtaatgaacagtccatttatttgagtgagtcaatataaaaatatttacagtatgtcttcatagatcaattttgattcaaaatacagrtggaaatattggcaactttaaattgtgtatacaggcagtaggcagcaatgagaattatgtgaat

SEQ ID NO: 818505 - DNA, 423 bp, Homo sapiens
tacgggtggttgggtgtgatttttgcagccaagatcccatcccacatttaccaagagcactgaatcctgcttaactgactgtaggtgctgatgctgccccttttcttctcttacatcatttcgtaccattctcctcgtggacctgaccagcaatcacaatgaccttcaagctcttcctctaacatgtcaactagattccagtcttgcttttcttcatcacttgctgtttctcctgactgatgtgggctccacacagacctatttattcaggtcctgttccttcatttcaagtgtcacctcatcagagagacctttcatgaccccaaccctgttacactccttctytttaccacacttttttctcaaagtatcgtcacttattattgatttcactccatgctcctggatctccccgctgctaga

SEQ ID NO: 818506 - DNA, 423 bp, Homo sapiens
tacgggtggttgggtgtgatttttgcagccaagatcccatcccacatttaccaagagcactgaatcctgcttaactgactgtaggtgctgatgctgccccttttcttctcttacatcatttcgtaccattctcctcgtggacctgaccagcaatcacaatgaccttcaagctcttcctctaacatgtcaactagattccagtcttgcttttcttcatcacttgctgtttctcctgactgatgtgggctccacacagacctatttattcaggtcctgttccttcatttcaagtgtcacctcatcagagagacctttcatgaccccaaccctgttacactccttctctttaccacacttttttytcaaagtatcgtcacttattattgatttcactccatgctcctggatctccccgctgctaga

SEQ ID NO: 818507 - DNA, 546 bp, Homo sapiens
taaaagtatatttagttttataagaaactgccaaactgttttccaaagtgactgtactatttcgcattcctaccagcaatgaatgagagctgctgttgctccaaatccttgccagcatttggtgctgtcagtgttctggattttggcccttctaacaggtgtgtagtaacatctcattgctgttttaatttgcaattttctgaatgacaaatgatgtggagcacattttcaagtgcttattttctatctgtatgtcttccttggtgaggtatctgttaagatctttggtccaatttttaattggatcctttgttttcttattgttgaattttaagggttctttatatattttggatgatagtctttaatcagatatgccttttgcaaatatttttacccagtcagtgcctcttgtctttatgwtctcttgacaatgccttttgcagagcagaagtttttaattttcattaagtttagcttctttttcttcttttcatagattgtgcctttggtattgtatcaaaacgttatcaccaaactcgaggt

SEQ ID NO: 818508 - DNA, 619 bp, Homo sapiens
gtaagcgctacagagaacagcaaagtgggaatccttaatgtctaccagtggggacaggggtagctaggatgagaaaaatagarggggacattaatatggtggcttagcctcaatccatgcataaagattgtcaaggtgcatgggggcaagttgtgtggcttttttttaaagcctttattgtttcataattgtgtccttcataatcaggcagacacagcctaaaattatacaggaagagtggcaaagaggaaggagtcaggagtgagaaagcggaggaatgaggcatgggaggctaatgagctgtagggccagccattgatgtcaggatcctcagaactaaaagtagaagccacagcctggagactcacacttaccactgatacccaacaatgccatctagatggtggtgagttagttgtaacagcagtttcttttgagtattttaaaaaatgattattataaaaaattaaatagcacattacagaaaggatataacctaaatacagaaaactgaaaagatttaggaaaaataagtcaccaataattccattagcctaattcatttaatatcagcatttgggttaatttcctcctagtcctttttcaggtgtatatttaa

SEQ ID NO: 818509 - DNA, 600 bp, Homo sapiens
gcctggttaattttttgtatttttaggggagacaggatttctccatgttggtcaggctggtctcaaacccccgacctcaggtgatccgcccacctgggcctcccaaagtgctgggattacagacatgagccaccrcacccagcctccaccctctttatttaaaccctgttcactagtttgagtaaaataatcagatatgttttcggttcaatttccctagcaacacttaaaagtttgaaattttttacaatcaacttcagtaaggcttctttaaacattattttgaaaattaaaaacattttagaaaagcaagctaaactggttgtatgacaggtatacattctaagtcattttgagaggtgacaccgtgctggcagccctcgcttgctcttggcgcccactctggccacacttgcggagcccttcagcccaccgctgcactgtgggagcccctctctgggttggccaaggccggagctggctccctctgcttgcggggaggtgtggagggagagtcacgggcaggaaccagggctgtgcgtggtgcccgtgggccagcacgagttccgggtgggcgtgggctcggtgggccccgcactc

SEQ ID NO: 818510 - DNA, 620 bp, Homo sapiens
aacaaatttaaagaataaatctaatttaaatctaatttagtggtgtcaactgggtcagggattgtgggcttttgtggggggtggggagaagcrtatgagaatcatctggggggcattttaaatcaacaggatacttctcacctgccagttccgacatctcctattactgtcatattccttagggtttttaggtttgtttttgtggccaaaaggatgagaacttggatatagcccacactatgtttgagcctttcttatgaaagttaggaatggaaccatttgtgttgacacctggtcccaaggctgctatctcaatgttcacattcattccacctgagtcttctgttttgtgtttccttgtacggatttggtagaatatttattaaaggatgtttcttttttttaattaatagcttgccttttttttcacagagggtttgaggcaactttaccacacaaatacataaaatgaaatagcatataaacagaaaatcagaactgagaaaaaaggttgcacatgtgttgattttaattcagatttgcttcatgtttttattgatgcctagtgcaaaatgacaaatagcatcaattatgttaataatttttaacatttttattta

SEQ ID NO: 818511 - DNA, 444 bp, Homo sapiens
ctttaattgttgcagaatagccagaagctaagaaatgctgggccggcgtcaggagaaggtgtgcccagcggcctcgtgcgggtttacgctctggccacaagmagccagccctacgctctcactcaaccgtgcaattctttctgtcctacgtgaccctagtttcctaaatgacctattctgcatcctgcacattttaagaatgtgttttatttctccttcattatttgattgatttttttctactactaaaacaagcatatatttacaaagtatatgaagcaacacgtatacggtgaaagtcaatctttttcaccagtcttcttgtactgtttccattcccagagcaaagtattctgtttcttgtgaatctttctagattatgtatttcctacccataaaaggtggcataaatacatgctgttttgcacacaatacagaatgcat

SEQ ID NO: 818512 - DNA, 601 bp, Homo sapiens
acaggagggcctgatggatgactttaatatattttagttttctactgctcaagtaattctcataattcagttggttttatattataatctattttagccacygactgttgggtaaatattgaatccctgactcctgtgcgattttggcaagcctagccttgcccttggcattatgaaagaagcagattgaattatgttccccttcacattttcttttatcaatctccctctctcctcctcttttttgttaatactttctcccctttcttactcagagactgtttcattctttccaggcccagatctgtgctatgcagcaagagataaatctacttggtctcacaacctgatggcctctgcactgaatttacaagcatgaggtatagaaacatcgcacagattgtaaggggtggccatcccagttgtgtgataagtctcttgtgccacaggtttttctttctgactctttgcctcaacttcactcagctgtccccatgttatctacctgctatcactcttagccttaggacatagacctgacctggacaaatagcacctgggtttggttgctccatagatggggcttccatagcaggtacca

SEQ ID NO: 818513 - DNA, 600 bp, Homo sapiens
tgtgtcttgttctggtggctgtcttgagtcatggtctacctggagtgcaggctggcatcagagtctcaacaatggccaggttgtagattaaccaccttgaggtaatctctggaatttcacaactgggtctttgtgtctagtttgtctcaagattaggccctggggccagggcttgtggctcacgcctgtaattacagcactttgggaggccaaggcggacagatcatttgaggtcaggagttcgagaccagcctggccaacatggtgaaaccctgcctctactaaaaatacaaaaattagccaggcgaggtggtgggcatctacaatcccagctacttaagaggctgacgcaggagaatcccttgaactctggaggtggaggctgcagtgagttgaaaccgtgccactatactccagcctgggcaacagagtgagactgtctcaaaacaaacaacaacaacaacaacaacaaaaactttggccccttgaacttctaagtaagcacataattagataagcyagcagggcaagggagtgtctggtgtgaagggccggagacagagttttaaagtatgtttcaaggctaaaagcaagaaagga

SEQ ID NO: 818514 - DNA, 540 bp, Homo sapiens
agcactaaagttataaaactcttagaagacaaaggattaaaacytcatgacttttttggatttagcaatggatttttttatttttttatttttttattttttttttgagatggcgtcctgctgtgttgcccaggctggagtgcagtggtgcgatctcagctcactgcaacctctgcctcctggattcaagctattctcttgcctcggcctcctgagtagctgggattacaggtgtgcgccaccatgcccagctaatttttgtatttttagtagagaccaggtttcaccatgttgaccaggctggtctcgaactcctgacttcgggtgatccactggcctcagcctcccaaagtgctgggattataggcatgagccaccacacccggctgcaatggattttaaaatatgacaccaaaagtacatgcagcaaaagaaaaataaatttgacttcaaaatctaaaactttggttcatcaaaggatactttcaagaaagtgaaaaaacagtccacggaatgggagaaaatatttgcaaattatat

SEQ ID NO: 818515 - DNA, 541 bp, Homo sapiens
acctctcaataatgttacactggcaattaaatttcaacatgagtttttgtagggacaaaccacatccaaaccrtagcacacctggaccccatcccagcaatgggttggctccacagggcccctgaagtttatccatagataccatttaataatgcttatctgaactcacctttgatggcataacaatttctgttcttagatcccacctctctctaagtggttaaaattgtaccttttctgtttatgcgtattttaccacaattttaaaaatattccacccctttctgatctttgagttcttctaaatcaattgttcccaaagttgtggtccccagaccagcagcatcaacattagcatcacctgggagctcattagaaatgcatattcttgagccctacttgagacctactgcatcagacactcttggggtgggaccagcaacctgtgttttaacaagctctacagatgattttgattcaccttgaagtttgagaaccacttttaagtaataagtaagtagaattcacttctaagctttta

SEQ ID NO: 818516 - DNA, 624 bp, Homo sapiens
gcgcatcataatttagatggcttcttttatgaaatattttgtatcatttaaatagtccagtgtagttkgttttcattgctcttcatgatgtgaactgtgtatgcagtcacacttttcatttagtggaaaattcagttttcaaatttggcagaaagtggtataggtgggattatattttatttgaggtttccgttttccaggggaaaagagtttgcaatcagcagatcccagcctggtataagaatttttgaaatgttttacaggtgatgatgaacagtctacacagatggctgcaagttgggaagatgataaagttacagaagcatcttcaaacagttttgttgctattaaaatcgataccaaaaggtttgtttatgttttaatattttattaattttaaaatttataagtattgtctttgatttatagtgatactcttggactagaagaatgttgatgttgggctgggcactcccagcactttgggagactgaggtgggaggatcgcttgagcccaggagttagaggctagcctgggcaacatagtgagaccctgtctctataaaaaataataataaaattaggagtgtggtgtgtgcctttggtcctgctacttgggaggct

SEQ ID NO: 818517 - DNA, 581 bp, Homo sapiens
gattcccctgcctcagcctccaagtagctgggattacaggcgcgtacctccacgcctggctaatttttttttttttttttttgtatwttagcagagacggggtttcatcatgttggccagaatggtctcggctaattttgtgtttttagtagagacagggtttctccatgttggtcaggctggtctctatctcctgacctcagatgatccccttgccttggcctcccaaagtgctgggattacaggtgtgagccactgcgcccagccgattgtctttttctttatgatatctatttatctagagactttttcatccatatcctgtattgttttttaaatttctctaagttaattttcacctttctctagtacctccttgagtagtttaataatcaaccttctgaattctttatctggcaattcagagatttcttcttggtttggatccatagctggagagttagtgcgaccttttgggggtcttatagaaccttgttttgtcatattaccagaattaacatttctggttccttctcattcaggtagactgtttcagtggaaagatctagaactcaagggct

SEQ ID NO: 818518 - DNA, 570 bp, Homo sapiens
tgaacagccaggataaggtaggccatggagggccagctcctggcacccacctcacagggttggagggctgagaaccaagggcagcacctgcctcagcaggtcacatgccacagcgctggcttgcgattgcctcgtgccatctgggtcttctgggatcaggtcattcatgctgagcccaccagtccctgtcccaccttgtgtggagtatttggttggttcagaattccccaagtgatatcattcctagtgggagcagccagtccttcctgagtgactacatttaggatgaagagcttcaccaggaggggcccaagaagctccgtgaaggcaggagtagtcaggcagtgctgaccaggccaggccagcctcctgccaccttgaggagggctgtcactccatagcccattctgcactgtgggccttagaactggcaagaaacaccaaccctgtgcactccagggcatggtttaatgtttcatccagatagttccttggggacagggtcagggaaraagccctacccagagggccactggagaggatccaggcccgcagcccccaccccagtcc

SEQ ID NO: 818519 - DNA, 624 bp, Homo sapiens
gggagtgacccgattttccaggtgccgtctgtcacccctttctttgactaggaaagggaactccccgaccccttgcgcttcccaagtgaggcaatgcctcaccctgcttcggctggcacatggtgtgctgcacccactgtcctgcgcccactgtctggcactccctagtgagatgaacccggtacctcagatggaaatgcagaaatcacctgtcttctgcgtcgctcatgctgggagctgtagaccggagctgttcctatttggccatattggctgccaagttcctccaaattctaaaactctgatattttaggggtattcaggccatatattgatagaaatgttttaatacattagaactctaaatttctgaaaactattgggccagttaattaccttgcaatcattcatacttagagcaaacacatgtaggcacagacatcttacagtgaaaagatgaaaataaaatgatcctaaaagtaattttgcaagattggagggataccacctctcccttggcctctgtgccttgtacgtgcttctatactgatccatttgtttatgggsccatctccccatgacagactgagcacaattaaggaaagtagaactgtgtattcatct

SEQ ID NO: 818520 - DNA, 547 bp, Homo sapiens
taggatccaaagttgaaagtaaaatgatgcattttgggatggtgaaaatgttacatacaggtggcagttgcacaatgttgtgaatgtaccaagtgccactgaattgttcatttttaagtggttaattttatgctatgttaattttatctcaattttttaaaaagactccctcaatttagttttgtttcattcatctattccctatttatttgcctctctagattataaaattgttgagaacatggacaggagtttattcctctttgtgctacccagcacagtgcctggaataataaatatttactgaaggcatcactaagcatggagttgaacatcattgaggggctcagacactggcggctgagtcaatgccatgcttgctgcaggacagcctgcccaggccatctcagtctcaggtatttcttcatagcagtatacgaatggactaatacaggcccatattccaagacccttaggarcaagtggtaattgtttactatctagacgggactctcctacttgataaaagtctcctgctctatagctc

SEQ ID NO: 818521 - DNA, 633 bp, Homo sapiens
tttgggtgggtcgaatgctcactgctggtcctgtcctgctctaaaatgttcagatatgtaatgggttatttttgttggtatttgggtgggtcaaatgctcactgctggtctygtcctgctctaaaatgttcagatatgtaatgggttatttttgtcggtatttgggtggtatttttgctctatgacctcccatttctctgacgtctctagattcctttgttatttgtgatttctgcttctggtggtgacaacaaaatctgccattgctgtgcagccgcctcacccatggagcaggcttatcctctacaactattctacagaaaagacaagcaaggtctgcgtggagtgaaagcgccttctttccatatcggatgctggaagctgtgatgttggcaaacggctctttgcatgaagtactgtgtactgaaccaggaaagtgaggtgcagacgcggaagtcaggtgcagatgtgttgggcagatgagctatggtgatggcgggtggccattccctataagagagtggctcctctattattaacaaaataaaaattaaagaaggtttccattgagtttgctagttcttcactagcaatattcccagctggttgaccttcatttgttttagtttgatt

SEQ ID NO: 818522 - DNA, 568 bp, Homo sapiens
tccaacacagctttatcttacctgctgcccacaccctactcttgagagcacgtaytcctggcaggaccccaacccaggaaaccctcccatgccccaggtgccgtcccctgaccaaccagcctcactctcagagacaaggatgaaacgcatatgaatatccactctaatacggttcagagaaggatgatctgttatctgaaacttttactgcaaaagctcttttaatcaaaaccttcagaaaatttgaattttactccttgcaaagattatttggttaaaaaaaaaggacactcacaacaattaacatatgactggggatgtgtaagaacagcgaagagaactggacaggctgtgtcctgggaacagcgcccggtgcacacacccctttccatcttccctattggcaccttcagtccccggaggcgctgctgatgctcataggaagggactaaggccttcacagtctgtcaacaggagggtcccatggggctccatcacggtctctgggaccccccttccactgcagcaaagtggacaggtgcactgcatcaacatctcaacaccgggt

SEQ ID NO: 818523 - DNA, 605 bp, Homo sapiens
aacttaggaggagtgaagagtggaagagtgcccggtgcagggatgggtgggaggaacctggggtagtgtgcacgcctgagacagggtgggggacacgaagggagacaggcgagrgtgggacaggcaagggtgggtagtgtgcatccctgagacggggtgggggacacggggggagacaggcgagggtgggtagtgtgcatgcctgagacggggtgggggacacagggagacaggcgagggtggggagggagacgctgactccgtggtggaacgtgggtaggtgataggctggctccctgagcagcccctcccctgtggtgcagagctgtgggtctaggggtgagggagccatcatctcatctcacgccatggagacacaggtgtggcttctgttcctgtatctctagtaaatgtttccttctgagaaactgggtctgtcagcctctttctcaggcctcttggttccctcagacttgggggtaggtgtgcacaggcctgcctgccaggggacaggaaccccaggggaaataaaggtgatgctcaaacccagaccaccgaatgctctgaacacacttgcttgctttcaggtggaaacattcacagtg

SEQ ID NO: 818524 - DNA, 612 bp, Homo sapiens
gagaagcaaagtgcttttaaaatgtttgcgtattagcataaacgattacaaatatttgtgtgtttcctggtcgatgaaaacacgcygctgccagcaggatgagatccgaatgtgaatggccacacttcagcaggagtgttattccaccagcgggagcgttattcccccagcgggagcgttattccccttcccgtttcctgttccttggtgttgactttaatgcatatgttcagatacacagaggaatagaattgtcaaactcggtcaccagcaggtctctcattattagaggacaccctgatccaggacagcagaccaagggtgcttagtttttacactatttaatacacagattattttcatcaatgttaagactacagcttcctgaagtcagaccccaggccttttattggtacctacacacccggggtcaggtgcagcctgcacatggcaggtacttgaggaacacctgtggacaagctggaagagtccggtgggaagggttttcagtgacaagcataggaagggttcgtgacacctgttcctattacagacatggggaggttcaaagtgaaccagtcaggaataatctcagcctcaccccagaaggaa

SEQ ID NO: 818525 - DNA, 602 bp, Homo sapiens
tcactttccctcctgctgaagaggcctcagtgcccggcgggtgcacacaagcggcgcagtccctactctggcgggaaacacaggatgtgaaagtattttatgaaacagtttcagtgaagaagaaagtgggtcattttctaatttgaaaaatccagagtcttctatttttctttgaaatttaaggagaagcaaagtgcttttaaaatgtttgcgtattagcataaacgattacaaatatttgtgtgtttcctggtcgatgaaaacacgccgctgccagcaggatgagatccgaatgtgaatggccacacttcagcaggagtgttattccaccagcgggagcgttattcccccagcgggagcgttattccccttcccgtttcctgttccttggtgttgactttaatgcatatgttcagatacacagaggaatagaattgtcaaactcggtcaccagcaggtctctcattattagaggacaccctgatccaggacagcagaccaagggtgcttagtttttacactatttaatayacagattattttcatcaatgttaagactacagcttcctgaagtcagaccccaggccttttattggtaccta

SEQ ID NO: 818526 - DNA, 471 bp, Homo sapiens
gaaatggcgctcgcgattgtgacgatcgtgttcgtgctgccrtctttgcacagcacgcgtggaaatggcgctcgcgattgtgacgatcgtgttcgtgctgccgtctttgcacagcacgcgtggaaatggcgctcgcgattgtgacgatcgtgttcgtgctgccgtctttgcacagcacgcgtggaaatggcgctcgcgattgtgacgatcgtgttcgtgctgccgtctttgcacagcacgcgtggaaatggcgctcgcgattgtgacgatcgtgttcgtgctgccgtctttgcacagcacgcgtggaaatggcgctcgcgattgtgacgatcgtgttcgtgctgctgtctttgcacagcacgcgtggaaatggcgctcgttgtgatgattgtggtcatcacagttgtgttgtcatctcagcacagcacgcgtggaaatggcgctcattgtgatgactgtggtgatcacggt

SEQ ID NO: 818527 - DNA, 471 bp, Homo sapiens
gaaatggcgctcgcgattgtgacgatcgtgttcgtgctgccgtctttgcacagcacgcgtggaaatggcgctcgcgattgtgacgatcgtgttcgtgctgccgtctttgcacagcacgcgtggaaatggcgctcgcgattgtgacgatcgtgttcgtgctgccgtctttgcacagcacgcgtggaaatggcgctcgcgattgtgacgatcgtgttcgtgctgccgtctttgcacagcacgcgtggaaatggcgctcgcgattgtgacgatcgtgttcgtgctgccgtctttgcacagcacgcgtggaaatggcgctcgcgattgtgacgatcgtgttcgtgctgctgtctttgcacagcacgcgtggaaatggcgctcgttgtgatgattgtggtcatcacagttgtgttgtcatctcagcacagcacgcgtggaaatggcgctcrttgtgatgactgtggtgatcacggt

SEQ ID NO: 818528 - DNA, 487 bp, Homo sapiens
tatctacagagccctctctcactccatcatgcgtgcccgatgtctacagagccctctctcactccatcatgcgtgcccgatatctacagagccctctctcactccatcatgcgtgcccgatgtcgacagagccctctctcactccatcacgtgtgcccgatgtttacagagccctctctgactccatcatgtgtgcctgatgtttacagagccctctctcactccttcatgtgtgcccaatgtttacagagccctctctcactccttcatgtgtggccaatgtttacagagccctccctcactacatcatgtgtggccgatgtttacagagccctctctcattacatcttctgtgcccgatgtttacagagccctctctgactccatcatgtgtgccygatgtctacagagccctctctcactccatcatgcgtgcccgatgtcgacagagccctctctcactccatcacgtgtgcccgatgtttac

SEQ ID NO: 818529 - DNA, 487 bp, Homo sapiens
tatctacagagccctctctcactccatcatgcgtgcccgatgtctacagagccctctctcactccatcatgcgtgcccgatatctacagagccctctctcactccatcatgcgtgcccgatgtcgacagagccctctctcactccatcacgtgtgcccgatgtttacagagccctctctgactccatcatgtgtgcctgatgtttacagagccctctctcactccttcatgtgtgcccaatgtttacagagccctctctcactccttcatgtgtggccaatgtttacagagccctccctcactacatcatgtgtggccgatgtttacagagccctctctcattacatcttctgtgcccgatgtttacagagccctctctgactccatcatgtgtgcccgatgtytacagagccctctctcactccatcatgcgtgcccgatgtcgacagagccctctctcactccatcacgtgtgcccgatgtttac

SEQ ID NO: 818530 - DNA, 516 bp, Homo sapiens
ggcaacacagcaagtctctcaaaaaaaaaaaaaaaaaaaatactagcacagtggaccctgaagcgccagcagcaaaccctctgagatgtgcgtccggagtggccrtgccaccagctttttctgcccactgttttggaaaagtgttgattttggaatgtggtttcccatcactgtgtggaccatgggtgaatggggagggtggatggtctctggggccgtcctctctccgcctccagatcagcaggcagtggatgggtatttgggtctttcttgtactcacacggatgcgatgtgtgattcctggtaggaaacaagaagcagctcactggcaacaccacactgccccttgcattccgaggagtcatgtagtcatgaggggcatgagcaagatggagacccagaggctcacgctcacatgatgacggccgagccgggcctgcaacggaaaggcctgtggcatggggtaacttcagagccttcttctcaacaggcacggcccgcagagccactggaggt

SEQ ID NO: 818531 - DNA, 513 bp, Homo sapiens
ttgtttacttgatgtgatcccgtttgtccatttttgctttggttatgtgcacttgtggggtattgctcaagaattttatgcccagacaagtgtcctggagawttttcccaatgttttctgatagtagttttatagttagcagtcttagatttaagtattttatccatttttatttgagttttgtacatagtgagagatagaggtctagtttcattcttctgcatatgggtatctagttttcccagaaccacatattgaagagactgtcttttttgcagtgtatgtttttggcacctttgtcaaaaatgagttcactctaggtgtgcagatttgtttctgagttctctattctgttcctttggttatgtgtctgttgttatgctactaccatgctgttttgatgactgtggctctagagtataatttgaagtcaagtaatgtgatttcctccgttttgttccttttttaggatagccttgactattctgggtcttttgtggtttcatatacatt

SEQ ID NO: 818532 - DNA, 606 bp, Homo sapiens
ggctaccaactacctatctggcaagaaatctatctcctttgygggctgtgcaacccagcacttcctctatttgtgtctaggtggtgctgaatgttttctcttagctgtcatgtcctatgaccgctatgttgccatctgtcatccactgcgctatgctgtgctcatgaacaagaaggtgggactgatgatggctgtcatgtcatggttgggggcatccgtgaactccctaattcacatggcgatcttgatgcacttccctttctgtgggcctcggaaagtctaccacttctactgtgagttcccagctgttgtgaagttggtatgtggcgacatcactgtgtatgagaccacagtgtacatcagcagcattctcctcctcctccccatcttcctgatttctacatcctatgtcttcatccttcaaagtgtcattcagatgcgctcatctgggagcaagagaaatgcctttgccacttgtggctcccacctcacggtggtttctctttggtttggtgcctgcatcttctcctacatgagacccaggtcccagtgcactctattgcagaacaaagttggttctgtgttctacagcatcattacgcccac

SEQ ID NO: 818533 - DNA, 541 bp, Homo sapiens
ctgatgggaaaatttctgcaggctgagggccaaactgccctcagtgaatcccattgtggttaccaaggtgttaaccaaaaagtgactgaggcaggtgtcttgattgatagaggtttattgagtcaaarcttgaggggacacctggaaacacatgagccacaggggtagctgcgacctgtgtttttccaaagagggttttgggaacttccgaatttaaagaggaaagaaccagcaggaaggaaaaaaggggggaaagagtaggcagtgtggcaaatgattacatttgtgtaaggcaccaattagctctcatcgaacctgcactttacatgtgaaaagacagagtagaggaaaaaatcaattatgcattcatgttgtactcagaaaatctacattttacatgagatatacatgtgaaaagaaagagtagaggaaaagtcagttacatattcatctcaaggtaggtggagggatgatttctggtcttgtccttattctgtacctgtgataagctggtaatttacatgatcaaggtgtgagtcaa

SEQ ID NO: 818534 - DNA, 536 bp, Homo sapiens
tacaattttgcctgtataagggtaaatttctctcctgaaatttacccctgcctctataaacccttgcttgtaagctgccagggaggttggctcatttttttttttttttttttttgagacggagtttcacttttgttgcccaggcttagattttccacattctctcaagttttataaatatctatttatgctttgtgattttgtgattttggctttttaaaattgaaatctgcatttgatctgaaatttgttttgatcaatgtcatttccactttttacatgaagaatgtgtattgcttgtttttagtaagacaaaccctaagttttctttttgaccagaggaataaaaggcacattttaataaaacagtaaaatccacagataatcccacagcttgggccaaatgatctctgctgagatctctgcagcaattarctttaggaggggtttggcctttagagtgggcagctctgaaacagcttcttttttcaggatggtgggctggtacgcggctgcttcagcagggataccttcac

SEQ ID NO: 818535 - DNA, 639 bp, Homo sapiens
ataatttttttaacaatttttttgttcaaactaggatccaaattgaaattggccaattggccaatatgtcttttaagtctcttttgaggctggctcatgcttgtaatccaagcactttgggaggcygaggcaggaggattacttgaggctaggaattcaagacgagcctgggcaacagagtgaaactccgtctctacaaaaaaaatttaaaaaactagccgggcatggtggcacatgcctgtagtcccagctactctggaggctgaggtgcgaggatggcttgagcctaggagttcgaagttgcagtgagctatgactggaccattgcactccattctgggtgacagagtgagaccctgtctcaaaaaattttttaaaaatttcttttgatctatagatttctctccactcccctttgtttgtttgtttgttgaaaatggatggtttgtcctctagagttttctgcaatctggattttattaattacatccctctggtgtcatttagcacattccttggttgcctgtattcctcaaaactcagcattagaactggagacctggacagattcaagttctaatttttggcaaaagtgtgtcttaggtgttagtgtgttctcgcattgggagaaaaagacat

SEQ ID NO: 818536 - DNA, 607 bp, Homo sapiens
tactatgaacacttttatgcacacaaattagaaaatctggaagagatggataaattcctcccatattaaatcacgaaaaaatagaaactctgaacagaccaataattagcaagattgaaacaataataaaaaaawttgccaacaaaaaaatgtccagaaccagatggactgacaggtgaattctattagacattcaaagaagaattgataccaatcttactgaaactattccaaaagatagaaaaagagggactcctccataaatcattctatgaagccagtatcatcctaattccaaaactgggaaaggacataacaataaaagaaaactacagactaagatccctgatgaacacagatgcaaaaatactcaacaaaatactagctgaatccaacagcatatcaaaaaggtaatacaataggatcaagtgggtttcataccagaaatgcaaggatggtttaacattcacaagtcaacaaatgtgacacatcacatcaacagcattaaaaacaaaaatcatatgatcatctcaatcaatgcagaaaaagcatttgataaaatccagcaaaactggtatacaagagacatacctcaaggttataaaag

SEQ ID NO: 818537 - DNA, 549 bp, Homo sapiens
aaatttgccatggacagctgcccaaccttgacctgctcaatctcttccagaccttctgccagaaagtgggcctgctgtgcacgcttcagggtaagctgcagccccaggactggacattgttggacgaactgctgcagggcctgcaaacactgctgctcatgattttgtggcaggcttcccgtggcctcttcctgcactaccacgtggaggccctaaccctgcgtcgcatcagtagcttccgccagtacaagtatgacctggtggcagcgggcaaggctttggagggcatgttctgcaagctcaaccacctcctggaacacccgcaccagctgttcttcctctacctgctccccactctgtcccgcttcgtctccatcggcctctacatgcccgccaccagcttcttgctcctggtccttggtttcaaggctctgcaactgtggatgcagctgcatgaggccggagtgggccttgaggagctcaggggggtccctgaccctagtgtccccsctcccccagcacaggatggtaagcacacaggtcccagac

SEQ ID NO: 818538 - DNA, 535 bp, Homo sapiens
aattattttatccactctaaattttctgatataatcatatttatgaaataatttctaaaccacataagaaattagtcaaaaataaacgtaacttcatgcattaaaaaraggtgtaatggaattttaaaaaacaagtaacctaaaaatgaaatttatgtcccagcactttggaagactgagacaagaggatcacttgagcccaggagttcgagaccagcctgggcaacacagcgagacctcatctctactaaaaataaaaaaattagctgggtgtgatagcatgcgcctatagtcccagctactcaggaggctgaggtgggaggatggctttgagccaaggagagtttgagtttgcagtgagctacgaacatgccactgaactccatcctggcaacagaacaagactgtgtctcaaaaaaaaaaaaaatatggaaaacagtatgacagttcctcaaaaaaactggaaataagagttgggtgcagtggcatagcgcctttagtcccagctagcagagaggctgaaaaacgaggatcc

SEQ ID NO: 818539 - DNA, 572 bp, Homo sapiens
gaaataatctctccagttaagccaaagagacaaattataaacaacaaattcagacagcaatgaaaggaatctttaactgagacagagactatatttgttgtcaataacaaagagaatgataactagtattacagccagagctgtagaaccttagaatattacagttttgtccagctacatttttcagttgataggtacatgtgtatgttgggatagctgaaaaatatggagtccaaatagtaaaattactaccctgttcaagctctattgctttctcaaatctattgtacaaatctcgatttaattgccctatgcccacttgaattataatatgactgcataataaatgtaatattatgaaatattataatatattgcttaaatataaatttaattcaatatcatttagtttcagaaagcttttataaatcaagggatcaattttcatagcattaacatatctaygcacatgattttaaaaccattttgcctaaatatgcttatgttggtttagtttacttataaaacaatataagaaatatatacatcaaactttttaaaacagagtttca

SEQ ID NO: 818540 - DNA, 613 bp, Homo sapiens
gcagagaaaatggaatgcttatacactgctggtgggagtataaattagtgcagccactatggagagcagtttggatatttttcaaagaacagggttgaactaccatttgacacagtaatctcattactgggtatatactcaaaggaaaataaattactgtactgaaaatacaggtatccatatgctcatcatagcactattcacaatagcaaagacatgaaaccaactcaggtgctcatcagtggaggattaaagaaaatgcgatacatatgcaccatagaaaataatgaaattatgttatttgcagcaacattgaatagagctggaggtgattatcctaagtaaactaatgcacaagctgaaaaccaaataccacatgctctcacttataagtgggaggtaaacattgggtacacatggacataaagatgggaacaatagacattggagaatacaacaggggaagggaagagggagacaagggctgaaaaactacctattgggtactatgatcacttcctgggtgacaggttgaattgtactccaaaccccagcatcacacaatatacctttgtaacaagcctgcacrtgtacccaagaatctaagatatat

SEQ ID NO: 818541 - DNA, 623 bp, Homo sapiens
agtaataagatagcatttgcaagcctcatgataacctcaaactaaaaaaaaatacgactgatacacaaaagataaaaagaaaaaaactaaattatattaccagagaaaatcaccttcagtggggaaagataaaaaggaaataaaaaaggaagagatgaacacaaaacaatcagaaaacaaataacaaaattgcaggattggctgagtggattaaaaaagaaaagtgagacatattgacctgttgcctacaagaaacacaggtaacctataaaggcacacataaactgaaaatatagggatgaaaaaaatatatcccatgccaatgcaaatcaaaacagaataggagttgctatacatatatcagacaaaatagaggtcaaaacaaaaactataagacacaaagaaagtccatatataatgttaaatagtcaattcaacaagaggatataacaattttaaatatacctgcacccaacattgcagcacccagttatataaggaaaayattagagctaaagagagagactccaatacaaaaatatagatttcaacacccactttcaacactggacacatctttcagacagaatctcaacaaagaaacattggacttagtctgcact

SEQ ID NO: 818542 - DNA, 623 bp, Homo sapiens
ctataataatttattatggtggtcaaatrttctagattttggccagtaggggcctgtcaacctgaattttgcactctacaacatgttcctattacattttgaacactttcttactttttggtataagataaaccagtgtggtcttttgctgctcttattgttctggttctggaatctataatttcttcaagtatatctggttcctgtttgtagaccttggtatttagaaactgagatctgacactggacatattcattgcaattgagttttggctgcttctaggttcactcagtggaataaaagttatgaaatgtgtgtgcgtatgtgtgcatgtgtgtacacatgcagactctctcctcacttagtctgagctcagatccctcaccactacctccttcaggctgccataaagcagggacacttttcatcgtgtagctgggccatgtcaccatgtagaagctctcttaaccatgcagggactctaacatgctagccatgctaccatcccttgttcttcaggcatgcctttctcaccctccttggactccaacacctttccttgggtcacaatagctttcttttctcccttggcacagacaactactttgctcagcctcacatg

SEQ ID NO: 818543 - DNA, 614 bp, Homo sapiens
ggatcacttgaacctgggaggctgcagtgagccatgatcatcccattgcactccagcatgggcaacagagttataccctgtctcaataatacatataataataaaatagtcatcctgtctggtataaaatgatatctccttgtgattttaattttcatttctctgatgattagtgatgttgagcatttttatcatatatttgttggccatttgtatttcttcttttgagaaatgtctgtttatgtcttttgcccagtttttaatggggttgtttgttttttctttttttccttttttcaatcatactttaagttttagggtacatgtgcacaacatgcaggtttgttacatatgtatacatgtgccatgttggtgtgctgcacccattaacttgtcatttaacattaagtgtatctcctaacactatccctcccgcctccccccaccccacaacaggctccagtgtgtgatgttcccctttctgtgtccatgtgttctcattgttcaattcccacctrtgagcgagaacatgcggtgtttgtttttttgtccttgggatagtttgctgagaatgatggtttccagcttcatccatatccctacaaaggacatta

SEQ ID NO: 818544 - DNA, 558 bp, Homo sapiens
ctagaggataaagtgagggaaaatacctttaagacagcagcaaaataargataaaaattttttggaaaaactcaagtgtttacattttatataagagaagttttagaacactgctgaatgtctcaaaagaagaactgaacaaattaaaagacgtcccttcttattgaatagaaaaaatcaacactagaaggatgtaaatttccatcaagtttttaataatgtaaggcaatattaaaaaaataactaacatgcctttgtttttgaatttttgtgatgatggtttcttattttgttgtttgtatatttttgtttgtgcaatgaaactagaaaactaattttgaagttcataaataaaactaaaccagcaaggctaggcagaaaaatctcttaaaaagaaaagcaataaagtaaagagcctctttgctgacagatattaaaacatattacagatgctcctcaacttacaatagggttatgtcctgataaatccatcaaaagtcaaaatatcattagtataaaatgtgtttaatacctcaataagcccactggaaaataaaa

SEQ ID NO: 818545 - DNA, 684 bp, Homo sapiens
cacgtatctctagatacacaatgctcaaggtgttttcctgaggcccttaaaggcaacagctgtcytattcatatctctggtctcctttcatggtgccagatttagcatgaatcaataaaagtgtttatttacaaaataagggaagcttaacaaaatgattaataaagtcctctctacaaataataaacagaaagacaaacccttcctataagttagcaaaaatgactggctttcctttttacctgaatatgacactgaagtaaattaaggggttccttccatttttcctttaccccttcctcctcaacacagtatctgtggttaaatctacccacattaaagatttaggatgtaagagccactctcaaagaagaaatgtatcctgggagctttataacactgaaacagaataaaagtcactgtgccaaaagaaacctgagaaataatcatttccgtttatctgtgtgttaaaggaggctactagagagaacttttgtcagacactgaagttatgaaaaaaactgagtctacacttcagagcttttcagaacattctgctatgtactgaaaagcaaggaaagtaagagcggcaaacacagctagaacatagtaaaggaaccaatacaacccataaagttatttgatgtccactatttcactggatcccccaaagaaactatgagg

SEQ ID NO: 818546 - DNA, 614 bp, Homo sapiens
  misc_feature 1, 2, 3, 4, 5: n = A,T,C or G
nnnnnttttaggtaatattggcaaagtgatgaaaaataagtccctagctgtccttccaaaatgaaggagatgtaaagactttcccagacaagcaaaagctgaaggaattcatcaccaccacaccagtcttacaagaaatgctaaagggagctcttcgtgctgaaagaactgagtgctaattagtaacttgaaagcatgaatgtataaaactcactggtagaagtaagtacacagtcaacttcagatgctctaatattgtaatggtggtatgtaagtcactaatatctttagtacaaaagttaaaagacaacactgttaaaaatagtgctttagatttataagctacaataatttgctaaggaatacacaatataaaattatgtaaattgtgacatcaaaaacataaaatatgaggaggttaagtaaaagtgtagagttatattttacgtgatcaatgttaagttgctatcagcttaggatagtatgttataataagatactttattttagcttcayggtaagcacaaagcaaaaacctatggtagataccaaaagacagaaaaatatggaatcaaagcataccactagagataaattttaatcacaaaggaaga

SEQ ID NO: 818547 - DNA, 635 bp, Homo sapiens
ggagcttcaatggggaaactataaaaagaaggaatgatttgtggatccaccaaagaccaatttgaaataatgargtctgaccagagaatgctgggaaaacaacagaagcaaacatgttaacttagaatccagcaatcactgacagaattgaaaatattttctaggaaaagccagaaagtgatctataaatgcagacattgagagtgaatagccctttccaaaagagctaccggcccagatattaaggcaaactccagatgtacagatgggaagaacgtggaccattaagtgagcccctatctttctctttcttctacgtcaggactcccatctagacaaaaagagtctttcacagtatttgtcaactcttgtattcgatatttacacagaccttcataatataaaagaaaaacctaatattttcaaagtatttggtgggaagatgctactcaaaaattagtgaatataatacttaaagtcaatcatggactcctccatagtcaataaacaaaacagaatttgttgctgatggggaagcggtgaagagggaaagatatccttataagtcattcatagttttactatatgcagttaaaactcctaaagttaatggaaaatgactaagcctttatgac

SEQ ID NO: 818548 - DNA, 645 bp, Homo sapiens
caccctgagctgccgcataacctcaggccactcacaaccctgaattggaataagtggataaaaaatcatcttactcatttttattaatctgtttaaaatgcatgtagggctcacatttatttctatgtttaatattagaagtgttttggtttttatttagaacttcggtgatgtttttgtgaccagcatgccataggaatttaactcttgcttgtatgagttagcctatgataaaattgtttttgttatacatcatttcattcaaagttgcagtttccaagaatctattgaggacattaagtgagtattttgttcttacaaataatgctatgcaagcagacacacctgtaagacaaatactagaggtggaaaagccaggtcaaagagcaaatgctcttgtcgtttatatttttcaggactgccttctctagggttcatataaatttatactcaatctgaaacatgcactccaaaaaatacaagcaaattgaatacagtgacctataaaaagaattgtatacaatgaccaagtgggatttatcccaggacggcaaggttggtytggacatatgaaaatcaattaatataattcatcatatcagtagaataaaaacaaaaattacatgattatctcaataaacacag

SEQ ID NO: 818549 - DNA, 453 bp, Homo sapiens
tggctaacacagtgaaaccccatctctactaaaaatacaaaaaattagccgggcatggtggcacgcgcctgtcgtcccagctgctcgggaggctgaggcaggagaatcgcttgaacccrggaggcaaaggttgcagtgagctgagatagtgccactgcactccagcataagtgacagagcgagattccatctcaaaaaaaaaaaatttaaaaaatttaaaaagcataggaccacatggatttgctggtcaactctctaaataaataaataagaatggaaaataatccttcccaaactcctccaaaaaatagaataggaggcagcaattcctaactcattctaagaggtaagcattgccctctcatgcccactttcactgctgttactcaatattgtactgtaaattctaggcagaaaaagtagacgtaaaaaagatataaaaggctgacatag

SEQ ID NO: 818550 - DNA, 640 bp, Homo sapiens
caaaaatccactccaaaatggagaaaattttcaggatgttgggctagagagctctcaggtttggcaccaaataatartccataaaagaaaaaactgatatacaccaattggtactgtccaggccagaaaagtccattttcatatatacataaacccttatagagtcaatgacagatttacctgtgtttgagagcccctgcagcctggtcagggatgtgagggaatgagggatggacaggtcagcaggaaaggtttcaaaaagattaggcacaaagagcactgctagtgatggcaaagatcaggtaatgacacaaaatactttaaagtggcaggcatacttaagggtatgttatgatctacatgatcaaaaccaaatttgcatcattaggctgaggaatcgataagaaaagtgggtgtgtcctggaagtatggtatgcaagacatactagtggagttaatttacaagaacatccgaagaccatttgaggaaagaggctcaaatttcagccttgggaataaaacatagagatgggtattggttagaaaaacacataacaagttaatgacaatctactggatgtggagacagaagtagcaaaatactgcagtaaagaacaaaagatcatggttgtctttcatg

SEQ ID NO: 818551 - DNA, 594 bp, Homo sapiens
tggtatttttaaatgacagcagaaaatgttatttaaagatatttggggacattattattgacttggaaatgaataacaatatcacctaagtcttcaaaaatcataacaaataaacagcatcaattaatgagatctaatatatttgcaaagtctactgcactgtgcaaacttctttcacatatttaatcttttatgatcctgacaactctgacactttctatttagactgcctccattttgcagatgaggaaattaatatgagaaactaccttttcaccatttcattttacagctctcataaaaatgtacataagtgaacgcagatccttgcaagagcaaatacgttcctctgtcagaggcgtttgaaccagagagactccatctttaataggggctggataaaataagcctgagacctactggactccattcccaggaggttaggcattctaggtcactggatgagataaggggttggcacaacacacaggtcatgaagaccttgctgataaaayaggctttggtaaagaacctggccaaaaccaagatggtgacaaatgtgaactctggttgtcctcactgctcattatatgc

SEQ ID NO: 818552 - DNA, 518 bp, Homo sapiens
cttttaagtaagagaaaaaaaataaaaaaaacaagagaggcaagggaggggcagggattggagacrggatggggcacgagagaccacctgagtgtaaagttgcaatacgagttctctcctatttctctcttcaatagttactttacagtagacgataaaagccctaaaaaggctgggcgcagtggctcacacgtgtaataccaacacaaggccaaggtgggaagattgcctgagtccaggagttcgagaccagccctggcaacacagacccggtctctacaaaaaaaattttttttaattagctgggcatggtggtgcacacctgtagtcccagctactcaggatgctgacgtaagagggtcaactgagcccaggaagtcgaggctgcagggagtcatgatcatgccaccacactccagcctgggcaacagagcaaagctgtcacacacacacaaaaaaaaaaagccctgtaaatgttactttagcctcagtaattccacttctgataatccatcccc

SEQ ID NO: 818553 - DNA, 518 bp, Homo sapiens
cttttaagtaagagaaaaaaaataaaaaaaacaagagaggcaagggaggggcagggattggagacaggatggggcasgagagaccacctgagtgtaaagttgcaatacgagttctctcctatttctctcttcaatagttactttacagtagacgataaaagccctaaaaaggctgggcgcagtggctcacacgtgtaataccaacacaaggccaaggtgggaagattgcctgagtccaggagttcgagaccagccctggcaacacagacccggtctctacaaaaaaaattttttttaattagctgggcatggtggtgcacacctgtagtcccagctactcaggatgctgacgtaagagggtcaactgagcccaggaagtcgaggctgcagggagtcatgatcatgccaccacactccagcctgggcaacagagcaaagctgtcacacacacacaaaaaaaaaaagccctgtaaatgttactttagcctcagtaattccacttctgataatccatcccc

SEQ ID NO: 818554 - DNA, 652 bp, Homo sapiens
atctagaaaatagcctctgaagggcaaatctaagagttattggccctaaagagaaggtggagagagacatagggrtaaaaagtgtattcaaagggataataacagagaacttcccaaagctagggaattatatcaatattcaagtacaagaaggttatagaacaccaagcagatttaacccaaagaagactacctcaaggcatttaataatcaaactcccaaaggtcaaagataaagaaaggactctaaaagcaacaggagaaaataaacaaataatatatagtggcgctccaaaatgtctgacagcagagagtggtatgacatacacaaagtgtggaaaaaaaaaaaaaaaagatctcacctcttattctagaatagtatatccagcaaaaatatccttcatgcatggagatataaagactttctgagacaagcaaaagttgatatgtcatcaacaacagacctgtcctataagaaatgctaaagggatttcttaagaaaaggacattaatgagcaataagaatcaattaaaaatacaaaactcactgatgatagtaaatatgcagagaaacgcaggatagtataacattataattgcgatgtttaaactactaatatcttgagtagaaagactaaaagacaaaccaatca

SEQ ID NO: 818555 - DNA, 628 bp, Homo sapiens
ggaacagaaaaccaaatactgcttgttctcacttataagtaggagctaaatgatgagagcaccgggacacaaagagggsaacaatagacaatggggcctaccagtgggtgaagggtagcaggagggagaggatcagaaaaaataactattgggtaccaggcttagtacctgggtgatgaaataatctatacaccaaacccccatgatacaagtttacctatataacaaacctacacatgtaccccgaacctaacagttaaaaaagaatcggctgggtgagtgcagcaaggtggcagaatagaagcctatactgtctgtcctcccccaacaggaacaccaaattttaacaactatatgcacacagaaaagcaccgtcacgagaaccaaaaatcaggtgagcaatcacagtacctggttttaatgtgtacggctaaaagaggaactgaaaagtgtcggagatatagtcttgaatcaccacccctcccctatctatcagcagcagctgcctggtatggcgagctaacttgcacacttggaggagggagagagcagcgactgggggacttcacactgaattcagtgctgctctgtcacagtggagagcaaagctgtgctgggctcagccaac

SEQ ID NO: 818556 - DNA, 592 bp, Homo sapiens
ttcagtcttgagactcagactggctctccttgctcctcaagcttgcggatggcctattgtgggaccttgtgatcatgtaagtaaatacttaataaactcccatatatatatacacacacacatatatacattatatatacacacacataggcattatatatacacctatatacattatatataataggatctatattatataggaatattatatattttacatatatatatatataaaatgctaagtactctacttctaatagtgtggaaaacactgatagtccttggtgtgaactgtttagagaattatgcaaaataaatgcatttgacatgacactcctgcttcactgctcatgagaggcaaggagtttagtgactctatacgtaatacctttgaccatatgtggggaaccaaggaacataatgaagctggttggttgctcctcagttcagtggacaamgtgatgaaagaaaatgatgaactcagggattctgtctcctggcttcagaagcagatactgagctgcaaatctgctaagattatcctgagctgaaattacggtaaaacagacacaaacttttatcatgtgag

SEQ ID NO: 818557 - DNA, 622 bp, Homo sapiens
tctatctttcaaattgcttakttattttagcacttcagttgtgaatcattgtactaagtaattgcaagctttaacttctgtttgcatatgctaaggtgtgattagatataatcaaacaatgcaaactgataaatacaatgcaaagtttaatggcttaatgtgcccccatcatatcaccagatgcatcacaaaagtcttttaaattagtgatcaaatattatttgttttgccaaaccatacaattttatttgcaaacaaatttagaaagttatatttaaaagtaatcatgccaatatgaaacacaaaacctgttctggtgaaatagtcacacttagacatttgtgccagtaagaattattttacattgtgttttgaaattcagaacttgaaaataaattttgtggtttattgaacaccttcctgagtaatatgctaacccatgaggcaaaaagtcctggcccctgctggcctgaccttcttcatttacctgggggtggggagggcccctacaaggataattcaggagctggaagagcaaggcacagaggcaataaagaagggtaagtgggaggagaaatacagaggagaatggaggaagcaacagagggtgcaagaagctggt

SEQ ID NO: 818558 - DNA, 647 bp, Homo sapiens
gtgagactctgtctcaataaataataataataataataataataataataataataatartagtagtagtagtagtagtagtagtagtagtaatagtaggccgggcgcagtggctcacgcctataatcccagcacttttggaggccgaggcaggcggatcacgaggtcagatcaagaccgtcctggctaacacagtgaaacccgtctctactaaaaatataaaaaattagctgggcgtggttgcagacgcctgtagtcccagctactcgggaggctgaggcaggagaatggcctgaacctaggaggcggaccttgcagtgagccgagattgtgccactgcactccagcctgggcgacagagcgagactccatctcaaaaaaaaaaaaaaaatagtaacagtaataaaataaaaattatttgtgaaggatgtgagctttcacctaaagccacagcaaatgaaacaatctttgtaggtgcagcctcatcctcagatgcttctggtctctgccacctcgagctcttcaacattcatttgtgttctttgctgttttgttttctttttctttcttttttttttttaacccgacacttcagtagctgttttgtatacttaaacatttgaataaaacttaatttttaagcatct

SEQ ID NO: 818559 - DNA, 647 bp, Homo sapiens
gtgagactctgtctcaataaataataataataataataataataataataataataataatagtagtagtagtagtagtagtagtagtagtaawagtaggccgggcgcagtggctcacgcctataatcccagcacttttggaggccgaggcaggcggatcacgaggtcagatcaagaccgtcctggctaacacagtgaaacccgtctctactaaaaatataaaaaattagctgggcgtggttgcagacgcctgtagtcccagctactcgggaggctgaggcaggagaatggcctgaacctaggaggcggaccttgcagtgagccgagattgtgccactgcactccagcctgggcgacagagcgagactccatctcaaaaaaaaaaaaaaaatagtaacagtaataaaataaaaattatttgtgaaggatgtgagctttcacctaaagccacagcaaatgaaacaatctttgtaggtgcagcctcatcctcagatgcttctggtctctgccacctcgagctcttcaacattcatttgtgttctttgctgttttgttttctttttctttcttttttttttttaacccgacacttcagtagctgttttgtatacttaaacatttgaataaaacttaatttttaagcatct

SEQ ID NO: 818560 - DNA, 563 bp, Homo sapiens
tcccagcactttgggaggccgaggcgggcgggtcacaaagtcaggagatcgagaccaacctggctaacacggtgaaaccctgtctttactaaaaatacaaaaaattagccaggcgtggtggcaggtgcctgtagtcccagttactcaggaggctgaggcaggagaatggagtgaacctgggaggcggagcttgcagtgagccgagatcgcgccactgcactctagcctgggcgacaaagcgagactcgctttcaaaaaataaataaataaataaataaataaataaataaggacacttaacggtattgagaccttctcaatcggggggccccaatcaacggtatttaaaccttctcatatcggggggccctgggtttctaatataagtgtatgcagcatgcatctgactgggtacagcagtgaaaatccacacatggcctcggctggctctccccacactgccccacactccccaccaytgccacttccaatagcaatggtgagggtgaagattctcaatcagcaaggctctctttcctcctaggcccccaagatctctccac

SEQ ID NO: 818561 - DNA, 631 bp, Homo sapiens
ataatgaggtcaggagtttaaaaccagcctggccagcatggtgaaaccccatctctactaaaaacacaaaaaattagttgagcatggtggcacgggcctgtagtctcagctacttgggaggctgaggcaggagaattgcttgaacccagcaggcggaggttgcagtgagctgagatcatgccactgcactccagcctgggcaacagagcaagactctgtcccccccaaaaaaaaaaaaaaaagtaaattccgggactcccaccccagtcctgctgaaccatactctggagatgtggctttacctttggaaactccttctggctatgacctcagcatggctatcattgaggatgtctcctgcggcaaagataggacaccaggtgaagacatatggaagctggagagggtctggttcctagaagcagaacacagcagtcccaccagcacccaggatggtcatgtagctcctggagagctttgccagaaggtaccacaatcatgaataacaatgcatcaggtgcasggtttctcaacccagcactgtagacattttgggccagaaaattttttgttgtgggggatctattccatccatacactgtagactgtttattagtagtattcctggcct

SEQ ID NO: 818562 - DNA, 541 bp, Homo sapiens
ttggattcagaaaatagaacaaggcctggacttttaaaaaaatgatgaaactcagcctaagatctccaagaatcttttaaaacrgttgagaacttatttagtcttaagctataggtagaactgaggcctgaaatgaggttttcttccctgaaggcagtcctggcatgctcctccactgggagcctgtgggccctgctgaggctcactcagttaatcatccagtttgcttgctcccaaacttggtcaactctttgacattgtaagagtctatagctgcctgatcctcaagtctgacaaaatgactgcggcacagtaaagggctctgaagtctctttacagacttatacctcccttggtagcacttgctttgactgtcagactattgtgctgcctggaagcaatctttgggactgtaacttgtggcctgaatgtaggcagaggcattagaattcccgttttctgtgtgtttgacagcccagctttagtcccctgtggaaaaaggaaagtggatgggctccgtctaacctcctggtcagtcctt

SEQ ID NO: 818563 - DNA, 589 bp, Homo sapiens
ggagcatgccacaatgtccagctaattcttctatattttttgcagaattgggtcttgctctgttgcccaggctggtcttgaactcctgggctcaagcaatctttaatcttcctgtttcggcctcccaaaatgctaggattacaagcatgagccaccatgcctgttctagatatttttaagttgccaaaacagtagaaagaatgagtagaatgctaacaagtataacactatggattttttgtttcaaaatttaacaaaggattaattgtaaaatatttaataaaatccagagcacagacacatggactgctacccaattaattctataaaacttcaaaaagatttctatcaagatttgagaatgcacacaaataacagttgtgaaaagaaaaaccttagacgaattaaatttcacagaggtcaattgagcaaacaatgatttgcaaattgggcagttccctgaaccagagagactctggtgctgttgggtgattggggaagatttaaggrctgaaaaagggccgggtgcagtggctcacacttgtgatctcagcactttgggaggccgagggggacagatcacttgaga

SEQ ID NO: 818564 - DNA, 524 bp, Homo sapiens
atctctttacttattcatttactttttcttcacttaagatttcctgggtgtattctgcgtgtcygacatgattctcaatgctgggctcacacaagggaacaaaagcgacacagctgctgcccttctaggacttacattttagcagatggggcagcccacagaccaccagataaacgtatgatgtcacgtggtgagaaggtatgacggagatttctgaggaggggatatttgagcagagtcctgaacgatgggcacatgatcccatgtgcatatccaggtggtgggcacagcaagaccaagtatctcgggcagggctttgctgggtttgcttgaggatcaggaagaaagtctgcagagcagcagcaggaggcgtggtgggactcaggctggggtgcatggcaggctgcaggaggggcttatggtactggtgaggccgtgggttttaactgagagaggaagccattgtagggtggtcttcagtagaagaactttgtgacctaatttaattgtcaatggctcactct

SEQ ID NO: 818565 - DNA, 531 bp, Homo sapiens
agagcagaaagggattcagtttcaattatcaaatcataactgaattgtaaccataggttggctacagatactgcagcttggcaaaaatcagtgaaagtattctgtaaraattaattgcttatgtaaaatttgcaataaagagtattgtgtattttattatttgtaaattgtgtgatatacatcctttatatgagtaaagtttataatgacattatatacatgtatatatattctagcaatttttatttggcgagcttgttgttaaatatttacctgcaaatcactgtgtgcgttcttcattgtaaaatgcaatcatagttgattttgaacaagggaatgtagagccctagctacgttatgggcattatctccccacttttcctagagatgtatcctctcctattactttataaaatatatgtagcttaacttttgttttctggggggtaagggcattcagaatatccccatctctgctctgcctgtaaaatacctatacatgctttatctttttttatatcataaagcata

SEQ ID NO: 818566 - DNA, 620 bp, Homo sapiens
tcattaaacccttatcaatgtcttatttattacaaattacaaaagcaaagattattctgttttgggctgggcttgtagttttgtaacccctatgccaaattttgacaccttacagtattttggcagggataagtatgaaattgcttgatgaataaatgcaaacaaaaatgtatgctgggcaatacttaaggcatttataatagtagtttaccagtaattttaaagctagcttatttattaaagatttcactggccaggcgcagtagctcacgcctgtaatcccagcaccttgggaggctgaggtgggcagattacgaggtcaggagttcgaaaccagcctggtcaacatagtgaaaccctgtctctactaaaaatacaaaaaattagctgggttgtgggcgcctgtattcccagctactcaggaggctgaggcaggagaaccgcttgaacccgggaggcggaggttgcagtgagccaagattgcaccactgtactccagcctgggcgacagtgcaacagtgtgagackctgtctcaaaaaaaaaaaaaagattttacttaagttacaggaactttaaaaagcattttatttagtctttaaataggaactttaaaataagg

SEQ ID NO: 818567 - DNA, 595 bp, Homo sapiens
acactttaacttttcatatttccatcataaatgttaatgagtctgtggctgtgtctccatcatatgatgcactctaagcactgtggctccaamgagacagaagagcatctaagtctgaggccaccatggcactagcagggagatcctgacaaattgtgcaatggtatctgtgtttgtatgttatcagatctatggtatctgcatttgtatgtcattagatatattatttatttttaagtcaatttatcttcctatttatcattggttctggaatccttggctactgtgttaagacataatgtcttccctgggccatacaactgaccaacgacaacccatctacttttagcaagatcttctaacaatacttatcctgaggggaaaaggccacagcacatccacttttgtttttgggaaataactaatttattgagattctttctacttgtagcgcctcatacagggtgctttctgggattttcccctttaatgtttgtagaaaaagtaaacaaaactaaaatactcggcatgtaggatactctttgaatatcctttatgtgcacactcactgcaatttactgacatgttgtcagta

SEQ ID NO: 818568 - DNA, 635 bp, Homo sapiens
ggatggtggctcatgcctataatgccaacattttgggaggctgaggtgagaggatcacttgtgcccagcaatttgagaccagcctgggcaacacagtgagrccccatctctacaaaaaattaaaaaattagccaggtctaatggtatttatgtgtggtcacagctactcaagaggctaaggtgggaggattgcttgagcttggatggcagaaaggccgcagtgagaccctatctcaaacaaaaaaaaaacaaaaaataaagtctcacggaactgtacatttaaaaggatgaattttgtaatatgtaaattctacctcaataaagatgtttaaaaataattttcccattgtcaggcacataactcccactgactttttaaaataacaactttattgaaatacagttcacatatcatacagtaacctatttaaagagcacaattcaatggttcactagcttttggaatattcagagttgtgcaacctttgtcatgatcagtttcagaatgttttcatcagctctccaaaaagctttacacagtagcagtcactctccctttcccccaagacaccccagccctaggtaactctttccacttctgcctctacttttttcctctacagattgatctattc

SEQ ID NO: 818569 - DNA, 616 bp, Homo sapiens
cttagtgataatgtcactgctgtgactcttagcagtttgcaaagtattttcatatgaatcagctagcttagtaattctgttttgtattacctttatgtgatctcctctccttcatatagattccttggaaaatattaactctaatgtttcctaagctactctgttattattttcattgagataattggtaaccatcttgtcagaaatggggtaataaatggttgttcagcctccactctttcttgctgcatggtctccttgaggatctttgtcaatggattcaaacttgtttctgtaataaatttgattttttttcctatggcccaaacagtgtatgaatgtgcatacataaatgtgtgttttttccttcatttggctgttgccctttttcatctctgttgtctatgcgactactgtctgccttttgtttttttcctcatagattacccctttgactattaccctctttcctttcttttatattctgttattataaaaktattatctatatttctttactttttacctactatttagtttttagattaattcatgaattgcaaaaatgttgctatttattttagaaatggtagaaaattttaaaggaaaacaaatc

SEQ ID NO: 818570 - DNA, 634 bp, Homo sapiens
ctttcagcagtgtttttagttttctatgtagaggtctttcacctccttggtcaggtatattcctaagtatttttttttacagctgtcataaaaggagttgagttcttgatttgattctcagccttgttgttggtggtgtataccagtgctactgatttttgtacattgattttgtatcctgaaactttactgaattcatttatcagatataggagctttttggatgaatctttagggttttctagttatacaatcatatcattggtgaacagtgacagtttgacttcttctttaccaatttgaatgccttttatttctttctcttgcctgattgctctggctaggacttccagtataatattgaatagcaatggtgaaagtgggcatccttgtcttgttccagttccctgggggaatgctttcaacttttccctgttcagtataatgttgcctgtgggtttttcatagatagcttttattacttgaggtatatcccttctatgcggattttgctgagggttttaatcataaatggatgctggattttgtcagatgctttttctgcatctattgagatcatatgatttctgtttttaattctgttyatgtgatatatcacatttattgacttcca

SEQ ID NO: 818571 - DNA, 639 bp, Homo sapiens
ctattgtgtaaggatgtggatgcattaaacaattttcttatgagaaaatagctgttttcttataatctgataaagtaggtgtgccacttgtttataccaacagggtaagaaaaaagacttgtggaatgtttctttgagaaatacctgatctggattgtatctctttccttctctttctccttctcttgccttcccactgacagggattccccaaccttgatgttcattttactactacatcttcacttgacctgtctggctcaacatacatcctcatctctttcaactatcagcttgacttcttttctctctgacaatgttttcatgttggcaatacccttgcaggcttcattcattcattcaatcaatatcataaacaataaacaaacaaaagatgcagcttagtggttaagaggtggactccaatgccagacagcttaagtttgtatcttggttctaccagctgttagccattagaacttgggaaaatcacttaacttacgtgcatcaatttcctcatctgtaaaaatgaggtgatattgatamtgtactaacaatatcacctcatagattgttgggagaaatgaatgaatcaatatatctaaaagtctttgttttttttttttttttttttttttg

SEQ ID NO: 818572 - DNA, 625 bp, Homo sapiens
ctttgactttcaattttcttatttgaaaaatgggcatattacacagatgtaaaattttaacttagaatttatatagtaaaacttaaaaggtagtatttgcttgctgtataaattcattaggtaagtttgatttatttgcacatttatatgtaattcagcttataaaaatgaaatgttccacatgactattgagagatttataaaggtttgaataattatcattaggaagtagctatggcacttagttcaacagcacgttggttactatatgccataaacgctgccaaaacattagcattttatctctcacacatccgaaccagtcagccatgtctgtatcatctcacttttacaaattataataataaaatatagggaatttgaaaattactgaaggtcacagagattgtaactctcagaggatggctttaaacctgtgatagcctgattccaaaatatttgttccttctaataaatcttcaaaaacttgagacacaagaagtgtttccctagacttcctgaaaatccaccataaagttttctcattggcccttatatgggttaatacacctatgacaatgytatacatatcctggaaatgtacgtgtagcttcagtgaattcca

SEQ ID NO: 818573 - DNA, 632 bp, Homo sapiens
cgtattagcaaatcctccaaaatgcaaaataaagttggtagtggaaaatattgctacatgacgtttctaatccaaaagtcattgtacaaaagagaaaatgtttctgctgacttcaacattatgtctcagatgatytcctgctttatatattcacagctactgccaaatttaagctgtgttttgttttacttttaatctcttaattggctacttcagcgttccctgattttccctccctcccttctttccttccttccttcctcccttccttccttccttcttccttccttctttccttccattcctcatcctcttcctcattctcctcctctcaacatcttctgtatgagatgtaaaatttcgttttttttaacagcttattgaggtaaattaatgcacaaagcattgcagttatatatgtgtacgatttgatgtctgaacatatacaaatacccatgaatctattgccacaatcaggtaatagacatatttgccactctcaaaatttcctcaggactttgtttttctttgtttgttttgtggtaagaacacttacatgagatctactctcaaaactaattttgaatgtgtaataccatatcgttaaatacagatgcagtgttttcatgaat

SEQ ID NO: 818574 - DNA, 514 bp, Homo sapiens
acagaatttcagtcaaggatttaccacatatatgacggtggtcccataagaatttataacacatcttaaaaattcctgttgcctagcaatgtcacagctgtcagaacttcacagtgccattcattattcacatatttgtggtgatgctcgtgtaaacaagcctactatgctgccagttgtataaaagtgtcttgtaatgtcctaggccttcacgttcattcagccctcactcattcagccctcactcatccactaacccagagcaactgccagtcctgtaatctccattcatggtaagtgttttatacagatgtacaatttttaaaattatttttgtcatatttttactgtaccttttctatatgtagatacacagatattaaccatgttgttataaatgcctacagtattctatacagtaatatgctgtacaggtgtgtggcctaggaacaataggctccaccacatagcctagatgtgtagttggcygtatcatctaggtttatggaagtac

SEQ ID NO: 818575 - DNA, 519 bp, Homo sapiens
aagacatatcctacaaacaaagggatttatcttttaaatctgaatgttsatcaaataataaaataacagttgattttttattaaaagtctattcctatgttttagggaatatagaattttccttgtcttcataataaaataccaattatatgaatgtcttcaatcaacaaaatgaaatcatttattttaaataagcagcccttgcatttaaattatgatctactattttacgttctgtaactctacaaattttccacttttcccatttaagagccaagtatattaaaggctgctttttctccatggcatcactttttccccctttggtgaagtagacacaaattagtctaaatgatcattaatgctcactaaaaaaatacagatatctggttttgtgcggactgacaaactaaaaacattttgagtagaacctgggtatctaagtttgtaactaccttttatgcacattacagtgtgagaatgtctgcatcactatttcctatgcatcattatagggaa

SEQ ID NO: 818576 - DNA, 482 bp, Homo sapiens
cttttaaacaaccaggtatcgcaagaactcattcattatcatgaggaccgaacsaagagggaaggtgctaaaccatttaggagaaagctgccctcatgatccaatcacctcccaccaggccccacctccaacattggggattacaattagatatgagattcaggtggggacatatatccaaaccatatcatatatgcttttaaacaaccagacctctgggaatttattttcattattacaaggacagcatcaaggggatggtgttaaaccattcaagagaaaccacccccatgatcatctcccactaggctccacctccaacactagggattacaattcaacatgaaatttgggcagggacacagagccaaaccatatcattctgcccctggtccctcccttccagatctcaggttcttctcacattgcaaaataaaattatgacttcccaaccatccccaaagtcataactcattccagca

SEQ ID NO: 818577 - DNA, 661 bp, Homo sapiens
tagaatgaaaaaataaattacagaatgaagtcactttttgaaccctatcgatgatggctcctcagtattcacagtataaggctcaaatctccccattctggcccttacccgatgtcgaatccagtggtttttttttttgagatggagtctctctctgttgcccaggctggagtgcagtggcacgatctcagctcactgcaagctccgcctcccgggttcacgccattctgcctcagcctgccgagcggctgggactacaggcgcccgccaccatgcccggctaattttttgtatttatagtagagacgaggtttcaccgtgttagccaggatggtctggatctcctgacctcgtgatccacctgcctaggcctcccaaagtgctgggattacaggcgtgagccaacgcgcccggccgaatccagtggttttaaactcaggctgcacattaaaataacctgggggcacttcaaaataaatactgatatccaggttccacctgtagagatttctgattaatttggtctgtgagtgctgctcagctgtccraattctttttaaaaatactccaagtgattcctatgtgcagctagggttgagtgttcctgctcattaattggccttccctataccatgcttgagaagtttttactatcattaag

SEQ ID NO: 818578 - DNA, 603 bp, Homo sapiens
gaaattttctgttatttttgatatggttttgcatggaaaaacatttacaggggcttcatgtgggtagaaatmacagttgctgtgacagggcagtgagttgtcatttatgaattcagtgttgtctgtaggagatatggcatggaagtattcttccaggactctgttggcattctgtggatggtgaatagtaaataagttaatgcagattttgatgagtgacttcaaaaactacagattatgatcagggatcatatgatgggtaggaatggaatagaaggtcaccttgaataacaaggtagcagggcttgagaaaatgggaagccaggacaggaaatgaactggaacatttttataagaggatcgacctctcaccaggatgatgtaatgattgtgatggggacaaagatagaacaagtctcattttgtaggcaggtgctccttcctacaaaggaaggaatgggatagattcatcaaaaacacagacagcacgtaatgttgtttggagcaggaacttctacatctgaaacagacagatctggacttaagtgttagaaagtggtgagaggtgacagcgtgctggcagtcctcacagccctcgctcgc

SEQ ID NO: 818579 - DNA, 657 bp, Homo sapiens
ttactcacttccactttggggacctttttactgtaacaagctgcctccactctttgacctactgtcctgatctygttctttcttactggtctcttcttagaccatatctcttttgaaagtatttgaggaagaatttcttctctgtaggttggagtcacaacttgatatgttaacacacaaagccttcagttctgacagctactggaggctgcctcagaataggtttattagccttgagaaatacaccaaagatagtttaatcttctcttctatcaggaatttcccattgcatttcactttttttgtcatgaaacaatttaataaactttatgtaaaccttaagttttcaaacctgccagtctttgagcaaaacactgtttttcaagaagggaagcactgagaagtagagcaagatgctgagtttacacatcattgcaattacattaattcacaaattgtcctatgttgggttaccccagaattagagtctgaatcgaatatttgaatttaagtagtttattagagaggagattccagaaagcactgggataggaatgaggaaagtaagactgggaagaaacaaatgtcagtaaactatgtattatcaagccaattatctcttggggcaagtgaggctcaatcttgctggagaactct

SEQ ID NO: 818580 - DNA, 603 bp, Homo sapiens
atccatgtaatggagcagtgtaatatcttgtgaagtgaaaagcactcaaggtctctctgaatacaatwattacacaaagccggagagttgatatacctctgtgttaggacagtaaaggtatattgctggcctttccagctgaaggcaaattgcttctgatgggccttttggacaggaatggagaaaaaggcatttgtcaagtcaatgtctgcataccaggtaccaggagatatgttaatttgcccaatcaatgaaaccacatctggtacaacaactgcaattggagtcaccatttggataagcttacgataatccactgtcattctccaagattcatctgtcttctgcacaggctacatagaagagttgaatggggttatggtgggaatcactacctctgccatctttcaagtccttgatggtggcattaatctctgcaagctcttcaggtatggaatattgtttttgatttactatttttctaggtagaggcagctctaatggcttccactgggcccttgtcaccataacagccttcaacctaccagtcagaaatccaatatgggggttctgccagctggctaagtatgtctatgccaatta

SEQ ID NO: 818581 - DNA, 576 bp, Homo sapiens
ttatcgatagctaaattttatagaattaagwcagccaaaaaactgaaatcaagataagagagatggctgacttttgtggggcaatcttcttcccaattggttgattattattaactttgcgaaggccaaaaaagaacaagcatacagtggcaacacagtggacagaaggaaagcagcggggtcaataaatactaggtacatcgtgcatgcaatcaagcttgtaaaggatctggaccaagccatatggatggtgaggagttaactctaatcatggtgtttcgcggaggttcctgtggtgagctgctctgcccagaaatacaccgcaaggcagcagagaaggagaagaaccccagtgtcagggacaactacctgggtatttaaggaaaaaaaaatagacccttacttgctgatttagggactacaaaaaaaaaagtcaggaactgagactagatattttcaactatgaaacatgcttctgtgtacactgtttccatttttcttcaggtttagcttgcttactattcgtgtagtaaatgttgcttttttgttgttttatttatttaaaaaaacattaat

SEQ ID NO: 818582 - DNA, 609 bp, Homo sapiens
aatgtcatccatgtaatggagcagtgtaatatcttgtgaagtgaaaagcactcaaggtctctctgaatacaatwattacacaaagccggagagttgatatacctctgtgttaggacagtaaaggtatattgctggcctttccagctgaaggcaaattgcttctgatgggccttttggacaggaatggagaaaaaggcatttgtcaagtcaatgtctgcataccaggtaccaggagatatgttaatttgcccaatcaatgaaaccacatctggtacaacaactgcaattggagtcaccatttggataagcttacgataatccactgtcattctccaagattcatctgtcttctgcacaggctacatagaagagttgaatggggttatggtgggaatcactacctctgccatctttcaagtccttgatggtggcattaatctctgcaagctcttcaggtatggaatattgtttttgatttactatttttctaggtagaggcagctctaatggcttccactgggcccttgtcaccataacagccttcaacctaccagtcagaaatccaatatgggggttctgccagctggctaagtatgtctatgccaatta

SEQ ID NO: 818583 - DNA, 605 bp, Homo sapiens
gtgtgtgttgcagctggggcaatggttctgaagaagagagaaagaatctgaaagacaatttttgtgtccaaggtatttcagtatccaaattccttatttcggaatgttacttgaaaaaatctctcatcttgccatgataaaaattggttcagatttaaaacacccccatctggaaccaatgtctttctctgtgtttaactatttaattgtctgctcaaaaacagacacccctattttctgtgaagaaacctgctcttcctcatgatagattctgggccacaagtacctcaaagcttccaaaggactcataagcacacatttgttttttatctgtaaaacatatccaagtggtttcttcccagcttaatggaaggtatgatttagagctaaaagactgtaatccatgtggcttttaaataggttatttctttgttttggttattttgagagtacataagtttcagctcctgagtaaattacaggcttttaaggcttcacatagctattttgcttttaagcagacaggatttcacctttattcctcctcagtttgctttcttatttacaaatgaaaawcagcagagggtagcatttatttactttct

SEQ ID NO: 818584 - DNA, 605 bp, Homo sapiens
gtgtgtgttgcagctggggcaatggttctgaagaagagagaaagaatctgaaagacaatttttgtgtccaaggtatttcagtatccaaattccttatttcggaatgttacttgaaaaaatctctcatcttgccatgataaaaattggttcagatttaaaacacccccatctggaaccaatgtctttctctgtgtttaactatttaattgtctgctcaaaaacagacacccctattttctgtgaagaaacctgctcttcctcatgatagattctgggccacaagtacctcaaagcttccaaaggactcataagcacacatttgttttttatctgtaaaacatatccaagtggtttcttcccagcttaatggaaggtatgatttagagctaaaagactgtaatccatgtggcttttaaataggttatttctttgttttggttattttgagagtacataagtttcagctcctgagtaaattacaggcttttaaggcttcacatagctattttgcttttaagcagacaggatttcacctttattcctcctcagtttgctttcttatttacaaatgaaaaacwgcagagggtagcatttatttactttct

SEQ ID NO: 818585 - DNA, 571 bp, Homo sapiens
acagccctccaaggtgctgagattgatgataaaaatgaccactgctggaaaggtgttgttattgatgaaccctctgcagtgggagtccccatgccttccattcagtgccagatctgtttccgaataacccgagaaaagtaccgtgcaaaaattaatcttcatcgtaatagcctgcactccacaatagacactgatgtctctttcagctgaaataaaaatatataaaaaacaaacataagtcagaaaagcagaaagataaataacattaacatcctactgatatatttattcatctcctttgtctgtttaactcatttttatatttgatacaccataatccaatgtgccagctattaagtaaagtagacaagaaaaatagccttttatttagttatttaaggagagatctttgagtgtagagattacagttcacctctgtttccttgtgmttgatgtccagtggatgtacattaagtgttgatcaagtattgccaaatgaccagagaattgagtggaaaccaatcaggttactgaggaaattcagacctagagcaactggattattcagatc

SEQ ID NO: 818586 - DNA, 585 bp, Homo sapiens
aggaattagagggaatagatataggacattcatttgtgaatgaaaggagaaaaatatgaagatacctagaaggaaatttgtatctagaggaaattttttcacaaagggaaaacttgatggcagagaaaggaaatgcaaaaaatatgtatattcaagagactggagagacgaggacaatttataacaatagtgttttctcttttgctcattgatgcaatgttgtaattaattcataaggaacaaagactgagccatcgtttcctttctgtttcctgatggataaaagaaaatcattcccttacatagagcagtaattaatgactatttgtaaacaaaggattaagactgacatctttggttcctttttacaaggatgaattagcattggtacacagtttctcctgtagcactctagtaagaaaacccccatttccaaagcagctacctggaatggagtatgtgatctacagctgaagagtagagaatgggctacaggaaaagcaaactcctagcctttccatggctagcacgctgcttaytggtcatgttaaccaatcaattacagagctgagcagcacaaaataa

SEQ ID NO: 818587 - DNA, 655 bp, Homo sapiens
gggcagcttgatttacaagcattaaagatggaagaagcggggaagagctgattagcattggccaggacaagaacatacrgtaaaccctgggttgtgttcaaagcaaggaggatttatgcttcctttcagttactctgagcactaagtactctcagatggtgatgggtgatggccatgaacttgaaggatgaatacaaggaacacagaaaaccccttttcaaccaaagcacaagctttggaggtgctgtccattcaaatgagcaactctgaaaaatcagttttcttgggagatcctgagctcttttatcaaagtgagtagaggtaaatctgtcttaatataagaatgttaatactcaatgccagaatttttgtctcttttggggttggaggggggataaggaaagaaaatgaatctccttcctgcaaaacttctgagttcactgctaatgagagttggagacgagacacaggagggaactcagatgtgattcacagacgttctgatagggtatcctctgcaaaggtcacccaacagggcagcgtgatctgggttcccatgaagagctcctttctgatgctgaacttacccacttataatagaataagagttgttcacaaagtgaacctcaatactcaccaacatcatccagccata

SEQ ID NO: 818588 - DNA, 433 bp, Homo sapiens
cagctgatgtcacctggaaaatgtggaggccaacacccctgacttggatagagcccttctgtttggttttatttttaaaaaatattgcaggtacgccttggtttgatttttaaaatgagtgatgctgctttatcctctatatgtatgcacaataaagacaacaatacatcaattcttctcattcctccaaaacactgttccattgaaaagccaaaatctccaccttgtacctatactaatattttctactaagttttactggtccagcaaaaaagaagacacttaatcatgttgaaaacatgagtattttcccatgaaaatagtttcttcattaaaaaaaggtggkgggggcatgcgggtgggaataacaaccatgtaagttttccctttaccctgtgctagagagtattccaggagctcctgcttaaaacag

SEQ ID NO: 818589 - DNA, 542 bp, Homo sapiens
cagagtggaaatcaaagagggatctcagagactgcacatctattactccttttttttttttttttttttttttccttttcaggggagaaggagtggtggtgaaagagggatggatgcatgcttgcctcggtcgagcaaaaacaaaacttcattgtcttgaaaaaattagcatgcacctccttccacacatcactgtggtaagaagaacacaatgaggataaagtggccagggttgaaaagcccttcagagaagatcacaggagaaatgctggcagaggaactgtgaggcatctttgggactctggtgagacattcttgtccctcagagtagaaaaaggagggctctgaggcagaagggcttgagtgaccttaagcaaatcatttcaccttcaagtatcaggtccttgaaccataaaatggagatgataatgcccatattgtggtgtgtcaaaacagttayacaaaatgaccagcacatagaagcagcctgatagaccctgggtttctacccacttccatttattcacttactttgatagtaa

SEQ ID NO: 818590 - DNA, 629 bp, Homo sapiens
gaattttgcaaatatgttttctcagtctgtgacttgtcttctttttctctggtcattgtcttttgcagaacggaaatttttaatttaatgacagcaagcttatttattaattatttcatatattgggtttttagtatcatatataaaaagtcattgttatacccaagtctatctaggtgttctcctattttatcttctagttctatagttttgtgttttaatttaggtctataatttatatgttgttattttttgtggagggtttaagattttgtgtaattcaatttttgcacatttgcacagttgttttagttccatttcttgaaaagaatatctctgcttcattatattgacttctctccttttttaaagatcagtataccacattcatgttggtctatttctgggctctattctgttctattgatttgtctaatctactctttggcccaaaccacactgccttgattaatgtagttttattgtaagactaaagctgggtagtatcaaatttctgacttttctttttcttcttcattattgagtcaggtattctgagtttttttgtctcttcacataaacctyaagtataggtttgtgaatatctacaagatatcttgctgggattt

SEQ ID NO: 818591 - DNA, 553 bp, Homo sapiens
agattgaaacaaacacaattataaaatctattgtttttatatcaacatggctaaaagagatatattatgaattacaaataatagatattgacactaaaacaccactttytgaggcacatacacattttctgctaaagagattatatgaaaatgaaaaaatggcatactgtgccttaaaacatggctaagcaaccaaaattataattcatcacttcaaattaaaattttaaattttttttggagagtgtttccctgcttagtcaccaacctgcttgagaaaaacatatggcagaatctttaaaaaaaggtcaacacagtgggtgaagagtataattttcaaaacaacagatatgtattattcctgataccacctggtgtacactgaaattttgctttctaaaaacatttttctcttcaaaaaagggaagtatcatgaatataattttgatacttataattttcttatcagtataattcaaatatagactactatacttgtcaattatttacttttcacttgcctttcttacttctgaacacatggaaaagtctc

SEQ ID NO: 818592 - DNA, 612 bp, Homo sapiens
atccaacaacacatcaaaaagataatacaccacgaccaagtgggatttatcctagggttgcaagaatgattcaacgtaaacaratcaataaatgtaatatattgcattaagagaatgaaggacaaaaaccatattgttatctaaataaatacagaaaagcattttataaaattcaacatcctttcatgataaaaaaaaattcaacaaattaggcatagaagaaacatatttcaacatactaaaggccatctatgacaaacctacagctaatatcatactgaatggagaaaggctgaaagcctttcttctaagaactgaaacaagacaaggatgctcactttcactagtcttctttaacacagtactggaagtcctagccagagcaattaggcaagagaaagaaataaagagcatccaaaagggaaaggggggagtcaaattgttcctctttgcagatgatatgatcttatatattttataaaaacctaaagactccaccaaaagtactcttagaacaaatcaataaattcagtaaagttgtaggatagaaaatcaagatgtaaaagtcagtagtatctctatacaccaataacaaattagctgaaaaagaaa

SEQ ID NO: 818593 - DNA, 636 bp, Homo sapiens
gagcttgcagtgaactgagatcacaccactgctctccagcctgggcgacagagtctcaaagaaaaaaaaagcsggggggtgggtgggggtgggggggtgggtgatggggggaaaattcatagcactaaatgcccacatcagaaagttagagatttaaaattaacaacctaacttcacaactgaaagaattagagaagcaagaacaaatcaaccccaagctagcagaagacaggaaataacaaaaatcagagctaaactgaaggaaatcaagacatgcaaaaccattcaaaagaacaatgaatccatgagttggttattgaaaacattaatgaaataggccaccagctagactaattaagaagaaaagagagaagatccaaataaacacaattaaaaatgatgaagggaatgttactactgactgcacagaaataaaaacagccatcagaaactagtatgggcacctctacgcacacaaaatagaaaacctagaaggatggataaattcctggacacatacaccttcccaaaactcagccaggaagaaactgattccctgaacataccagtaacaagttcaaaaaaaagccccaggacctgatggattcgtagctgaattctaccagatgtacaaag

SEQ ID NO: 818594 - DNA, 582 bp, Homo sapiens
ctgtctagcttctccaacaactggacttcctgtgctatccataaacaaaggcattctctttttcttattacygttacccacagaggtatctccgggccttgctggtattttcaacaatacccttatgccacagaacaaagtataagcaaaacaaaacactgtaaataaggcacataggtcttggctccacatgggtcattgtgagaaatatgctgttggcgtgtccgaactgcacacatgacattttcttacattttatgagtgtgcttctgtgggacaatttgggcatgtgcagaaaagatactctcacagccaaaaggggctgaaaggatcttttttccactgggaacactaaataaactgtgtgttgtgcatctgcattttgacgaagacccaccatgttaggtcaggtgtgaaactttccacttgcgatgccatgtcagctagcaaaaggttttggatcttggagcattttaggttttgaatttttggactagagatgctcaccttgtacttcattcattttatgctgaataatattccattctatggagataccacattttgttgtcattcaacagt

SEQ ID NO: 818595 - DNA, 581 bp, Homo sapiens
cattagatctcatgagaactcactaccacgagaatrgcaggaggaagccaccctcatgatccaatcacttcctaccatgtccctcccttgacaagtggggattacatttcgagatgagatttgggtgcagacacagaaccaaacaatatcactcactgttgatcagcatgggagttttgatctgctctgttttcaacttgggctggtccacccactttaggcaacctgttggtccctcattcccggaaggtcaccatattggtgccaaacttagtgtggacaccctatcggcatagtacactgtagccctgaattcccggactcaagcaatcctcatgcctcagcttcccaagtagctgagactacaggcaggcacctccacacatggctgaagaactgttaagtaggatatactaaagctgaacttatgctactacccagcatatgctacagaccctagctctatacccagcagaaatgcaagtgtattcaccaaaagatgagtaaaagaaggctcatagcactcctattcataacagccccaaactgggaagaactcaaatgtccatcaaagttaaaat

SEQ ID NO: 818596 - DNA, 599 bp, Homo sapiens
gatgaagctcttcggaaggtagctacatttcgacatggagggcgcttcccagtactmagctattaccacaaaaaaaatgggatggtaagtgcacagcactactgcttgatgtactgaaaggcttgggttggggatcttttcgtagaaatgttcccttttgctatctgtctgttcactgaaatgattgtccaggtctccaccacaagggcttccttcatgtaagctttagggaatcaggagtagggtgttttctgtggtgaggatgtgatgctgaattctttccatgatcctgctcagccgtataaaagccctgatagctttatctccaggacactatacaaaggaaactagtgtttatttgatgcttacagcaacattcttctggtagaaaaatgagaaatttctctgttcagaataatggtaaaatacttgaatttttcttaacaactttacacgtgaaaggtggagcagacgtatttattttcaaaggtgaaaagagtgatgctcatgtcatttagtcacaactctagtaaacactggagtcaggattaaacaaggagttaagataactaccttgtaatggtggcgtcttgaaagaa

SEQ ID NO: 818597 - DNA, 613 bp, Homo sapiens
atatacctaatttgttatggttatagagaaattcataatagaatgggttgctgaaatcatgtggtaagttagcaacagagccatcaaggtagagtcccttggggtcaagattgccaggctatccctgttctttctgttttaggcgttaggtgaagcccatttacctaataaactgtgggaattaaagaccaaggttctgtggcagagaaataacaaatacataatgattttgttaatactgagggtttttttctttttaacctaagtttaccagatttctccttacattatgagtacagaggcttctgtttttttttatgaaacaggaattgtaataaacagttaatcaccacatttctcaattttgcagctgtgacagcatgatgatacagattaagacatccctcagtgcagaatgcagaacagttctcatgatttccaccttcatttagtttgagctggccacctcaaaggcagagacttccagactcttgggaaggttcagggttttggttaattttgccatgtttgrgtccctttttctgatatatattggcctattattttcacctccatacaaatttgcccttataattaattactgaaaacatga

SEQ ID NO: 818598 - DNA, 522 bp, Homo sapiens
ctataaacaactattttttagggtgttgatatctgatatcttaactaactataaacagtagttgtttacagttacgaagtatttgtataggttgtaacacaaatagataactagaagaggatcttaaaagcattgattatgtcttactcatgtatttatgtgttttctgtgatactagtcattatatctcacatggagtaggtatctaaaaataactgtaaaattataataacagctatgaaaatatcaataagtattttaatcaaatattttctttaacattattattttcaaatgatgtacatatatgcatatataatcacatatataaaatataaatgttaatagatatatgtaaatgtcaatatattttaatatataaatatatttaaatatgtaaatttcaagtgtttatataaaaatactatttttaaccaacatttaattagtaatgcccagaaaacrtgaagcaacaattaaaaacctactaaatgacataaaactattccattatgtaaaata

SEQ ID NO: 818599 - DNA, 520 bp, Homo sapiens
aatccaggcacggaaaatcaactaccagataatctcactgatatggtatggatctgtgtccccacccaaatctcttattgaattgtaatccccattgttggaggtagggccaggtaggaggtgattgaatcatgggggcagagttctcatgaatggtttagcaccaccccgttgctactgtatagtgagtgagttctcgtaagacctggttgtttaaaagtatgtagcacctcccgactcttttcctgctctggtcatgtaagacatgcctactttcccttcgccttctgccatgattgtaagtttcctgaggcctcctaataagcagaagccaataggcttcctatacagcctgcagaaccataagacaattaaacttcttttctttataaattatccagactcatgtatttctttayagcagtgtgagaccaactaatacactcacttatatgtgtaatctaaaaatgttgaacacatagaaatagagagtaaaataatggttaccaaatcctgcagt

SEQ ID NO: 818600 - DNA, 500 bp, Homo sapiens
tgtcatcaattacttagactacagcaccccacagcaaaaccagaagtgcaccataagtctcaaattagtattaactatcagattgtgttagtctctttttayactgctataaagaactacctgataccaggtaattaaaaaaataggtttaattgactcacagttctgcatggttgaagtgacctcaggatacttacaataatggcagaaggtgaaggagaagcaagacctatccttcacggtggcagaagagagcgggcgcaaaggagaagtgccacacttttaaataatcagatctcgtgagaactcactcactattatgataatagcatggggaaaatctgtctccttgattcaatcacttcctaccagttccctctctcaatacatgggaattacaattcaagaaaaaatttaggtaggaacacagaaaaaaaccatattattctattcctggcccttcccaaatcttatgtgcttctgacattgcaacatcaatt

SEQ ID NO: 818601 - DNA, 500 bp, Homo sapiens
tgtcatcaattacttagactacagcaccccacagcaaaaccagaagtgcaccataagtctcaaattagtattaactatcagattgtgttagtctctttttacactgctataaagaactacctgataccaggtaattaaaaaaataggtttaattgactcacagttctgcatggttgaagtgacctcaggatacttacaataatggcagaaggtgaaggagaagcaagacctatccttcacggtggcagaagagagcgggcgcaaaggagaagtgccacacttttaaataatcagatctcgtgagaactcactcactattatgataatagcatggggaaaatctgtctccttgattcaatcacttcctaccagttccctctctcaatacatgggaattacaattcaagaaaaaatttaggtaggaacacagaaamaaaccatattattctattcctggcccttcccaaatcttatgtgcttctgacattgcaacatcaatt

SEQ ID NO: 818602 - DNA, 611 bp, Homo sapiens
atcaagaagcagcatattctggtataactttcaaattatcctttaaaaatagtcataagttcagaatctggtgtacaaattctatattatgtctccttacctttgaaatgcrtttttttttttttgagagacaatctcgctctgtcgccaggctggagtgcgatggcaccatctcggctcacggcaacttccgcctcccgggttcaagcaattctcctgcctcagcctccggagtagctgggactactggaacgcgccaccacatccagctaatttttgtatttttagtagagacggggtttcatcatgttggccaggatggtctccatctcctgacctcttgatccgctcgccttggcctcccaaagtgctgggattaaaggcgtgagccaccgcgcctggcctaaaatgcgtttcttttccttgatataaatgtattatctgcactactatgaatactgaaatgccataattgaggctttttttttaactttgcaaatggaataaaggagagaaggaaggatgagagtctcctgagatatttagataaatgttagagaaaagaaaagattcaagttgatattctgataaacctgataaatcacatggac

SEQ ID NO: 818603 - DNA, 624 bp, Homo sapiens
tcctgaagttgcttatcagcttaataagcttttgggttgagactatggggttttctaaaaatatgatcatgtcatctgcaaacagggataattgacttcttctcttactatytgaaagttctttatttctttatcttgcctgattgccctggccagaacttccaatactatatttaataggagtagtgagagagggcaaccttgtcttgtgccagtttccaaggggaatgcttccagcttttgcccattaagtatgatattagctgtgggcttatcatatatggtgcttattcttttgaggtatgtttcttcaatacctagtttattgagagtttttaacatgaatgaatgttgaattttattgaaagccttttctgtatcttttgagataatcatatggttttggcctttagttctgtttatgtgatgaataacatttattggtttgtgtaggttgaaccaaccttgtatcccggggatgaagtctacttgaccgtggtggatacgccttttgatctgctgctcaattcggtttgccagtattttgttgaggatttttgcatcaacattcatcaagaatattggcctgaagttttttgttgttgttgttgttgtatatctgcc

SEQ ID NO: 818604 - DNA, 491 bp, Homo sapiens
gaatgtagtgctatttaaaccaaagaacacacgcacarctcttactattataatcatagaaaaaaattaactgacattaaagggcattttaaatgttcatatattttgtctcttttactcagctactaaaatactcaaaatgtggtaagattctctaatgtttatatagtagaggtttttgtttaactagttgagttggattgcttatcatacaattgagagcttcgaatatcagaacagttacttacatgccaaaattgcttatgaatgttctgtcatgtcaaagttgttccattaccatatagaagtaaactctgatctgtatagatactatcagatgggtgtggtggcacatgcctgtagtctcagttacatgggaggctgaggtggaagggtcacctgagcctgggaggttgaggctgcagtgagctgcgatcacaccactgtactccagactgaatgacagagtgagaccctgtctcaaatgaaaa

SEQ ID NO: 818605 - DNA, 636 bp, Homo sapiens
tggggacttctattatacgtatatgaatgttttatcgtatctttttaggatcctacaccatgtataccctttatccttgtgtaggcacttgatcccatacaccgccctggattgcaactgatcagctttaagtgtgccatctttcctactgacctagctctaaatccctgtagggtaggaattgtcttaaaattgccgagcttggatgcgtagcacagcactatgaacatcgtaagttatctgtgaaataatgtagcatagacctacgctaaagaagacaaaggaacatggatctctctgttcagaactctatgtgttccacttattttaatgcatcctttttccaacctttccaaggataataggtcccatgtattgaactcttaccatgtgccaggcacacagctaacattgaacatgtatgaactcacttaatcctcacaatgatcctataaaatatgttctaatcccatttccactttacagatgagaaagctaaggcacagaaagattaaagcaacttgtttgaagtcacattgcccatgawtggaggcgctaagtttcaaacccctgcagagtagctctggagcctgtgcccctaaattctaagctgttacaatggccattgtatagtca

SEQ ID NO: 818606 - DNA, 659 bp, Homo sapiens
ggtgctgggaaaactggctagccatatgtagagaggtgaaactggatcccttcattacaccttatayaaaaattaaatcaagatggattaaagacttaaacgtatgacctaaaaccataaaaaccctagaagaaaacctaggcaataccactcaggacatagacatgggcaaagacttcatgactaaaacaccaaaagcaatggcaacaaaagccaaaatatacaaatgggatctaattctgcacggcaaaagaaactatcatcagagtgaacaggcaacctatacaatgggagaaaatttttgcaatctacccatctgacaaagggctaatatccagaatatacaaagaacttaaacaaatttacaagataaaaacaaacaaccccatcaaaaagcgggcaaaggatatgaacagatacttctcaaaagaagacatttatgtggccaacagacacatgaaaaaatgctcatcatcactggtcatcagagaaatgcaaatcaaaaccacaatgagataccatctcacaccaggtagaatggtgatcattaacaagtcaggtaacaacagatgctggagagtatgtggagaaataggaacacttttacactgttggttggagtgtaaattagtttaaccattgtggaagacagtgtagtg

SEQ ID NO: 818607 - DNA, 556 bp, Homo sapiens
atgcatacatgacaattttcctacttcttaaaagatgtgtgctctcaataatttgttggctgatttcyataggcccaatcaaaattttctttaaaaaatagtttttaattttcagcaaacacatcctagtttctgttaaaagtacaaaagtattttaaaaaccctcaatggttttatgttcacattaaaatatattcggatatgttaaaaaccaacttgcttataccatcagtaatctactcaggtgatttgattaaatatataaaagactttcttcatctaggtagatttctaatattgtaaactcaaactgatgggtgaaatggaacagaaatcacattaatgccacaaacatcctacttataaaatgagacaaactgaaataaaattttaatcaggacttctgagagtcattagcctggagggaaaagcaatctttgctcatataaaccatgagtcctgaacttgtttcatactgcactttaaattgtcagacctctgagtattttctactttgcactcaattcagtggaagcttgctgacgccttcagcaat

SEQ ID NO: 818608 - DNA, 623 bp, Homo sapiens
aaaagatgtgtgctctcaataatttgttggctgatttccatakgcccaatcaaaattttctttaaaaaatagtttttaattttcagcaaacacatcctagtttctgttaaaagtacaaaagtattttaaaaaccctcaatggttttatgttcacattaaaatatattcggatatgttaaaaaccaacttgcttataccatcagtaatctactcaggtgatttgattaaatatataaaagactttcttcatctaggtagatttctaatattgtaaactcaaactgatgggtgaaatggaacagaaatcacattaatgccacaaacatcctacttataaaatgagacaaactgaaataaaattttaatcaggacttctgagagtcattagcctggagggaaaagcaatctttgctcatataaaccatgagtcctgaacttgtttcatactgcactttaaattgtcagacctctgagtattttctactttgcactcaattcagtggaagcttgctgacgccttcagcaatagctttggtgctttactttttgttgttcttgacagagagcttggttgttcagtcacaaaactttattccttgtgactccgagtggctctcattctc

SEQ ID NO: 818609 - DNA, 596 bp, Homo sapiens
gagcttggttgttcagtcacaaaactttattccttgtgactccgagtggctctcattctccagtgctgcagagtgtgagakggaatttgccctccagtgttttgccttcataaatgactcctgcttaaagctagttagtcccctgaccatgtcactgataccttcacatgtagaacaagtagaaaatggaaaagctgcttgtgagcaacttgattcacaaagcccctgggggacctctaggcttcaaagacccacttgtgaccttgaagggttttaattcctaccaatagacagaatatgtgacggtgtttttctgaacctgcaatgtaaccactgggaaaagaaagaaagaaagaaaggaaagaaagagaaagaaaggaaggtaggtaggtaggtaggtagataggaaggaaggaaggaatgaaggaaggaaggaaatcagcgtttatccctaaaatttaaactgagactaacaaaactttcacatacataattggcagggctcaaaagtcctagtttttcagaatagggacttcacatatttgctcctatggaactcatatctactaatatctttttaccagtctaattatata

SEQ ID NO: 818610 - DNA, 620 bp, Homo sapiens
gttccttgatcttatttcttatcatagctgatgctccataggcacacacaggtacagcttcctggatgtttgtagatggcatttattctggttggatggtgtctgccacacaggggcattacatttttttgaaaatcacctttgtctccatctactttccagtacaatgaccttgctcttccttgaacaccccagtcatgctctgccacagggcctttgcacttgatgtttctttgggtggaaatgtttgtcctccatatatctggttggttctgccctttactgttagcatctctgttcaaacaatatctcatcagacagaccttttatgaccacccgttaactgggagacagaaactgcccattattctttctctttaccttgcttcgtttttcttcacagtagttatcaccaccttccacaaactttacaaatattttaattgattttgtatatttacattatggtccccccatcagaatgtgagcaccatgaaagtaggggctatgtgtatgtttatttgataatgtaattatgtaaacatagttatttaacatagttaaattctacatcttcacggcttagaagagtgtcwtgcatgtagaagtccctcagtaaa

SEQ ID NO: 818611 - DNA, 514 bp, Homo sapiens
catgggttggaagactcaatatgttgttaccatggcaatactcaccaaattgatttacagatttaatgcaacccccattgaaattccagctgggctttttttttttttttccagaaattaacaatcagactgtataattcatatggaaatgcaaaaatctagaatggccaaatcaatcctgaaaacagaatgataatgctgggagaacttccacaaccaggtttcaaaatgtattacaaatcttcaataattagtacagtgtagtatgggcatagggacagacatctggaggatagaattgaaaaaataaaattgaaagtccagaagtaaaagtcttatgtttatggtcgattgatttttaccaaagctgccaagataattcaatgaragaaagaataatcttttcaacagattgttctgggacaactgatatcagcatgcaaaagaatgaatttggactctacctcataccatacataaacacatactggaaatgagtcagagatctaaatgt

SEQ ID NO: 818612 - DNA, 595 bp, Homo sapiens
agtctattttcaaacgcctacagctagtagtaaaatagccagactcccccagcaggttaggatcacacatcatcatcatgtctattagatgctgagctggaaatattgagccagagcaataagcaaaaataaataaatacataaagattggaaaggaataaatacaactgtcaggattcacaaaggacaattgcatagatagaaaattcaaataatcaacaaattagaattaacagatgaatttagaagggtcactggaaacatggttaatataacaagtccactttgtttctatgtaatagcaacaaaaattagaaaaataaataaattctgattcatatagcatcaaaaaattcaatacttatggatacatttatttttttcaaatgcaagacctcttcatgaaaaactatgaaacattactgaaataaattaaagaagacatgagtaagtggggaagatggtccttgtttgcggattagaaaatccattatttttaaaatgtcaaccctttccacattgatcaccagatttaatgcgattccaatcawaatcccagcaggaatttttgtgcacgctgacaagccaattataa

SEQ ID NO: 818613 - DNA, 624 bp, Homo sapiens
ctcccatggtgggggaggggtggggattggggagggagcaggaggtggctaggaaaactatttcggggtgtggattccatgggatgaataagaaacaggatcgtttcttatgaaaagtgcagggacccctcattttacaactaggggaccaatgtccacagtgtaattctccttggaaggacctttcactgcatcagtgtttctccatccattttattggagtcccagtcaatgttccccagccaaccccttgccttgagtggagactagcccctccccagcagctgtgtaaggagccagtgtttgatgtctggggtcagaactgctgctcctgcaaatcatcggtctcagcggaaaccaatctctcaacccctccatctgttaagcagggccagcccagagagctgccgctttggttggtactaaaagtacacggcagcaaattctagaaccaaaggtcaaatcgcttgattataaggttttttaaaacccaaagttaaagagccatttgccttcagcacagagcagctggccggytctgtccgcccactcatccacctggcccatgaagggcccaccccctccatcacttgggtctgcagggcgtgtgtgagaccttgcgtg

SEQ ID NO: 818614 - DNA, 626 bp, Homo sapiens
ctgtggactactagagcagggaggcaaggaggggagcgtgggttgamaaactacctgtcaggtactatgcttgctaccagggtgatggaatctgtaccccaaacctcagcatcttgcaatattcccatgtaacaaatctacacatgtaccccctgtatctaaaataaaagttgaaaagactgcatgtttccttttaacgctagctttaaatttatcctacaatttttaacagctttatcaagctataattgacatacaataaaatacatatattaacgtatataattttatgttttgacataggtacacacccaagaaaccatcaccacaatcaacataatgaacatacacactatgccaaagagttccttcgtctccctttataatccctcctttctgcttctccctagcacccttgatttagtagatttgattttactgagcaaaacaaaaaacataacacacatcaaaactatacaggtcagtgaatggtcacaaagggaacacacacgaaaccaccacccaggtcaagagacagaacatcagcaacacccccaaaaggccttcccagcctcttcctctcaccatcccctccattcttccaagtggtagctcctagttttcta

SEQ ID NO: 818615 - DNA, 551 bp, Homo sapiens
ttacaggctgcttaaaagggatagtttgttgtagtcctgaattaataaagtaatgtcctattctccacttaccatgtagkactgcttttgttaaataatccactggggcttgggtagtttatgtggcatttttgatatgccccactgttatggcttgaattctgagttgtcaaaaagtatgtcccctcaggcaatggtgatttttgtgctacaagaagtcgggggctcaataccaataatgcactcacaagtgagaaccatggtcactgacatccaatatggaccaaagccatatcacaggtagataagcactactggtcaatgcattcattctaaaaccttccagtgtcaccagtttttctccctaagaggacctggaagtattatgtggactcctgtatcaaaaaaaaaagtctgaatttctttcttttctcctcttaccttgacagaaatataaggcctttggcctccatttggggaccccgagaacttggtcccatttctgactctgccattcagcccaagacattggatttgcaatgtcctttcat

SEQ ID NO: 818616 - DNA, 556 bp, Homo sapiens
gtgtcatcaatttttacatcaaggactccatgataaagagaaagtacaggtggcctgttatcaaggctgaccattggactgtggactgcacctgcatctaccaggttcttctggatagtcccagttttaaatttttgacctgacattcatgaacacagtgctactggtcagacctttgtccaggtttaagcttcagaacataatgtctcatgcagtgggaggcctgattatggttatgattctgccctggggcatctgccccttcttacctggaggtaaacttggcatctactacttacctctacacttgaacagccaaggatggactgagcacagaggctcacatctgtaactccagcactttgggaggccaaggcaggaggatcgcttaaggccaggagttcaagaccagcctggtcaatatagtgagacctcgtctctgtaaaaacaaacaaacaaaaccgaggatgggtgggtgacagggagcagttcaacatcrgaaaccataaatctgagaggtggaaggacccttagaccagccccacattaacagatg

SEQ ID NO: 818617 - DNA, 503 bp, Homo sapiens
ctccagcctgggctacaaaagtcaaattccatctcaaaamtaataatgataataataatgttttctacaagcaaggagttactttgtactgtgaactggtgtgaagggatctgccatgtgtaagcttttggattgatgacagttatttctaattttaaaaatagcaacccaacagaaaattgggaaaatgcattaatagggatttcacaaaagagaaagcctgcaaaacataaaaattttctcaacctcattagtaatcagggaaatgcacaagatactacacatctattctctccacaaatattaagaagtttgacaatacaaaatgtattagtccatattcacactgctgataaagacataaccgagacagggaagaaaaagaggcttaattgcattaagggttccacatggctgaggaggcctcagagttatggtggtggatgaacagcacttcttacatggcagtggcaagagaatatgagaaggaggcaaaagaagca

SEQ ID NO: 818618 - DNA, 578 bp, Homo sapiens
cattatttagtgtaatctatgtgacaatcctctgagatatgtgttactattccaatttaaacamgaggaaacaggttcaaggaaggtaagttatgtgctgagggacacacaagagggggtggagctggatttcaagcccactgggtgtacagaactgagccttttcaccatgggggcaaatccctcctgaggacagggctggaaaggccatggagatcatcttgtgcttggacaagcctctcaccagtcaccacagggccctgactcccattcctaccttcaagaagctcagcaggctactactcgtgttcatgttgggtcactacatacggttttatttgaaggaaggaccccagagttaaactcatttgaaaacccctgataaattcagtcccctccctctttttacaggtgaggcccggagagaagatatgacttgcttaaggtcacacacttagtttctctgtcaatctttctaaatctaggacgagttctcttcccactgtatcaggctgcctcaacaaacagggaagtacaaaaatagccaaatccaggaaggagggcaagtggtctgtgtc

SEQ ID NO: 818619 - DNA, 608 bp, Homo sapiens
ctgcaagtccctcagtgtagagatgagtctgtagaggaggttgacacaagcttgtgaaagacccagtatgccaggctaagggggtgggaacagtgagggacactgagggttttatggcttaaattttgacaagtgtatctacatatagacaactaatgtaacactcctttttttttttttttttttttttttagagatggagtctcactctgtcgcccaggctagagtgcagtggtgagatcttggctcactgcaacctgcgcttcctgggttcaagtgattctcctgccttagcctcctgagtggctgggactacagactgatcccaccacatctggctaatgttttgtatttttggtggagacagggcttcgccatgttggccaggccggtctcgaactcctgagctcaagtgatccacctgcctcagcctcccaaagtgctgggattacaggcaacactttttttaattttcttttttgagacagagtcttgctttatcatccaggttagagtgaagtggctcagtcatagctcactgcagccttgacctcccgtactcaagcaatccttcytcctcagcctcctgagttgctttcaattttttt

SEQ ID NO: 818620 - DNA, 327 bp, Homo sapiens
gttactcccccaaacccatgactgactaatctgatatgacaaaagcccatgatggatttggtatatgttaattcacaatgccctttcctccagaatttaactataagttaatacacaccggaaaccatgcgcatrcactctccttaatgggcttagtaatgtattagtgagtcctaacgatgcatacaaatgtgctctgcgctctgtagacccctcaagatttatgggccttgagctctctgaagctgtaaacaaggagaaaaaaaaaagagaaagcgaaagcgactggggggaagagacagaggcctgactcgcccctccaggttt

SEQ ID NO: 818621 - DNA, 663 bp, Homo sapiens
actggccttgtcttccaggaaaggtagtgtcgcatttcctctgcacttcctgtctcattcatgagggacatcctctcctctgctcctgggtggactgactcccttgatcttctggctgaaacgaatgtaagggaaccaaagggactgggctggggctggggctggggctggggctgtggctgggcgcagcctaagttgcgtcagggctaccagggcggtggagggttgggggtggggcgaattttgcagaaacctctttgctcctctggtaggcatgtgaaaacgtggcttgggtcaggcacaggacccccaccccccgggtcctaggtgttcttcgattttccctggcattgatggaaaggtcaactgtttccccattcaaccggcacatgcctggacaccaccctttgtttcgccgtcgccccgtatgcctccggtgacacacattaacaccaactgctgtgggataggccagtgccacgcgtggtcacatggtctccacctcggattcgcccctgttcctctatgcaggtgtcctgtaaarcgcggtgggctttccggaaccccagggcttttagaagcggggcaggccactgctctttcaaaggaggagggaggcagagggctgatggataagtgaatttgcagctgacactaggcctt

SEQ ID NO: 818622 - DNA, 611 bp, Homo sapiens
atgacagactgagattccatctcaataaataagtaaatacataaaataaatagaaaaaaagaaaaatgaaagaaagataaagaaagaaagaaagaagaaagaaagaaagagagaaagaaagaaagagaaagaaaggaagaaagaaagaaaaagagagaagtcgtgtgctcaggttgctaagatcgatggtaagaacaaatcctctagcggtgaaaatgtaagaaggaaaaagaaatttctgttagtcttgtttgttgcaccccaagctctaaaaagtacagccatatgtgtgataagtgcttagttaagatgaaaaaggcattaaatttgtgagtggaaatcaaacagaaatgtgttctgattgaaagcaattgggtcaatgctacccaagttcaggcatccactgcgggtcttaaacacatctcctgcagataagggagggctattatataacgtttctttcttttttctttaattataaagcattctcctttttwaatataaaaattggccacatatatcactttaggtataaagatattaggatacctttatagtagataaaatgctgacacattctttgtaagagttaaagtatctttcattatatg

SEQ ID NO: 818623 - DNA, 611 bp, Homo sapiens
atgacagactgagattccatctcaataaataagtaaatacataaaataaatagaaaaaaagaaaaatgaaagaaagataaagaaagaaagaaagaagaaagaaagaaagagagaaagaaagaaagagaaagaaaggaagaaagaaagaaaaagagagaagtcgtgtgctcaggttgctaagatcgatggtaagaacaaatcctctagcggtgaaaatgtaagaaggaaaaagaaatttctgttagtcttgtttgttgcaccccaagctctaaaaagtacagccatatgtgtgataagtgcttagttaagatgaaaaaggcattaaatttgtgagtggaaatcaaacagaaatgtgttctgattgaaagcaattgggtcaatgctacccaagttcaggcatccactgcgggtcttaaacacatctcctgcagataagggagggctattatataacgtttctttcttttttctttaattataaagcattctccttttttaatataaaaattggccacatatatcactttaggtataaagatattaggatacctttatagtagataaaatgctracacattctttgtaagagttaaagtatctttcattatatg

SEQ ID NO: 818624 - DNA, 611 bp, Homo sapiens
atgacagactgagattccatctcaataaataagtaaatacataaaataaatagaaaaaaagaaaaatgaaagaaagataaagaaagaaagaaagaagaaagaaagaaagagagaaagaaagaaagagaaagaaaggaagaaagaaagaaaaagagagaagtcgtgtgctcaggttgctaagatcgatggtaagaacaaatcctctagcggtgaaaatgtaagaaggaaaaagaaatttctgttagtcttgtttgttgcaccccaagctctaaaaagtacagccatatgtgtgataagtgcttagttaagatgaaaaaggcattaaatttgtgagtggaaatcaaacagaaatgtgttctgattgaaagcaattgggtcaatgctacccaagttcaggcatccactgcgggtcttaaacacatctcctgcagataagggagggctattatataacgtttctttcttttttctttaattataaagcattctccttttttaatataaaaattggccacatatatcactttaggtataaagatattaggatacctttatagtagataaaatgctgacwcattctttgtaagagttaaagtatctttcattatatg

SEQ ID NO: 818625 - DNA, 432 bp, Homo sapiens
tcagctcaatgcatttggtggaaaattcaagtgaatagattggttatatgatatggcaaggacaaaaactttagtttaaaaatttgtcatctttgagtattggcatttcttccgcctgatgacattgcaggaacttttaataaattaaagccacatttggctgaagaagccagagaagttactgactggctaggaaataattatatgcacagtaagataagaagacacttaggcaacggtgttgctgttggatcacggtattgtttccaacacatttgtctgtatatgagtgcatgtaaaatggatttctgcatacccaaaacaacrgagaggcagagcacagaagatgggaaaatttaataggaatgctgatgtcaatgtatataaaattatagaagaattccagaaagggcagagccacggagaaaatga

SEQ ID NO: 818626 - DNA, 612 bp, Homo sapiens
gaacacacatggaagcaagcatcgtaacagggggtgacagattggctcagtaagctcatattcagtgccttccatgtcaggcacccrgctaagcccagagatggatgagataaaagctcctgattggaagatcacaaacgaatatggttgaaaggggccagaaagtaaaggaggtggagagattatgtcacctgctcaatcttggaactttacctagagaaagaaggatgtcacaaccctgaaacacacaagatgctcactagactcacctattttcctggtacctggcctcgtcctccaggccttcttcctttctacccttggcaccttgaggtcaagtatttgctaatgacccaacagagtcatcctgttcctcagagcctaggctgtgcccatgagcacctaggatcctgtgaagatattcacgtaaaaatggcctggcaagattttgcagccatgccctccatcaaaacagcagcttcctcgagtcatggcacagggtcagttccctcttcagggtggcctctggagtggatccactgctcttggaaatgaaagaacagatgcttttaaagcccacctcttttctctcccagccttttaagtttcagt

SEQ ID NO: 818627 - DNA, 546 bp, Homo sapiens
tcaaaggtaaaattatttctgaatgcaagagccatctgaagaaggtactaagatgttagttgttgggttctggttacaaggtaagtagtggggtgtgtgtgtgtgtgtgtgtgtgtgtgtctgtgtgtctgtgtgtttaacaccatagtatgtttccttggtgttcttattgttctttgtttgttttctttttgttttgtttttttacaaaattgccttagctaataaaatcttgggataaccgagacagaaaggcatacatcaaagaagccaaagatgtagcttcccattagggaatgcttttgttgtataggtgccaactacttggccccgcctgaagaatgcaaactcccatatgaaaccctggccaacccttccagagttggctgcaagattctactccttgggccatgaagcattctctggtccccacagcaccagttggcaaggactttgctctctcaggtctcatggccaggagctttttgggtactcccagcraaacttctccttgaaggcttcctcatttccagaatgcacgcgtat

SEQ ID NO: 818628 - DNA, 603 bp, Homo sapiens
  misc_feature 176, 207: n = A,T,C or G
ataaataacattatgctttttaacatgtatacatataaaattgtgagtactttgaagagagaatttcttatcacctctaacaaaactgctattacaattttggtgaatttttcctatagttgttatttgaagcatacttatatatagtttgaaaatcagagtacatgctccatatngactttatgtattatggatatgtgttatcgnttagatgagatgttgctctgtcacccaggctggagtgcaatggcatgatctcgactcactgcaacctctgcctcctgggttcaagcaattcttcggcctcagcctcccgagtagctgggactacaggcacctgccaccacgcctggctaattttttgtatttttagtagagacggggtttcactgtgttagccaggatggtctcgatctcctaacctcgtgatccacctgccttggcctcccaaagtgctgggattactggcgtgagccaccacgcctggccgttccrtatttcctttatgttttattttgctgttatttgcctagcatattcaaggtaccaaattaagtattgattgatggtaatagtgataacattaagacttggagatcaggt

SEQ ID NO: 818629 - DNA, 608 bp, Homo sapiens
gaagatcgggaccaaaaatgattgcagyttgagccattcagcagttgtcattgattgatccattggctacttaatctgtttgttcatctgttagggattcagtcagccaacatttattcagcaccatggtcttgcaggcaaaatgctgagtgctgagaatcctatgatgagcaaaatagaatgcctgccttcgaggggcttccactttagttgggaacacatttataaataagtaagagagggccagacatgttggctcacacttgtaaacccagcactttgagaggctgaggtgggcagatcacttgaggtcaggagttcaagaccagcctggccaacatggtgaaaccccatctctactaaaaatacaaaacaattagccaggcttggtggtgggtgcttataatcccacctacttgggaggtcgaggcagaagaatcacttgaacccaggaggcggaggttgcagtgagctgagatcatgccactgcactccagcctgggtgacagagtgagactccgtctcaaaaaaaagtgagaaaaatgaagtctgacattttattgtctaatgccattttatcaatgataggtgctctttgaagtaatatt

SEQ ID NO: 818630 - DNA, 608 bp, Homo sapiens
gaagatcgggaccaaaaatgattgcagtttgagccattcagcagttgtcattgattgatccattggctacttaatctgtttgttcatctgttagggattcagtcagccaacatttattcagcaccatggtcttgcaggcaaaatgctgagtgctgagaatcctatgatgagcaaaatagaatgcctgccttcgaggggcttccactttagttgggaacacatttataaataagtaagagagggccagacatgttggctcacacttgtaaacccagcactttgagaggctgaggtgggcagatcacttgaggtcaggagttcaagaccagcctggccaacatggtgaaaccccatctctactaaaaatacaaaacaattagccaggcttggtggtgggtgcttataatcccacctacttgggaggtcgaggcagaagaatcacttgaacccaggaggcggaggttgcagtgagctgagatcatgccactgcactccagcctgggtgacagagtgagactccgtctcaaaaaaaagtgagaaaaaygaagtctgacattttattgtctaatgccattttatcaatgataggtgctctttgaagtaatatt

SEQ ID NO: 818631 - DNA, 602 bp, Homo sapiens
atttagtgttttttagtatattcgtaaggatgtgcaaccatcactactaagtccagaatattttgatcaccctaaatagaaagatggtacccattaagcagtcattccccatttcttcctctcatcagcccctagcaaccactagtctttctgtctctaaagatttgcctattctagacattttgtataaatggaaccatacaataagtgacctttggtgcctaacttctttcatttagtataatattttcaaggttcatccatactgtagcatgaatcggtgcttcattcctttttacttttaaataagtgctagtctaggttctttgtatcttcaagtgagtcagcatgtgtgcctctctctctgtagatgtctttgtatgcatatttcttactccctctctcaatttctgataactgtatttttattagaaaaatactggctaggctcttcatctctgagtgtatttgtgtacactcagacacagataaacactacaagagacttagacaataaatgttgtgagcttgtttacagaaagactrtatttaatgattattggttctttttcttagaatcttgattgtctatcaaaggtaac

SEQ ID NO: 818632 - DNA, 632 bp, Homo sapiens
cactgttcagtagaagaaaactaggaaagtcaaaaaggctaattaaaatttacataagtccaatataagattaataagtaaaaccacaaaacatatattttctccactcaactggggctgctactggtcaagattgaaagaattctttttaaagtcatgcatttatttgcctgatactctgccactgtctggcaccaaagaatataattcaaagtgaaacttgtgtcagtcattcagaggttttgactacacaaggctaaacatctgcatatttggatgaacgcctggctttctaattcactaactgagaggagatgcaccattagctgttatcctaggcatcaagaaggttaattcattatgcatatcaggtatcagtgtacttgtttgggatacatttatcttatcatctaagattatgttgattttatttagatcatatccaaataaaggataattaaactgctatgtgacaggaaataatccactgttaaagaattctgcaaatataaaattaactgccaggatgaccttcagggtacaggggaaaagagtacaggagcaagaacatgaggccygtatcaatcctctcttagtaaatcgcactgtgagttctgtcaagtcatttaaaa

SEQ ID NO: 818633 - DNA, 490 bp, Homo sapiens
gctttctgcaactcagtttccaggtctaaaaacttcaagtgataattcttacctcaagatactgttgtcagggcttaataggataaattatgtgaaagtgtggcataagccaggtactgtggctcacacctgtaatcccagcactttgggaggccgaggaaggcagattacttggggtcaagagttcaagaccagcctggccaacagggtgagaccccgtctctactaaaagtaaaaagaaaaaaaaaattagtcaggtgtggtggcaggcacctgtagtcccagctacttgggaggctgaggcacgagaatcacttgagctcaggaggtagaggttgcagtaagccaagatcgccccactgtactccagcctgggagacagagygagattccttctcaaaaacacagcagcagcagcagcagcagcggaagtgcggcatgaggcaggtgcttaaaattcttaataaagttaataacgctttatcctcaa

SEQ ID NO: 818634 - DNA, 490 bp, Homo sapiens
gctttctgcaactcagtttccaggtctaaaaacttcaagtgataattcttacctcaagatactgttgtcagggcttaataggataaattatgtgaaagtgtggcataagccaggtactgtggctcacacctgtaatcccagcactttgggaggccgaggaaggcagattacttggggtcaagagttcaagaccagcctggccaacagggtgagaccccgtctctactaaaagtaaaaagaaaaaaaaaattagtcaggtgtggtggcaggcacctgtagtcccagctacttgggaggctgaggcacgagaatcacttgagctcaggaggtagaggttgcagtaagccaagatcgccccactgtactccagcctgggagacagagcgagattccttctcaaaaacacagcagcagcagcagcagcagcgraagtgcggcatgaggcaggtgcttaaaattcttaataaagttaataacgctttatcctcaa

SEQ ID NO: 818635 - DNA, 390 bp, Homo sapiens
tcaacatacccaagagacagtaaagggaggcattactatcccacaatatctatggaaacaacccccagcacagtgctccaggaggaagcttgcatgctgcgtgtgttactagcacagtcaccrtttagtgcttgtcaaggcaggctcagcaccttctggaaacctagaatgcaacacccaaagaaatcaaccaatcctcccttttttttttttttttttgagacagagttttgctcttgttgcccaggctggagtgtgatggtgcgatctcagctcaccgcaacctccgcctcccagattcaagcgattctcctgcctcagcctcccgagtagctgggattacaggcatgtgccaacacgcctggctaattttgcattttagtagagacg

SEQ ID NO: 818636 - DNA, 535 bp, Homo sapiens
aactttaagaaattaaaaaaatgtgcaaatttatttgcaccaaattggaaactactccagaacaaaaataatgaactcttgaaacacacaagaatatgataaatctcaaacaaattacactaagtgaaagaagccagatattaaagagtacctatcatgattatttcatttatataaaattctggaaaatgcagagtaacctattgtaatagaaagcagatcaatagttgcactggaatgaggggacggggaggagcaggaagaaagaattatgaaggtatgaataaactgttgggaatgatggatatgttcaggatcttaattgtggtgatgtttcataggtgtctaaacatatcaaaacttatcaaattgtatattttatatgcaggtttttgaatcaactataagacaacaaacctgttaaaataattacataaaacccaatatatgctattaagagtaaagacattccctaarctctaatgggctggctaatctcaatgtctgtgggctccctagacaagttgaagcatgt

SEQ ID NO: 818637 - DNA, 467 bp, Homo sapiens
gtaatttactcagcggtggtcccagtaaacacaagtagcttggaaaatgaaaaggaaggcaaccgataaatgatgcatcatccrattagttacctctgtgggcgactggagcttaatccggctgggaaattcagggaaatggtgtgagagcatgcctcaaagttatcaggcccaaggggcgagggagccgggactctccagcagttcccactggcattggtcaagtgctgcttctgaggggtgttaatttcctggcacctcccaaggctgcgtgtcacttgggcagagtgccctctagtggccagacaaaaacaccatctagcggagaagaaacacaagggttgacacttgaacactgggtgagaggatgcaggcagagcacctacagcatcagacaccacatgcacacagaagtacaaatgcttccgtgttctggagcacatatccaactggggagttgcagacaa

SEQ ID NO: 818638 - DNA, 606 bp, Homo sapiens
ttacctagaagtccctggttgtagatgataatgatgtctacccatgaagcgttacaattgcttcagtgaccaggtcaatggcctcataattctgtaattctatattacactrttataggtgaaattggcacttctgactctgaaaatgctggctttatgggactggaactggctaattgatctgattaaaaaatacacacgaaatggtacttgatatcatttgactacctagagggtggtagaaacagctgtaattttgcaagataatatcaagacaataaaggagtcttataaggctactgtctcattaagggatggatttcttcccgaagcctctttgaaacctgtccttcacatctgaaggaggaggccaagatattcatactatgttgggacttactagagcagtaaaaactcaagagcagcctgatgctataacagaataaatctttaaaaatcattttaacaataagatcatgaaaatgactaggagatatgtgatttagaaaaatgaaagagaaaagctgagaccatttggttcatgcttcatgttcccatttctgttcatctaaataagacatggagtggttcaacaaattctgaatg

SEQ ID NO: 818639 - DNA, 531 bp, Homo sapiens
attgtacttatcataatgtattagtattttcatacacttggatttgattagccaatattttatttatcttttgttcacaattatgatggcttctaatttcctttcttgtgctgtttctgttttatagtatcagttttgtatttgaccataaaagaatttagtcagtaatagttttttagtgcttgagatagaaaggcatttcagagacctggacatgtttgtttgaccaagcagagctttcagaaagtctagctgtttggaaatttatgaattacttcatgtgtattacaggagggtcgttttctgttttcagagatcaagacatgaaacccatgttcaagatactttccagtgtgtcttcatgtgatcctctgagtccagccatcaggctaccagcagctcttggaaaccctgacatacttattcttagaagactgctttccggactcaaagtggaacctcaaattttcaattttcttwgtttttaaagcctacacataggtgatgatatatacatgcatatatattttg

SEQ ID NO: 818640 - DNA, 505 bp, Homo sapiens
cttattgactttctggagggccaaagaacagtaacatcttattatgagagtgtatagagaaagtcagccaacgatttagcaggaaaacacccaggaaatcgtcaccccggaaagcttcaccagagagcccttctccaccatgacaatgctcctgctcattcctctcatcaaacaaggccagttttgtgagagtttcaatgggaaatcactaggcatacaccttccaggcctgatttggttacttctgttttataattttaaaaaatctttaaagggcacccacttttcttcagttaataacgtcacaaagactgaagtggcatggttaaattcccagggtgcccaattctttagggatgaactgaatggctggtaccattacttgcaraagcgtctcgaccttgatggagctcatgctgagaaataaaacattttttaatttttatcttttaattcaattttttcgtgaacttttgaagtccccttgtatttgttttcggtggaa

SEQ ID NO: 818641 - DNA, 380 bp, Homo sapiens
agagcaaagggacaggcaaggtcatacctgcgggggtgtggagctcctctgctgggcctagatgttgagttcatacccctttgccaggttgggagagggcatcggctggggacaaagcgggtcaagcaggtatgagattacccttggatctcttcctcctgcagcttggaggatgccagcaggggccggcgttgaggaggccctcgggtggcatcaccagcatggctctgagggtctctatttccagagctctgcatctgtgagctcaggcwccccacccagtcagcgagggagaaggcaggccgctcctcagtggacacatgccagtggcctcaggtcccattgctccacctctcgcagtggaaggccacccccaatgt

SEQ ID NO: 818642 - DNA, 629 bp, Homo sapiens
tggaatacctttccattatgtgtgtgtgtccacttcaatttctttaatcagtgttttatagatttcctcgaatagctctttcccgtcttyggttaaattgatttataggtattttatattctttgtagatattataaattgctttcttgatttctttttcagattgtttactgtcagtgtacataaatgctaccgatttttctatgatgattttgtatcctgcaagtctactgaatttgtatcctgcaagtctgctgaatttgttgatccgttctaatagtgtttttgtggagtctttaggtttttctgggtataagatcatgttgtcagcaaacaaggctagtatgactttttcctttccaatttggatgcctttaatctctttctcttgactaactgctctgcccaggacttcaattgttatattcaataaaagtggtgaaagtgggcatccttgttttatttcagcatttagaggaaaggcattcaatttttccccattcagtatgatgttagctcttcgtttttcatatatggcctttattattttgaggtatgaaccttcatactcagtttgttgagggcttttatcattaagggatgttgaattttatcaaatgctgtttcag

SEQ ID NO: 818643 - DNA, 649 bp, Homo sapiens
gtaattttaaatatatttacagtgtggagtttcagatacatttattcattccagtggcagtgaaaattggtgtaatttctttggagaargcttcagcaatatcttttaaaagtgattagaagatgcatacttctttggaccctacattttcattgctaggaatttaccattcatgcacagtggacaagtaaaagagtctttatagacttgctttggttttccagtttctctagaaccatgcagggtgcacatagtctcatttctctctttcggaatgtgtcagtcacatgctcctttatttttccaattacttagcagtaacttttttttttgtgatagcaattgtcttactgagtacttctgggctgtgtgtattttgcttatattaactcagttaatcctcacaccagtgaaaattgtattttactttattgtgcagagcagtactagtttctttcatttgcagttctttccttctaccttataaatggtatgattcgtgaattgctggcatttaaaattatgcccaatcttgacccatagaccatataatacgtactccctaacacccagtgatacatttacttttgaaagactttgctttagtccttagccaaggcctattcttgtccacagtctgaggaggcaa

SEQ ID NO: 818644 - DNA, 577 bp, Homo sapiens
aactgaccaaagttgttatctttactttctaatcacagtacttgccattgcataatcttgatgtattctttcctcatttctcttggtgcaatagtgagaaaaagaattctctctctctctmtatatatatatgtaacccataagtagtggcagtttaaatgtagtttatttgtaaatagtgcaccaaattcagaacttatcacctttataagtttagttacctttataacgttaggactaaatgtaaatgaaaaattgtttttgtaaagcttagtgtttaaggaaggttatgaatgcagggttaataacactggaggattccccacttcttctgccaccatactttttccttcatagaacacgcttaaagatttagatattagaatgttacttaaaacagtattagatatttctaagagacccatctattaccagaatggaattactgtctgggggaagattttagtattcagagttgaaagaccagacgtagttatttccaacagtaggctcaacactgatcaaatcatttcttttattgtaagtatccatattaataaaatcaggaggtgggagt

SEQ ID NO: 818645 - DNA, 664 bp, Homo sapiens
gggatgtgatctcggctcactgcaacctctgcctaccaagttcaagcaattctcgccagcatcatttgttgaacggggtgtcctttcagtgttttatgttttcgtttgctttgtcaaagatcagttgactccaagtatttggctttatttctgggttctctattctgttccattggtctataggcctatttttataccagtaacatgctgttttggtgactatggctttatagtatagtttaaagtcggtaacataatgcctccacttttgttctttttgcttaaaattgctttggctatgcaggctgtttttgggtccatatgaattttaggattttttttctagttctgtgaagaataatggtgggttttttggtttgtttttgagacagagtctccctctgtcacccaggctggagtgcagtggtgcaatcatagctcactgcaacctctctctcctgggctgaagcaattctcttgcctcagcctccagagtaactgggattacaggcaagtgttaccacgcccagctaatttttgtatttttagtagagatgaggttcatcatgttggccaggctggtctcacactcctgatctcaagtkatccgcttgccttggcctcccaaagtgctaggattacaggcatgagccactgtgcccag

SEQ ID NO: 818646 - DNA, 599 bp, Homo sapiens
gaaattctttaaaaacatgcattgaggttgggcacaatggctcacacctataatcccaacactttaggatgctgaggcaggcagatcacctgargtcaggagttggagactagcctggccaacatggtaaaactccatctctactaaaaatacaaaaattatccaggtgtcgtggcacatgcctgttgtcacagctactcaagaggctgaggaaggagaatggcttgagcccgggaggcagaggacacagtgagccgagatcatgccactgcactccacactgcagcctgggggacaaagagagactccgtctcaaaaaaaagaacccaggtcaggcacagtggctcacgcccgtaatcccagaactttgggaggccaatgggggcagatcacctgaggtcaggagtttaagaccagcctggccaacatggtaaaaccccatctcaacaaaaaatgcaaaaatcagccaggcgtggtggcacacaactataatcccatttactggggaggctggggcaagaaaattgcttgaacccaggaggcggaggatgcagtgagctgagatcatgccactgtactccagcctgggtgacagagcg

SEQ ID NO: 818647 - DNA, 653 bp, Homo sapiens
tcttctggaagaaactctccctcaaataaatagccaaatccttttggtcccaaacaccgaagagggattttctttctgccattgctcagcagcctggcttctaaatgagtttgctgtacttagtttgtgtagtacctaaactacaaaacaaattgctttcctgaatgtgcctccaaaaaggaaataagtgtatggaacaaaccaggttcaaagcatggtataaacaaagggaaattgtttgcaattccagctgcttgtaaagatgcaagagggaggagagaagagccctcatgggtgtgaagtgggctatgaaagtgcaaaagaaggtgcttcaaatgggaaccaaatgggctaagtcagaagttagacagcaattagaagtgaggtgcctccaggcgtctctctctcactctacatgcggcctcacctggtagcaaaaagagggaaaccgcttaagcccaaaggatttgcccttctctctacctgcatccacagccttcaataatttataaccccagcactagagctagtgctaaaagatggattttattttgaaaaaagatcgtgtcrcttttttccccagatttcaaaagctcttcaagagtctgctctggcagcctggccattattattcacatttagggagtgcataa

SEQ ID NO: 818648 - DNA, 628 bp, Homo sapiens
tggtcactggaaaaaaggtggcagtcactcatgttaggcaggatagggagtgtttggtcattgtgtggcttgaacaatgttcttgtgttttttgtctgagttcagacatgactrtagagtgaccttatttttgtcttgatccattacagtcagagttgccttgtctgaggttggtatgtgaaactgttgatattcaacaggtgaatgccgtcacctcactgtgagtgccaggccagctcctggctgtcagggactaatttttccttttttatcccaaatcaaaagacaaatgaaaagaaaaattgtaccaggtatgacagggcttcaagagccttcagtgacctgtggccatgataaatctgtgtctgggaaaaataataatgaaaataacttaataggtgttattatattaattaagtgctcttcaataattatttatttaataattatcatttagtacttattacaggtcagatattacataagcctattcaaatacactatctcatttcattctcctcttaaaatcgctataaaattggtattttctttttttgcagctacagaaataggggctcaaacaaattaagtgccagctgtcaggccacctgcctaataaggctgaatt

SEQ ID NO: 818649 - DNA, 695 bp, Homo sapiens
tggtacctccagcagtaagcrtagtgccagacacatagtgcagcagactctcaagtactgtggaattagtttttcgcctttctctggttcttccatgtaataggctttactagaaagctgcaatataatttttattacctgttgttttaattgaataggttttgcactgtgggagagttgaacaataaaaatgtttcttagaatacatacacacacacacacacacacacacacacacactaaatgactttttttctcatgaaatcagcagtgtagtttttctctataggttagtgatccacagtatgaaatggaaagaggtggcctctagcattcctcgtacctaaggaggcagtagagcatcattggagaataattcctgcgtcactcagtgcagcaaaggtgtttgagattgcagtggcttagaccatgaacttggagccagactgcctgggttccaatcccagctctgattcaattcttcatccctacaatgagttgataaaaagcaatgcccaccttctatggttgttgtgaggattccatgtgttaacacacagggcctggcaggcagtaagtccttagtgatcactagcatcattactgtgctgcacttcttacagagactttttttcccaatggcctaatgagatatttatgtttcagtttagttcaactaacacttcctgtgcccc

SEQ ID NO: 818650 - DNA, 338 bp, Homo sapiens
taagatattaacaaggaagagcctgagaagacgttgcaaggaatgcgggaggtggaaatgggtggaggatagtctggtggctggtgttggtgaaggatctaagtcaggaaataccaggaagcacttaaccagctctcgtgccccctgaatgttgccatttcccgaatgtctgaaagaggcaccataatatcagccacattgagtatattaggataatgccagttattagtaggaaagccatttycaaggactgcataaatcttgttcgtgtatcagtctggtgtagtgttcctgatagcagacatttctttatgttggggatcactgaaaaacctgga

SEQ ID NO: 818651 - DNA, 338 bp, Homo sapiens
taagatattaacaaggaagagcctgagaagacgttgcaaggaatgcgggaggtggaaatgggtggaggatagtctggtggctggtgttggtgaaggatctaagtcaggaaataccaggaagcacttaaccagctctcgtgccccctgaatgttgccatttcccgaatgtctgaaagaggcaccataatatcagccacattgagtatattaggataatgccagttattagtaggaaagccatttccaaggactrcataaatcttgttcgtgtatcagtctggtgtagtgttcctgatagcagacatttctttatgttggggatcactgaaaaacctgga

SEQ ID NO: 818652 - DNA, 505 bp, Homo sapiens
aggatctcattcgaaataggaccaaagctttatgttaccagatgttcatgatgtcattatttataatcacaaaaaaaaatcagaaaccagctccatatcccacagtatggaaaatagtactaccactttatggcataccaagctaatgtaatattataaagttacttaaaatgagtcctacaaagaggctttcatggcttcaaagtgtttatcataaaatgttaagcaaaaggtataaaactgtatcatagctatgtcaaaactatgtcaaaaatatgtgtatatataacaaaatgttaatagtgttgtgtgaatgatgtcactacagttcattttcctttttttctaaatttttattattctatgtttaaaawacatgtttctaaagaagggaagtaaaagtttgctggcagccagaacgagtaggacccatttgtctttgcaatcaccagggaccgcctgctaaggaagcccgttaaacccggggtggcagagcccttgtgct

SEQ ID NO: 818653 - DNA, 580 bp, Homo sapiens
ctacacctgactggcacaagcgaagaacccaaacacccattatttagagaatggaaaagcaaattgtgrcactatcaggatacaggatactactcaacaatgaaaagaaacaaatgattgatgcacgcaatgtgcagtattgtggattaaactaagtgcaagaagcccagactcaaaaggttacaaactctataattttatttatatagggcattctagagaaaataaaaccaaagggacaaatgagtagttgccaagactaggagctggggaagggattgactgcaaggagatgaggggatttttgaaggttttagagatgtgtatattttgattatggtcatgattatatgattatatacacttttcaaaactcatcaagttgaggctgggagcagtggctcatgcctgcctgtaatcccaacactttgcaaggctgaggcgggtggattgcttgaggccaggagtttgagaccagcctgggcaaaatggcaaaaccctgtctctactaaaaattcaaaaattagccgggcatagtggtgcgcagctataatcctagctacttgggaggctgaggtat

SEQ ID NO: 818654 - DNA, 564 bp, Homo sapiens
tgaatttgtaatgacatcaagaagtctgaaaactgtggaacgtatgagacagaaggttgggtaagatggaggaaagaaatatggatttaggatttatcaataaaaagtaacatggggaaaaatyaagagaaactatgtgcagagaaaaaggaacaaagcccctaaggactgatattaaaggaaaaagaggaagaggctttagtaaagaaatgactagaaacatgccttataagtaatgacagcaaactatgaaatctgtacatcctcaagaccttgagcaatttctgtacaaagccattgttgaagggctatttcttaaatgagagaataaacagctgctatagaccgcttcggctcatcctgtgtttcctcactctaacacaatggttctccatttttagccaagcatcaggatcacctgaacggtctgttaaaacacatttctgggctccagccccagaggttctggtttcgcaggcatgtataatttttatttctaacaagttccaggtgatgctgtgctgctgatctagatctagtccacattttgagaaccactcttgt

SEQ ID NO: 818655 - DNA, 608 bp, Homo sapiens
tatatgatactgcctagtgagtcctctataagtatttgatattattattgcggtggttgttcttattgttgttatggtaaatagaggtatggagggagctctgcagaaagatcttgaataggcacgttaatttgggatcattggtacgtaggcgaatgtcaaagctttagggtgaaatagatcaaatacaacttatctctataactttattttattttattactttttgagatggagttttgctcctgttgcccaggctggagtgcaatagtgtgatttcggctcactgtatcctgcgcctcttggctcctgtgcctcctgcctcagcctcccaagtagctgaggttacaggcatgcaccaccatgcccggctaattttgtgtttttgttgttattgtttgttttttactagagacggggtttcaccatgttggtcaggctggtctcgaactgacctcaggtgatccacctgcctcggcctctcaaagtgctgggattacaggtttgagccaccacgyctggtcgtacctctataaccttaaaccactcctctccagagacttcaaaatcttatttgtcaaaaagaaaattaattctatcatttttgt

SEQ ID NO: 818656 - DNA, 578 bp, Homo sapiens
agtctcagaaaccttgactatggccatcaccagctcattggaaacgtatttatgagcacattctttaagaaagtgtaacaaatagttctccaaaacgggctgtgcattcttttaagcttagcacataattctctcttacctctcttgaatgggatgtataatttaagattattgcatgctgtgcagggaaaattaatgctgttttcacccctttcaccctgcagaacactaaagagagaatttccaaagctgctactactttcctaccagatgctactttcagggtcaaagccgctcattgaaaatatttatcacaccctataaataaatcagtcataaattgataggattgcacgtccataactgactggtgggaggaacctgccctcacgtcccagtaatcatatattaaaagccgcatgggtaaacaggctcaagaatgagttgttgctgcattcggagccagcytgaatcacacctctcccacatatctagcatttcaatttaatattcctggtgctagggttgcctatattatcaatgtcaaaaaaaaaaaaaaaaaacccctaaaatgtctt

SEQ ID NO: 818657 - DNA, 663 bp, Homo sapiens
aggtgcaagctcatgtcctactaaggcaactgagttttgccacagtgatttatatatgwgtaaatactgcttccatcagcatggtttgtttagtgttagatcccgaacgcttctcgcatctgacgctatccatgcattcttcattcatttcatcaatagcatcctcctagactttctttgacatggctgccccattcttttaatctggtttctcagaggtatccagtttcatcaaatctcttttatgaaatatatatctacttctgctatacaaatacaataggtaatcagcactttttcttgcatacgcagaaatgtaatttatctatttgaaatttctatatttacttccttcattaagaataatttttatcaatgttttgctataatcaaaaccgatatggcaaagctgcaaaatgtcaaatatcttaagaaataataatttaatggatggtgcatgaagggagaaacataatcatatagcaggcttatatcttctaaaaatgtaaaataaaaacacaaaatgttttagagaaacagttatagatggtaacatttacacgaatcagatcttttaatatgagtacacgactttaaaacaatcagaattctcagcttgaataggcttgttaggttttttacatgctggttatttccagatca

SEQ ID NO: 818658 - DNA, 562 bp, Homo sapiens
cagatattggagcagagtgatcttgtcccccccagaggtcccccatttcaggccaaatatcttcagttgctccccacttcttgactgtcaaagacaccctgaaatgtggttttcagaagtgggcccggtgtccctgtgtggagggaccagccctcagccgtgcaggccaccagtggccaaccccagagctgactctcctgaccactgattcggagcctctctccttgagtggctgctaggacacatcttgtcccttgttgatggttgttttttaacctaaaaaagtgaaatccttttgcaaagaacacagcaccatatccagtgtgaagcacgatattaagaaaggcctggccacagtgagcactgtctctaaaaagggaatcaggaggtcctgccatttcccacaacatggtcgggcctggaggacattatgctaagcaaagtaagtcagacacagaaagaaaaatactgcatgatctcacttacatgcggaatwaaaaaaacagagataagagaagaaaatagtggttaccaggggtttgggacggatggaaggaaggga

SEQ ID NO: 818659 - DNA, 624 bp, Homo sapiens
ttgagagcctccaagacatctttctcagagacataaaattagatgtgtgttaatgataggaaaacctattctaccctgaatgaaaggatcaggtgaacattttgttgaactttgccattagaggaaaaaggtatctgaaatattgcctccctttcagttactaaaaaattgctcgataaatttttattttgcttaacatataatagccatttcatagtagaatgaaaaaacaataattcaggccaaaataaaatgcaagttctataatattcatatgtatctttatattctcttgacaaaatgaggaagaaagaaggagagggacagggaagaagggtaggaggaagagagagagagagagggaacctttctccatctcacaaattaccttggctcagtgcctgaaagaaattagtctactctaaagaaatcctgctgtagtcaaataaaaatgtaacaaaacttgaaatgtaatacctagatccaagactgcagttctcgccagtgctgtcacttactgcccatatatayatatatatatatatatatatatacacactttattcactgccaggcattgaaaaatgtatgcaggtctggagacaaatgttatgggctgccatt

SEQ ID NO: 818660 - DNA, 604 bp, Homo sapiens
cacttaaatgagacaggtaagaagagaactaagttgtgaatgctggaaagaatcccatgctagagacaaaatgtactgatggcatctkggtgataaataaatatcacaaacacccagcactttgggaggctgaggtgggaggatctcttaaggccaggagtttaagaccagcctgggcaaaatagcaagactgtgtttctacacaaataaataaataaataaaagaaaaaaattaagcaagcaaacaaacaaaaacgagctgggcatgatgacatggacctataaccctacctacttgggaggctaagataggaggatcacttgagcccaggaattcaaggttgtagttcaagtaagatataactctgccactgcactccagcctggacaacagagcgagatcctgtctcaaataaataaataaataaataaataaataaataaataaaatgaacagtgatagttcatgaaaacagtctgtcagaggtggtctgacgtgaaacatgtctcagagtttctgaaaacttgacgaagaagagctagatctcttcagaaaccaaggctaacaagcagaagaaatcaaggaagtctgagagcaagtaac

SEQ ID NO: 818661 - DNA, 508 bp, Homo sapiens
gtgctaataaaagcagctcttgagccatttcaaacagacgatgaggcagattcagatgaggaagrggaagacgagtgtaaaaatcgaacttcagattctgaatgtgaggaacaggaaacggaggaaatttaaagaaaggatatgttttactagcccatcagctccacctgctgaattaagtgaaaggccacttcctctctcctcttaatgggcaagaagatgaattggctacaaaacttactgctcccgtagttgaaacattaaaacctggagcaattggtggtgctacacaaaattctattcaaaaggctagagccgagagagaccttgaagcatggtaattccccgtaactataagatgctcttttaagatgctctgctccccagtttctacccagcttaccccccctgcaatacaatcttcaagccttggctccttgcccagggccttagaactgataacctagtactttaacagctggaactgggtctacaacaacataataga

SEQ ID NO: 818662 - DNA, 583 bp, Homo sapiens
taaaaaaaaaattacaaattttatctattccctttcctttaaattatattggactgatgctattaaagcagacctccaaattttaaagtcctttagatttcaacctcaaattactaargggtagagtagctatccacttcaaggtctattttatagtctaaactttatttcattctttctctctacaatcaccacccaatgctgtctgattttctttgaaccattcttagatgatctcattcaaatcatgttctttaaatgttctcaattcacctttttctattacaaccctagaagtgtaaggtgttaaaatcaactctgaagctattctagctacgttcactcagcctaataattcctagattatgctatgcttttttaaagcacacaattagcaactcattgggtagtttgaatcaaagaatttcttagaagttatcacatgtaaatccattggcctgcataagtaatccaaactatatcaatatttttttaagttaagaatattttgagattcctattcatgctgttttttgtctcttttcagtcaagtcattatccctaaaatattgttattaacaga

SEQ ID NO: 818663 - DNA, 623 bp, Homo sapiens
tccccatatcaaaaattcaaattgtcttttctttgctatctttttataatactttgaatttttttctatttatttgttggtccctatttttccaattcgtagaagtgttctatatattaaggaaattagactttgtctcagttacaaatagcttttaccaaacttgaggttagaactgagttttgatgaattttgtctttctttttcattggcattattatgtttaagtagtagaaagtttatatcatttcccttatggcttctgggattttcattattattagaaaggcctcccctattctgagattacaacatttttaacaatgatttctatactacttctatagctttatttctatttttttattcattgaaatataccctgatatgaaatgagacgtggaagaaaactttagtccagattacaaccaaaatgtcataacgtgatttcgttttaataaacaatcttttcattactgtctaaaatgctgtctttttcattttgtaaatttccatatgcatttgggcctatttctggaattataatttgattctattgatgtrtttattcataagcaatatcatactgctttaattattgaggcctaataatattctttaag

SEQ ID NO: 818664 - DNA, 661 bp, Homo sapiens
ttcaaggctaggatccctgtcaacrttatttaatctctttgagctttagcaaaatagggtagataatggtagttatttcatagggttgtgtgcagcttaagggagatcatgaatggacatttctaacccaatgtgacaatcagtgaccaatatgttttggctttttcaaaccaagaatctagttgagtccacagccacttctttcttgaaaaaaaaaaaaaaagcattcaggagtgcaagttttctgctatagaaggcagtgggtacagacagaccttccctgagtggagggctgggagagagtctgcatggggacatccctccaagcaacttcagagtgacagaagagcagccttccttagcacctgcaacagtaacccttttctcatcacagggggagcaccaactgacaggagagaagtaagaagcttatcagcgtatcattgacacttcctgcagggtggtccctgcccttaccagagctgaaaatgaaaaagagaacagcagctttctagggacagctggaaaggacttaatgtgtttgactatttcttacgagggttctacttatttatgtatttatttttgaaagcttgtattttaatattttacatgctgttatttaaagatgtgagtgtgtttcatcaaacatagctcagtc

SEQ ID NO: 818665 - DNA, 649 bp, Homo sapiens
aagtagtaacagatttcttgagtcatcaaaatttcttaaggatatcagtcagcatttgatataaaacaatattttgctagtttttattaactcaaaaaatattgattaagcatcagttgattaagcctgaacttcctaacaggttttacgaagttctctttgcatgacttggtcatttaattatttattttttaaaagtcaggcctaaaatatttgtggaaagcaatgggatatgaaaaatactctactcttgctgctatgatgacaactgctgctgttaattgctgttactgtcatttgcatcattcccttccatttccacgttgagaaacacagtaaagatgatgataaactgagtgtacaaaactggttaaaagatgtttttaaaaacttattcagttaaaagcatactgttatgcaaaattattgtttaaataaatgctagaattagagaagagttattttgttccttgtttttaaaataacttgacagcctttttattaatcttacattgtcattgtgggtttgtatatgtgtgtgttggggrgtgctaagttattttagctcttttttctttaagtcatcttataaatagcagagtcatgaaggaagcaagcaaattatctaagactcaaagcacattttatg

SEQ ID NO: 818666 - DNA, 605 bp, Homo sapiens
cactcactggcccacctttgctgtctttcttttctcttccctatcaatttttattgacctgttctaaaatttgcttgcctgatttgtctcagtaatcctctcaggtatcactgtttgaattcacattttacacatcaaggcacagagtagtgacacagctcattgctggagtctggtttttgagcccatgattttaactaccatacaatctatttgcccagtacagaggctaaataatagcaataatgcatactccatcagctccatttattgtcattcatagccacataaattttttttaattatactttaagttctatggtacatgtgcacaacgtgaaggtttgttacaaaggtatacatgtgccatgttggtttgctgcactcatcagctcgtcatttacattaggtgtttctcctaatgctatccctcccccagcccccgaccccccaacaggtcctgctgtgtgatgttccccaccytgtgtccaagtgttctcattgttcatttcccacctatgagtgagaacttgcagtgtttggttttctgtccttgtgagtttgctgagaatgttggtttccagcttcatccatgtccctgcaaa

SEQ ID NO: 818667 - DNA, 611 bp, Homo sapiens
atattagagttaaaaagactgaagtatagagaagttaactagctggccaaagtcacccaccaggtaggaagtgaaactgtcacctgagcctgagtttatttaccaaggatatgmtcttatttactgaatgctactccattgccattaatactgttgtttatcaaataattctagttcattcctatttaaggcacatggaaggatttcatttctttgccatcatcaggttagatgtggccaatgacttgctttggtcaattaaataagagaaatggcatgagtcagttctggatagaggcttcaggactcccctttctcaggtcggctgtgattaaagaagccatgaaaagaagatgtctctgtcaacctgttaccctaacagaccacagtgagtacaatcaccttgtgtagcacacataatatgaacaagaaatacactgttgttttgttgagaccctgagatttggggaataattgtaaccacagcataatctagcttgtcctgagacaattatgctgctgccaaatatgtagtaagttgtgtcaatgatgtgtgtcaactctccaaggttgggggaagctcttatcagtaatgttgggggatttttgta

SEQ ID NO: 818668 - DNA, 585 bp, Homo sapiens
cacttcttttttccctttgtccccttagctttagaggtaagcatagcttcctttagctgctaactccctgacaacttagtgtccactctttatctattcagtaattaacatctttataccaagttagcagttcttaataataaattctttttctttaaattactgaaaggatttccatcttctgactaatatacaaaatacattgataaacattaaaatatataaaatgattaaacttctatataattaaaagactatttctaaaagagacaaaagatagttggatcagcttacatgttacagaaggtcaagacctcgggaggtaaaggtcacaaggaaacatgtcacctactacaaatactaccactaacaataatagtaacaaccttagtcaatagaaaacaggaacatcaaatttaaacgcttcctgattaaacccaggagtgtcaaaattcgttaacattttttatctattacataagccaatttctaataattaagattgrcaatgctgcaataacacacacattctaacatacagattgtggctataaattggtacatctcacttagaaaagcaatttg

SEQ ID NO: 818669 - DNA, 658 bp, Homo sapiens
gtattaataacatcctttacacctaataaaacacttctataatgcaaaatatttttaaaaagctaagtccaaagacaaaactaggaacaaacattttaacttatgccaaaaatatacacaaatatgtaatgattttctataaattgatttttaagaccaacaactcaatatgaacaggctgttcacagtaatggaaatagtttccttctttcttctttcttcttctttcgtctttcttcttctttttttggtgtcacccaggctggagtgcaggagtgcagtggtgcaatctctgctcactgcaacctccacctctggggttcaagcgattctcctgtcagcctcctgagtagctgggactacaggcatgcgccactatgctgggctaatttttgtgtttttcaaagagaggaggtttccccattttggccaggctggtcttgaactcttggcctcaagtgatccacccgcctctgtctcccaaaatgctgggattacaggcgtgatccactgcacctggacagkaaatgcaattttcttttaaacatacaaaaaaattatgattaacctattataaatatgctaatgtataataaaataattgcaaattaaaacttcactgaatcatttgggatccctctgttctctgctccaattt

SEQ ID NO: 818670 - DNA, 585 bp, Homo sapiens
gcacagtttgccaagctgtttgtgaaagaggactttatatgtgaccactcccagggtgtgtcaggaagagttycccctgataccagaattcccttgtgtcagagccatttgtaaggtctctgagtttctaccgttgccctctgcttggaattcaaatttaaagctctctttacagtaggagggatccacaggaaaatagcttctgttgtggatttgaggaacttacaacttctctagaaactctatactcaaataaatacattaaataactgggggcttgatagagtaggtgtttctgactattcagtgaggcaagatttagagtagggagaggtcctggatagttttatgtaatagctttttattttctttttccttttttcctttcaatgttttaattggcctataataactgtacatatttcttgggttcactgtggtatttcaatacatgtatactatgtgtaataaaccagccagggtaattagcatatctatcccttcaaacatgcatcgtttcttttgttgggaatattcaaaactcactcatctagctattcaaaaatttacacaaaattgttataa

SEQ ID NO: 818671 - DNA, 445 bp, Homo sapiens
ttccagtcctaactttctgaattctgtttaaagaccttctctaacaagctatgggaatttggcttcctacttttttttttcttttttttttttttttaacaacagcagtgttttgggtgataattctggattgatacttattcctttttctgggttttgttggctttttgaaaaattgtctttccaacttataattggtgagtggcttggtagcaaagtaagatttttttttttttttttaaaaagaggacagaaaaattgaactgcagcttgaggacatattcttttttcctactttgtcattgaaaattgaggaatcacgtttaactgttttaggtgtgtgtggccaaagagtgagcaaggactatgtttytggattgtcaaagaggatgcttaatcttaaaaataaagataaatgtacaaatcatcttataattaaaaaaaa

SEQ ID NO: 818672 - DNA, 587 bp, Homo sapiens
gcctgacccataggagaaatgtgggggttctggaggaccccgtgattaatcgacagttactcttggtctaggtagacaataggcacattgtggagatgtaagcttggtcatagagcagccaaaggtgcagttgtggcctgggcaggagagcagcacctacacctagcaagggccccggtacaaaggacacctgtgtacataccccaaccagcaagaatccagcagggtggcaagggccggtgggcatggcccacaaagcggctgggtcctgggtacaggctgggtgtccccacgctgtctgtgccccttgctgtgctgaggtgggccagtgaagggcttgaggcagccagggcctttgctcttgcgtgtgtttcctcagctgctgacagggctgatataaaagtctaaggatccttcgaaacctcataccccagggtatcctgcctttttctctggggaggcaggagggatagaaaaggttcctcatgcctgtaagggggaagggacagtagaggtgggggaaggggagaagyccttttccctccagacttgagtcctgaataaatatactggcttgagctctttgc

SEQ ID NO: 818673 - DNA, 646 bp, Homo sapiens
gcagattttagaaaaatggccacttttcagggatatacttgtgtatttggagctacttagtagatagaatgataaatgatagaaaaacagatgatagataagaagaaggacaatagctagatagatagatagataaaggaatgttaaaaatacttgaactcagtatgaatctaacccatttaattaaagtggcaatggaaagctgtatgatttagtgggcaaacaatgtcatggaaaaatgagatataagtttaatttttgcatcggttctatagtttctcacctggaaaagagaaaactgtatcacaggagtggtccttacatgagagacaaaaaaagacaacgatttcaatgagttggtgggttagagtaatagagaagttattaaaaagaaaaaaaaataacagatgttggtaaggattcagagaaaagggaactctattacactgttggtgggaacacaaactagtaaagccaccatgaaaaacagtatggagatttctcaaaaatctagaactagaattatgatttgatccagcaatctcacaactgtatatctacccaaagggaaagaaatcaatatattagagaaataattgcactcacaygttcattgcagaattagtcaaaatagcaaaaatatgga

SEQ ID NO: 818674 - DNA, 617 bp, Homo sapiens
aatgcagattctgattcaggagatttagggcaaccaggttcgtctacttctaacaygttcctaatgaggctacattgctagccctacagaccacaccatgagtagcaaggcaaagtagcaagtaaaatccttctaggtttttacatttttgttttgggtttagtttctgaaccccacacaaaaagtcaaatctctatacttaatgaaaacattttatttttcacatcacaatttttactcaccttgaaaactcatctattaagcctggctacaaatgatagctatttcaaaaagtcaactgaattttaaagaatcagaacttgctggctcagacaagatgcgtaattatttatcatataatatgaaatcacttccaagatggtgttccgacattatctgagtagtagcaagttgggtggccatcttggtcggccagggacttttctggtgttggcactgacagtcacactgattgggaaacctctgaggcctgagaaaattgagagcattaacagcagcctgagaaggactcttttgtgaccctggacaagttatagggtcttaaccctataactatgggtttaaaaggcacagtactccctgacacctatgagttt

SEQ ID NO: 818675 - DNA, 578 bp, Homo sapiens
catgatgagtgcacaataccagttgctttctaacttggatgaatattattcaattggatttggagaaattagtcttgctttagaacttctctttaagacttcttattgaaaacaaaatgcaarcaaacaaaaaccttccctttcttgtattttgtaaagctgagtacacaagagataaatagaattcattttaaatattctcttttgaaagttgaagtttcttatggtttacttctggaaatgttagttgtatttgctagttattttccatgagctgatagttatctcaccagtcacgacatgcataatattatttgaaaaatttacttcatgtgggctaaaatttactaaaactgcctttaaaaaccaactaaaggtcacatagcaccttgtccttctagtgggattgcaagataaatgtcaaacatccattctaattggatccagaagtccctgggcatttggcaattagtagtaacaattccccaattaataacatataatattcctaatgccaagtgtgttatatgttagtaagcaaaaagggttctgaataagtcttggtttaaaaaaaaaga

SEQ ID NO: 818676 - DNA, 576 bp, Homo sapiens
tcatctatctgtagactcagattaatttaattactcaataaggagacaattaattatcacttaaagrggaaaatgctagaagtttgctttattggttttcttaatcacatatatacaattccattaaactgaaaaagaagagtgccgtgagcctttgtcaaattgctaaatatattactttttccgtattttaaattattattcatcttcattccaaaaccaagctttcttcagcaaattccttatttgatattgaggatataggaaaaaaacaaagtcagtttctcctatactgtcactcaacagtcaacacaaaagatttctgtgaccaaatgtaggggtaggggttcccccccatacaccaagcaagcaatcacttctgcagcagacaccagctgggtgtcctctaattcaagtcaattgtgacactctctacctggaggtagttcagatcccacaggttgaagtctcagtccccaagacttcccctccttatcctccacccaccaccattctgatgccaattgcaaattccaggttattttacctgtgcttctgaccaatcggctataatca

SEQ ID NO: 818677 - DNA, 560 bp, Homo sapiens
tgctgatgggggatggcaattttgaggaataagatcgtgaataagaataataaaactaaagagtgtgagagagtcctggaggtcagtggaaaacattaatgtggatgagaaaagtcagaatgtcagctgtccaccagcctccagagaagagtagggttcccagagatggcactggaacaagagtttaaagctttagaaggaggcatcaaggagaagtgtgctcaacctttctcctcaaaactggaatgaggggtaggagaataaacaacactattgaaagatcatgtaaggggcaggtaggctatggttatagggaaagataggaggaatgataaagaaaaaggcaagaatgtaggggagttttgacacaaaatttaacaggcattcctaatgggcaatcttagatcctatgaggccaaacaaatctggacttactgaaggcttcattttttcccccagctattttttaaaacataggctaaaaccttctgagcagtttttacctagaacaagaatagagaagggaagatcttccmtacatgtcttcaataaaactaagc

SEQ ID NO: 818678 - DNA, 620 bp, Homo sapiens
cccatcatcccatcccaccaaaygtccttggccttttaacctattttttaacattttattttaaaataattttacacttacagaaaggttgtaaaaataatacatagagttcatgtatctcttcactcaacttctaacagcttataattgaaacaattagcaaaacgaagaaattagcattcataaagtactgttaagtaaactacagacctattaagtgaactacaaacttcaccatttttttcacttatgttctttttctgttctaggatctaatctaagatcctacattaatttgtcatgtctccttattctccaccaatctgtgacatttacatagtcttttattgtctttcatgaccttgattcttttttaaaatattgattagttattttgtagaacactcttcacttttgttggcctatgttttctcttaattagataaagggtatgaatttgggacaataatatcacagaggtgatatgcccttatcagtgtgtcatatcaggggatatgagatgccaatatgtctaattactggcagtgttaatttgatcactttaagcttaaaaagtaacttgcccacagtagcatagttgagtaagtggcagatccagg

SEQ ID NO: 818679 - DNA, 517 bp, Homo sapiens
atcgtaccacataaatatatacaactatgcacttataaaatatttttatttgtcaattaaaaaaaagaactacagaacatcagagctattaaaggaccaaccagtgagctttttagatttgcctaccaccaggctggcagaagcttccgagagtgagaacttacagtgtgccaatgaaaaggaatctgtactctcacaaattgttatgggaaaatcaatcaggagaaatcaattaaaatttagaatccacatatccattgagggggaaaaggaacaaagaaaaaggttatctggcaataatcaattgttcttcactcttaatccagaaggatgtcatagtggtctagaaggacagttgtgttctagccatgagctagcctgtctaaagtaccaagaagtctcctagtttatatcttaatgaaaaaaaaagccacctcttactaagcatcacaactaaaactttcctttacagttaaacatgtycaaattcacttctgtgagttaaggacaagaaagt

SEQ ID NO: 818680 - DNA, 542 bp, Homo sapiens
tctgaagcttcactcttttatggacctgaagtggtgtagttggaaktggagtattttgtacattcacataggtaagctctacttgctaaatgtttaaagggcatacctttatttaagtctttcaaatagaattggtggttgatagacaccatcaaataatttgatatgaagtttcaaaacagttattgtgattaccatgttgtttggggcattatccctttttttagtcacgttgctaaagtaaactttgtttgctgatcttatttccctctgttcttcctttcttagttggcacttttctttggtcctgtcttatcatcatgattattattatttctctttattacaataaatacaaatacaaatctcaaggcaaaatacacaggaaaatgaagacccacaccacacttgaaaccaaagcgcaactgacgtagtaaaaaagaaaatgatgaattcttaaactgctttaatagacagcccagatatctattaccgtaagtctgcaaatatattgtacctagagttaaaatgcaacctcatgc

SEQ ID NO: 818681 - DNA, 632 bp, Homo sapiens
ttacaaacaaggattcccttttctccacatccttacyaacaattatccattacctttttactaacagccagaggtgtgagatggttatctcattgaggttttaatttatatttccctaatgtttagtgatgttgagcattttttcatatacctattggccatttatatgtaggttttacatttaggcctttgatccattttgagttaatttttgtatatgatgttaggtaagggtctaatttcaatcttctgcaaatggacattagttttttctgtaccatctgttgaaaaaactgtctctcgaccaattttaatttgaaaattttgtaagtacattttgtattttccaaaaaaccccaaaacaaacaacaaataaaaacttcaatgaaactatacattcaaaaaattttttaagagtgtttgatatggacatccaaagatgagttaaatatttgctcattttaaattgcagagcagtcccttacatatactgtagaagtgatcttaaagtgaatcaagtgctgcatctcaataaaaacacttagcagctctttgagctattttaaggtagagctttaatttgtgctaatgcgaatgaactcacagcagcagagagaaaacaggatactcca

SEQ ID NO: 818682 - DNA, 523 bp, Homo sapiens
gtctcatgagacagcaggggtacacagggaagaccatttctaaataattttcaaataacttggaggtcatttccaactaatccgacataggtatcacttttagagacacctcasaacaacttcgtaaaaatattaaatactgagttaatcagatcatctgggagaaaggcaggctgtctgaatatttctcaattttctaagaaaaaaatttttttaatgttgtccttcttcggtttttatttattccagaatcataccattctaggaagctcagacccctctgcaattgtttttagtcccaagagacatttcagaattagaaaaagaaatccagcatataaagagtcctaccttttcctttaccaaatgacccaacagcttttcatttggtgtgctgaaaaagaaacgtgaaatcagtgtttgaagatcaaatggcaacttaaaaacattaataaggaacttcttctatttgagtttctcaagggattacaaaatttggccagaacacgcagttgtctattct

SEQ ID NO: 818683 - DNA, 594 bp, Homo sapiens
ttatatttctcacgcaagtagaaataagtgtttgaatcagcatcttagctttgaagaatgagttaagataagcaaacagtaaacaatgtaagaagtcacatggttgtgtcagggaaaaccagagatggacaatacttaaagtggtaaaaacaaattttattcaagattattgcaataggggaaaagagatctgagtatagaactaggcttaactttgaatacacgattggcaagtggaaacttagacccaaagatgggaatatagagtcagtggatggaaaattactaagaggagccatcaggagaaacagaagattctggctaaaatgacctaacaggattcttgttgaaggcaggcgagggtgatcagacatcacctgagggatggtggaggagaaggaacccaattagctatggcgggtgatcagatactgaggggggatgacaggggttatagttaaagcaactcagcaggattcttactaaaactgaacaatgcaggcataaacatgaagtaaaaaagtcgaggcttaccggagcagaaagttctttcaraggaatctgaggagagtttggtcaatgagggactctttg

SEQ ID NO: 818684 - DNA, 484 bp, Homo sapiens
taccttaatttttgctttcacaattttagcgcatacccattttatgcgctaaaacacagttaacaatttttaggaaaaggattttwaaagacaaagaaaaaccccatatatcttttccctaaaaaagttctaaaaagttcttgccgaagtctaaaagtagacttctcctaccaagaaggatcaggatttctgaactatcttagaagtataggttacatcacacagaaaggacaaactgactgacccatctggaacataaaatcatgttcctaagaaaattatcttaaccaactacaaaacctaaaaactcatcattttttgccaacgagtcttagccataagaattttcctttttcgcaagatagcaaaagccattaacccacctactggtaattattcaggctcgattccttaacatgctagtgccaaaagtttaataatagttatctatgtaccacatgttgaacctattgtataaaattgg

SEQ ID NO: 818685 - DNA, 354 bp, Homo sapiens
ttcacactttttcaccctgttgtctataggcactttttgtgcagtgccaacgatgtcatctctatgatcatgtcagtgctcaaaaattttgaaatttagaagcattttggaattcagatttttagattagggatggtcaatctgtgaaagttaaagtaatgtctgctatttttttccctctgtaaagttatcattttacctcttataataaaaatatatcttgtgggtatatagtttcagatgaygtaaatatcctgttcctcgtcaaaatttcatccactagtgtcaacattcgttgatgattcttgcctgacttaattatcactctgatggttacgaatactgattttttaa

SEQ ID NO: 818686 - DNA, 516 bp, Homo sapiens
ttctaaaaattattcagaataaatgaaagatagataaggagttcaaaagccatatgacattcaaaagcctgatacacctagagggctaaattctatcttctgaaataacttttttttaactttaactagaacataatctcattaaatgacataatacaaaagtgaacataaaagttgtacaagagaaatgtcaaaactctcagaagaaattaatgtttattggtgcagtcttcgatactcctctcatctctacttaaatgcagtttaaatgtattactatacatcaaacgaagtcagcccagtaatttcctacaaaattctcccactcaaagtttataaagatttgacaatgacttttaggtagtttacaaagagatttgtccttgaatgttttgaatgtttaaacttgaaaagaaaagaaaaaagagkctcctacataactgtaagaacgaatacttcaaatcagcctcaatggataattttaaatgaatgtatatattttaacataatttatag

SEQ ID NO: 818687 - DNA, 606 bp, Homo sapiens
ccccgtctgggaactgaggagtgtctctgcccgaccgccaccccttctgggaggtgaggagcgtctctgcccggccgccccatccragaagtgaggagcccctctgcccggcagccgccccatctgggaagtgaggagcccctctgcccggccgccaccccatctgggaggtgtacccaacagctcattgggaacgggccatgatgacgatgttggttttgtcgaatagaaaagggggaaatgtggggaaaagaaagagagatcagattgttactatgtctgtgtagaaagaagtagacatgggagactccattttgttctgtactaagaaaaattcttctgccttgggatgctgttaatctataaccttacccccaaccccatgctctctgaaacgtgctgtgtccactcagggttaaatggattaagggcggtgcaagatgtgctttgttaaacagatgcttgaaggcagcatactccttaagagtcatcaccactccctaatctcaagtacccagggacacaaacactgctgaaggcctcagggtcctctgcctaggaaaaccagagacccttgttcacgtgtgtttatctgctgaccttccc

SEQ ID NO: 818688 - DNA, 621 bp, Homo sapiens
tctacttgctactggggcttgtaaatacttygtacagattgtatgcaatgatgttttaaatttgtattttgtggtgaaattcctcagacataatatttcacagcagaataaatgttaactcatctattttgaggagtcctgaaatggtgaatccttttatgttgcttaactagaatagaagctgtattctttcaggccattgcattggtcttatctgtttttaactgtagacataatattgttctaaaacatgtttacagaaatcagtcatgtaaaaactgcattggggaatcagattctgacatgaattcaagttattcatttgtaactctaacattgaaatgcactggttcatatcaaaggctattacattgtcactggctagctaggtgacgttgggtaagtaacttcatctttgcagacaaggtttggcatctgtaacaggagtgattaaaagagattatccctaaggtcttttacagttcttaaattctttgtctcttagttcctctctaaggaattttaactctgaaaactgctagcatttcacatcctactctctttgcaaatgagagattttcaattcccagtgatgaactgaatctgcatacacacttgtat

SEQ ID NO: 818689 - DNA, 630 bp, Homo sapiens
gtgatctttctatctatgggtgtattagtctgttttcatgctgctaatgaagatatacccaagactgggtaayttataaaggaaagaagtttaattgactcacaatttcacatggctggggaggcctcaggaaacttacaatcatggcagaagggtaagcaaacacgtccttattcacatggcagcagcaagaagtgcagagcgaaaggggacaaaatccccttataaaacgatcagatctcgtcagaacttgctcactatcatgagaacagcatggaggtaacagcccccataattatctccacctggtccctcccacaacatgtggggattatgggagccagagttctagatgagatttgggtggggacacaaccaaaccatatcaatgggtaatctgaattattttgctctgaattttttaaagaacttttcaagtaatatattttattagtaaattctacaatttcagtttaacatgcctaaggataaagttctttgtatgtatcctcctcagatttgcttgggattcctgattctatagatttatgtttttcatcaattataaaaaattctcagtcattttttaaaacatttcttttaatacattgtttctttaccttctgtcat

SEQ ID NO: 818690 - DNA, 315 bp, Homo sapiens
atgccactactaaaggtccttgttaggctacccaagtgggcacatagatttaaccttggatttgagatcctgtttcaccactaagctaagatcctcygtcttctatagcttgactccctgtgctctccctccaacttctagggaaatgtttttcctggacagagtgctctagccggtgataacacagaatagtttgaaagaaaggccctagtgatgcagtcagtcagctttgcctcagggcctggacctctccttcctagtgtatagaaaatgcactgtgtgagcacggattcaaatgcagccttacacgggatc

SEQ ID NO: 818691 - DNA, 501 bp, Homo sapiens
ttagcaggtagtctatgcttaaatatgtgtaggatccacaaataaggcatggataaaacccgagtggagtgtcctggaaatcccacgaccacggacccccctcgctggggctgcctgccgcccccaccagcctccacacacccacttatctccacaaccccagcccacccctcagagacgtctgcagagcccctgaccctctccccttgaacaaggaccctccaccctcttcagactctcgacgagggaccccctggactcctgctggcggcaggacccccaccccaagctggggtctaccacagagcggacagcaagaaaatagggtgggggcgcaggcgatcatggggtcactgccagtgggaccagggctgtgggcgagtgcgccagggttcccggaggcsagacgtgggacccgggagtcgagcaggtgaagcggcccttgccccgcccccaccaggcactgtcccgtcgccgccccgtcccgcgccctcccagccg

SEQ ID NO: 818692 - DNA, 673 bp, Homo sapiens
agtgatgttacagattcaggaaggatcccctccctcctttgygctaatgttgtgtatattacagtattacagtttttgccttagttgtgtctgtattaaattaagaaaaaaagaaatagagaacatttcatatttccctacctttaccatgtccagtggattttactcctttctatagatgactttctgcctagcaataattctttctgccaagcaataattccttcagcctgaagatattcctttaacatttctatagtgtgtctgctggcaaagccttctctcagttttccgttatctgaaaatgtctttattttgcttttgtttttgaaggatattgtcactggatagaactctgggttgacaatcgtttttctttagaactctaaagatgccagtccatcatcctctggcctccagtggttataagaagccagacatatttgaatctttattctttgagtgtaacgtctttttccttccaggtgctatctttgtctttggtattcggtagtttgactacaatgtgcccagataacattttctcttacttttactgcttacagtgtgctgagcttcttggatttacacatttatatcattcagctattatttctttaaatactttttatgccccattttctgtgtcctctctctgtggggctccaatcac

SEQ ID NO: 818693 - DNA, 490 bp, Homo sapiens
cgcattactataaaggtataccagagactgggcaatttataaagaacagaggtttaactggctcacggttctgctgactatacaagcgtagcaccaacayctattcagcttctggtgagggcttcaggaacttttggttatggcagaaggcaaagtgggagcaggcacatcacatggtgacagtggaagcagtagcttatctatttactttttaaaacttcttcacttggctgagcaaggtggcttagggcctgtaatcccagcactttgggaggctgaggtgggaagactgcttgagcccaggagttcaagaccagccttgggcaacacagtgagatcctatccctaattaaagaaaaaaaattaataaaaaaaagaaaacccctccactagactgacaggaaggatctatgtgcctcatgatcccatcctcaaagcctagcatggtaccattatagttattcagtgagtacagaaagggtgaattaat

SEQ ID NO: 818694 - DNA, 490 bp, Homo sapiens
cgcattactataaaggtataccagagactgggcaatttataaagaacagaggtttaactggctcacggttctgctgactatacaagcgtagcaccaacatctaytcagcttctggtgagggcttcaggaacttttggttatggcagaaggcaaagtgggagcaggcacatcacatggtgacagtggaagcagtagcttatctatttactttttaaaacttcttcacttggctgagcaaggtggcttagggcctgtaatcccagcactttgggaggctgaggtgggaagactgcttgagcccaggagttcaagaccagccttgggcaacacagtgagatcctatccctaattaaagaaaaaaaattaataaaaaaaagaaaacccctccactagactgacaggaaggatctatgtgcctcatgatcccatcctcaaagcctagcatggtaccattatagttattcagtgagtacagaaagggtgaattaat

SEQ ID NO: 818695 - DNA, 630 bp, Homo sapiens
aagacaatgtgacaacctgaaaaatgtttttaagaatttttataattttaatgagaaaaattacgaaacaaagatctgtgaatactatcattataactttgttcaaaaacatggaaaaatgaataaaaagatgctaaaattatattaaaaactatgtagaaataaaaagataaatatttctctttgtgtgcttatatctgtatatatgtgtaacatgataacactgaatcatcactctcagaagtacaaaccatattattagtattattttgggtgtgatgagagaactaattagcagtgtttggggtggggggaatttcaaggtgctcaatattatccatccattcaacaaatacggtacatatttttttaatatccattgtgttcaagggcagaagtgatctttcaagctgagcttggaagagtttgccacctgattaaaacatttattgtttgacaatttcactcaactcctccctttacccaaataagtcacagatctggttacactagctgttcaagccactgctcttccttgtcttatttttcttggtgacaagagtcaagtatatatgrgctctactattatctctctgtctcagcattgtccagacacaagttaggacactt

SEQ ID NO: 818696 - DNA, 520 bp, Homo sapiens
ctactgtgcagccattaacatgatgtgatggtttatgaacaaaagaagtatgtccaagtctattcataagttaaaaaaaaagaacatactgagaatctagtttgtagctatcagaatagtaaaggctataagtttaatcatagatattattggccagggtacggggaagaaaacacactttattggtaggggtgtcaattggtatacctttttggaaagaaatggaacaacagttttaaaaactttaaatgtacatactctttgatccaggaattccacttctgcaaaattatcctatacataaacagcatatggcacaaggatttatgtccaaggctgcacactgtggcattgtttagtaatagtgaccaaccagaaaataaactaaatatccagcacacaggactggttaaaccaagtacrgtatctcaacggagtggaacattacatattgctgacaaacaatgaacaaatcagtaagtactaatttggaaggctctctaagatatgttaagtttta

SEQ ID NO: 818697 - DNA, 494 bp, Homo sapiens
tttttcactacctcgtaacattcaagaacttcaaaacttggcctctgcttcacttttgcctttcaaatcatgaggagagagcatatagttgagaaaacttaattagcattcagactgcccccccatctgcataaaaagttctgggtaacagtttaataatttctcagcctctgcaacttgaagagtacattgggtaaataaattcagaattcactgtcatccttagcggttgttccagtttacccctctatcagcaaaaatacttgttccctccattcttaccagtaatatctagaatattacaatgttttataaaactaaaaagtctttcttgattaataggttaaaaaactggtatctcagtatagttttgtcttatacttctcttagtaataaagttgaactttttttccggcttgmatcattttattcttttctgtgaaaactgtttacaattttgtacctttttctttttggatcattggactttttca

SEQ ID NO: 818698 - DNA, 617 bp, Homo sapiens
aataactgaaagaataacatagaaatggtaggaaatttttaatttattctaagtgcaatacatagccactggagggttttaagtaggggaagataataatcttgtttatatttttaaaagaccagctttgcagttgtgtacagaatggattggatgggagcaaaaatacattttggagacaggaaacaattgcaggctttcaggcaagagatgtgaatggcttcaactgggatggtagcagtgtagatagggagaagtaaatagaatcaagacatatattagagatagatgtgatttgataatggatttgattggggaaggggagggaaaagggtcctctatttcctagagaacttctaggctttattaagttgatgcacagcaatatccctgtagatggaattttgtaacttaggacttcatagtactttaggtttgtgtttacagaacatgttgttgtaaaggttatttcatgaaaaggaaattttattttaatgataaatttgacttatcytaaagttgatttaccctaccaacatgtagcaagtgctacaaagaagctccaggacactgaaattccttccaataaaggcaaaatgaactatgaagataaaaag

SEQ ID NO: 818699 - DNA, 645 bp, Homo sapiens
ctttataaaatcaatgtttstgttgattttaagaatttaaaattaacaggggcaactcattgttcaggttcttggtggcaccttcctgctgtcctcagtcctacccagacttacaagctaatttggtatcatggattgtcagtaacagctttatggttttagggaatgctgaatgcaaatctgcctgtaaccaggtaaaacacagggtagctttggccattgtgtaagtcattttgctaggattagaactcacacctacagacttcctgccccactctgctggtgctgtgaaggcctgactaaacactaccctactactgtgggggcaggtgcctaggctctggcctgatcttcactgttccctcctcaatctggatactcagtgtggtcgcagaataacagccccctaaagacctccacatcttaatatgaaccttacatggcaaaaggatcttgcagatgtcattagattaatcatgtcttgagatggggagatgattgtggattatttggacccaatgtaatctcaagcatccttataagggaaagaaggagttagaagaatgaaagaatgatatgtgagggtggatatagaggtcagaggtttgaagatgctattctgctggctctgaagatggaagaagg

SEQ ID NO: 818700 - DNA, 562 bp, Homo sapiens
taaatagcttctgataatgttatttccagggtaagagagccagtaaatgatgagcctttcatgaaagatttaaaaaaaaaacacaccaaaaaaaccttgtgagatgaagaaaagaaagacatttgcatcagtaatagtgaaagaagaaattactttgatttgtagaccatcgcatctttctttcaaggatttggctttatttggcgtggtatctcacttgtcttttcaccagtcctggcaacattcctgacaagtgagaggaagtgagacaagaaatgatacagtaagggccaagtacgcaactccagggccaggcatagtcattgcctgcttgggccccacttccttcctgcacccccggggtcatcaaagcacactctctcttcagattcctctggagacaggggtttctgcctcttaccccatccccttcacctrggagagaactgtcactaaactcagcaaggaagactttctcaccttgggttttcagttaatgggggtagacacaaaacaactaaggacattgactgcggtaaggtatttagacaaagcaggtaga

SEQ ID NO: 818701 - DNA, 562 bp, Homo sapiens
taaatagcttctgataatgttatttccagggtaagagagccagtaaatgatgagcctttcatgaaagatttaaaaaaaaaacacaccaaaaaaaccttgtgagatgaagaaaagaaagacatttgcatcagtaatagtgaaagaagaaattactttgatttgtagaccatcgcatctttctttcaaggatttggctttatttggcgtggtatctcacttgtcttttcaccagtcctggcaacattcctgacaagtgagaggaagtgagacaagaaatgatacagtaagggccaagtacgcaactccagggccaggcatagtcattgcctgcttgggccccacttccttcctgcacccccggggtcatcaaagcacactctctcttcagattcctctggagacaggggtttctgcctcttaccccatccccttcacctgggagagaactgtcactaaactcagsaaggaagactttctcaccttgggttttcagttaatgggggtagacacaaaacaactaaggacattgactgcggtaaggtatttagacaaagcaggtaga

SEQ ID NO: 818702 - DNA, 486 bp, Homo sapiens
catccttcttgctgggattgactgggcatatagcaaggcctttctggcctcagtttccttatctgtaaagtgagggtataaggctagttgactccyttgattcccttcttcaccttttgaatggccttaaaatacaggtgtctctgtccttgcagggagtagcgctactcccttgccgtcattagaatgtgtgccctaatttttttcgcaggggttggtgatatatttgtgctgctctggctataatccttcacccagagtattgctggaaaagaatggaaataattcagctcatgaaaggatcttgacagtgtgaaaagtctgagttgatgagccatgaggttttcatcaatattcacagcatgcagataaaggcaactgggatttagaaatgaacaaaacacaaacaggatttaactttctgtgcttaaatctgttggtttgatttctaactctttaacatttggtaaacaacaaccaaccaaa

SEQ ID NO: 818703 - DNA, 566 bp, Homo sapiens
aaaccagttacttgtgaggctattacagaagtccrggcaagaaatggtgaacacccagaccagggttagcacaggagataaagatatttgggatgtagaattaacaaaaatttgtggaaggtaaaagaattatgaaaataaaggctgatttccaactttctggatcaagcaaccagataaatgatggttcattcattacaacgagaaagacctgaatgggtgtagttgagttcagttttgaagatgataactttgagatgactatatgttaaaacaaaaaaaaagtcttcaagtctggagttcggaagagagagcctgtacttcagataaaaatttggaagtaataagtatacatattcacactagtgaaaaatgataaattcacctgagatagaaaagaaaaagactgagttcctgtaaacaacacttggaaatcaagaagaagaaaaggagacagaatggtcacgctggtagaaaaaccagattcagtactatgttatataaactgaaaaagagggtgtttccagaagaatagtgtggtcggttgagttaaatgctgctcagag

SEQ ID NO: 818704 - DNA, 581 bp, Homo sapiens
gctggagcctgggcttagggagccccactgcagggctgcctggggcatggcgaggtgaggttgcgaggcagggttttccggccagaccttcacgatggccagttgcctgctatagtaaatccctgtcccttcccaaggccgccaaggctttcttggggaaagtatccatcatagtctatgaaaaggctgccaggtcttaccttaagagaaataatttaaaaattcctctgtagttatatctccagacagtatcctggcttagcatcagatgcaaataaatcactgtgatccattcctagatgggtaaagcttggtgtatatgtgtgtgtgtgtgtgtgtgtgtgtgtgtgtgtgtgtgtatataaataaatatataaatatgtgtgtgtgtaaaaacactttcatctttgaactgctgtcttccaatgttaacattgagaaatacagtcgtatcgcatggttcttttgaagccaagtaatgtcacagtcagtatcctttttatcagtagaaaaaatgcgaacacccaacrtcggctgcatgctcaccaaggtgtctcagcaagcaataaatgatgtgccgc

SEQ ID NO: 818705 - DNA, 591 bp, Homo sapiens
ctagttaacagttgtctttctagggagrgcaagatttaactcatgctgtttctgaatctacgatcagtaacacttcaattatttggaagagttattgacagtaaactgctttggcaaccacaactgtctggaacacaacacaaactgcaagtgaggctagaagagggtttaagacttggggttcagcagccagaacagacagcagcaagctcagagatatgaaacaagttaacaggattgtacctgtcaccccttcaaaggctgcctctccttccttacacatcattccagtgagtttggttgtctgattctctgtctatagcagggcagaagcaacaaatagatgggtctgccagatgtccacagggtacgtcaagtgtgacagctgagggtctgctggcaggaagtcatgtgtgacaagtcctgccaactctgcctcctcctgctctctccaacttgcccccttctctcaactccatgctgccaccctagttccagccaacatctcatcaggagggctgctgtcattttttttttttttttgagacagtgtctcactagtgcagtggccgctatcttggctcactgcaa

SEQ ID NO: 818706 - DNA, 591 bp, Homo sapiens
ctagttaacagttgtctttctagggagggcaagatttaactcatgctgtttctgaatctacgatcagtaacacttcaattatttggaagagttattgacagtaaactgctttggcaaccacaactgtytggaacacaacacaaactgcaagtgaggctagaagagggtttaagacttggggttcagcagccagaacagacagcagcaagctcagagatatgaaacaagttaacaggattgtacctgtcaccccttcaaaggctgcctctccttccttacacatcattccagtgagtttggttgtctgattctctgtctatagcagggcagaagcaacaaatagatgggtctgccagatgtccacagggtacgtcaagtgtgacagctgagggtctgctggcaggaagtcatgtgtgacaagtcctgccaactctgcctcctcctgctctctccaacttgcccccttctctcaactccatgctgccaccctagttccagccaacatctcatcaggagggctgctgtcattttttttttttttttgagacagtgtctcactagtgcagtggccgctatcttggctcactgcaa

SEQ ID NO: 818707 - DNA, 591 bp, Homo sapiens
aagcgtgagccaccacacctggcctatttattcatttatttaaaaaaaawtttttttttaagtaagacaggttttaaaatgttgacttgcccctggcacagtggctgacatctgtaatcccagcactttgggaggccgaggcgggaggatcacttgagctcaggagttcaagaccagcctgggtgatatggtgaaaccccatttctacaaatacagaaaaattagctgggtccggtggtgcgtgcctgtggtcccagctattcaggaggctgaagtggaaggctggcttgagtcctggaactggagatcgcagtgagccaagattgtgccactgcactccagactgagtgacagagtgagaccctgtctcaaaagttgacttgccataatccaagttccttgaaatcagagtggaagaaactcatatttagagaatagggaagagtgtaggctggaaggcagggacttgaggaactggtcatggcagtcatggaaggttcctcagagcatactgagagggtttgcttcctgccacagaaactgacattcctgtaagtggaaattctatgaattgacccagaaccataaatg

SEQ ID NO: 818708 - DNA, 663 bp, Homo sapiens
aggaggagggatccaaagcttttttattttcaaaatacgctgtgtgattgaattccaattttcctttcctaagctggtttttactgacattgatattaccagaggttaagaggatgtgatttaaacgttgttaatgaaatgtatcaataccttcctctcacaaatcagccatgcttggccaggaaaagtgtggcttgcagttatatctaaaatgcccatgcttggtgcatgcaaaggggaaaaggaaactacaattaatagagcacttacttggggtgaggtctttaacgctggagacagcattccccttacactaacttatgtggcagcaatattgtccattttgaagaggaaaatgtgtgtgttggtcaaggtctcatgaccaagtagaggcaaagccacaattcaaacccaattgggtttgaccatagagcctcttctcttttgctatcacttgctacctccatgaacctgacttgttttcagtaaatatttggcttcatccaagatctggtgagattagcactcctccactggycatgcatctcaaaacatattctttcattcttgtaaaacaccaaggcaagtctttcacatgaagaaggcatattaagggtccttggtttttgacagtcacctatactgttagaaatgcctacctac

SEQ ID NO: 818709 - DNA, 645 bp, Homo sapiens
ttatctgtttaacaaatttctaagaattttcctagactaatctattatttcaaaaaatagccatatagtttcacttagtgatccctgagattatgtcttatatcagtttccgaaaaaagatagattgcattaattcttgaaaaattatctttttgttagcatgaactttgtatttctggtttctctctagtccctcacttttcctgaaaaaactctggctaagccattcccatttactacacaactaccttaattacaatttagagaaccgactgtggctgggttgaatgcatcaaaaaatacgtcttctggtgatgaatcctatcatttactctgaaccaacacagctataagctttgcttttcaccttcctaattaacaaggaaaaacaaggttgaattgttaagatacttccttgtgttaaagctgcatctcaagtctccataaacataaaatgcttttctaccagtcagggtagttttgtagattacaatgcttcctcatctcaaggaatcaatctaagagtactgatgcatttcatcactgactgartaaagtcaaatttattatcatattcataagtggtatcaaccctgtctttatccttagcataataatatcagttgcaacttattatacattagt

SEQ ID NO: 818710 - DNA, 595 bp, Homo sapiens
atgtggttaatggcttcagtgtttagccaggcagtgcttgaatgtgggcagcacagggcctggtgcctgactctgcaggagaaatcacaggtatgaggtggctgaagatgcrcagcatgacagagtgaggccaaaaggcagcagtgcttgaagtttgagaacatgatgggggaggatgtgttcattttcctgcaggacaagtagcactgtgcaagttagtgcaagttatttgaagggcctcccaccatttcacagcaagaggggtgcatgctggaatgaaggaatcccaagcaccttctggtacaggagtcaaggttcttacaaaagattaacgagagagtgttttgaatgcatcaggaaatgttaaatgtatgagtccctgaaagggtctccaaagaattaacagaggtacttcatgaaaaagacttcttggaacatctgtcctacacagggcatttgacaacaaagaaagacacaaatgcacttgagctggggaggaaaaacattgatttcaagaataaattgaagttttggtatctgattgggttagagttttttgattcctgaaaataagttctatagtacttgaaagtaa

SEQ ID NO: 818711 - DNA, 553 bp, Homo sapiens
tctatagggaatttaaacaaatcaacaagcaaaaaacaaataaccccatttaaaaatgggcaaaggacagaacagaagtgaayggacatttctcaaaagaagacatacaagtggccaacacgcacatgaaaaaatgtttcacatcactaatcattaaagaaatgcaaatcaaaaccacaatgagacaccatctcacaccactcagaatgactattattaaaaagttaaaaaataggccgggcatggtagctcatgcctgtaatcccagcactttgggaagccgaagtgggcagatcacctgaggtcaggagttggagaccagcctgatcaacatggtgaaatcctgtctctactaaaaatacaaaaaattagccgggtgtggtggtgggtgcctgtaatcccagctacttgggaggctgaggcaggagaatcacttgaaccccaggagacggaggttacagtgagctgaaatcacgccattgcactccagcctgtgtgacaggagtgaaactccgtctcaaaaaaaaaaaagttaaaaaataacagatgttgg

SEQ ID NO: 818712 - DNA, 587 bp, Homo sapiens
ccagataattaccttcatagactaattccttttttttctttttctttttcttttttcttttttttttttttttggkgtgggggacagcatctcaatcctgttgcccagggtggagtgcagtggcatgatcttgctgcggcctcgacttcgtgggctcagcccacctcagcctcacgaggagctgggactacaggaacaagccaccatgcccagctattttaatgcatttttagtagcaatagggttttgccatgttacccaaggctcaagtaatcctcccgcctcggcctcccagagtgctgggattacaagcatgggccactgcacctggtaagactatttctatgtagtagtttattcccacctcctttcctatccctcctgggaataactgacctaattgatctatagaacaaacactcttaccacaaagatcacacacacacacacacacacacacacacacaaacacacacacacacacatagagtcatgtaccacataatgatgtttcagataacagacctcatatatgatagtggtcctataagatataatagaattcaaaaattcttatcacctagaga

SEQ ID NO: 818713 - DNA, 637 bp, Homo sapiens
taacatgtgcattgatggtacaaaagcagtagtgggtgaaactgttggcaccttaacacaggtcaaggctttgacattaagactgtactagtagycactgtagtcttcgccattatgtagtcacagttaaaaaaaaaatccagtttcattaaagaatgtctttgatgaagcaataacaataatttcattaaatcttgaccttttgtaatattctgtgtgacaaaatgggtagtataaaaccacttatgctgcatactgaagcaaaatggtcatcccaaagtaaggcattggtgcaattatttgagctcaaggctgaaggaactaatcactttccttcatatctacttgaatgaacaactcacagactatggttattcaaacttatatatttagcagacattttctcaaaactgtacaaaatgagatcatcacttcaagtgaaataactgacagtcatttgcggccaatgataaaattcaagcaatatcaaaattttggaaaacttgtatctgacattgtgagcttagcagcttcataatacttaaaagactgttctgatcatctcagtggtcatattgataaacataatttttaaatttatataatgtaatacagtaacatttgtaagatctgtgta

SEQ ID NO: 818714 - DNA, 637 bp, Homo sapiens
taacatgtgcattgatggtacaaaagcagtagtgggtgaaactgttggcaccttaacacaggtcaaggctttgacattaagactgtactagtagccactgtagtcttcgccattatgtagtcacagttaaaaaaaaaatccagtttcattaaagaatgtctttgatgaagcaataacaataatttcattaaatcttgaccttttgtaatattctgtgtgacaaaatgggtagtataaaaccacttatgctgcatactgaagcaaaatggtcatcccaaagtaaggcattggtgcaattatttgagctcaaggctgaaggaactaatcactttccttcatatctacttgaatgaacaactcacagactatggttattcaaacttatatatttagcagacattttctcaaaactgtacaaaatgagatcatcacttcaagtgaaataactgacagtcatttgcggccaatgataaaattcaagcaatatcaaaattttggaaaacttgtatctgacattgtgagcttagcagcttcataatacttaaaagactgttctgatcatctcagtggtcatattgataaacataatttttaaatttatataatgtaayacagtaacatttgtaagatctgtgta

SEQ ID NO: 818715 - DNA, 567 bp, Homo sapiens
atctaagccctgattgcaggctgactggatataaactcaatatggttgctggggcatggcaggattgagactgaccttgccggttatgagggagctgggtaaggcctgtcactgctgkctttcccccacttccctggtgacctgtatgatgcagcagaggcagccataatccccctgggaacaaaactccattggcctgggaaccacctcccaccccccacagtggtggcagcaagccccgtccaagaaaagcctaagctcagacctgcctaacagtgcccacacctgatggtttttctctactcactctggtagctgaagacaaaaggcataagctcttgagagctctatggccctacccatcacctgagaaacctaagtacccatcctgccaaatgtagggcaagattatatacccctcctactacctcagctggtgctctcttgaaaacaccacctcctggctggaggcaaaccaactcaagccattacagcaactcataacagaacaactgttaccagggggtccttgttcttagagctcccaagatggtggcgggcagcttc

SEQ ID NO: 818716 - DNA, 530 bp, Homo sapiens
ctagatttatatttttccatcaagtatatgcttatttgtattcatcacagtagtcctgtttttctcattagtgtcaccccccctccccttaaaaaaaaagaaaaaaaaaagagacagggtctacgcagcagtatgatcatagctcatcacagcctctaactcctggtgtcaagggatcctcccatctcagcctcccaagtagctgggactacaggttcactagtgtcttgataggaaagattatttccttattcacagaggatacgtagtaagtactggccagtgaagaggcacactttaggaggaaagagaaaacacggaacattccaatgagaaatagctggtatctgctaaactgctgagcaggctctaaatcaacatacagcaagataccacaactrtggagctgacaatgggtatcgagtagacaaagattcaggtcatacttctagatatggggagcacctaaggagaaatcagccttacactgcgtgaaatggctgtccctttagttcctctctagcacaagc

SEQ ID NO: 818717 - DNA, 530 bp, Homo sapiens
ctagatttatatttttccatcaagtatatgcttatttgtattcatcacagtagtcctgtttttctcattagtgtcaccccccctccccttaaaaaaaaagaaaaaaaaaagagacagggtctacgcagcagtatgatcatagctcatcacagcctctaactcctggtgtcaagggatcctcccatctcagcctcccaagtagctgggactacaggttcactagtgtcttgataggaaagattatttccttattcacagaggatacgtagtaagtactggccagtgaagaggcacactttaggaggaaagagaaaacacggaacattccaatgagaaatagctggtatctgctaaactgctgagcaggctctaaatcaacatacagcaagataccacaactgtggagctgacaatgggtatygagtagacaaagattcaggtcatacttctagatatggggagcacctaaggagaaatcagccttacactgcgtgaaatggctgtccctttagttcctctctagcacaagc

SEQ ID NO: 818718 - DNA, 493 bp, Homo sapiens
tggggcctccttctgcgcagacctcgagggtggccaggaccccatctctctggggtctgcgtgcagaccacagggctctgcatccacaccacgtgtgccctggcagtgcccgtccctgtgtgcatgactggcacgtgtgaacacccgtgtgtgcacgtgagcctggcagcaacctggggcggtgcaaccctcaggatgagcaggttgtgctggacaggcagcgcattctcctgcaacaggcttttaaaataattgcctgtgaccctgagcagtagctctctgtccgctggctgcccctgccccaggcgcctgctgccaggggtcactgctctgtccatctgcagagacttgggcacctgtgctgtacttggggatggggcarggagggcgggtgaggtggccccgtgggtggcctgaggctgggggcggtgggtggtgggtggctgattgaagggataattgcaggcagcaggccttagctaatgcatgctat

SEQ ID NO: 818719 - DNA, 634 bp, Homo sapiens
aatatcagagaagatttctggaaaagaaaacatttaaaatgtgtcttaaaagagtgagttgtaagatggaaagaggagatggaggaaaagaygtcattttaggtatggagggcaatgtaagcaaagatatgagaatgggaggggaggctgttgggatctttttcaatcaatagctataggtagcacatgaaatttcaacatgttttcttgagcaccacctctgtgccaggcaatgttatgtggcactcgtgaattaaggctggataaaatgcaggcctaccctcaaggagcagggagagctaagacaagaaaagctatttgaggacagaccatggggagctttgaatctgacctccagactaagagatttgcacaatacttaaccatttaaactttcagtcagggacctctgttgcaatataattagaattatattttaggcagatgaatttcatagacaaatgaatataggaacatagagagaattcttacaagattatcataatggtccaggaaaaagatagtgcaagaatagaaaacagatttataagtgagaatttcagcaggagagatcatcagaattgggcatttgatttgtggacatgtatgtgttggcagtggtttatccttttga

SEQ ID NO: 818720 - DNA, 607 bp, Homo sapiens
atatgtgcatgtgtgtagggggaaggtgggcaatgagagttgttgccattagtgaagaatgctaggaatttcaaggatgggatctgtatgaaaaccaascaaccaaccaaccaattccccagattctgaggcatcagtaattttgtatatgagtttggaaggatggtttcctagcttatctccgacaatgctaaaatcataattctggttttcaaaatttgggtaatgaaactatttctactgggttaatcacatcagttcttctgccaatctcagacccatggcaataccccactgttaagaggtggaaggaattacaatgggaatattctggatttatgatacttcaaaatctgaaatttttatagctaaaccatttttaaaatgctgaaaacttaatgcgtctcaactgtgacacatatatgcttttctgatttgtctccaccatttttgagcacttccttattctacaacacaagatatttcacactcattttgtaattgctcagctttggaatcagccattttcccaaggagaacctcttccttaaatggaagatgatacttagaaaccaaaatctgggcatggaatatgcttattggtact

SEQ ID NO: 818721 - DNA, 644 bp, Homo sapiens
ttgcatggagccagcacttgtgccgrcccttggagctgcctgacccagcgcagcagccggcatgcctggctgtgcacagtggctggaccttgtgcttgcttgctcacacaccccttgctgttctgagcctggatcatgcttggcaggcatgggatctgggcagatagtgcaagctgagcacatcctgccaggttgggtggatgtaatgagcccagcaagcccaaacaaaactcaggcaaaggcctcaccagccacaaagggttccagctggaaaagccacaccctaagggtcctgagacaatagtatcattcagttctagatgtttttaacttccactgtgatatctttttaacctgtgaagtattgagaaatatgcttcttaatttccaaatgtttggtgtggatttgattggattttgtttcattagtaacattttcttatgtgtttcaattttcttgtgtatagtcaaataaatatgttaagcctttctttatgtctgtatttgtcatcagtttgtaaatgttttacatatgcttggaaggaatatttactcactactggagtgacgaaaaattctttatatatgtattaaatcaaattggtttggtttgttcaaatcttctatatttatatctgattttt

SEQ ID NO: 818722 - DNA, 668 bp, Homo sapiens
ctggagtgacgaaaaattctttatatatgtattaaatcaaattggtttggtttgttcaaatcttctatatttatatctgatttttttgtgatctactttatctactaattactgagaaatgtgtgttaaaaaatatgttactctgatggtagatttatcagattctctctatagttctgacaaattttgcattacatatttttctttttgttaccccattcataaagtttaaattgttatatatttctgctaaattcaacttttatcatttatactgcttttgccttaaaagctgtgttttgtctgactagcatagttacaaaagctttctctggattattacatgccttccgtattttttgatgctttcatattaaacatttatatccttatattttagatttacttttggtaaataatatatagctttttattattttagtccagtttgaaaatcaatgaatttaaataaattaaatgttatcacattttatagtaattataatagttttcattcatttgggttttctattgcatttctctttttttcttttttttcttcgtgtcttcttttggattgatkattttttactattccacttttcttttggattcttttttttattattccacttttttgacccccaattttaggaaactgatttatg

SEQ ID NO: 818723 - DNA, 655 bp, Homo sapiens
tcaccatttttatcggtttaaactggcatatgtatacttagtttttgtttaaaaaaatcctctctttgaacgtaaatttgtgtctttgccctagatatatgagcattattaaaaaatgygactttgggaggcagaggcaggcggatcacgaggtcaggagatggagaccatcctggctaacacagtgaaaccccatctctactaaaaatacaaaaaattagccgggcgtggtgtggcgggtgcctgtagtcccagctactcgggaggctgaggcaggagaatggtgtgaacccaggaagcggagcttgcagtgggccgagatcgcgccactgcacttcagcctgggagacagcaagactccgtctcaaaaaataaaaaataaaaaataaaaaatgcgaatctcaaccttttggctcctggttgcagtaggacccatggttaattggaagagctttggaggtgaacggacctgcgtcagcatcttgtcctgctatacagtgcctttggctaattacttattttttgagacttggtttccttacctactaaatgggaatactgacagtaccaacctcagaaagttattgtgaggattaaagcccttgcatagggcatggtacagaatgaatgcccaaagtatgcaattagtgtttta

SEQ ID NO: 818724 - DNA, 627 bp, Homo sapiens
ggaggcaattctcactgagcagacctaggtacctgtcgaactgcaggatgtgagtggcgtggtgatcaaacccctgctcccgggcmaggaagacgtcagctaccttctgctggctctccctgcagccaggaatggggatgggacagtgagaactcagccttgtaaccaacgcagggttagaagcagggggcctggagtcacatccctgggtgcagatcccagctcaacccttgcacagttgttttactttgagcaaatgacttaacacttcggagttcggctttcccatcaatcaaatggagatactatttcatatggtggtgtttttatccgtctccattcccccagtgcaacaaaagtggaacccgggggtccagggactgctcaccaatttgacagcctttcctccagctcctccaggatgccttgatgaaggtcgtggatggctgggagttcactcaggccctgcctcagctcctcccgggccaatgtgtctctgccttcatggtccatgtcatccaaggccctcatgacagctccatggaaatcctgaaacaccaaaaggtctgttacccacaggttgataggactgagcacaagtcctccttggcagatttcccctggggc

SEQ ID NO: 818725 - DNA, 419 bp, Homo sapiens
aatgttaaatgctgcttttagatacactgtaaaaatacacctatcaatgagtttttttattaaaaacattgcaattgtactagactttaaatactaagcaataattcaggcttcaatgttggtttatagttttctcatttctttcatttaatacctctgtaaaatgaagcagttacttccattttcctgaggtgagataagtgccctgcacaatgttataggcccagtaagtgagactggagctctgatctaatccctttgacattaaagtttgtgcagtaaaccagctrtgtcagtttgccacatttgtaatagtgttcaataaattttcacttaaaggtttaatattaaagtagtagcaagaattcataaccttaattggctttaacagcttttctttccctgaaaacagatgcata

SEQ ID NO: 818726 - DNA, 620 bp, Homo sapiens
aggatatatccaagctcattaaaatttaagtcggctgtggaggagaggtattgtgcatagaactgtaccccctgaaaagatacattccagccataattcccagtatctattaatgtaccttacttggaagtagggcctttgcaaatgtaattaggataagatgaggtaatactgcattagggtgggccctaattcaatgactggtgtccttataagaagaccatgtggcaatggaggcagagattggagtgatgcagctgcaagcaagcgaggaatgccaaggactgctggcacccaccagaaggtaggaagaggcaaggaaggacactctcctagaaccttaagagagcatggccctgctgacaccttgatttcagacttctggccaccagaaggttgggaaaataaatttctattgttttaagccactaagtttgtggtaatttattgtgacagccctgggaaactaatacaagaggcaaattttatttctttacttggaacaaaagttcttaaattcctgtctgtaaactataacaaaytggggggaatgaagtaacgttaagaagatatgtgttgttttctgtgatttttaaggccctcaatagcctacctataca

SEQ ID NO: 818727 - DNA, 612 bp, Homo sapiens
ttcagtttcaaatggatttttctatcttgaatgagatgctccaagttttgctaaattagcaatgagtttcctatggagcttgaaagaaataaattgtcatttaattatctacaaaattatataacagttaattaaagtactgctatcaaatgttaaagccaacaatccactacggagcaaaatgtttaccattatagaaccagaggtcttcagaggaaacaccgatcaggcctcaacacttccaaatagtgaatgagaacttacaataccatttggctgtctaagtcaattttccgatgtctgattttagtgacaggggtaaaagccattaattctgaaagtcattattttgcatgtatgtgtccatctcctccttcttcctctcacataccctctactgcaagtccacatggaccactaacttagtatctgacattttctctcctggccctagtcccttcatactttcattctacataatcggagtaatatacaacattcaaagaatttcaacaataagagcatgrcaagttattttgcaatgtaccctggcacgcaaacataagtgattaaaatgttttgctgctgtcagtagcaccctttttataagaa

SEQ ID NO: 818728 - DNA, 617 bp, Homo sapiens
tataatggctgtatgagacaaggccatattgactactttcctcagtgtttttgattaattattaagtatatcaataagtacattagtttatgcyctcctaacatgcacagtattatgtggtagcctcctggaaagtgtaagacagacattaacactaccagataactaaggccaaagttgttggcttttattctgtaaatgcttgcttttatttcttatggtatttttagagatggttggaatatacttcaaatgctttatcagtaataataattcatgtatacaaagctaggatttgagtttaacattcatttttatttttcctcctagccgaaagacctaaatacacatttgatttctcagaagaagaggatgatgatgctgatgatgatgatgatgacaataatgatttagaggaattgaaagttaaagcatctcccataacaaatgatggggaagatgaatttgttccttcagatgggttagataaagatgaatatacattttcaccaggcaaatcaaaagccactccagagtaagtaatgctatttagtgatgtggtatagttaattgttgtaaacatttgccaaagatattatagtgagctcttctaagaa

SEQ ID NO: 818729 - DNA, 570 bp, Homo sapiens
aacgaagtttctgtttccaggccacaagctctgcacccctctacagcaggcaggccaacgtgaatagttatgcagttatgtgctgcacaaaagtgcccagtaaggcygatatcgaaatcagtactgggctaaagattatctaaccttagagaggtgtctaggtttgactattggcgtggagagaaaatgaggcagctgtggagcaatggttaaaaccatgggttctagaaaaagctgaaatcaaatcattctactagcttatgtgacctagcataagctattcagatttgtttccccagctaatagtaacaattcatgggttgataggagaaataatatactagtgtttagtatggtacctggtaggtgatcaataaaacattagctattactgtatgttagggatgaagagggcttactcattcagttttcctctcggagttttaaccaataagacactgaagtcagacttttaaaaatatatacaacagaggcgctgctgcaccctcactctataggatgtcctggtgccttcctccttatccacgctggagtcctttgtgtagggag

SEQ ID NO: 818730 - DNA, 485 bp, Homo sapiens
tcctgacaatagagatcctacccaaccattcagttaacttcactagtatttgagttctacctccttcattaagctttctctggctaatcctaacctgcattgacctcccatttggggattaatatctggtttcacactgtcttaaattgttccttgttactccaattattatttaatcttgtcagatgaataaagtgacaaatactttgaaggctgaaaccatagccttgtttctctgtattcaccataataattagaataatgttgaatatatagtaggtcttaaataaatgtttattgactaaatcataggtatttaataattactggctgtttcactgtcttccctctgtgtgatcagaaaagcacatatatattactktattctgaagaaaaggaaaaaaaagatttgttaataatgttcacaatttacttggaacactgttatttctatcctgccatgttaaaatcctttacttgctgtt

SEQ ID NO: 818731 - DNA, 621 bp, Homo sapiens
gtttaaggagccggtctaacaaatgtggctcaaggggatgaagtgacttgcccaaggttcccactgatgaggctccagcagagctggggatggyactttggttaaggacattgcctctctaatatgtccccatggcagtgttggacctcttcccagaggggtcttgttctcaggaccttgccaaggtataaaccagctggacaacagcggggcattaaaaaggcaaatgttccttgtgtctctagcgctggcacaaatatatagtgagggacagggatgaggctccaaatgaagtcaccaaacccttgcagccattatcccagaccttcaaacagcaggatggatccaaaggctacatattcatcttgactatggcaccatcagaaaacagatgagaaacaaacacaatgtttttaccagaagaacaggttctttgtggattatttagaattgtggtctaactggaagtgtcagttttacttgcaagttgctatatcttgtaatcatttcttggtcctttaatgtatttttaatcaagaatctatgataaggagggcactgctcattgcagggctgtttccagctgtggcacagcactggaaacagcatggagcaagtagc

SEQ ID NO: 818732 - DNA, 642 bp, Homo sapiens
gtgatatgccatcatcaccattccctgtcctccatgatgtctgcttgtcacagtgccccccagcgtggtggcctgggggcacttggggcrggcgctggcactgcaggaacctgactgttctctgccacccccgtgccctgtgcgagcctccctgtaagcaggagggctgatgagcacatcaagaagctgcctcattgaagccaaagtgctacatctgtttatggtaattaaataaatgccagttggacccttctcagcgtgcttactgaagcaaatgccagaaacgcgctgctctccaagaatcggagagaaattagaaacagaaaggcgagctcccaggcacttaccacccactccttgaaaagacttggccaaggaggtttatgcagaatcaagaggctaagctttcatttgcagttctggcttgcttccttgtgtggtcttgagcaagtcacttaaccttggctacttcatctgtcagatgagaagatgacacttgccctttacctccctccaaggtgaccttggtgtgcagagatgagtctttacaattgaactgatttacaggctgcctcttttcaaaaaagtttgaggcaatttacaccaaatggggggtgatgtggtgaatacaatagacataaa

SEQ ID NO: 818733 - DNA, 647 bp, Homo sapiens
ttttttaatttaagaaatatggcatgaaagctttctacagagactattccaagtgcaggagataattcactgaaaaaaatgacaaaaacaaaatgttaaaattcttattttataaagtttacattctagtgggtggagggagaaaaatatattattaaaacaaactacaccagaatgtgttaaaaataagaagaaaaataaagcagaaataccagttatgaagtgtcagtaggatataggaaggagaaataagtatggccctgaggtcaaaacattcctagaagttcaaatcaagagctatagagttgggacaaatagagcaagggaaaaatagttagaggtgacttacagaggggatcagagtcaaatcctagaaccttgcagtccactgtaaggacttagcttctgccataagaaagaataagatataaaaggacccagatgaatgaagcctttatggccacagaaaccaggtgggaggagatgccactgtctaggataggtaagattcttggcagaatcacattttggtagatgagtgtcaggggtttgattttggacatgcaacatttgaagtttccttyaaacctttagatagttggttgtctctatctggacttcagatgagcggtctgggagttatcagg

SEQ ID NO: 818734 - DNA, 557 bp, Homo sapiens
cagtctttcaggaagagtgaaaaatgtgatttgccttttgaagaccagctcaaggacataagagcaggaggattaaagaaatagagtcaagcgacaaagatcacattgtcagatataagacaagtggaatggagccaacatcaaccatagggacagtgggaaataaaaagaaggtcaaaatgaagtgcttaagagtttaaggaaactgaaccaagattaaaatactctgtgggtgatgacattataactcattattattctccttttttggggggagattatctgtattttccaccattcaaataatgtatattgtacccattaagtaattttttatcatcctcccccatttctacaaagcaaatgaaggtttccataatatgaaaaataaaataaaatttattatacaaaaaatacgctacaggaatgtaagcatttaaattgtaattggaaatcttactaacatgagaggttcttgcaatgattttacattgtaaaccaaaaattatgatgtgtaggttaaaatayatgcatatgcacacacattcttcccttgt

SEQ ID NO: 818735 - DNA, 534 bp, Homo sapiens
tgggcagagaaagaggctctttcttctgaggtaatgtgttagctggsctgggattaaagcaatcatggagcaagcctgttgcctaggttgctctccccacccttaccatggtccggtccatctgctttgagagatcagaacagagtcaactatttttagcaacatgttttcttgtccttgctggctttgttttagtttgaagtacacaaatttggggtaccatttctatttagataattgaacttgaatacttatgctggttgctaagtctaccagacattctcaccaaaagaggaaagggagtaattcaaaccatttaggaatttggggctgtaatgatgcaagtgtggctatcagttttctttctttaaaataaaattggcagcttaaataatagagtcaaattgaccagatgttttgcacttggttaaatgcattccaattaaccaatcagtacgaataactgattagatcttttgctaaagaattcccattaagcaaataacaacaatggcaacaacaacaacaacaaag

SEQ ID NO: 818736 - DNA, 534 bp, Homo sapiens
tgggcagagaaagaggctctttcttctgaggtaatgtgttagctgggctgggattaaagcaatcatgragcaagcctgttgcctaggttgctctccccacccttaccatggtccggtccatctgctttgagagatcagaacagagtcaactatttttagcaacatgttttcttgtccttgctggctttgttttagtttgaagtacacaaatttggggtaccatttctatttagataattgaacttgaatacttatgctggttgctaagtctaccagacattctcaccaaaagaggaaagggagtaattcaaaccatttaggaatttggggctgtaatgatgcaagtgtggctatcagttttctttctttaaaataaaattggcagcttaaataatagagtcaaattgaccagatgttttgcacttggttaaatgcattccaattaaccaatcagtacgaataactgattagatcttttgctaaagaattcccattaagcaaataacaacaatggcaacaacaacaacaacaaag

SEQ ID NO: 818737 - DNA, 525 bp, Homo sapiens
aaggacgagaaaccaaacaccrcatgttctcacttataggtgggaattgaacaatgggaacacatggacacaggaaggggaacatcacactctggggaccgttgtggagtggggggaggggagaggaatagcattaggagatatacctaatgctcaatgacgagttaatgggtgcagcacaccagcatggcacatgtatacattgtgcacatataccctaaaacttaaagtataataaaaataaaataaaataaaaagaataatagaatataaacttgctcacaaaaaaaaagaataattaaagcctttactctaaacattaaaatatcatccatggtgtactcaatttttgaattggtccaatctcatggacttatatttcactcttatcctgcaaacaacactgcataactagaatatttagggtttcaacattcaaaataaggaaacaaaaaacaaaagttcaagtgcaaagtagcaatttagtaaatgtttttggcactgaattgcctggaataaagtcaa

SEQ ID NO: 818738 - DNA, 518 bp, Homo sapiens
atcttttttggatctttcaatctgctaatcattacataaagtataaacttcctgcattcycacttcagttctactgttgcccaactttgtaatatctgtgaacaaactcaatcttgctgtgctttagttttctcaccagtgaaatagagataatagtacagactctcctagacaggtaactgctagggtcagatagatcaataaatgtgaaagtgctcttaaatctgtgatgaattattgagatgcttgtgatagtaaggatttagagctcagtcgataaaaaaatcagcctttattccagatgtgataaatctggagcatgatagaattttaatatagaacacagtgaaacattttagaaggacaattaatgataattttttttgcatttttttctatacttgataaagcttatgttttatacaagaattgaaaatttttacctttacaattttaaacaacagggccatattccaataggtatcctttttttctttttctttgagacagagtctttc

SEQ ID NO: 818739 - DNA, 531 bp, Homo sapiens
gcctctgcaaggttagataaccagaaagacaaggtggttagtagcacggtggcaggtaacatgggaatgggaaaaagaaaggtatctaaagagaatcttaggcagagaaaacagtaggtacaaagaaacagaagcttaagaaagcacagagcatttggagatcaaagagtggttaatttaagctaaagcatagggcagtgcggaacaaagttcagactttagcagacagtgaactgtttgctattagtctgtaagaagaaaagagttttcaccagagtataaatcaactgagtcactgaacaaacgatttgatcttattttgcttttaattgccgaactttcttgacaaaggaaggagtacattgatttatattctggctcaagcttcttatctcaattgtggactggtactaaaaagtttgcagattatttggagtagcactggtattttttttaaaaaaggagcagaggagaagggagtgaagctgkagaggtaggcagctaaagatcacaaaagaatttctacgccat

SEQ ID NO: 818740 - DNA, 468 bp, Homo sapiens
aggtatagaaagaaatgaaattaatgggtaatagggtaagtatatgttcagttttctaaaaaacagccagacctttttccaacattgtagtacattttaaactcccaacaacaaagtatgagagttgcaactgctccatatcgctacctacatttgatcttttagtctttctagtgcctgcaggctaatatcttttctagttataactggcatttctccagtgacaaataatatcaagcattttttaatgtgcttattggcaatttgtataccttcctttgtgaaatcctttcaaactcttgctcattttctagtgaggttggctgtctttttatttttcaattgtagttctttatatattctggatacatgtcccttgtcagataaacattttgcaaatatttckccgtcttttaaaatttatttatttctatttatttatgtgagacagggtctcactgtgtcgcc

SEQ ID NO: 818741 - DNA, 645 bp, Homo sapiens
ttaactttttcttgttatttataaaaataattatgtacttctctctggggtttaatgtgtctttttattctcaaaaaatgtagtacattgatcagccacctaaaatactagccstatagaattctaatagttaggttttatatacagccatttgtcgattaaatattaaataccggatcagcttaaaatggacacacaaaaaaacactaccacataagctatacagtgccttttttcacagtgtcttataggtggaagatactcagtgagtgtttgttgagtgaataaaggatcttcacttggtgcatcccatttccttacaatttattattttttattttactttactttgagtcaggatctcactaggttgcccaagctggacttgaacttttagatccaagcaatcctcctgcgtcagcctctcaagcagctgggactacagggatatgtcactatgttcggctttaatttttattttattatgaaagttttcaagtagcaaaagcgatgtaatgaaccccatctacccattactgagattcaataattactaagattttgccacacttgctttatctagtctttaaagaaatttctccactgaatgatttactttaaaatacttgacctcctggcctttta

SEQ ID NO: 818742 - DNA, 619 bp, Homo sapiens
aaatgctacccagtggaaaagccaagtcatggggattgtggtagtagtaggttttcccatcataaataatcccaggaaaatcctttggaaaaacaaatacgatgcccagaatctgtcttttctgccagtgtacaggtggcaattaacacacagtctaaaggcaatggtttctttcatgccttttaatgtaaccatgttgactgaagtaattagaacacatacaacaaccttttcatgatggatcttccaatatgctctgctgttcatggttcattcctttgatgagtattgactgagcctctgctatagactaggtactagagatacagaaacgaacaaaacacaaggttcctgccctcatggagctggcaccccaggggcgagcagcttcctcatcccaatgagaagccagcttccttatgaatcattccgtcttcatcctagatggccttttgcatggaaacctaaaaacacagacacagatggaagaaactaaaggtacccaggggagtgaggacctaactccaagagtcaatggcaggactatgtagggtattygtgggagcaggtgattctcaggcccaaatagtttccaattttcagtttaggggaaaagaat

SEQ ID NO: 818743 - DNA, 616 bp, Homo sapiens
ggttctccaaggagatcatcaggggtcaccgagtccattccccagcctctggcttcactgaaggactcccaactcctcccaaagagatagtcatccatgtccttaaaaaatctccttgkgtctgaatccaagaccccaagccaattctccactgcctcatcagagctgccattagcatgacaccaaattcacttacagactcagctggtaaaggaaaggtcagtaaacaccactctaatcagctctggagagatacatgtggggggcacatgccagcctagggacacactgtcagaaaacatcaccttccacactaacgatatctcagagggccgtggagcccttgcctgtgatggaagaaaatcactcttccctagcttccctttggtggcaaacaagaaagtccccctctgaagtactagaagaatcccccctaccccaaagcccacccatgcccaatgctttcctctttctcctttctcagctgcaaacctgcagaggccccacttagtgaatatttccaagaaggagacctgcagtcccccacagaacttcaccattgggctatgcatagtgctgctttattggtaaaacaggaagatccaatttacaccta

SEQ ID NO: 818744 - DNA, 605 bp, Homo sapiens
gacgacgactctgcttccttactactctcctctcttggcctcgccaatccacatataatgcagagacgcaaagatcaaaaatgcattgaatgggaaggcagggaatcgcacrtctgtgcttgtactgaagagtcaaatgaagatttatatacctatgagcaatctccctaaccaccttaaagaagtaataaaggagtattttcttgtgtttaatcaatagtaaggaaaattaaataccacaatcatttttaaagtgattcattaaaacaggcacttgtggccaaattgcctggaaatggccccaacacgaggaaagatgctcccctcttaggatgctagcccaggagcctccttgtcactctattgaaataataacttccagcaaagcaaaaacagcttgtatcctttacgaatgctttccagaccaaaataaaaatgactgaaaggaccctccaaaaataccgaggatgtgagagtcagaacacatttcagctcagctgattcattcgtatcctgtttgaaattttctgagcttcaggggggacaagcaagccctggcaaaggcctccagaaagggcttctctccgagtgttggttttgtactt

SEQ ID NO: 818745 - DNA, 612 bp, Homo sapiens
agataatattattatggaatggttcatttgtgtgccgagtgggagtagacttgaattttctgccgtttccttaaaggaacrtgatggtaatttacttacttagatgatttaaaagacataaaaatatttaatccatagattactgattcataaacttctttacctcctcctctgtcactggcaattatattttctagattaacctaaatgaactattaatgaccaaaaactggactaattacatctactggggatggttttacttttagaggaattttcatctgtagacttcaacagtagaaaatgagcttcctccttacctgttttggtgaggagaaaacagttgtacaatacctgatttgctagattttcattaaaattgcaaagttaccaactgttatctggtggaggaaagctactttttttgcttttcctcattattcccttcataatttctcttcccagttaaagagcagtgtttcaagaactcataagcatcaaatcacctcctatatttgggtatgaacatatatatgccattacctattaatgtatattatgtgtaaatcatatatgtatatataatccttatataatattttctctggatcc

SEQ ID NO: 818746 - DNA, 612 bp, Homo sapiens
agataatattattatggaatggttcatttgtgtgccgagtgggagtagacttgaattttctgccgtttccttaaaggaacatgayggtaatttacttacttagatgatttaaaagacataaaaatatttaatccatagattactgattcataaacttctttacctcctcctctgtcactggcaattatattttctagattaacctaaatgaactattaatgaccaaaaactggactaattacatctactggggatggttttacttttagaggaattttcatctgtagacttcaacagtagaaaatgagcttcctccttacctgttttggtgaggagaaaacagttgtacaatacctgatttgctagattttcattaaaattgcaaagttaccaactgttatctggtggaggaaagctactttttttgcttttcctcattattcccttcataatttctcttcccagttaaagagcagtgtttcaagaactcataagcatcaaatcacctcctatatttgggtatgaacatatatatgccattacctattaatgtatattatgtgtaaatcatatatgtatatataatccttatataatattttctctggatcc

SEQ ID NO: 818747 - DNA, 405 bp, Homo sapiens; identical to SEQ ID NO: 818163

SEQ ID NO: 818748 - DNA, 541 bp, Homo sapiens
caagagcgagactccgtgttaaaaaaaaaattaataaataagattcatccatgttgtatgtatcatcattttattcctcttcatgcccaaatattccattgtatggatataccacaatttatccatatatcagttggtggacattttggttgttttcaccttttggctagtgtgaatagtgcggctatgaacatttcacttacacattttagtttgaacacctaatttcagtactctttggtatatacctaggagtggaatcactgaatcatatggtaattgtatgtttaactttctgaggagctaccaaactttttcttagtggctgcaccattttacatttccactagtaatgtgtgagggctccagtttctccacgtccttgccaacacttgttattttctggtttgtgtgtttgttttatagacatcctagtaggcatgaaatggtatctcattgtgattttggattccattccttaatgayagatgatgtagagcatacttttatgtacttgttggccattagattatctttggaa

SEQ ID NO: 818749 - DNA, 569 bp, Homo sapiens
aagaagtctggagatagacagagtctggatgttgcttcagcagccccatatatatctaggagtctcagcctttccttcttggtggcaagatggctcctgcagcaccagccatcacatccacattcaaggtagtgccagggctttacctacagttgtccctgatacttattcattcattttttctttcatcaaatattttctgaacacctgctatgtgccagataataaactaggcactgcgaatagaaagatgctccagccaagatgtagaaaaggggacatcatatgtttttgttcttatgaggaaagcaaaagccttctttggaaccttctacaggcttcctttatgtttcatagacaagaaattcatacctgcctccttgtaattcaatcacgggtaaaaggtaattggaagattgaagccttagaacaatcataactcattttctgaggmtgggggaggggctacccttccctaaaccatatgacagtcataatcctggactttacacgcaattgctacccctactgctcattcattcatctattcaacaaatgttattgaacac

SEQ ID NO: 818750 - DNA, 598 bp, Homo sapiens
catcccacaaatcccttttgttcttactgcagggacagcttgtcaaacgggctgtggcaaaagtgggcacagtgactccaatacctcactcttctgaaagcctggaagtgttcttcacagcatggctggtgaagagaggacggccaggcaaaaggctccatcttacctgacaggcattcccggaaggctgaaggtcctgtctggggaaacctgcacagtgtccttggccagggagggaccccaaacagcagaggagggaaggctcatgggctgagtgagccacgtgatgcatgagcaccaggtcttgggcagggctgctgagtgtcccacatgttattcccattcatgttttggttgttttgcagctccttgtaccaggaaggtcaaggtacgtacgaaagcaaaagtgtccagcgagtcctcagaacaggaatggtgatgctgaggacagccaggccctggagcccaaagaccatctacaggaygccccttagctctcctacccaatcccttcttgcttggtttccaccaagtagcctgagcactgaactgggtccaggagcttggactctgccggggcgtgtgggcgagtcatgga

SEQ ID NO: 818751 - DNA, 546 bp, Homo sapiens
tgcagttatattattttcagcttctagcaatatctggaaagtggtaaatgctaatttatattagattttaataagtcaargattcatgctgtaatctctgactaatgactaaaaatattaatgttaccaggaagaaacagaatgataaataagatgagacaaaatatttaattaaccatagagaaagtaagagaggaggaaaatggaatgtcagacacgttggatgcagaaaaataaataaaaagcaaggcattgatttaaatcccaatacagcaggaattatattaaatatcaatataataaagactctaattaaaaggcaataattgtcagactccttaagaaattcaactatgtaatacttaatagatacatgccttaaaaaaggaaaaaaaaggatggaaagtcacacacagtacaaactaaccaaaggaaatctgatatatttaaatgaatgacaaagttgattgtgggcaagagacattactagaactgaagaaggacattttggaatgataaaattttccattcagtagaatgacttat

SEQ ID NO: 818752 - DNA, 546 bp, Homo sapiens
tgcagttatattattttcagcttctagcaatatctggaaagtggtaaatgctaatttatattagattttaataagtcaaggattcatgctrtaatctctgactaatgactaaaaatattaatgttaccaggaagaaacagaatgataaataagatgagacaaaatatttaattaaccatagagaaagtaagagaggaggaaaatggaatgtcagacacgttggatgcagaaaaataaataaaaagcaaggcattgatttaaatcccaatacagcaggaattatattaaatatcaatataataaagactctaattaaaaggcaataattgtcagactccttaagaaattcaactatgtaatacttaatagatacatgccttaaaaaaggaaaaaaaaggatggaaagtcacacacagtacaaactaaccaaaggaaatctgatatatttaaatgaatgacaaagttgattgtgggcaagagacattactagaactgaagaaggacattttggaatgataaaattttccattcagtagaatgacttat

SEQ ID NO: 818753 - DNA, 435 bp, Homo sapiens
aaataaacatgccatttcagcaaaagccctgtactgacattgcacataggcttaaataaaaccacttaaagaaactcatttccttcaatattgtcatcctaaaatcatttctaggtaggaattytgaagccatcacacaccagaaaaagaaatcttgactcaaaatatggaggtcctggccaggtgcagtggctcatgtttgtaatcccagcactttggcaggccaaggcgggcagatcacaaggtcgggagttcgagaccagcctggccaacacagtgaaaccctgtctcaattaaaaatacaaaaaaatagctgggtgtggtggcgggtccctgtaatcccagctacctgagagactgagccaggagactcacttgaacccgggaggcgaaggttgcagtgagccaagatcgcagcactgcactccagcctgg

SEQ ID NO: 818754 - DNA, 435 bp, Homo sapiens
aaataaacatgccatttcagcaaaagccctgtactgacattgcacataggcttaaataaaaccacttaaagaaactcatttccttcaatattgtcatcctaaaatcatttctaggtaggaattctgaagccatcacacaccagaaaaagaaatcttgactcaaaatatggaggtcctggccaggtgcagtggctcatgtttgtaatcccagcactttggcaggccaaggcgggcagatcacaaggtcgggagttcgagaccagcctggccaacacagtgaaaccctgtctcaattaaaaatacaaaaaaatagctgggtgtggtggcgggtccctgtaatcccagctacctgagagactgagccaggagactcacttgaacccrggaggcgaaggttgcagtgagccaagatcgcagcactgcactccagcctgg

SEQ ID NO: 818755 - DNA, 609 bp, Homo sapiens
tagaggaagtaaaactaaccgtgtttgcagatgatatgatgctatgtataggaaactccatagtctttacttcaaagctccttgatctgataaacaacttcagaaaagtttcagtatacaaaattattgtacaaaaatcactagcattccaacagtccaacaacaaccaagccaagaggcgaatcaggaaggcaatcccattcacaattgacatagaaaatatttagtaatacaactaaaaagggaggtaaaagaactctagactgtgaatcacaaaatattgcttaaagaaatgagagataacacaaacaaatggaaaaacacttcatattcatgtattggaagaatcagtatgattgaaatggccatatggccaaaggaatttacagactcaatgctattcctatcaaactaccaatgacattcttcgcagcactagaaaaaactgtttaaaaattcatatggaaccaaaaaagagcccraatagccaaggcaattctaagcaaaaagaacaaagctggaggcattatgttacccatgttcaaactatactacaaggctacaataaccaaaacagcatagtactggtacaaaaacagatgttttgca

SEQ ID NO: 818756 - DNA, 542 bp, Homo sapiens
tgtctctgtcttttaaaatatagaacagtctcccatgattttggaggtcaaaatgaatttgcyctattcttacctgtcagagttcacatttaagacaacatctctcatttcaaggttgccatctctaaattgaaccgtgtttgtatttacaccggtgaaaatgagtatactgtcattaaaatagaactctgtatcctaccaacaagccaaaaccgaaaaacaaacagaatacccccaaaaaagacacaagtgagattgatttctaccattacaaaaattcttcagacagataagtattctaatatttgtggtcattttgcttattcaaattttattaattttatatttgcgtacttctatcaaagtgtgcaaatcctggatgattttaaagattgtacaataataacttttttttttgttctgcagttggaaggggctgagtggcccactgttgatgacatttgtcagtttccacatatatgccatagcatatggaaaaacatcagaaaatagtaaatatagtcattctccttcacaacttt

SEQ ID NO: 818757 - DNA, 617 bp, Homo sapiens
agttaagctatagagcacagtggtagaattcaggctggtctaaggaaataattgcagacaggccatggagaggcttcagggttttacgttttgggggtgcttattttatttttcytctttgctctatacttttttgggcttcttaggtcaatgtggcattacatagctgccaatgctttcaagtaggtagagtacaatttcagtcatgagctaggatgaactagctatttcctagcaacttgcctggggaccggatctaactggcccagcttgagtgagataatgtactctggtcaagtcagccacaagcttaggcactgagactattgtcgaaggtcaccccttacgaatggggagttaatgtgagctgggaagatatcccaaaggtgtctaatgcactgacaaatggcaaagatgcaacagatattttggataaataaatgaataaaataataaatgaatgaaccaagagactgttagttttgggtagcataataaactcagattgacagataaagagcaattcattaggcatctacttattaccagaggctgtaaggaataaaagctgaaaaaaaagaggagttcctgactttaaggaacttgtcagaagaggt

SEQ ID NO: 818758 - DNA, 586 bp, Homo sapiens
agagagtaatgggagggttttttccttcttgttcagaatttcttttaaatccgacatctggtatttggcacttgacttttactagaccaattgagcacttttaaaggggaataaatcatatgactttcattttaatttttactgtaatggtttaatgcagccaacatatgctgagtaatagtattaaaataaaatcagtaaatgagggattaaaatttgcctgagttcagttttgcaaagacactaattagagaaaggtttttcagatcagaattggataagccagcaattttttaaaattgtaataatatactgagaaatatttgggtttgagcatgctgttattgagaaggaaaaattacaagggaaattaacacctttgctctaatgcgaggctgtggggtgaatctgggaacccttgcatgcccgtttctccactgccagaaagtatccagacaaacactgaagaccaatccacatttrcttattttaaacagagatactaacttgaaaactggaaatatttgagttggactaagcaggatggagatttcttgacatcataaggagcattcatttaaatttc

SEQ ID NO: 818759 - DNA, 679 bp, Homo sapiens
gtagttctatttttagttctttgagaaatctccaaactgctttctatagcggcagaagtaatttagattcccaacagtgtataagcattctcttttctctgcagacttgccagcatatttttttttacttcttaataatagccattctgactgatgtgagatggtatctcactgtggctttgatttgtacttctctaatgattagtgaggttgagcgttttttcatatgattgttggctgcatgtaagtcttcttttgagaaatgtctgttcatatcctttgcccactttttaatgggttctttgtttttgcttgttgaattttttttcttttttctttttttttttgagacggagtctcactctgtcacccaggctggagtgcagtggcgcaatcttggctcactgcaacctctacctcccaggttcaagtaattctcctgcctcagcctcccaagtagctgggattacaggggcccaccaccacgtctggctaatttttgtatttagtagagacggagttttgccatgttggccaggctggtcttaaactcctgacctcaggtgatytgcctgcctgtcttggcctcccgaagtgccgggattacaggcgtgagccaccgcacctggccgaattgtttaagttcctcatagatactagatattggacctttgtcaga

SEQ ID NO: 818760 - DNA, 598 bp, Homo sapiens
gtaggaaagaaatttataattactaattttctgaattattaatagtacttccaaaatggtaaaaattctttttagcaggaatgtttaaaacagttgctgaatgactattaaatatgccttagaagataatagactaaattatcactgtagtctctgtacattttattccaagccattttcaaatgatttttctttgctacatatttctttaagaaatacgtacagaaatgaatttattcaaccatccatctacccatccatccatccatccatctaaagaatatatggaagatttgagtttcacattttgctgaagaaaacctcagattcttcataaacccttaaaaaaatgtgataggtagtcccaaataaaccaatatccaatttttgaagttcagttgacatcattaacaagagtgaactatgaaaaaggggggttaatgcttccttctttctctctctttttggcataaatcrgaagaaaataattagaacatattatttctaagtacaagcattgagataacagaacttgtataatacatggaagaagctctttcagaagcagctttcattatttttcccaagccacagatgt

SEQ ID NO: 818761 - DNA, 465 bp, Homo sapiens
aattattattattggggtataatttaaaaggtaaatagtaatttacattaagcaaaataattgagtattctgttatactttattgcttacagttcatccttctgggattattttccttctgcctgaaaagccctccacaaccctattactcacccctgccatttgtttatttgccaatggttactgtatttgtttttgctttttttgcaaatgaatacacttaattttattttgaagaatatttttttggttgtaggattccaataactagccattcctttagtatttgaaaatgtcatctcagtgtcaactagcttctatgatgtctcttgagaaatcagttgctagtcttcttgttgtcactcatttgaaggcaaagtatttaataaaattattttttgytcatggtttttagtgactttgctgtgaattgcccagttgcggtttattttgtaaagttattca

SEQ ID NO: 818762 - DNA, 589 bp, Homo sapiens
ctttcggtcaataaaagccattagcaagattgtgaaaaggaaacatacaggaatggataaaatatctgtaaatcagatatctggtaagggtttagtatccagcatatagaaagagctyttacatttaaacaacaaaagacaaacaacccaatgggcaatcgaattgaataagcacttctccaaagaagatatacagatggccaacaagcacatgaaaagagaaaccattgatcattaaggcagtacatattaaaactaaaatgaaataccacctcacgcaactcatatggctttaatgaagaacgtgaaaagaaaaaaaaaaatgattggtggtgatttcaagaaacaggcacattctggtgggaatgtaaaatcatgtagccactgtgcaaaatagtttgatgatcccttaaaaagtgcaacagaatactcagcgcattatacttgtaggtatatacctgagagacataaaaacatatgtccacacagaaatttgtttacaaatgtatatagcagcattattcattagccaacaggtgaaaataactcaaatatctgtcaatgaataaatgaataaagcacagttttc

SEQ ID NO: 818763 - DNA, 589 bp, Homo sapiens
ctttcggtcaataaaagccattagcaagattgtgaaaaggaaacatacaggaatggataaaatatctgtaaatcagatatctggtaagggtttagtatccagcatatagaaagagctcttacatttaaacaacaaaagacaaacaacccaatgggcaatcgaattgaataagcacttctccaaagaagatatacagatggccaacaagcacatgaaaagagaaaccattgatcattaaggcagtacatattaaaactaaaatgaaataccacctcacgcaactcatatggctttaatgaagaacgtgaaaagaaaaaaaaaaatgattggtggtgatttcaagaaacaggcacattctggtgggaatgtaaaatcatgtagccactgtgcaaaatagtttgatgatcccttaaaaagtgcaacagaatactcagcgcattatacttgtaggtatatacctgagagacataaaaacatatgtccacacagaaatttgtttacaaatgtatatagcagcattattcattagccwacaggtgaaaataactcaaatatctgtcaatgaataaatgaataaagcacagttttc

SEQ ID NO: 818764 - DNA, 589 bp, Homo sapiens
ctttcggtcaataaaagccattagcaagattgtgaaaaggaaacatacaggaatggataaaatatctgtaaatcagatatctggtaagggtttagtatccagcatatagaaagagctcttacatttaaacaacaaaagacaaacaacccaatgggcaatcgaattgaataagcacttctccaaagaagatatacagatggccaacaagcacatgaaaagagaaaccattgatcattaaggcagtacatattaaaactaaaatgaaataccacctcacgcaactcatatggctttaatgaagaacgtgaaaagaaaaaaaaaaatgattggtggtgatttcaagaaacaggcacattctggtgggaatgtaaaatcatgtagccactgtgcaaaatagtttgatgatcccttaaaaagtgcaacagaatactcagcgcattatacttgtaggtatatacctgagagacataaaaacatatgtccacacagaaatttgtttacaaatgtatatagcagcattattcattagccaacaggtgaaaataactcaaatatcwgtcaatgaataaatgaataaagcacagttttc

SEQ ID NO: 818765 - DNA, 578 bp, Homo sapiens
ttgaacaactggctcctgaatgactcatgagtaaataatgaaattaaggcagaaataaagaagttctttggaaccaatgagaacaaagacacaaygtaccagaatgtctgggacacagctaaagcagtgttaagaggcaaatttatagcactaaatgcccacatcagaaagctggaaagatctgaaatcaacaccctgacatcacaattaaaagaactagagaagcaagagcaaacaaatccaaaagctagcagaacacaagaaataactaaaatcagagcagaaatgaaggagaaagagacactaaaaatccttcaaacaatcaatgaatccaggagctggttttttgaaaaaagtagcaaaataggtagaatgctagctagactaataaagaagaaaagagacaagaatcaaatagacacaataaaaaatggtaaaggggatatcacccctgagcccacaaaaatacaaactaccatcagagaatactataaacacctgtatgcaagtcaactagaaaatctagaagaaatggaaaaattcctggacacatacaccctccgaagactaaaccagga

SEQ ID NO: 818766 - DNA, 578 bp, Homo sapiens
ttgaacaactggctcctgaatgactcatgagtaaataatgaaattaaggcagaaataaagaagttctttggaaccaatgagaacaaagacacaatgtaccagaatstctgggacacagctaaagcagtgttaagaggcaaatttatagcactaaatgcccacatcagaaagctggaaagatctgaaatcaacaccctgacatcacaattaaaagaactagagaagcaagagcaaacaaatccaaaagctagcagaacacaagaaataactaaaatcagagcagaaatgaaggagaaagagacactaaaaatccttcaaacaatcaatgaatccaggagctggttttttgaaaaaagtagcaaaataggtagaatgctagctagactaataaagaagaaaagagacaagaatcaaatagacacaataaaaaatggtaaaggggatatcacccctgagcccacaaaaatacaaactaccatcagagaatactataaacacctgtatgcaagtcaactagaaaatctagaagaaatggaaaaattcctggacacatacaccctccgaagactaaaccagga

SEQ ID NO: 818767 - DNA, 567 bp, Homo sapiens
aggagacatacctaatgtagatgatgggttgatgtgtgcagcaaaccatcaagtctcatgtatacatatgtaacaaatctgcacgttctgcacatgtatcccagatcttaaagtayaataaaaaaaattatttcagaaataaactctctaagaaaatattttaaaaaagaaaaagaaataccaacacagagaaaagtacaaagaaatgtatgaaaatgagaaatatcaacacccagggaatggcttctttgaaaacactttggcagttcctcaactgagttaccatctggcctggtaattgcatttctaggtaagcatccaagagaatcaaaaatgtatgttcacacacaaacgtgtacgtgactgttcatgcaagaagcactactcataatgaccaaaaagtggaaacaattcaaatgtctttcaattgatgaatggctcaacaaaaattattcagccacagaaaggaatgaaatacattgatctatgctataacgttgatgaaccttgaaaacatactaagtgaaagaagctttcacaaaggaataagtattgtatgattcaatt

SEQ ID NO: 818768 - DNA, 567 bp, Homo sapiens
aggagacatacctaatgtagatgatgggttgatgtgtgcagcaaaccatcaagtctcatgtatacatatgtaacaaatctgcacgttctgcacatgtatcccagatcttaaagtataataaaaaaaattatttcagaaataaactctctaagaaaatattttaaaaaagaaaaagaaataccaacacagagaaaagtacaaagaaatgtatgaaaatgagaaatatcaacacccagggaatggcttctttgaaaacactttggcagttcctcaactgagttaccatctggcctggtaattgcatttctaggtaagcatccaagagaatcaaaaatgtatgttcacacacaaacgtgtacgtgactgttcatgcaagaagcactactcataatgaccaaaaagtggaaacaattcaaatgtctttcaattgatgaatggctcaacaaaaattattcagccacagaaaggaatgaaatacattgatctatgctakaacgttgatgaaccttgaaaacatactaagtgaaagaagctttcacaaaggaataagtattgtatgattcaatt

SEQ ID NO: 818769 - DNA, 624 bp, Homo sapiens
agatgagatttgttattatttcacactttctstgacattccactataatattatctttactttcataactttaaaatgatatttttcttagtcttccatctacattgtctcttaatttccacatattttctaccaacttcaaaggcttcagatgatgtctttttacatgtttctgtgttgtaagagtagcaattctcctacaagatataacaacctggatttctaagtagcagaagaattccaaatccaggtttgaatcagagatggcaaattaatgaattactaggaatagaaattaaatattagctaataaatggacatctaaccctgaatgaagcagttaatgaccctctttcctgatgatctttctccaaataaaacccctacttcaaatatttaaaaagttactatattttaatgtgtataagattataaatgtaaattaagataaaaggaagccaagggggaaagtgacataaaattgttttgactcttcatcaaatgaccacacaccctattaacacaacaaatatttatgtgaggcctatgtctactgcacaggtcatactaaggctatcactggcactaccactaagcagggatttgattaaagatgaattattc

SEQ ID NO: 818770 - DNA, 594 bp, Homo sapiens
cacacttaatagatgaaataaaatgaccttgttacaatcacccagctagtgatattgaagctgagggttgaaatcaggtttgactgatgccaaagactatgttstctcctatcttccagcaacatccaaaataaatgtctacactacccaatgtgatattcacaagctatgtgtagctactgagcacatggtataagaacaatataaaaaacacctagatttttaatatcatttcattgtaattaatttacatttaaagtctaaaaagtcacatatgattagtggctctcccaactattaatgagtttctattttctgccagatattgtacaagctactttctgctggacactgcacaaactactcttttcaagtaaacccccatcctaattcaaatagacattagagatgtataatcatgtatatgtatttgacataatacatataattctatcacatgtaatactaaaagttataatgattggcaaaatgatggagcaaggattcttaattaggatgatcatattccaaatcgttgactctttcaactacccagtattagtataggatcccaaaatgaagagtaacaagaac

SEQ ID NO: 818771 - DNA, 623 bp, Homo sapiens
cacccagcatataatttatttttacatgtttttgagtctataaccttgctaaattcctttattagtattttttggttgttttctgatgaactaatgttttatataaaagtcattctttttttaaaaaaaatttattcttccattttgatctgaattaatagttttctttctctcttacattatccattaattctagcaaaatgtcaaacaaaagtggcaggaggagatactcatttccatatttgggaatttgtagtccatcaaatataattttaggtataagtttttcatggatgtcttttatcatattgataccagaatatcatattgatgatactcttttctatacctaggtcttgactgggttttaaattttgccaaatgctttttgtacatctatgaagactaccatatagactttattctatattttgttgatgtagtaaattttactgattgatttctgaatgtcgtgcagaccattataagtcatttacacatgtcaactcattcaattcccgtaacrtctcaacgagaaaggtgctattaatttactcaaggtcatgcagataataatttatcaaaataagatttaacagtggaaggttaacacctgaatttat

SEQ ID NO: 818772 - DNA, 586 bp, Homo sapiens
tacccatgaggataaactgttaatttacattgtcaaagcaagggaggccacctgaggaaaacttggcttaggaacaaaagcaaaggcagatttttttttcatgactcagtttccaagtttaacatttcytttaggcatagtgagtttggagtcctgagattttattttccttttgcaggacaaaaaccatatttctgtctagaatctgtaatgcaattctttttttgttttgtttttgttttttgagacagagtctcgctctgttgcccaggctggagtgcagtggcgcaatctctgctcactgcaaactccgcctcccaggttcacgccattctcctgcctcagcctccccagcagctgggactacaggtgcccgccaccacgcccgctaatctttttgtatttttagtagagataaggtttcaccgtgttagccaggatggtctggatctcctgacctcatcatctgcctgcctcggcctcccaaagtgctgggattacaggtgtgagccaccttgctcggcctagaacttgtaatgcaattattgtcaaccctgtggggatagttccaaaaagggggcttgga

SEQ ID NO: 818773 - DNA, 659 bp, Homo sapiens
aacattacaacaagaatctaaaagaaataaattatttctgaatatgacgattaaatacattttgtatagctatcatttcaaatcctatgaaarggatttaaaagtaatttttaaacattatttaaatttgtttaaatatagtaattttattgctttggatatcgaaagaagttgttaagctaatacttgatttttctccatacaactgatagaaaagcagctgtggagttttttgtttccatcataattctggtttaattccatttttaacacatgataacagcaaatatcttttaatgcccctgttttttcttgcctcaaagatattaagcacaaccaaactgctagtctgaaaatatttttcaatgacgttttaacctctgtgttatcatttgtgttacattgttctagttagaatgactgataaattattttttaaaaaatcccagttgaaaaaatctcatctttaccatgagcgtaacttagtgagaaagcaaataatgaaacagttcaatgaatgagtgctgattcaattgatatgtatgggcaaataagtattatggacattaaaaattgtacatttactttacattttttactatttattcagtaaaaatggagggtgagacctatgggtatacggggcacatttatgggga

SEQ ID NO: 818774 - DNA, 551 bp, Homo sapiens
ccatctcattctctgttcaattctgtgcccttgctggagaggtggtgcaatcatttggaggagaagaggcactctggccttttgggttttcagcattttttttcattgattctttctcatcttcatgggtttrtctagttttgaactttgaggctgctgatccttagatgaggttttgtggggacttttttgttgacactgttgttgttgctttctgtttgtttgtttttctttcaatagtcagatctctcttctgtaggattgctgtggtttgctgggggttcccttcaggccctattcatctggttcactcctgcacctggagatgacactcaaggaggctgaagaatagcaaagatggctgcttgctccttcatctgggatttctgacctcaaggggcaccaacttgatgccagcaggaatgctcctgtatagggtgtctgacaactcctgttggaggatctcacccagttgggtggcaaggggagcaggaccagtttaacaaagcactttggctgccccttgatggagggggtggctatgctggggg

SEQ ID NO: 818775 - DNA, 618 bp, Homo sapiens
ttgccagagacttttttccctgtcgtacacaacattggaaaagttctactatttaaaatgtctgattaagtactaaaatatacaaagaaataaactgtaagccttcactacygaactctaaaaataaaagttaataggcgtggctaaattatagtcatgcaggttgcaagacatgtacgagctttagatctatatctgccctaaatctatctacatttctggttcactcacaacaaaaagttacaaatttctattcacaaaactttttcaccagtgcaagaaaaattaagctctatcatgtgattggctaaaatgccctatatgaaaacttcatatatgcaatcaatataccaaatagagaaatattgattcataaatgaatccatgcaaaatagggaaagaaagaaaaatgagtcagtgaacaaagtagaatcactcatgtctgccctaaaagtatcttctaaaactcaatgagtcaaatttcctggagggcaggagaaatcagcaggtataagctacacaacgtcaggttgtttggattccccaggaaggaccctttgcccagaatttcactgtaaaatgtgaatcaagttagctggatggaaacatctggggtat

SEQ ID NO: 818776 - DNA, 488 bp, Homo sapiens
tcttctacttggaatatttgttaacatacccacacagggaagactatgtgttttgtggaacacaaaacttacaccgtatgagtgccctcttaagaaaaacaagacaaaataattaatacaaaacatccaagctccctctgtgaaagagagcaaatgaggggccctgaaacctctgtgtccttagcttcgtggcaaattcacctctattttatttttgctgaatgaatttaacaatatttggctgagttattttaaaaaaaggtctttatttatatttcagttggaatcacgttatatctgtgaaatagaacacgatgtttctctactttatttgtcttctttttatactcctgataacacattctaatttcgctcattcatccagcagcaatttattgagtacctcttcaataactttgcaaggattttttttttttttyttttttttttagatgaaacctcactctgttgcccaagctggagtgcag

SEQ ID NO: 818777 - DNA, 512 bp, Homo sapiens
cataccgcatttctgttttgtgactggcttatttcactgcgtgtgatgtcctcagggtttatccacgttgtagcaggggtctggatctccttcctttttaaggctggataatattcccctccatgtrtgtatattgtattttgtttatcaacctgttgccgcatccccattgccctttgacggaccccgactcctctccctgcacagcccagtctcctctctcctggcttcatcctggtttgtcctcccccgtctagcgctgcatcctcactgctttcttcctgtccctcagaagatgccaagtgtgttcctactccaggaactttgctagcactttccctccacccttgatgttcttcccccaactttcaaagggctggctcctctcagcattcaggtctcatttccaatatcacttcctcgcagaggcctgtttactacttaaatagaggctcaatctctgccgctttctgccatgctacctttaaaacccgtattcattacatttacca

SEQ ID NO: 818778 - DNA, 624 bp, Homo sapiens
ttctctttatcactagtttttagcagtcttattatgatgtcccstggtggtttttgcatgtgtgtatttatgcagattagggcttattggtctacttggatctatgaattgtagttatcaaatattaaataattctggtgttttttcaaatataatttcccactcctctcttctttctttttctgacacatatcttaggtggctcgatgttatctaacaggtctctcagaatctggtcattatttttcattgttttttctcggtatgctttattttggacagtttctgttgccatgtctttatgtacactggtcttttacagtctctaatattattttagcccaaatccgtgaaagtttatattttagagatatttatctctgaaaggcttatatttttgtatcttttatttctgtcctcattatataaatgttttcccttcaatcactgaacatggtaagtatatttataatagctattttaacggccctttttgttaattttgccaggttaatcatatctagttctgtttttattgactaagagtgctccttgtatgtgttatatcttcctgtttcttaatgtgtctggtaatttttaatcagataccaaacgtcaattttt

SEQ ID NO: 818779 - DNA, 366 bp, Homo sapiens
ctatactgggatggtcaaggcaatggtctgagaattgtcttgtttcctgccaccatcctgtgaaccaagagcagtaaacttctgaagtctccatgccaacccctgcagccttccaaatgggcacccaactgggtctaggactcagattgcgaccctggtcttgcctagggacaccatgggctgtgcaggtggagctgagactcttcgaagatcacattgctatcttaatccttttggcctgaagcctctgaaggactctgtcaccctgggcaatcttttgaggtcaaggtgagatgggggtatcttgggttctgctctgattctgctagcacgtctttggmtcctatctcccccactgcaaaataa

SEQ ID NO: 818780 - DNA, 461 bp, Homo sapiens
tttttctcattcatttgacgaatgtttacttagtgctaggccctgtgtgggtgcaggtcccagtgcataaaacatacacacacaccccattcttccttggaaaaaatcgggaaacacagttgcwcaggaatcatcacagcagtaaaaactctccaaagaggaataagagaagtctaattcgggtcagatcttcagagacaggtaagataagcctgcaatacaaggtttcctggaggcctaaattctgggcccagaagagaaaggggaggtggcatcaggcctcatgagatggctcaagggataggcttctggacttctccttggttgctctctgctcatcccagctgaggtcagactgccaggcagtcaggctggcaacgggatagcaggcacatcctgttggcagctgaggcccagtctgggagccgctggccacagccccatggcaagaagacctttct

SEQ ID NO: 818781 - DNA, 651 bp, Homo sapiens
agatacaaatcaaaaccaccatgagctgtcacttcacattcatgaggatggctatcattaaaaagacagatattaacaattgttagggaggaggtggagaaatgggaaccttcatatcatgctggtgggaatataagatggcacaattactttagaaaacagtctggaagttcctcaaaaagttaaacatagaatcaccatataatccagcaattctactgttaggtatatgtccaagagaaatagaaacataggtccacaccaaaactacacatgaatgttcacagcaacattattcacaatagccaaaaggtgaaaaaaagccaaatgcttattaactaatgaatggataaacaaaatgcggtaaagctatgcaaagaattgttatccagccctagaaaggaatggcccaggtctcctgatacatgctgcaacatggatgacccttgaaagcagtatgctaggcgaaagaagtcagaattaccaaaaatccacatattacattatcccatatatataaaatrtccagaatgggcaaatagagagagatagaaagtagattagttattgcttaacgttgaggggatagagagattggggtttgatggctaaggagtatagagtttcttttagaagtgatgaaaatataaa

SEQ ID NO: 818782 - DNA, 588 bp, Homo sapiens
gacatacaggcagagctgcttctggaaaatggatttcttccactgtttgtccattttagtctaatccctaatgaaacagaatgaacttcagtctcttgaaatctgattcttccacctatgaaaaaagcaatgagaaaggtggcttttcactttaaaagagagactttgagccgagtctaactcaggagaactgctcaaattgtaccctctcttgcccaacacagagatcaggccagaccaggtcagaaatgctggtaaaacatttatttcaaaaattcatttggttttcagatgataaataggaattaagaatgagtatctttcttaggctctaaaaaccagaaataagacacaatttcatacgtgcagacttttgaaatatggagtaacatttaaaataacagataaaagaaaagctctgaatgttactctttattctggtaggtatgatttacccagtattgtttacatgcyttgatttagtatcagtgagtatctcctgtatgcaaggcgctcagagccatgattcctagcttctaacatccgatttctaggcctctcatgcagatgccaataaaggatctgtgt

SEQ ID NO: 818783 - DNA, 369 bp, Homo sapiens
ttgactatccagatctacaaattcaagttgaaacttatttcagccctccttggaacagtccactaatctagaaaacactgggactattcttcccgagcagtgaaacatccacacaggttagtaactacaggctgctctaattaattacctgagacacaattggtggatgttagagtttgttatgttgttgtatttttaattccatttgcctacttgatccacattttcatgccttggctgtgacactttagaaattaaaacatcccaatagtgtataattaaaagttaaatatagcagctacaatctaatttcattgraagtctcctccaaatcacagaagtgccactggcctggcctggctagaagtc

SEQ ID NO: 818784 - DNA, 439 bp, Homo sapiens
gagatagttttacttcttcctttccaatctgtatgaattttgtttcttattgttattatcatttttgttttgcataattatcttggctaggtcctccagtgcaacacgttagaaatgagcaagagtggatattactgttattttcctggtcttcgtgagaaagcacccaatctttcatcattaattatgatgttagctgtgggtttttaataaatgcccttcattaggttcagaaagttttcttctattcctggtgtgttgaatattatccccataaaagcatgctggattttgacaggtgtgtttgtgtgtgtgtgtgtgtgtgtgtgtgtgtctattaaaaagatcatgtgggttgggcrccgtggctcatgcctgtaagcccagcactttgggaggcctaggcgggaggatcacctgaggtctggagttcgagacc

SEQ ID NO: 818785 - DNA, 439 bp, Homo sapiens
gagatagttttacttcttcctttccaatctgtatgaattttgtttcttattgttattatcatttttgttttgcataattatcttggctaggtcctccagtgcaacacgttagaaatgagcaagagtggatattactgttattttcctggtcttcgtgagaaagcacccaatctttcatcattaattatgatgttagctgtgggtttttaataaatgcccttcattaggttcagaaagttttcttctattcctggtgtgttgaatattatccccataaaagcatgctggattttgacaggtgtgtttgtgtgtgtgtgtgtgtgtgtgtgtgtgtctattaaaaagatcatgtgggttgggcgccgtggctcatgcctgtaagcccagcactttgggaggcctaggcgggmggatcacctgaggtctggagttcgagacc

SEQ ID NO: 818786 - DNA, 532 bp, Homo sapiens
ctctccacccccgacagaccctagtgtgtattgttcccctccctgcacccatgtgttctcactgttcagctcccacttataagtgagaacatgcagtgtttggttttgttcctgcattagtttactaaggataatggcttccagctccatccatgtccctgcaaaggacatgatctcattcctttttatggctgcatagtattccatggtggatatgtaccacattttctttatccactctgtcattgatgggcaactgggttgattccttgtctttgctattgtgaatagtgctgaaagcataatgttctataaaggctttttttaatggtatgttatgaaaactggcatgtcctcagttttactctagcatcagaatatattttcattattattttccataaattatggcagcataaatatagtatgccattaaaattctataatttaaaaattaaagaataaaaatactttaaaattaaaattaaattaaatataaacaaaattaaaattaayaattaatggatatttt

SEQ ID NO: 818787 - DNA, 639 bp, Homo sapiens
acatctttatttttttagttggaaggttcaaatggaaagtgataaataatgttgagtgtctctgcccagggcacttgttaactttcttcctgataattggcatctcactctcttattgccagtgtgaaccattgtggtctctgtgaacatctcatacttttggtcgtgtctatagtagtgagagtattggttctgcaaataaatgcttaatctctaaaaattgtgactatgttatgttacataacgaaggagattttgaaggtgtaattaatgttacagaccttaaaataaggagatcagtccgggcgtggtggctcacacctgtaatcccagcactttgggaggccaaggcgggtggatcacttgagttcaggagtttgagaccagcctggtcaacatcgtgaaaccccgtctctattaaaaatacaaaaattagccgggtgtggtggcaggtgcctgtaatcctagctgctcaggaggctgagttaggagaatcgctggagcccgggaggtggaggttgcagtgagccaagatcgtgccattgcrctccagtcccagtgacaagagcgaaactccatctcaaaacgcaacacaacaaaaaaaaaacaaaaaacaaaaataaggagatcattctggat

SEQ ID NO: 818788 - DNA, 571 bp, Homo sapiens
aactaatatcaatgtcctatttgttaaagattacacaagcaaagatcattctgctttgggctagatttatagttttgtaaaccctgtgcccagttttgacaccttatagcatktggaagggataagtgtaaaatttcttgattaatgaatgcaaacaaaaatgtatgctggcaaattcttaagacatttctaatgttattttagtaataattttaaagccagcttatttattaaagattttaagtcacatgagcttgaaaaagcatttgactagttttttctctttagtagtatctgatttaagcacttttatttattttttaagccaactagttagagctcttttatgtactttttaatagtgaaacattgtgtacacaacacataaatatgtagatgtaggcctgtcaataaaagtgtatcttatagattaataaagaccttctttttttccttcttttttttttctttttttttttttgagatggagtctcactttctcacccaggctgcagtacaatgcttgcaatcttggctcatggcaacctccacctcctgggttcaaacaatt

SEQ ID NO: 818789 - DNA, 629 bp, Homo sapiens
ctaaatcctatacttaaaaggtataaaatagccaattggatttaaaaaaaaaaaaagccatccttctgtggtgttcgagtcccatctcacatgtaatgacacccacaaaaagtaaagggttctagaaagatctatcatgcaaatgggaaacaaaaactaggtggatgaaacacagggaatttttagggtagttaaactattctatatgatagcacaatgatggatacacattatgcatttatcaaaacccacagaatgtacaacagagtaaaccgtaatgtaaactatggactttcattcagtaggactatgagctgaattccacctactccatcctagttggagaaaaaaccctttccagagtttttgatatttgttttcctatttccttcacttaccacaccttcctgaggacaatgaccaagtttgttctatttagggtcagtaaactacaacctaccatttacatcttgattttgtaaagaaatttctattggactacagtcacacccattcatttacttgtttatggctgatttctctacaatgacataattgtgtatgagaggttataygacctacaaagcctgaaatatttactatctctttacagaaaaagtttaccaacc

SEQ ID NO: 818790 - DNA, 622 bp, Homo sapiens
agttgaattaaataaaattattcaatagaattaaatagcatgcaaaaactggagaaacattatccctgcaatatctcacttttctaagctcccgcttcaatgtctcctctctggacaggtacttgcctgcatgcccctttatgtccgcctctggtttattctcttctttaaagctattgccacatactgttttgtgtcatttcattcccaaactattgactgattctcttttttggctggacctatatgcaagaagtttggcccttttctatctacaccttatcttctttttgttaaatagggaagcaaatgctgaagaggcattttctcctgcttttagatacttttggtttacaaacaagaagtcattttcttggtgtctccatttatatcacttaggatgtgggataatgatgtttttatatcctgatgcaaataactcttcatcacttgagttctgaaggctgcgtcttcataaatctaacactggaggtttctgctcagaaaactaggtcactccacatcatctacaatgtgcttcgctttacagcacagtctcacccactcttacaactggggtgcacatgtatttatttcataaraaataaaaatatcagtgatg

SEQ ID NO: 818791 - DNA, 587 bp, Homo sapiens
tttgtgtggggacacagccaaatcatatcattctgcccctggctcctcccaaatctcatatctttacatttcaaaaccaatcatgcattcccaacagtcccccaaagtctcaactcatttcagcattaactcaaaagtccacagtccaaagtctcatccaagacaaggcaagtcccttctgcctatgagcctgtaaaatcacaagcaagttagttactccctagatacaatgaagggacaggcattgggttgaatacagccattccaaatgggagaaattggccaaaacaaattggctaaaggccccaagcaagtctgaaatccagaggggcagtcaaatcttaaagctccaaatgatctcctttgactctgtgtctcacatccagggcacactgatgcaacaggtgggttcccatggtcttgggcagctttgccactgtggctttgtggggtacagcctctctcccagctgccttcacaggctgttgttgagtgtctgcagctttttcaggtgcatggtgcaagctgtcagtggatctaccattctggcatctgsaggatggaggtcctcttctcacagttccact

SEQ ID NO: 818792 - DNA, 622 bp, Homo sapiens
gaaggggttgaccacaaagtcagccaagccactctttttgcaagatttccccctaaatataagtgcacaccaataagggagggtaatggcaccatctgamagatggaagaagtagcagggactgcactcatacattattttacagtcaatgctagttggccatgcatataattcaacacaaatcatgattaataagcaaatgaatgggatgggtgctagaaattatcgctgcccatgtacatcatacaaaattaaatctgattaccttttgaaagcaggcattattgtctcttatttcttaataaaaactatgtatttatatttttatctaaatctcttgtttttaacagagagctgatataaccacagtttttccctctacagagttccagctctatggcaagctgagttctgtgtacacaggaaattaaattaaattcagcaaatgaatgaaattaaaattaggagaaaaaaggaagggaaaaaggatgagttggggagaacagatagataaattttgctaaacttgtatatttcctttctgattttactcacagatgttttcattatgagctttgatgagtcactgtgacaaattatggtgtgtgacatcgtcagccta

SEQ ID NO: 818793 - DNA, 620 bp, Homo sapiens
gccacaacccaatttaaaatgtacaaaagatctgaagaggtatttgttcaaaaattatatacaaatgactgataagtacatgaatagatgctcagcatcattagagaaatgcaaatcaaaacacaaaaagatggacaataaatgttgggagggatgtagagaaatcggaaccttcacaaaccgctggtgagaatgtaaaaatggcatagccactctggaaaatatggcagttcctcaaaaggttaaatgtaaagctaccatataacacagcaattatactcctaggtatatatccaagagaaataaaaacatatgtccacacaaaaacttagacacgaatgttcatagcattattcataatatccaaaaagtagaaacaaccaaactattcactgactgatgaatggataagtaaaatgtggagaatccatataatgtaatattacgtagcaataaaaaggaaaggcatactaatacataccataacagacaaactctgaaaccaytatgctaagtgaaagaaaccagcggcaaaagtctgcatattgtatgattcctttatatgaaatgaccagaacagacaaatctatagagatagaaagttggctgcctagagcttg

SEQ ID NO: 818794 - DNA, 579 bp, Homo sapiens
ggtccagccaaaatagaacttcagatgaccgattttcagcctttctttcctaaaacatgcatttaatgctacagatctcactcattacattgtttgagctttatctcacaagttttaatatgccatattttcagtgtcgtttaatttaaaatatttactaattttcattgaaatgcctttgatccatgggcgacgtagaagtgcactaagttctaaacatttgaggatttgtttacaattatgttgttttttatctttattctggtcagagaacatactctaatttcaagtctttgaaatttcttggaacttgatttttggcctagcatgtggtcagttttgatgcacttgagaataatgtatattctgccaaatctgtcaaaatctttaaaaaatgaaataatgtcaactatgtcatatttgcatctgccccaaattagtacttacctctttagtcatgawgcaaggacctcacaaccttttaacttcatttcacaagcctctgccccccactttctgcttattagtataatgtgttttagttcaacatattttaaaccccacaagtccttattgtga

SEQ ID NO: 818795 - DNA, 567 bp, Homo sapiens
ttggaaagcaaactttccaagagagcacccgggacctgttagcttttgaaacaggcctgggtgtgattgactggtagagatgcctgtgtgatttttggygcattgcaggagtgtggattgggacaggcaccccagcaggaaggaaggctgacaccaaaggggtctcacagggcccagctccccttgcttcccgataattggccaccaggccatggcgactctggggaagcctagatgggaacacccaccttctccagcagtagaaggaatatttcagcagagccatctgggagatgttcttataggaaaactgcagtcattcatttcatagttttgcttatataaatagagtacatttgggaggcagttttgaattcctgttgctactctgcttggtgcggagttgcagtggccccaagtgtctttcagagctgttgcttttaggatccccctcaagctgtgggttagggccagggcagggagggggtgctgcctggcactgtgccctgaagagggctgcttgcttcctttggtcgggagcacgcagagccaacattctggtgggaa

SEQ ID NO: 818796 - DNA, 659 bp, Homo sapiens
agttgggtttatttcactgatttctcctttcctgactttgaaatcctgtggcccttacttcattgtctgggttttctttcaataacttcttccccagggtttattcatgccagcctcccacctgccacttttccagacagaagaaaatatcctaagaaaacatcagctgcatccctgatgcccttctcctgtggctcacctgcgtgattcttggccatgtctccagcaggacaggtttccctggcattcttcctctctgttgtgcctcacctcagcatcttctttcagcatgggattgtttccataacttcactctgagagcatctggaggcatttcgtcaaatcatgaagctgtaccagtctctagggtaacaggttttatagctgaccctcaggttggttctgatgttccatagtaacgatagtgctaaggtttggagcgtccttcatggaaaagaacatctgcttagtttcagctaaaagatgcatgttataacaagttccatagactcttacactcttctccatttactcytaatcatactttggcagtatgcatttggagctgcaatatagatgccctgatgtttaaaaaaagaaaagtagaaggctattttataaaattataggcaatgaagttaactgcagctaaagtggtg

SEQ ID NO: 818797 - DNA, 619 bp, Homo sapiens
tcccagcatggagtttgatctctgagaatggacagactctctcctcacgtgagtccctgacccccatgtagcctaactgggagacacctgccagtaggggccgaytgacacctcatacagccgggtgcccccctgagatgaagcttccagaggaaggatcaggcagcaatatttcctgttctgcagcctctgctggtgatacccaggcaaacagggtctggagtggacctccagcaaactccaacagacctgcagctgagggtcctgactgctagaaggaaaactaacaaacagaaagaaatagcatcaacatcaactaaaaggacatccacaccaaaaccccatctgtaggtcaccatcatcaaagaccaaaggtagataaaaatcacaaagatggggagaaactagagcagaaaaactgaaattctaaagaacagagtgcctcttctcctccaaaggaatgcagctccttgccagcaacagaacaaagctggacagagaatgattttgacgagttgacagaagtaggcttcagaaggttggtaataacaaacttctccgagctaaaggaggatgttctaacccatcaaaaggaagctaaaaaccttgaaaaaagatt

SEQ ID NO: 818798 - DNA, 509 bp, Homo sapiens
ggacttttgaattaagtatgttcaaccgttttaagcagggagcagaaatcaggttttggttttaacaccttgcttggaaatctcctcagctaacaattaatggctgttgctttaagttgtactttccacataactgtaggaaagttatgtggaaagtaacaaagtttctggctatacatacacatgttccttttcctccgttatccaataacattcttcattttctcataagccctcactggcagtgcctttactgtccatgtttctaccaacggtttctgataactaaaaaattctctaggacagtatgtattttctctactgtgctttgcactttgaaacctcactagcaaagtcattatcatccatatttctgtacactatctgtgctagccaaaaaagcagttttagtcatgctcctccaamttttccagcctctacccattacctaattccattgccactttcacattttagatattcgctagagcagcaccccattttatatg

SEQ ID NO: 818799 - DNA, 538 bp, Homo sapiens
tgacatgatctcagctcactgcaacctccacctcccaggtttcaccaattctcctgtcttagcctcctgagtagctcagattacaggcacctgccaccacacctggctaatttttgtacttttagtggagacggggcttcaccacgttgtccaggctggtcttgaactcctgacctcaggtgatccactcgccttggcctcccaaagtgctgggattacaggcatgagccactgcgcccagtctccctgtccacttttaatttatttgttttttaaatatttattcatataagtacgaacttatggattttttttagtacattcttactttctggcactgccaggagctccaggcttgtctttattttccccgcccgagccccaccatcagccagtttactaaggarccctgattcattgtagttgaggatggtattagaagccaagatctgggtgctggctgtgctcattgctaatggatgtcactgcccctagtctctcacaggggatagcactacatttttgaagcacaggaagg

SEQ ID NO: 818800 - DNA, 518 bp, Homo sapiens
acagccctgagaagatggcgttttccctatcagtggctctgaggaagtcaagccttcagtctctacctctcccaccaattcttttggaaacagcaaaccaatgttacacacacttcctaatccagaggaagctagaacacgatttttaaatttatttagtaaaataaaactttttttgcagatgtaacgaatggaaattggttgctggcttctttcatccctgcaacctagcgtttctcagcctcagcacgacggtcgtctggagctgggtcgttcttggtggctggggtggctgtcccctgcaccgtgggatgttgagcagcaacactgaactctaccaactcattgccagtagaccccactcccggtcatgacacacaaaaacatcaccagacattgccaaatgtccactgcggggstgaggggcgtgtaaaagcgcctcccattgagaaccactgctgtaacctgaattagaagatttggaaaagaaatggttgaaaacccagaccaggatccct

SEQ ID NO: 818801 - DNA, 477 bp, Homo sapiens
ggaagggcaagtttgaaaacaaaatttgtgagaaaccctgacttaaatctgctaaatcttatctcagaaaaggcagttgcctcactcaacatgaacacctgaagcagctgagtcaggggaagatacaacttcagaacaggttcctaatacccaggaatctcgttgtgttagaagcagatgtcttgtctttactgtgatttttaaaatatattatttttgttcttatcctaaatacctctgcgtgtgtctgtttccatgattttatcaagagtgacttttcagatttcctgcaagttggcctctctagagtttattagaataactctctaaatattgatcaagtacttactcaagcactaggggttcaacagttctrttccagtggggaatgcagacaataaacctgaacgtgagtgagtaagattttggataatgaaaggtactatgaaaaaagttgaaagcaggtagtgggataga

SEQ ID NO: 818802 - DNA, 570 bp, Homo sapiens
caaagtaaattgaaaactttatggaaaggagtcaccattctagatgccattaagaatatttattattcatgagaggaggtaaaaatatcaatattcacaagagtttggaaraagttgaatgcaactcatggatgactttaaggggttcaagacttcagtggaggaagtaactgctgatgcggtagacatagcaagacaattcaaattagaagtggagcctgaagatgtgactgaattgctgcaacctcatgataaaatttgaatagatgagaagttccttattgtggataagcaaagaaagtgctctctttttttattatttgttatttttgtagagatgggatcttgttatttttcccaggctggtctcaaacttctggcctcaagcaattctcccactcagcctcccaaagtgctggaattacaggtgtgagccactgtgcccagcccagaaaatgctttcttgagatgcagtctactactggtgaacatgctgtgaacattgttgaaataacaacagaggatttggaatagtacataaacttaggtgacaaagcagtggcaaagttt

SEQ ID NO: 818803 - DNA, 626 bp, Homo sapiens
gtaggacaaaaactcaggcaaaggcgctgcggccatagaggtttccagtaagaaaaattgacaccccagatatcctgtaaaattaaccactgagtyattgctgccctcttacatgtatctttccctctccagaggtctaagccccttcagcagggcccaaagtatgaagcaaccagctcctgtatacacttgcaggacgagcctgttttgaactaatttcattgggggttccctgtacggctgctgtaaatcacggagggtcaacaccccagacaatcccacgaggcccccagtaacccagggtgcctttcagctggaaggaacaaaatgccctttcttttccaagctgagtaaactcagtctcatttacttatgaaaacaacagtacagttcctcatgcaaatgcgcccagccaagccaaatcaagattaatttcgggagaaaaagcaatggagaagaccctttaaaatgcacctctgaactacaattaggatccttaaacaacaacttcctagaagagcaaaaataaaagctcagaataaatcaaggacctttcatcaaagggaggttctgggctcaggaggacttagcagttccaccagaggagaagctcaaagtcgtggagg

SEQ ID NO: 818804 - DNA, 614 bp, Homo sapiens
tacttcttccagttgtgacgttaggttgttaatttgagatctttccagctttctgatgtgggtgtttcttgttataaatttccctttaacactgacatagctgtttcccagagattcaactatcttgtctctttgttctcattagtttcaaaaaacttgatttctgccttaattccattatttacccaaaagtcaatcaggaggaggttgattaatttccatgtaattgtatggttttgagcaattttctttgtattgaattctatttctattgtgctgtggtctgagagtgtgactggtatgatttcatttttttaaaattttatgaggattattttatgtctgattatatggtcaagtttggtgtatgtgctatgtggtgatgagaataatgtacaatttgttgtttttggatgaagagttctgcagatgtctattagatccatgtggtcaagtgttgagttcaggtcctgagtacctttgttatttttctgcttggttctgtctaatactttcaatggagtgttgaagcctccaactagtattgtatggrtatctaataaggagcttatttctccttcacctactaagtttatttggctgaatatgaaatt

SEQ ID NO: 818805 - DNA, 637 bp, Homo sapiens
tgagcaaacacttctttcagtatttacagactacttttggcagatgaagaccttctcctgttgatttcctgtgcttattggattatctccaagattgtggccaagtggtgtttgaaccaggtcatgtgactgctgctggttttgcattggaatttgcacttagtgggcctgttaccaggggctctagggagtatgaatcctatatgttttttgagtggactggactgactccaggtctttggtcagcagatctggcactggaataaggatctacttcaaaatctgcagatggttttcctgtttccaggtgatgaacgggtactgcttcttctaggtctctgggagggcttatgctgggtaattctgagaatcctcagacagataataccgaccctagaccatggctggaagggctttgaactgagtccaggactggttcaagtctgtagccatgactgaggcctataagcctgccattggtgtcagaagtggatttgtattctagtggcttcctgggaaagcaggactgttctcagaccatagctgacatgagstggagtcaatttacagggctgttttaagattcacagtggggccaaggtcagtaggcttgcctacagaggcaatgctgagtgaa

SEQ ID NO: 818806 - DNA, 313 bp, Homo sapiens
agaggttttagcaaagtgcatatctacagctgatcgaaatgtgtcatctaaattttaaaaattaagggtaaataaggtttgtgccaatagtgttgcmgggtctttacccatattcccccctttttgttttttgagcatatttttaagagttgaacgggcatgttttactatggcttgtccttgggggttatacgggatgcctgtggaatgttggatattccacatgtgacaaaattgttggaattgtgaattggcataagctgaaccattatcagttttaatttttgtgggccatcatataaatgcaaaagtt

SEQ ID NO: 818807 - DNA, 313 bp, Homo sapiens
agaggttttagcaaagtgcatatctacagctgatcgaaatgtgtcatctaaattttaaaaattaagggtaaataaggtttgtgccaatagtgttgccgggtctttacccatattcccccctttttgttttttgagcatatttttaagagttgaacgggcatgttttactatggcttgtccttgggggttatacgggatgcctgtggaatgttggatattccacatgtgacaaaattgttggaattgtgarttggcataagctgaaccattatcagttttaatttttgtgggccatcatataaatgcaaaagtt

SEQ ID NO: 818808 - DNA, 313 bp, Homo sapiens
agaggttttagcaaagtgcatatctacagctgatcgaaatgtgtcatctaaattttaaaaattaagggtaaataaggtttgtgccaatagtgttgccgggtctttacccatattcccccctttttgttttttgagcatatttttaagagttgaacgggcatgttttactatggcttgtccttgggggttatacgggatgcctgtggaatgttggatattccacatgtgacaaaattgttggaattgtgaattggcataagctraaccattatcagttttaatttttgtgggccatcatataaatgcaaaagtt

SEQ ID NO: 818809 - DNA, 430 bp, Homo sapiens
gaggcccctcctccaacactggggattacatttcaacatgagatctggagggaacaaacayccagattacatcagctatatatccagagcttgctctagcaaggcagtcagctgctgttgcttgagtttggcagagactcacaggcagggacaggaatgggaaagcttcatggcggaaaaaagggaaggaaggtttcaggtgcgccctcattggaggctgtgggatggggaagccgtaggtgggctaaccagaagtgaggaatcctatgtgattggttatgggagcatatttggctttctctaattagtcctaaattggaagcgggtcataggtggcgggggcgggtaggcaaagatgaagcaagctggccatcgttaatcaagtcctgctcatttgggaccagttgctgtaagggtggttgtttggctt

SEQ ID NO: 818810 - DNA, 570 bp, Homo sapiens
ggtgctgcaaagcatgtatgttctgttgatttggggtggagagttctgtagatgtctattaggtccrcttggagttaaagtcctgaatatcttcgttgattttctgtctcattggtctaatattgacagtggggtgttcaagtctcccactattattgtgtgggagtctttgtctctttgtaggtctcttagaacttgctttatgaatctaggtgctcctgtattgggtgcatatatatttatgatgataagctcttcttgttgcactgatccctttaccactatgtaatgcccttctttgtcttttttgatctttgttggtttaaagtctgttttattagagattaggattgcaactcctgctctttttttttttctttccatttgcttggtaaatattcctccctctctttattttgagcctatgtggttttttccatgtgagatgggtctcctgaatacagcacactgatgggtcttgactctttgtccagttttccagtctgtatcttttaattggggtctttagcctgtttacatttaaggttaatattgttatgcatgaatttg

SEQ ID NO: 818811 - DNA, 534 bp, Homo sapiens
gacccgtgacttggccagaggagaatttggaaaaggagattggagcaaatgtaccatatggtataccaaaagycccagactgtcctctctgttcctgctagacctcacgaataacaggggctcctctgagtgcgagtgtactgacctccagagtgcatgacttcactgggcagcctcttcacccatggtcacccttccccagcgcacacctgcagaaaatggctaaccacaccttggactcaggcactgtcctgggttctgccctgtcccctcactggcttgcagaatctttcttattactctgcctttattagctcccttctttgacttcatttgttcatgcatgcactcattcaacatgtatgttttgaaaactccaccaagcgtcatgtgagccattggtgaactagacacctgttctttttctcacttcctttttgctggagctccgtatgccactgtaattatctggaaaatgctgtttcggagctgaatcaatcccaagagttctcttgtctgtgaaaaggtattgaa

SEQ ID NO: 818812 - DNA, 473 bp, Homo sapiens
aatacatagaaaaatatgtccacatagagaaaaaaataatggccaagaatatgaacaaagagtatgttttagtttaggttgatttaaacacaaattggaactaaaacaaatcaaagtagtatgaatayataaaatgatgaggtgggtagtgatcaaagtaaaataatattctaagattcttatactttagaaaagaagatataattatggtttaatgttaagcattattttggcaagtaagagtgttaaaaaatctaatgttaacactaaaaagtagaaataaaatgtacaacataaaaagtagaatgaagaaaatatcaaacagaaggtagaaaagaagaatgaaaaagcaaaaataaaaaagcgataaaatacaacaaaaactagtaattataaagcacataagatgaaaaagaataaattcaaatggatcagtaaccaaaataaatagatattaaataaacttagttcag

SEQ ID NO: 818813 - DNA, 635 bp, Homo sapiens
aaaagccaatatggaatttgacaattttaacatagataggttaatatctaatgtattaaacaaatgaaagcaatactaagacayggaagatttagaaaaaaagataatattacttaatagataattacgaaaccctagccagaacagtcagtgaatcaatattatttcaaacacatggaacatctacaagaattgatcaccaagaaagtcttaataaatactaaggatttaacagcatacaaaccacactgcaacaaaagtagaaataataaaaaaaaactcctaattcccaaaccaaggcttagaaaatttataaatacccctttaaaaatagatggcttaaagaagaaataataaatatacatgtttgacgtggtgagaacaccatatatgttttgtgggatatatctacagcagtacttagaggagtagtcataagcttaaatgcatatatcagaaaataagaaaagtttaaaaagaatgaactaaacttgaaacttaagatgctaagatttttaaatataatattaatttattagaaagaagcttcttctatttgaacagaaattaatgaaacatacatattagttacaataaagatgataacaggcaaaagttgaactgttttacttaga

SEQ ID NO: 818814 - DNA, 635 bp, Homo sapiens
aaaagccaatatggaatttgacaattttaacatagataggttaatatctaatgtattaaacaaatgaaagcaatactaagacacggaagatttagaaaaaaagatmatattacttaatagataattacgaaaccctagccagaacagtcagtgaatcaatattatttcaaacacatggaacatctacaagaattgatcaccaagaaagtcttaataaatactaaggatttaacagcatacaaaccacactgcaacaaaagtagaaataataaaaaaaaactcctaattcccaaaccaaggcttagaaaatttataaatacccctttaaaaatagatggcttaaagaagaaataataaatatacatgtttgacgtggtgagaacaccatatatgttttgtgggatatatctacagcagtacttagaggagtagtcataagcttaaatgcatatatcagaaaataagaaaagtttaaaaagaatgaactaaacttgaaacttaagatgctaagatttttaaatataatattaatttattagaaagaagcttcttctatttgaacagaaattaatgaaacatacatattagttacaataaagatgataacaggcaaaagttgaactgttttacttaga

SEQ ID NO: 818815 - DNA, 530 bp, Homo sapiens
agcctaccaattatatttatagtagcataatgaaactgcctttgcaaaaactgtaactgagaaaattatgatggtaaaagaaatttgacttaaccgtccccatcttgcttctaacctccaagttgtccttgttcattcttgggcataggctgaactaactttgggaggtacttagtttatagttcaactttgagacaaagataataacaactctttgccaaaacaaacctccttcctccctggggactagactgcctttgcaggactaatgaattagccacaagatgagaaattatggtttaggagttatgcagctggaggctgcaagattctaaactcctccaaatggctccttgggataacatcactattgtaaaactgaaaatctgtgcttgagatatttcgcagaccctgcacttgatggatcagctggcaccgcccagatcgctacgagtggctcccacccagcaactgactcagtgcaagaggacagctttgwctccctatgatttcatctccgacccaactaa

SEQ ID NO: 818816 - DNA, 637 bp, Homo sapiens
atgagacattctctgttgtttaaattggtgttttcctagagataatgtgttgcttctggataccttcaagatttttttttatctttagttttcacaagtttaattatgatgtgtctgtcatgaatttctttggctttatcctatttgggattcactctgcttcttgaatctctaggtttatatcttttgccaaatttaggaagtttttagtttttactttttcagtgttgttggggaccagtctctgcctcctctttctggagctccaattatacacatgttagttcttctgttattgttgcccagatcctgagactctgttaatttgttcagtctactttctctctgttgaccaggttgggttgggtaaattctattgatgtttcttcaagttctctaattctatcttatgtcatttctgctctactgttgcatccatccagctggtatttttatgtgttattgtatttttcctttctataattttcatttagttcttcttttataagttctatttctctgccgagagtttcaatttttttttatttgctttaagggaattcawaattgctcattgaagcatctttatgatggctgctttaaagtccttggcagataattctaacatctgattcat

SEQ ID NO: 818817 - DNA, 645 bp, Homo sapiens
caagataagaggtctcgcttcagccgtttcctccttcagggtctggtctgggtctcctgatacccaataccaagtggtccccatctamccctcccctggtcctgaaagctggggctttgtggcaggtaacacaacttgccttgtgttcttcacttgagtgctcttgagtttctgctccccagaaagatcagtttcttgccaatgtcatcacttttagccagcagggacctatcagcggctccatcaggcactgggggccccagccccccttggcttaaagtctgagccctgggaacactggggaaacttaattctcgaacaccttccactcaaagagccactgttctgcagaaccagtgctggcccctgtatttcaacagctttcgggtgggtttcccaccccagacgtcgatagggcctgaaacgcctgtgaatgtattgacctgacttcacccgcaggctcagtttcaaagggttggctgagctctgagcccgccctcattccatctgaggctcagctcctggaaacctcaggctggatctcagttactgggaagccttgctctgaatgtgggttttcactcagtgtttcccgatgagccatttcttgtggcaggacgcccacctcttaggggaaacagcctt

SEQ ID NO: 818818 - DNA, 637 bp, Homo sapiens
tcaggacagacaaacaccaagagggtggccttgggcagcagccagtgaggagaggcaagatggggttaagcttcgcacattgagggctgggcacagtggctcacacctgtaatcccagccctttggggggttgaggcggcggatcacttgaggccaggatttcgagaccagcctggccaacatggtgaaaccctgtttttactaaaagtacaaaaattagccaggcgtggtggtgggtgcctgtaatcccagctactcgggaggctgacaggagaatcgcttgaacccggaaggcggagcttgcaatgagccaagatcgcgtcactgcactccagcctggacgacagagtgagactttgtctttaaaaaaaaaaaaaaaaaaaaaaaaagtttggcgcagccagccttgggggttgctttcagataggagaggtggtgggagccctctcccccggggcagcctctgtctgaggacagtcacaggtgggtgggacagcgggtgaaggggttagtgacagggctcatactggccctgccacaaatcckcagcgtaacttccaacagggtgtttctggccttcattttccccatctggaaaataagggtgtgggggaggggagcctcgggatcccataaa

SEQ ID NO: 818819 - DNA, 487 bp, Homo sapiens
gtcctgggtttggtagagattcaacccaattttatataactaccaatattgtrgtggcccctatagcagttatagtccctaccagtgacatttgtgagggactgtggttaagaaaggacataacataaagttattttatttaattataatgattactgtgcttattacctgccagctactcttctaaatgccagatagattatcgataggtagctatatggatgacaggtgaacaggtatcatggatagatagacacatagatagataggtaggtaaataggttttacttatttaatccttacaaccaccctgataggtaagttatattattttcatcattatacaggtaaagaaagtaaggaccagagggattaagaactttgccaagacaatagctattaaatggtagagtgggaattcaaatccagaaaggctctgaaatctgtgtgcttaactcttacacttatcgtttctcatagtcatcat

SEQ ID NO: 818820 - DNA, 550 bp, Homo sapiens
aattaactaactcacttgccaacatttagacatttgtccggacttttaaaatataaacattatgattaggcactgtattagcttcctaaggtgccataaagaagtatcacaaactaggatgccttaaaataacataactatattctctctcagttcttggagaagtctaaaatcaaggtgttggcagggccatgctccctctgaatcctttgagggagaatcctcctttgcctcttccagcatctgtagcctcacacattccttggtttttgacagtatcaccccagtcttcatctcatatggccatcatcccccatgtctctttgctttttataagaacaccaatcatgatgtgttaaagtcccacctgactctagtatgactccaacttaactaattacatatgtaacaacccaatttccagataagttcgcattctgaggtttcagaaagcacaagaaatttagggggaaactacctaaacttgtacatayaccctgaaccatcatttatagatatgctaacattctcagttttcatgggacaagaa

SEQ ID NO: 818821 - DNA, 627 bp, Homo sapiens
cgatcttttcttctctttttccttcctatctcatatccagctatcgagtcctaaaaattctacttctgcaatgtttcatctgtcagagctatcctttcaaagagcaagytctcctcccattcaaaaagactccgtagtcagttccctactgccttgacgataaaatctaaacttagcatagtatttgggactctccccagcctgtgttctacctacctttccagttcaatccatcttagctccaattgcttgtaaggagagacggaggtacttgtgatttactggcggagtaggtgctctcaggagaaggcaatccaggaaagtagaataaggcaagaaaatgaactaagcaaggatgcagtcttggctgaagtccagcttcagcctaattccacagagggcaccggagcatgaattgcaacgcagagttaattccatcttgaggcaaagggagctgctcatttataacaccacaacagtgtgtcacggaccatgggctaaggatggggggaatttaagctttctgttgagatggctctcatttcagctgagggcagcgctctgaaaaaaaaaagatacagctgtgatcttattagcagccaacagtcattgcagctgggggagagg

SEQ ID NO: 818822 - DNA, 573 bp, Homo sapiens
aacgttctctactggtcttctaaggctgatgtctttatatttcatcttagcgaaaagagcagaaataataataccaaaaagaggggaagaaaaaggaaaagtggaagaaaaaaaagttagacaagatgtaacattataaaaacaaccttaaaatgcccagatataactctaataggagactgaacgaatagactttgtgggaaaaacagtagtaaactttaaagcctctgaaagaattatatgcctaagggaaaaataaacatttgcttccaaaattaaaataaaatgagaatttctgatttttcttgaaaagtaaaaaaaaaaaaaaaaaaaaatctgagagtgtcctggtactgaattcccactaggcgtttattggctgcagaactagctaaatgaactgcgactggcccctttggactaaacagaattttacaactttctacaatctgtacttgraggccccagtctttgctttgtgcaggtccctgtaataagtttggtttgcaacccccagcatggcttataggttcttagccaccaggtactcttttactagctagtcttaagggt

SEQ ID NO: 818823 - DNA, 558 bp, Homo sapiens
cagagctggcatacccaatgagagagtagaaagtaaaccctgatggagattgatgaccctgactagaataaatgaaggtgacactccaaaaatggaatatatttaggtaaatatatagggttcaaattatatatttaactatttagggatgaccctgaagtcatattttttaatataataatttaccagaagacaaataaacttaacatactttcttacagggcaaaaaaaaaaaaggaattattaacaggtctgttttcattttgaagggtttttattcttttattctttttttttttttttttttgaggctaagtctagctcttgtcacacaggctggagtgcaatggtcagatgttggcttgctgcaacctctgcctcccaggttcaagtgattctcctgcctcagcctcttgagtattgggattacaggcacctgccaccacgcccagctaatttttgtatttttagtagagatggggtttcactatgttggccaggctggtctcaaactcctgaactcaagtgakccacccacctgggccttccaaagtgttg

SEQ ID NO: 818824 - DNA, 577 bp, Homo sapiens
cttactttgtcttccaacttacgggcacttagaatcagaataatgttttggcaaagaagccccgtatctaaaatattttctaaactcctaataactacaatgtcagcaacaacaaaaacaaaatggtcttggtttttacattttgaaaaagtttatggaataggaaagtaagtcaggttcaagcaataggaaagtaaatgtaattaatgtgttcaggttttgacagaagatattactgacttaagtttccttcttaattttactttgacatgttattccataagcacattgatggggggcattaatgaaataaactacctactccatcagtattcagcacaagaaccgagttcagggagttgagaaatcctgatcattggtaagaagcttggtatagtggcaggagcatagactaaggatttagaaaatttgggttcaggtccagaactttcttctctccagctcaaagtccttgggctggktatctcattgttttgggccagtatattctcatttatcaaatggtggggcagtaatagatactctcctaagttcacagtcctctgaatttttcttt

SEQ ID NO: 818825 - DNA, 595 bp, Homo sapiens
caggcagggaggagaagagcrtgtagtggggtgagatcatggcatcagaggaaataaaactagcttttcattttttttaacaaattttttgtgtgacttatgaatgccatgagcaggactcactagacataaataagaacaagatgactacattaccatttctttcaggctagtgaggaatgcaaccagtaggcaggaaattgagatacaggtgttgaatgtcatgatgttgtgtggtcagagggatatatgctttagtaatagtatgcaggaggggtttctagcccattgtagggtatccttgaaggcttcatagaaaaagaactttcttaggtaagaggtaagtacacattagccaaatgaggaggaagaatgaaccatgctaaaggcaaagtaacataacatttgaagtttgttattcttttcaaggaaaagaataaacttcaatatgactagagcaaagtggatgtatgaaggagtaggcaaagtgaaagatgagtctagaacattaagcaggaaccaaacccttaaggaccttataaaccatattaaggtcatcagattttgttctacaaaatgttgagaaaatgaacat

SEQ ID NO: 818826 - DNA, 608 bp, Homo sapiens
caacttataaagaccattataaatttctgagttatgactctactatgttaaaataaaataaaaataatgtatctaagaaaaaatgagaatcatagttcttatgtattttcatgggttcattatactatttcaaaatattttaacatttaagtaataaagataattcatgaaggtttgtaactaaaatgaaccacaatttaaaacttaaacaactgggtgggtagttgtgctagtcaccaaaagaagatattccaagaatagatttgcagaaatggagaatgataatttaaagctgaagatgtctatatctagatacagatatatttatatggtaactggaaatatacataagttgaaaataattcttattggagaaatagattcaggagtaataaaaatgtatgagtaacatctttttcacaagagtagaaaatgtaaacacgatatatgtcatacgggatgtgtaagatgagaaacatcactccaayacaagggaaagcacaagtacatggacagatgagagattccagatattagcatttgggccccctctttcatcatgggcacaaatacctctctcacttatggattttccattaagggaaccc

SEQ ID NO: 818827 - DNA, 653 bp, Homo sapiens
tttaggccaaggcgggtggatcmtgaggtcaggagatggagaccattctagctaacatggtgaatccctgtctctactaaaaatacaaaaattagccgggcatggtggtgggcacctgtagtcccagctactcgggaggctgaggcaggagaatggtgtgaacccaggaggtggagcttgcagtgagctgagattgtgccactgcactccagtctgggtgacagcgtgactccgtttcaaacataaaaaaaaaataaataaaataaaatttggaccttgatatggaaataaacataaaaaaataaataaataaaataaaatttggaccttgatatggaaataaaataaaattttcttttatgaaaataatactaattaccttgttgcttttataaataaatggctgtgtacattttcacgactgtttaaaaaatcaataatgtatgattaaacactttatgtatgattaaactttttacatatgattaaactttttacatatgattaaactatgtgtttgaatatataaatagctccttaacatccatataatatgcgttgtagagtcttaggttgatatataatacagcataaagaatacatttaaatcaaatataaattaatacatacatatatagtctgctgtttttgtc

SEQ ID NO: 818828 - DNA, 638 bp, Homo sapiens
gtgccactgcactccagtctgggtgacagcgtgactccgtttcaaacataaaaaaaaaataaataaaataaaatttggaccttgatatggaaataaacatraaaaaataaataaataaaataaaatttggaccttgatatggaaataaaataaaattttcttttatgaaaataatactaattaccttgttgcttttataaataaatggctgtgtacattttcacgactgtttaaaaaatcaataatgtatgattaaacactttatgtatgattaaactttttacatatgattaaactttttacatatgattaaactatgtgtttgaatatataaatagctccttaacatccatataatatgcgttgtagagtcttaggttgatatataatacagcataaagaatacatttaaatcaaatataaattaatacatacatatatagtctgctgtttttgtccattttgataaacggctatgtttaaaatacatggttattaaaaagaattggtgacaattggttattaaaaagttgggtgacaaagttgagaagtgattcagcttttactgagaacctgttacacatctgatccatttctggatgctctacctatattaattaattgaatccttgccgcag

SEQ ID NO: 818829 - DNA, 571 bp, Homo sapiens
catgtcatatgcagtcatataaaaatctttctcatttaaacaraggtccatgtagacattttcaatggaaatgttctgtaaatatggaatataaaagacagacacagaatatgagaatggagcttttttcatggaaggttacttttaaaagtttgatagctagtctttttttccccaatgaaatataagaatataagagggaaattgtagaaaaactaaacataaacccactcaagcatatattctacatataagatgaatatgctacagtggatgacactttgtatctcaaataaagcataatatacaaaataccaaatcacctagtcaacttcaaaattttttcacacattcaagagaacacacacacactcatccacacacaaacacatatacacacacacacacacgaagttgtattattgagccaatacttcactcttagttgcatttactttcagtgtactttctgaactccagattttcctccttaagcctgtctaaaaaattctcaggcaaaatacaaactgcactgtatgcagatgtgttgtaggaagtatccttgtttatt

SEQ ID NO: 818830 - DNA, 619 bp, Homo sapiens
taagaacaagcattgcaggccccagatatttagagactccagtgacrtttgggcttttcctgaactttagtgtgcaatgtcattttaaaaagtattttaggggaaatgataaattatagccagtttcataaaagaggtatacattatatttttaaaagactttatatgaactgaatcatttgactttaagtttgggtgtaaaaagggtatacttcaatttctctcaggccagcttgctccccagtaaatgacaaatatgggtctcgccgcactaagatattttaatatacttcagtgggaaaggctctgatccagaaatttgcagttgtgctattgataaaatttatgagaaactttcttctgtgggcctcagttttcacatctattaaatgtgctgatttaactaaactatctttatttcctttaggctcagacatttcctatttcttttatttctataactgtacttattttcattatgtagataccagatggcaaaatgtcctggtagtgtgtgcaggactcaaactgattctgggaaaatggggcacaagtgaattctaaggtataaggagctgaagtgagcagaagcctctagaatctatttctatttctgtca

SEQ ID NO: 818831 - DNA, 287 bp, Homo sapiens
aagttattttcttaatgcattcatgtatgcactagtgtgtgtatgcctctrtacacccatgcctgtcactctatgacctgttgtcatatctgtacattcatgtaacaatcgccatgtttaagaaatgtagcattgagcctatgtcttaactgatgtatcctgtttcaatctatcttgaagtggccaatcaccctatccccaaagatactgctactcaaagcatggtccctgaaccatctaggaacttattacaaatgcagaaccagagaactcatgcctgatatact

SEQ ID NO: 818832 - DNA, 588 bp, Homo sapiens
gtctccaggttattcagactagtctccatttgtctctgtgtctccacagtttaactagtatcctatactgataatattataagaaacataaaataatrcctgaaatcttatttctttctgttgtggaattacctaggagtttagaaagtgagcccagcattgggctagcatcaaacatttataatgagacttattgactagtgattcagtgtttgcatttgggagatggatagataatagatagaaagatagatagatagatagatagacagacagacagacgtatatttcccctatgaacaggcagtagaggaggatggggaagaggaggaagaagaaggaggacaaggaggagaatggggtgggagaggaggaaagaaaggaccatctcagttcttggctggaattgtcccagttacatccgtggtgtgatgttgttaacttgccttttttaactctcaaaagtatcctgacttgaacaataacttacatggccattctgcctcttggtgtcctttcaataatcccaaactacctcatatagctggagcttgatattcaaagtgtataatccactgtagaatgtgg

SEQ ID NO: 818833 - DNA, 495 bp, Homo sapiens
atgatcgttaactatattttgaagtcttgcatcataatgaatagatgcttttttccttttagaccatggctctcrttggagaatatgttcacatttattttctacacgatgttgttctttttgaaattctcctgtgatttgacatacaacaacatgaacattccatattaaaatttcccatcttctgtgccatgcctcgatgttgttttgggtgtgtggaaatccattcctcacgcactcatatacataccacacatttggcagaaacaatactggtatttgaagggaacgccattatgtaagtgccttcttatcttaccatgcacttaattatttttcaaccattcattaatttgctggcttctccaggcaaatgcagctttaattcattaaaagtttttgtaatgtcatcagctggaagaaatgccaatgcaggcaaatggcaaatttttaaactgaagtttctattgttgctgtatgtcatggccaagccac

SEQ ID NO: 818834 - DNA, 495 bp, Homo sapiens
atgatcgttaactatattttgaagtcttgcatcataatgaatagatgcttttttccttttagaccatggctctcgttggagaatatgttcacatttattttctacacgatgttgttctttttgaaattctcctgtgatttgacatacaacaacatgaacattccatattaaaatttcccatcttctgtgccatgcctcgatgttgttttgggtgtgtggaaatccattcctcacgcactcatatacataccacacatttggcagaaacaatactggtatttgaagggaacgccattatgtaagtgccttcttatcttaccatgcacttaattatttttcaaccattcattaatttgctggcttctccaggcaaatgcagctttaattcattaaaagtttttgtaatgtcatcagctggaagaaatgccaatgcaggcaaatggcaaatttttaaactgaagtttctrttgttgctgtatgtcatggccaagccac

SEQ ID NO: 818835 - DNA, 650 bp, Homo sapiens
ttttggtacctgggtaaaactggccttgtagaattagtttggaagtattcyctcctcctctattttttggaacaatttgatttgagaaggattggtattagttcttctttaaatgtttggtagaattcagcagtgaagccattatgtcccaggcttttcttttccgggggacttcttattgtggctttgatctcattagttgttattaatctgttcaggttttggatttcttcatgattcaatcttggtaggttgtatgtgtctaggaatttatccatttcctctagattttccaagttattgcgatatagttgctcatagtagtcactaatgttccttttagtttctgtggtatcagctttaatgtctcctttaaaataaatctctgattctattcatttggggcttttttctttttttcttcattagcctggcaaaaggtttttcaattttatcttttcaaaaaaccaactttttgtttcattgaacttttgtattgttttcttcatttcaaattcatttatttctgctctggtctttattatttcttttcttctgctaattttaggtttggcttgctcttgcatttctagttctttaagatgaaccgttaggttatttgaaatttttctacttttttgatgtagaag

SEQ ID NO: 818836 - DNA, 616 bp, Homo sapiens
tagcttgttttacttagcattytgtcctgcaggttcacccacgttgtcacaatggcaagatttccttcttttttaaggttaaatagtgttccattgaaaatgccattgtaaaattccaattccacattttctttatccattcacctatgggcagacacttaggttgtttccatgcctttcttgtaaactacctgcatccaagcacttttctctatttgtggggagcccagactaagacactgagcttacatttttctcgacagaattagcagtctttacccctttgggattaaaccatttattcctcagccacttctcatagaaagcatgaaaatatcaaattgtgatttgaaataaataagtagaatttaagtatttattcaatgaaatcttctttatttttgttttgcaaactcataagaaaaagagattttattggataaaaaaaatacaggacctctgaatggtagaccaatacaagattgtcacttgtaaaatgagaaatatgttcatgagtcacacatacccccttgtatgatgctattgcaatacagcaactacaaaacaccaagtaatgtcaatcttgagcctctgtctcaaggctgcttttcattgt

SEQ ID NO: 818837 - DNA, 599 bp, Homo sapiens
caagagcagcacaaaaaatcagcacctggatcaagaagggtgacctcagcaggaagggaatacttcatccacaacagagaaatcctaaagcaaagttcaccttattagaagctctgtgtggaatctatggctagagggtacttggatttttaacagaaaacagaatacatctaaaagcagatggcaagacacaattcccaaatggacaagacagtcaggctacccttttatgtacctgtctctacattcctttcttggccgatgctagagaagaaagcactttggcatcacgttgtaaaagatacaattaaaaatcaaaacagattggcaaagttcggtattttaatgaaaagaatggctcataattgtatcctggtaatagtttctgaaatggaagaaaagtaaaagagcttttttcattgagataaattctttttaggcctgaggcatgtacacgtgctagaaaaaaaaaagtaacctatatgtttctatctacacagagagggaragttgagaagaaaaatgtgtttacctttatttgtcacacgggaatcaaaatgctggcctgggactctcaaatatgttatcaaatatgatct

SEQ ID NO: 818838 - DNA, 618 bp, Homo sapiens
aataaattttctaaagtaacccttgtcttccactagctttataccccaatatatctactagtgactcgtctgcaatgcactgccccagtcagacttcccagtctagttatttcttctcaaatttattgttatttgtctaaaaagtattaaagcgtcttgctttggccattttttcagacttcactctcttgtgagggcttccatgtacatgttaaattaataaaacttctatgctttcctcatgttaacttgtttttgtcaatttcattcccagatccagtcgaagagcccattgaagatctaagaggcatagaagctatggttagtgcctcccttacaagcttaccattaatgcgttacaggtttatcaatagtgttattacttttagaaagacatagttgtaaaagaggtggatctgagcagaaattaatacaggaaatacccattttacttttaatattcaatactaaataacattactacttacaattgtgtttgttttgtaagttttcaaaaactaatattttmagattatggccagaattatcatacagcatttattatatttttcaggaatcatctttatcatattttttgactaaaataatacttttcta

SEQ ID NO: 818839 - DNA, 468 bp, Homo sapiens
tttgagtgcagcacagatttcatgttagcttatgcatggttttgcccaagagaaacactaagaaaccacaacaacccccrccctgcccccgcaacccaccgaccctgcactcagccgagcagagccatgtaggattgtacacaatgcacacaggcatgtacctcaaacatctacccgcttcctcagtacgagccttgcccattctacactttctgtctgatttcagatcattgttgtttcacttcacaaaaactcacaagctgcgacacttcccatattcacaagcaaagttcatgttttactcagggtaaagtttcatgccacatcttctgtggcattgcaagacctgctgaggtgttacagggctgattgtggtgttgtaggatcgtgcagtgtttattgtggtaataaagtgttttgtaattaatcagcaagtacaaaaccatgctgtttaagcttctggttaaa

SEQ ID NO: 818840 - DNA, 652 bp, Homo sapiens
ccaagctcctatgcatttcacagaccagcccattgcctgatgcacaagaaagtttctcctggtaaacaacaatcaagcataaaagctactgcaactgctgcagctggctctaacctgcamgtgtcatctactggactagatgtcaaactacacaacccaatacaaaagctgctaacacaagtaaacagtgcttgggaaccagataagctttaagacctcactaacctggccccacaggagaccaagagcctactcacacacctagtaaaccactactaaaaccacatttagaaagccactgcactaatactgtctataaccaaggaatttatagagtctttgtcaatgaaagcactcagaaaagccaaatgaccctactaaacacacattatagtcacatcctcaagggaaaaaatagtcccatctaaacagcagtaaatgcaaaaataagaagtgatagtttcttcagataagaaactaatgcacaattcttggcatattaaaaaaactcaggtgttatgatacccccaaaggattgtactaactctctagcaatggatcctaaccaaaatgaaaatgtaaaaatgccagataaataatttaaaatattgattttaaagaagctcagtgagatccaagagaaatcataaaa

SEQ ID NO: 818841 - DNA, 467 bp, Homo sapiens
aaaatataagttaaaaagcaaaaacaaaaaacaaaacccaaggtacacaggcaacaaagagaacgatgaatgcaatggtacctcacatctccatcctaacactgaatgtaaacggtccaaacgctccacttaaaagatacagaatgcagaataaaaaactcaccaaccaaccatctgctgccttcaggagactcacctagcacataaagactcacataaagtaaaggggtacaaaaaggcatttcatgcaaatggacaccaaaagcgagcaggggtaactattcttagatcagatgaaacaaacgttaaagcaacagcagttaaggagacaaaaagggacattatataattatataatccttgtccaacaggaaaatatcaaaattctaaacatacatgtgcctaacactgsaggtcctaaattcataaaacaattgctaatagacctaaaaaatgagatagatagc

SEQ ID NO: 818842 - DNA, 586 bp, Homo sapiens
atggagtcatcatgatgatggcatgggcccagaggccagaagtgtttcttacctggcttgtcatagaaaaagtttgctgcaccctagcagtgataataatgaaccataaaatgattaggaaacaatgcattttgataatctatgacttttgttgtttaatatatttgtaagcctatgatttaatttttaaaaacgttgtttaacaactggctcatgaaattcctgaatgatgaaaaatcagctctttcaggctgccatgtgatccagccatccaccactggtatataccccaaagaaaggaaatcagtccatcgaagagatgcctgcactaccatgcttgctgtagctctgctctcaatagctaagattcagaaacaacctaagtgtccatcaacagacaaatggataaagaaaatgtggtacatatacacaatggagtaccattcagccatgaaaaagaatgagattcagtcatttgcaacgacatggatggaactggagaccattctgttaagtgaaataagscaggcacagaaagacaaacagcatgttctcacttatttgtgggatctaaaaaccaaaacaa

SEQ ID NO: 818843 - DNA, 653 bp, Homo sapiens
taaaatgtcaacaaatgcaaagtagatacataattggaattgaattctagtttctgtggaattaatatcattaaatcagatacaaaatgatggggcagggagagagtgggtgactccttctcttaaaggattcttcctgctttcaacataagctggtgattccaatgagtgcatgaggacaaatcaatgtgaagggcccaggaaatgctgactgatccaaacaaagtgaacctggtcattaatgttctcctaaaggtgagatttgagattcaaagaaggtgagacccattgatcagttcagaggagccaagggatattctgatttgaggataaggtggagagagcagattaggctattgatagactgaagaaagagtgaaaaagtagcaggtgtaaaggagggaggcaggagtgagagatgcaataaatttttctaaagtagctgggtcaggaaaatttgaagagctagataaagattacagtagaattcccagggttctatatttttagagggattctgggtaccaggaaaattcaataagaaattctggggttaggacataatttttataaaagatttattaaatatattattcatataccatacaactcayccatttaaggcatatgatcctgtgttttttagtgtattc

SEQ ID NO: 818844 - DNA, 531 bp, Homo sapiens
taaggatgtgtgggcaaaaatacagattttcagctaaaacattttaattcgtatctcagtgtaggtaaggttgaaattaagagttgtacgctaaataacctgaaayggaacttacaagttgggtgctttaagctctatacaccaaaatcaatgaagccatgaaaagaatataaggaagggggcagagaggataactggctggccagcactgtcagcaagcaggatttgccaaagagaaagtcatccaatggcaacacctctctcagagctcactctcttgccttcacttctttgttctgaatgtgtgtcccactgattctcgcattcctacaaacttgcatcctgactgcccaactcccctccatttggcttagctctgccgcagtcaggcaggaagaacgcccactggggcctgctcatttgcttttacagttttataccactgcaacttgctatgcctctctttcccacatctagggcaccctttagataggaatgctgggttcattcctgctgaggtgttactgactg

SEQ ID NO: 818845 - DNA, 590 bp, Homo sapiens
atcattttacatttccatataaaagcgttaaacacaataagaaatgataaagaggatgtcaccactgatcccacagaaatgcaaactaccatcagaggatactataaatacctctgtgcaaattaactagaaaatacagtagaaaaggctaaattcctagacacatacaccctcccaagactaaaccaggaggaagtcaaatctctgaatagaccaattacaagttctgaaattggggcagtaattaatagcctaccaaccaaaaaaaaagaccatgaccagatggattcacagccgaattctaccagaagtacaaagaggagctggtaccattccttctgaaactatcttaaacaattgaaaaggagggactcctccctaattcattttatgaagccagcatcatcctgataccaagacagggaagaagcacaacaaaaagagaaaatttcaggccaatatccrtgatgaacatcgacgcaaaaatcctcaataaaatactggcaaaccgagtccagcagtacatcagaaaatttatctgctatgatcaagtcagcttcatccctgggatgcaagtctggttcaacgta

SEQ ID NO: 818846 - DNA, 590 bp, Homo sapiens
atcattttacatttccatataaaagcgttaaacacaataagaaatgataaagaggatgtcaccactgatcccacagaaatgcaaactaccatcagaggatactataaatacctctgtgcaaattaactagaaaatacagtagaaaaggctaaattcctagacacatacaccctcccaagactaaaccaggaggaagtcaaatctctgaatagaccaattacaagttctgaaattggggcagtaattaatagcctaccaaccaaaaaaaaagaccatgaccagatggattcacagccgaattctaccagaagtacaaagaggagctggtaccattccttctgaaactatcttaaacaattgaaaaggagggactcctccctaattcattttatgaagccagcatcatcctgataccaagacagggaagaagcacaacaaaaagagaaaatttcaggccaatatccatgatgaacatcgacrcaaaaatcctcaataaaatactggcaaaccgagtccagcagtacatcagaaaatttatctgctatgatcaagtcagcttcatccctgggatgcaagtctggttcaacgta

SEQ ID NO: 818847 - DNA, 527 bp, Homo sapiens
ggaaatgatgataaaaagtacttcacagaagaaaagatgatgccattcagatatttaaaatcacttcgtcctaaatttggacacaaccagtgcaaacagaaatataataaagttacatatgtgtcaaatcagtcaacacgctgtcacattaatcttaggtggttgggtagaattaacctgagacatgtctgttgagaatcaacaacaccatacaaaataataaagatggcgcttcagtttactgtctcctgaactagaagagtatctgatgtagttatctggagacataatttatgagatttaaactgtatataacacattgaaggtgaatgcgttgtttgtgatttggggagactgtagataactcattgttcattacgagactgatgggagtattccaaactctaacagtctacctacaaggcagctattattgcyccatttcacagaaacacatctaaagcttagagaggttaggtgacttgatcaagttcatgtggtaagagattgggcttggatccaaaact

SEQ ID NO: 818848 - DNA, 539 bp, Homo sapiens
ttgcttttaaatgtcagctctttttaatctccttcattctggaatagttactcagtttttgcttaattttcaaaattttggcacttttgaaaattatgggccagttattttgcagaatattcctcagtttcagggttttctgtttgggttttgattggattcaagttattaatctgtaacaggtgtatcacaaagatgatgctgtgttctcactgcatcatatccagaggcatacatttatgttcactttaatctcttgattaaggcggcatctacagatttctctgctatgaagttatttttgttcttttttaattaaaataattctaggagaggttatttgaagatatgaaatatcctttcttaattaaacttttagtttattcatttattatttatatcagtattatctcatagatttctactttaagacttaaaatccgccaggcrcgggggctcacgcctgtaatcccagcactttgggaggccgaggcagggggatcacgaggtcaggagatcgagaccgtcctggctaacac

SEQ ID NO: 818849 - DNA, 539 bp, Homo sapiens
ttgcttttaaatgtcagctctttttaatctccttcattctggaatagttactcagtttttgcttaattttcaaaattttggcacttttgaaaattatgggccagttattttgcagaatattcctcagtttcagggttttctgtttgggttttgattggattcaagttattaatctgtaacaggtgtatcacaaagatgatgctgtgttctcactgcatcatatccagaggcatacatttatgttcactttaatctcttgattaaggcggcatctacagatttctctgctatgaagttatttttgttcttttttaattaaaataattctaggagaggttatttgaagatatgaaatatcctttcttaattaaacttttagtttattcatttattatttatatcagtattatctcatagatttctactttaagacttaaaatccgccaggcaygggggctcacgcctgtaatcccagcactttgggaggccgaggcagggggatcacgaggtcaggagatcgagaccgtcctggctaacac

SEQ ID NO: 818850 - DNA, 556 bp, Homo sapiens
ataactaggatctataaggaacttaaaaaaattgacaagcaaataatcccacyaaaaaatggacaaaagacatgaaatgacacttctcaaaagaagacatacaagtggctaacaaacatgaaaaactgctcatcatcactaatcgtcagagaaattcaaatttaaaccacaatgagataccgtctcacaccagttagaatggctattactaaaaaatcaaaaaacaacagatgctggcaaggctgcggagaaaagggaatgtttacacactgttggtgggaatgtaaatttgttcagccaatgtggaaagcagtttggaaatttctcaaaacacttaaatcagagctaccattcaacccaacaatcccactactgggtatatacccaaaggaaactagataattataccaaaaaaacacatgcacctacatgctcattgccatgaaatttcacagtagcaaatacattgaatcaacctaggtgcccatcaatggtggactaaataaagaaaatgtggtacatacacatcatggaatattaaaaagccataaaaaag

SEQ ID NO: 818851 - DNA, 524 bp, Homo sapiens
gcctgtttttttctacattcctacgtatcctttagtctactttttgtcaaattagagataycagtgaaagcctcaagatttggaatactcaccttctttccacaaaatgtctgtcaatgagcaataatggtagtaagttttagaatctgcacacactgtaccaaaattttctaattgcttctgtgggctactgtttttcagtgtaataatatttgctgcttttgaacttttttctttcttgcctttttttttttttggcttttttctactttgtatgtatcttttttaggtgtacaaagggagaatgtgtaacattaagcaccaggagcaccaaatgggaggggtatgtaaactgttgagggcaatggtcactaactattgagtcgggagtagaggactctgtgagaggtacagagtttttgaaagaatttgcaactgcatatggcctccaaaaattgtctgctggctgaataaaaatagcacttattgaattactatatttcaaatgaattcaggtgctattt

SEQ ID NO: 818852 - DNA, 642 bp, Homo sapiens
ggaaatgtgatttgatctagctcagattcaaatataaagaataatcatcacattttacmacaaaggtctgttttgtgaattctttgttcatattattatatgtttacatttgaagataaggcagctgctattggcatttctggggtcagtaaaatggaaagagtgaatgaatgagtgtcaatcttttctaagacaaaatgttcaagtagcttgaatcagtgtattatgaattcttattttccatattaagctaagtggaggtatctatctttctcaggttatgaggtagtcagtgaattgctgtaaggtcaatccaatgttgctagccaattaagatgactgacataacataatgagtcttgattcctggtcatgcagattggttggaggactctccaccctgaatgaaattgccaaggactcagtgataccacaatggctatgatcattaacatttctcaacacctattatgccccaggctctttacatacacgatttgtgatttcgtttcatccttttactactctttgacacatgtactgtatttttcccattttacagtgcagaaatcatagctttaaaagtctaaaaagtttgttaaaggctatacaggacatattctgctgacccagaaaatacaa

SEQ ID NO: 818853 - DNA, 615 bp, Homo sapiens
ccttccaggcagatgacagctgcaaggtagggtacttctcctaagactcatgccaggttgcacattttctggatgtgacagcaacagactaggtcctcagaaaatgaaccatcgagatggactatctacttttgtcaagttaattaatccaaggaaaatcagggggttgtaaatacacacagtcaaatatggaaccccaggttccagtctcctaatattatggtcaaatcagactacagcacaccaatcatttcttttctgttactgtcatgatcaatactaattgtcatgggccaattcaagctcaggacaagctgcacgattagaagcagaaagtgaataaatgatctttgttgcatttcatttgttttacacatacgggggacaggatgtgagttccacgtatttgtcccatgtgcgagccaaccaagctggcccaatggggaacaggacatgggagatttcaaagcagaaggagatggcttctgttccagtattcctttccctcttctgtgactgtcattcccattgcaagtggcaataaaccacaaagaarctcctcttaactatttaagagcttcgtttttatttggtataccacttccataattcacc

SEQ ID NO: 818854 - DNA, 609 bp, Homo sapiens
aaagttataaggaacctccagttaagtacatatgttcctacaaaggaggctggtcagtaamttaaccattttttttttaaacatagaatggaatattattcaggcttaaaaatgaggaaaccttcccattgcaacaatatagaggatattatgctaagtgaaataagccagagacagaaagacaattctgtatatgatctcatttaaatgtggaacctgttaataaaataggcaaactcatagaagctgagagtagaatggtagtggctaggggttgtagggaggaggaaatggagaggtgttgattaaagggtccaagttatgccagatacataagttctggagattcgttacagagcatagggcctctagctaacaaaatggtattatatacttaaactctgctaagagagcagatcttacgtcaagtgttcttaaccaccattctttatgtattcttccatttactttcaacatcttgatcgctatcttgtaaacccttccatggttctagaaaaaattcagagtgactagtgacaagaactaaaactgcatatccagggaaaacattggggcacaccaaggaaatgaaatgcaaaagatataaat

SEQ ID NO: 818855 - DNA, 547 bp, Homo sapiens
ttctaggacacaaatgtagactctgaaataagcaactatgtttacccattcaagccaggtgcggtggctcacrcctgtaattccagcactttgggaggctgaggtgggtgaatcacctgaggtcaggagtttgagaccagcctgactaacatgatgaaaccctgtctctactaaaaatacaaaaattagtcatgcatggtggcctgagcctgtaatcccagctactcaggaggctgagacaggagaatcacttgaacccaggaagaggaggttacagcgagccgagatcgcgccactgcactccagcctaggagacagagccaagactccgtctcaaaaaaaaaaaaaaagtacttccttaacacccactacatgccaagctctgagctatgcaggacatgaggaacatgttggatgagataaggaaaaggtgaattcaacaaacacattttggcatatgggctgggctggcatccaacctcatgatagagtatggtcagtacacaagaataaactggcctaaataaaagatgaacatgacaaagca

SEQ ID NO: 818856 - DNA, 560 bp, Homo sapiens
ggagaaaaaaagaatagtataaaataaaggcaagaaaaaaaatgtggcctatacatttaatggaatattattcagtcttaaaaaagtaaagaagttcatatagatgacccctgaagacatgatgctaagtgaaataaatcagtcacaaaaggacaaatactgtgtgattccacttctttgagatatttagagtaattgagttcctagagacagaaagtagaacggcggttgccagggtctgggaggagggggacattgtttaatgggtatagagttttggttttacaaaatgaaaagaattccggagatggatggtagtgatgggagttgtacaacactatggatgtatttaaaactacttaactgtacacttaaaaatggttaagatgataaattttgttatgtgtagtttaccatagtcaaaaaaatgaaaaaaaaaataaaaamcaatgtaaaatacttagaaatcatgattattggtctaaaatctatgtaagaaagtttactatagcaaagttaaaaaaaaaaaagatgactctagcaacatagcaaccaacttg

SEQ ID NO: 818857 - DNA, 614 bp, Homo sapiens
taattttttataagtctactttaccaggcaatttttcaaggacgtttctaaactacattttaaaagacaaagtcttgttgggcagtgctactgtgatcgaatggaggatgaaatggtttgagtaataccgtcttgtttcttcctagactggcatctgccacaaggggcagcccatctgctccatccttggggaagaactaaatgagtgtcccttggctgagacggctgaatggaagatgccctgacatcagccaccatgtgtgtcctcaaatacatgtctctggtgttatgctacagatgcccacggcatattttgctctttgtctgagttagtggggcaaggttctaccccagggacgtttggcaaaatctggagacgtctttggttgtcatggatgggtgaagggggtgctactaacatctagcaggtagaggccagggatgctattaaacatcctacagtgtacaggacagcctgcacaacagataattatgcaatccaaaaggtcaacagcacaatcgggttgacattaaactcattgtaactcaatagtatgctctctgctgcttaaaacccaccacagcttcccagcwcaatggttaagcctagaggc

SEQ ID NO: 818858 - DNA, 473 bp, Homo sapiens
caaagaacttgaaaccaaggggcatccccctacctggacgtgtgctgcgatcagctggtgcactgaaacggctccagccatccgacagctcctcccgtgcccttggcttctaccactgcctcacatcagggacacctctgtccctcacatgcacgagagagaggagggggtttacactttctgaagccctttgtgcaaagaaaaaatcctaaggagggtagagaggcagaactgacttctgtgctgggcctactatctgcctactaacagttacggttgacaagtatcaagtcttcctgtgccctgggaattgtgctaagggatttgcacgcatcttctcaccaaatgctcctaccagatgagctataatctcagttcatccccatttcacagactgagaaattcagatccaggcrgatgaagcaactgaaggagccatgtatccaatgagagaaaatgaagacaagagccca

SEQ ID NO: 818859 - DNA, 524 bp, Homo sapiens
atcgtaccacataaatatatacaactatgcacttataaaatatttttatttgtcaattaaaaaaaagaactacagaacatcagagctattaaaggaccaaccagtgagctttttagatttgcctaccaccaggctggcagaagcttccgagagtgagaacttacagtgtgccaatgaaaaggaatctgtactctcacaaattgttatgggaaaatcaatcaggagaaatcaattaaaatttagaatccacatatccattgagggggaaaaggaacaaagaaaaaggttatctggcaataatcaattgttcttcactcttaatccagaaggatgtcatagtggtctagaaggacagttgtgttctagccatgagctagcctgtctaaagtaccaagaagtctcctagtttatatcttaatgaaaaaaaaagccacctcttactaagcatcacaactaaaactttcctttacagttaaacatgtycaaattcacttctgtgagttaaggacaagaaagtaagtatc

SEQ ID NO: 818860 - DNA, 616 bp, Homo sapiens
gatctgccacttactcaactatgctactgtgggcaagttactttttaagcttaaagtgatcaaattaacactgccagtaattagacatattggcatctcatatcccctgatatgacacactgataagggcatatcacctctgtgatattattgtcccaaattcataccctttatctaattaagagaaaacataggccaacaaaagtgaagagtgttctacaaaataactaatcaatattttaaaaaagaatcaaggtcatgaaagacaataaaagactatgtaaatgtcacagattggtggagaataaggagacatgacaaattaatgtaggatcttagattagatcctagaacagaaaaagaacataagtgaaaaaaatggtgaagtttgtagttcacttaataggtctgtagtttacttaacagtactttatgaatgctaatttcttcgttttgctaattgtttcaattataagctgttagaagttgagtgaagagatacatgaactctatgtattatttttacaacctttctgtaagtgtaaaattattttaaaataaaatgttaaaaaataggttaaaaggccaaggacrtttggtgggatgggatgatggg

SEQ ID NO: 818861 - DNA, 584 bp, Homo sapiens
ggaaaccctgattatagccgattggtcagaagcacaggtaaaataacctggaatttgcaattggcatcagaatggtggtgggtggaggataaggaggggaagtcttggggactgagacttcaacctgtgggatctgaactacctccaggtagagagtgtcacaattgacttgaattagaggacacccagctggtgtctgctgcagaagtgattgcttgcttggtgtatgggggggaacccctacccctacatttggtcacagaaatcttttgtgttgactgttgagtgacagtataggagaaactgactttgtttttttcctatatcctcaatatcaaataaggaatttgctgaagaaagcttggttttggaatgaagatgaataataatttaaaatacggaaaaagtaatatatttagcaatttgacaaaggctcacggcactcttctttttcagtttaatggaattgtatatatgtgattaagaaaaccaataaagcaaacttctagcattttccyctttaagtgataattaattgtctccttattgagtaattaaattaatctgagtctacagatagatga

SEQ ID NO: 818862 - DNA, 601 bp, Homo sapiens
cagaaactgcagcccagagaggttagttacttgcctaaagttacagtcaataaaaggcaaacccaggtaaccctgatctagaatctgtactgttaatcatatttctactgatagwtcaaaaggcatggacccccctcactgaaccccccattttgttttcttttttacagatcatctcatggaacacactttggcaaatgctgttacagaagttccttcatttatttacttacatttatctatgagccagcattgttctgaaagttctaggcattgccaaaggcaagaaatagaaatgagacattatcatttgaaaggaagcaaaattatttttatctataaactggataattatatacctagaagatgcaaatgaatcaagtctaagagctactagtatttattagtaccagtataaaaatttagaaagatggccagttaaaaatgaaatacataaaagccaatagctagaaaccaccaacaaaatatgatatggaaaaaatccttttcataataccaacaaaaatataaaaacttaatacagactttaatataatccttaatactataaaagattataaagcaaggcagaaagtacatt

SEQ ID NO: 818863 - DNA, 500 bp, Homo sapiens
aagtcactttgcaaaacagcctcgtagtttctcaaaatgttgaccatagcattaccatatgacccaccaactctacccttaggcagatacaccaagagaatcagaaagcttatgttgacataaaaatttatacgtgactatttatagcagtattagtcacaataggcaaaaagtgaaaaccactcaaatgtccattaactgatgaatggccaaacaaactgttgtgtatccatatactggaatacttttttatatgaccattaaaataaattaagtacagatacatagtacgacatggataaatcttgaaaacattattgtaagtgaaaaaagccacacacaaaaggctacatattgtataattccatctatatcaaatgttcaaaataggcaaatccataaaaacagagcagaatagtggttgycagggactggggaaaagggggaaaatggtgaatgactcccggtggatatggggttttgagagagagagataaaaa

SEQ ID NO: 818864 - DNA, 610 bp, Homo sapiens
gccaagatgctggtggtctcttccacgaccagctccctccacgtggcacacttttgtctgcatggctgggcatggggcacctgttcstccgacacactttgagcagctactctgtgcattgaggcaacgtggcacggtgccctggggaaatagcgaggaggcactgcacaggccccacccttctggcattttctgtctcctggggatggtggcagttaaataagtgacagccaattgtcaggagagtttggctctgattcaccaggtggagccaggcactcctgccggaagaggcatgggaactagcataggatgaagggaggcagcgagcaccagcccaggccttgcccccacagggcccttttttcacacctacttgtgcaggcgtcccctgtgagggcagagacacctgcagtgcttgagggagacttcctgcgggcggggtcgtccatccacagcggccaggtgggaggtgcatcagtgtcctgtggctgccataatggaccacagctgtggggcttgaaaaaatggaagcgggttctctcccatgctggaggccagaggtccaaaatcaaggtgtcagcaaggccacactccctagggaggctct

SEQ ID NO: 818865 - DNA, 649 bp, Homo sapiens
cggatttcaagagcactcctccattgggaaggccctgccctcgtctgtccctgcatttcctccacctggacttgcttaggccctcaggactgtcagcccagcccacggacctctccacgtgagctggactcccacctgcacaggtccctgtccgtgggtggccgggtctgggatgctgatggttttctcccatgccccggctccaacgtgtacatcctattccatggagaaagccaccgtccccccagagcgccaggttcctggcagctctgaacgctgctgcctccacgtggcctgcctttctctccccttcctggcctgatgaaattgtacttccactgctggggaagctccctggacactccttgtgtcccagccatcctgctcacggctcggtgagctccagaaagcagagcccgcaggttgtgtccctgggcctggctcccggcacagtctctggcacaatttaggggctaaactgtgtctgcccctggaggagaatgttcttgtacatccccatggacatccccctacctgtcccccagagccaggaccacgtccctgtgyatccagcaccagccatcaccgagatttagatggctcggtgacaaccgcctccccagccacatcctgtttgactcagctgagt

SEQ ID NO: 818866 - DNA, 547 bp, Homo sapiens
ccattaactctttcgtgcacgttggcttccagcaggcatcctcacactccccaaccaggcccgcagggtggaaaggcagccgccgagctcaactcaactcccacccagccgtggaagccagwgtggatggcaaagtacccatgcataaacacacacacgaggctgaggccaagagaacacgcgctcagttctcccttggtcctccagcaacgtctccatgctctagccctgcctcaagccctaaacggtgtaaggtttttccaggtggaggaatggaagcccctaagaagtccgtgctttagggattacacagaggcagggctcaggagcaaaggcctccagatcccgcagtgcggcgctggcaagcttgcgctgctgcattcacactgtcctgggatgaaggcgacatgctgacctccctcaggtggctgcaggacagccaggaggaggtgagatgccagccaaaggcagccacagacaacagcactacggattaccagaaacgccaccctcgtgccaaagcgtccgcctcccctagctgcttcat

SEQ ID NO: 818867 - DNA, 615 bp, Homo sapiens
aagaaacactcacacttgacaaggagcaccatctaggggatttataaggcaaaatttttcttcaagcaaatcctagagctgggagcgttcaatagtgaggactacatgctacctctgccttgggccaggmtggcaggaacctagatcggagacatttagccacatctgacccccaagcccagctctgggcatccatctgacaatttggagcgctgctgagtgcagaaaactgcctttctggcactggagaagggattcctgtttagagagttggggagaaaggaaaatgtctctaagcgtacttctgtgattctggcaaagcaaaaacgtcaagatccatgtttccaagtctccctaaatgaagatatttaattagggtgattaagagttccacattcaagcaattgaatttagtgttttctcttgaattctaacctttcagttttaaaaggatgccactgttggcattatctgactttattttgagattctaatccccacctgtacgaggcagggttccttcattgggactgcgggaattatgcctgccggcagtgagcaggaagacgccttgcacagtgagacccccactcctcagccactctcagcagcagg

SEQ ID NO: 818868 - DNA, 467 bp, Homo sapiens
gtttgagaccagcctgggcaacatggcaaaaacccttctccactaaaaatrcaaaaattagccaggtgtggtagtgcatactgtggtcccagctactcaggaggctgagatggaaggatcacttgagcccaagaggtcaagtctgcagtgagcctttattgcactactgcactccagcctgggtgacagaacaagaccctgcctcaaaaaaaaaaaaaaagattttactcaaaattcccaagagaaggagggcatgccaggccatgggagtgggaggccatcagggttgggtcaggaggcagagggcttccatgtgaaagaagaggcaaggcagggtaagcagcttagggccagccagtttgaataatttcagtgggcctctggggctaggggttggccctagtcatctagtacctggccctggggtaatgaagacaagggaatagcagtccagagtgtgagagcca

SEQ ID NO: 818869 - DNA, 512 bp, Homo sapiens
aaggccccacatgtcaaagcatcagaaacacatgggtaatatgctatggtcgcacagtgcgcttagtggcacagacaggtaggacctgggactctcaacccagttctctcctcactgaagttcgctgcagtccctccagcccagcccagcctcatctgcatcctctaccatcttgcaagctcaaaacattatttcttaaggaacttgctcatttgactctgagaggcttctttctctagtttatcctttaattttctcctcttacagctacttattttctaacaacagaaaatccttttatgcacattatgcacataaagtcaccgtgtccaactgggactcacaccgtaggttactggactttacccactttccaggacttagctaattagcacacgaggccaactgcatraaacgggcaggtgtcagctctgtgttttctctggggctggacaaggtttcttgctgccacaaggggctgtctgtggaggctcagcctgcctgccccatca

SEQ ID NO: 818870 - DNA, 557 bp, Homo sapiens
gaagataaatcccagtttacagccatggaaaacatggaccctctgagcaccacagttgtgggttgtatcagagagccccaagttccaacttctttatgtgacagcttcacccaagttcctggagtctctaggatggtgttggagtgtgtctcacagaggaacacattcaattttagtactgacaaatatttgttcttcgtaaaagattggtatttgaacttaggttctctggtagccaatataagtagaagatttcaacatacctaagggccatggttgaaattaatgagtactcttctttgggaaaaaaaagtcttacaagggaaaaataataaaacactacataaaattctgtttccaaataaatggatcacatgccctggctttactaaatgcctagagaaatatttatttattgaaacacatcaactactctactactgtgaggctggcgttggtctggagaggtgggggcaggaatgcagggcttcagtgtatctcgcakgtcatctggaaccgcctgtcctctatcttccagcactgtccctggccccaca

SEQ ID NO: 818871 - DNA, 566 bp, Homo sapiens
tttctgaacctcttcaatgtggggtgggttttttttgttgttgttgtttttttttttaaataggaaaggcccattgtgactaatgacacacacaggctaattcctcctcacatttcccagcagtatcctctgttgtgtgaaccagttcgttgtcagaaatattcacaacctgagcattttcatcagataaaaaacaacctgtttatgagatgaacttagcaggagtcttcctgtttcagtttcttcctgggactttttttttaaactagataaaaagaatctttaaaatgacgttttaaaagaaattgttagaagataaatctgagctaggcatggtggctcaagcctgtaatcccagctacatgggagggtgaggcaggaagaggatcacttgagcccagaagttgagaacagcccgggcaacatagcaagaccctstcttcccccgtaaaaatattccagtgctccatgtttctttccaccctgtaaagtggttgcaaggagggaacccagaagggactagagatgctactaggggaatatcacacgacacctcccaggagaaa

SEQ ID NO: 818872 - DNA, 655 bp, Homo sapiens
tctcacttcatatatataaaaacttcaaagcaatataattccattcttccattcatcatttgtgttatcatatctttgatttctatacctacattatacactcrccttataatgctagtttttgttttcacaatcagttttcatttaaggaaattacaggaagagggatgcagccttgtatatttacctacctacttaacatttctggtggcttgctttcttttctacagatttgcatctctatctggtatactttcccttcagcttaaaggacagtgtagtgcagaactactagtggcagattctcccagctttttgttatctgaaaatgttttatttatttatttatttatttattttttggagaaagagtctcactctgtcacccaggctagagggcagtggcacggtctctgctcacggcaacctccgtctcccaggttcaagcaattctcctgcttcagcctcccaagtagttgggattactggctaattttttgtatttttagtagagactcggtttcaccatgttggccaggctggtcagaaactcctaacctcagatgatccacccacctcggcctcccaaagtgctgggattacaggcatgagccaccacacccggcctgaaaatgttttatttcttcctcatttt

SEQ ID NO: 818873 - DNA, 629 bp, Homo sapiens
aatataggtcagtgttggggcagcatttyctgatcctgacttggagaaggtgttaaaatcttgacattcccgactcctcctttgtgagagcccgtgccctgcaggtctcacagggttgttgtgagggtcacctgtggtgatgggtttggaagtgatttgtgaatgacacagtgggccttcctattcctgtcattggcctttcaaccttcaatactaattgcctggggatctccaggcctcaaggtctaatcccggaagggtataaggtgtccctagtggagtattctacacctcctgggaggtccctcacttccaccttcacctgacataacccctgctcctgttccctcagcctggagagcttgcccagtagagcacagggtagtactggactgacctctttggaaagggtgattacatcctcatttcagctctccctcttcctagctttccacatagaattccagggctccatgcagcatttgctggacatgagagggaaaacttttagggcagggatctgccctgggtggggacagaggagtatcgtggagtctgggtgtcaggagtgtgagccctgcccagctggccagcccctgtccccatgctgctcgatgcatgatgtttcc

SEQ ID NO: 818874 - DNA, 528 bp, Homo sapiens
aggatcctggtatccacctggggcctggtatccacctagggcttgatattcacctggggcctaagaatccacttgataactgrtgcccatcggggtcctgatgttcaccttgggaccgggtaaccacctgaggcttgatgtctacttagggcataagtgtttatctggggtctagtgttcacatggggcctgatgtcaaccttgagcctaggtattcatcaggggacgagtgtccagctggggccagatgttcacttggggtctggtgtcaacttgaagcatggttgtcaacctaggacctgatgtccagtccagtgtccaccttgggcctgttttctaactggggcctgtgtgtccacatagaccctggtgtcaatttggggccggggtattaacaaggggcctggatattcattggtacattatgtctactggggtctttgtgtcaatctgagctctgatgtccacctagagattgggtatccacctaaggcctggtgtttacatggggcctgtaacacgaggttc

SEQ ID NO: 818875 - DNA, 528 bp, Homo sapiens
aggatcctggtatccacctggggcctggtatccacctagggcttgatattcacctggggcctaagaatccacttgataactgatgcccatcrgggtcctgatgttcaccttgggaccgggtaaccacctgaggcttgatgtctacttagggcataagtgtttatctggggtctagtgttcacatggggcctgatgtcaaccttgagcctaggtattcatcaggggacgagtgtccagctggggccagatgttcacttggggtctggtgtcaacttgaagcatggttgtcaacctaggacctgatgtccagtccagtgtccaccttgggcctgttttctaactggggcctgtgtgtccacatagaccctggtgtcaatttggggccggggtattaacaaggggcctggatattcattggtacattatgtctactggggtctttgtgtcaatctgagctctgatgtccacctagagattgggtatccacctaaggcctggtgtttacatggggcctgtaacacgaggttc

SEQ ID NO: 818876 - DNA, 528 bp, Homo sapiens
aggatcctggtatccacctggggcctggtatccacctagggcttgatattcacctggggcctaagaatccacttgataactgatgcccatcggggtcctgatgttcaccttgggaccgggtaaccacctgaggcytgatgtctacttagggcataagtgtttatctggggtctagtgttcacatggggcctgatgtcaaccttgagcctaggtattcatcaggggacgagtgtccagctggggccagatgttcacttggggtctggtgtcaacttgaagcatggttgtcaacctaggacctgatgtccagtccagtgtccaccttgggcctgttttctaactggggcctgtgtgtccacatagaccctggtgtcaatttggggccggggtattaacaaggggcctggatattcattggtacattatgtctactggggtctttgtgtcaatctgagctctgatgtccacctagagattgggtatccacctaaggcctggtgtttacatggggcctgtaacacgaggttc

SEQ ID NO: 818877 - DNA, 477 bp, Homo sapiens
ctgcaccccagaatctgtatgcctgcacctgcccaaggatttattcatagcttacctaagaatttcaaatttctaccataacactgaataaagtttgactttttgaaacttccatggcttctttcactccctaatattgtagatggtgtttttgaggcgatgttgaaaacctctgatagttgtgtgttttgttgtggttctttctgtgattaaattaccatctgatcaagtgatattgaaaacccttcaggtatggcttttggcttttagaagactttgacctatttttgcttgtgttgactctcccttcagccttgtggaaagagggatcatgtaggtttcatttctctggcagatcagtcaccttttgccatcaaagttttagcatccatttccaaaatttggtgtacaagttgatattttggtgttttyagctaatcttgggtcaaaacagaatgccatagatgaggaagctta

SEQ ID NO: 818878 - DNA, 589 bp, Homo sapiens
catgctaatcacagttacttgggaggctcaggtgggataatcccctgagccctggaggtggaagctgcagtgagctgagattgcatcactacactccagcctggggaaccccagtgagacactgtctctaaaaaaagaaggaaaagaaaaaaaaaaaaatcagccagttgtggtagcatgcacctgtagtcccagctaccaaggaggctgaggtgggaggattgcttgagcccaggaggtggaggatgtggtgagctatgattgcatcactgcactccagcctgggtgacagagtggaaccttgtctcaaactcttatgactcaactacaaaaaagcagcttaggttggtggtctggctcaggatctcttgcaaggttgaaatcataaagaactctttttgggctgggcacggtagctcacacctgtaatcccagcactttgggaggctgaggcaagcagaacacttgaggtcaggagttcgagaccagcctgaccaacccagcaaaaccccgtttttacaaaaaattcaaaacttagccgggtgtggtggygggcacctgtaatcccagttactcgggagactgaggc

SEQ ID NO: 818879 - DNA, 539 bp, Homo sapiens; identical to SEQ ID NO: 817540

SEQ ID NO: 818880 - DNA, 566 bp, Homo sapiens
cttctacaatggaaagaagaccattttaaactgcagcaagaaagccttaacgatttggagaaatgtattctcttagcgtgcagttaatcattttagttactgagggaggttttgaaatctctttccckgcagatatttttttaattggatagattttaattttctagaatgtcatgttagaattctgccctacgagggcaagaaggagggagtgaggatggagattatctcaacaaggtccctcatccagggaccagggcttccaatctttccttctccccccagtcaatttcccttctttctcctttttcttctctctctttctctcatgacattaagttggtttgtgcttacatgagaagcaataaactttgtttctctttgctttatttctcatgaccacatgctttcacctatgtccattctataatgtgccacagattgcaaaatttaatggtaggaacagtgtgtatgtgtatgtaggtgtgtgtatctgtgtagggatgtgtgtgtgggggggtggggtggggaatagtggggtggagctagaaagggagtttcacaat

SEQ ID NO: 818881 - DNA, 630 bp, Homo sapiens
ccgtagactaggaaagttgatctctatggaggaagggaggggctgyaatctccttgccaatagggactttgtcttaccttttttttgaatccctgacaggatctagtctagttcctggcaattagtaagttctcagaacatgaaagaaaaaaaagaatgaggaggggaggagtcctttaaaaaccagagcccttgtacaccctttatccccctttttactccccctccttcccaacaggtccagaccagtgacatttcacatacagagaaagtcccctcctgctctggctcttagtttgcttaaaggaaatagaactgtctgctgttgactcagtacctgttcttcccaggttatttgcatacatcgcctcacataatggtcacaacagccctttgcagtgggcaattccatccccatttcaccgatgagaaagttgaggctcagatgggttaatgactgacccaaggaaagtcaatgtggtgactggtgactggcagggcctttgctgtttccacggagccacatggccaccctgcccttctgcctccacttaatgaggtcacctgggaataaaaccacagtgacagcaaatagcttttgagattggctcccaggaagaggagagatga

SEQ ID NO: 818882 - DNA, 571 bp, Homo sapiens
caagacttggatcctctttcattgggttttattgtgtttatcaagatcaaaagcaaagttatcctcagtaaagtctgtgaakactttctcccatcattctcctggagaaagggcccaaacagaagggactgggtcctgcctctccatgctaccacacctgttgcagggagcagagtgcagagcctgtcccctggacctagatggttggctcaacacatgttggacagggcatgggtcattcgtcattctaattagctccagtgcctgtttccccagcaggcacagagtcaggacaaaatccacatctgccatgtgaacttctgcagaggtgccacttgctgagtagggccaaagtcatgtaattattgtaattatttttgtttatgggatgtcccttcccaggagatcccaggcacttcactgcccagaagttgtcacttgagagcaggacagcattgacccatgctggggctgaaggaagtgatgaagggccctgaccacccatggtgctatgctggctgcccggaagccatggcatgcataagcttctggagaggccactagggggtgt

SEQ ID NO: 818883 - DNA, 579 bp, Homo sapiens
aagggggtaattgaggaaagtttaatgaagggactatttacagaggaggtatagggttaaraaaccaacagggatgatgtggcaccaggatctagcaacccatgaagctgttaccacccctgggtgtgaaggggtaaggggaggaggctgttactagaacttcatgggagctatagtgggtggggctgtcttctgaaggagctagggcctcatgtggagaggtagagacactgtgaagccacagtagcaggaagggaactgggcaataagtaccctaataagatccttgtgtcttcagctgatgcctcctgttggcctaatataatgggaagcaagagggcaaggaaggccagatggtgcattcttcagagcctgccagggccgtgggcagggtggagaagggtgaagagggatctggaagggtaaatggaggcttttgagcgcagttaacttttgggctgaaggaaaatggacatgcaagcaggagggagaatcctagttagactcctcggttttcacaagtcattgtcgatgtcactgtcagtgtagtgggccttcaagctatagggagccactcct

SEQ ID NO: 818884 - DNA, 629 bp, Homo sapiens
ctttatgccactgaattgtgtgtgtgtgtatatatatatatatatatatatatatatatatwttttttttttttttttttttttttttttttttgagacagagtctcgcactgtcgcccacgctggagtgcagtggtgcgatcttggctcactgcagcctccgcctcccaggttcaagcgattctcctgcctcagcctcctgagtagctgggactagaggcgcatgccaccacacccagctaatttttgtatttttggtagagacaaggttttgccatgttggccaggctgctctcgaactcctggcctcaagtgatcctcccacttcagcctcccaaagtgccgggattacaggtgtgagccactgcacccagcctgaattatgcacttaaaaatggttcaaatggtaaattttatgttaggcatattttattacaataagtaccacaaacaaggaggcccttggggctgtcaggcagaacgttctcccatatagattgcttgccgtccccggtcattcttgttttgtatcaaattatatacagtttaatctctcaatagttatgacattgattaaagcccctgatataagaagtacaaatacttaacacccctctcccgaaaatatc

SEQ ID NO: 818885 - DNA, 553 bp, Homo sapiens
cccagattcaagtgatcctctcacttcagcctcctgagtagctgggactacaggagcacgactacacctagttaatttttgttttttaatagagataaagtttcactgtattgcccagactggcttcgaatttcttagctcgagggattttcctggatccacctctgcctccgcctcctaaagtgctgagattatagtcatgagccactacacccagccaagattattattttcttaatttcctttttggatagtttgttgtttatatatatatatatatatatatatatatatatatatatatatatatatatatatatgcatatgaatcaagaagaaatagagagcgtgaatctcgcagtaaaaggaattagtaatctaaattttctttttcacatatattttattattttttattatatttwtatatatctcttctaataaaaaaatgggatacatgtgcagagaacgcacgtttgccgcatatgtatatgtgtggcatgggggtttgctgacctattgacccgccctctaagtttttttccctcacccg

SEQ ID NO: 818886 - DNA, 568 bp, Homo sapiens
cggtttcaacatatcctttcttctcagtgttaacataaatcttaccttgaaagtatttgcagtatttatttaaatgctgaagaaagctctttgtgtaacatgaggaataagcctaagatagtatagtattctccatttttctattagtttttaattttatgtaaaaatatttaccaatcttcggcaccaaaactttatatatatgaaaaatgtaccatgacatactattggaaatgaaaacatttgagccatcacatctcaacagacattttcagagtgaaaatctatgccagagcaagcacagcagcattcccaaataaagtcctttgtggccagtacgtttaatacataaagctccccaaatgattgctttgtgaggggaataagaaacacacatggtacagacaggtccttgctgtatattttagctataactgatagtgcatatgagtcaatgattacagctatgtattattttatatgtctcctgtaattttgccatatatttaattattgctttaaatgaagcaactcaratgcctttctctgttttgcaaagaaagggcct

SEQ ID NO: 818887 - DNA, 577 bp, Homo sapiens
tctgtcacccaggctggagtgcagtggtgatcccaggttcaagcgattctcctgcctcagccacycaagtagctgggactacagtcacacactaccagacccagctaactttttgtatttttggtagagacggggtttcaccatgttgcccaggctgatctcaaactcctgacctcaggagatctgcccgccttggcctcccaaagtgctgggattacaggcttgagccacagtgctctgccttggttttttttttttttaacaaaagtgtgtatagtgcaaaaagtcatttatctgaaggtagcaagcctctctatatttttttctatatagatatatatatatatatagagagagagagagagagatgtgtatatatatatacaagatgtgaaaaaaatgcctgattttcttacccctatcttccctaatgttctcactttctatatttttaaaagtttaaaatgataacgtggaggagtgctgaaagataattgtttaaatttgtcaaaaccaaagaactgtaatgggctcgattctactatcattagctccagtgtattttattatatggcat

SEQ ID NO: 818888 - DNA, 636 bp, Homo sapiens
gacgcatctcccaaaatacacacacataaacacacgcacacattcacctccaagcccatgcacaattatatataatatggtgcctctcccaaaatacatacacataaacacacacacacacacacacacacacacattcacctccaagccccatttctcaaagttaatccctgttaacaattggtataattttctatattctctctatagattttaaagatttttttcactctatgatacatcttagccatctttgaatatgtagatatagttcattttctcatggctatgtagcatttaattgtgtgataaaccttaatttataaaaatgcttctggtaaaagatgagttctttttattttttatggcaggaggtagctattacaaaacattaagtgaatatgcttgtatatactatctttcacacctgtatgaaaaaaaattaggataacattttagaagtgcaatggctaggtcaaaccttcaccacataggtagaacagtttctaaatgaccctgaaaataccgtattactttacactctcatgatctcarcatcaataatggaggatattaatctctccttacttttgtggacattgagtattatcacttaaataaaactttggggcttta

SEQ ID NO: 818889 - DNA, 628 bp, Homo sapiens
atttcatgtggttttaatgtcatgactgaattatgtaattggmgaataaagtgtagaaattttcttttaagaaaaatgaaaaaaatgctgtacatgttggtaatcagggaattctttgggatgaacaaaaagtggaggtgggaaaaaaataatcaagggattttaacataaatttcatgcacttcttgaggacctataactaggttctagatcaataagatggaagtaggtacaggcacgatggctcatgcctgtaatcgcagcaatttgggaggcagaggcaggtggatcacttgaggacaggagttcaagaccagcctggccaacatgttgaaatcctgtctttactaaaaatacaaaaattagccaggcgtggtggtggcgcctgtagtctcagctactcggaaggctgaggcaagggaatagcttgaatctgggaggcggaggttgcagtgagccaagattgtgccattgcactccagcctgggcgacagagtgagactcccatctcaaataaataaataagtaaataagtaaataaataaataaataatggaggtagcatgatcttccccccaaaaaagatgtgcatgccccaatcctgggaacctgtgactatgtgatgtta

SEQ ID NO: 818890 - DNA, 650 bp, Homo sapiens
ccaaaatctctgggatgcaataaaagcagtgttaagaggaaaacttatagtgctaaacacctaygcaaaaagtttgaaagatctcaaattaatgatctaacatcacaccaagaagaactagaaaaataagaacaaacgaatcccaaagctagcagaagaaaagaaataaccagaatcagagcagagctaaacaaaattgagacccaaaaatctatacaaaggatcaacaaagccaaaagcttgttattcaaaaggataaacaagatcaatagaccgttaactagattaacaaagaaaaaagagagaagacacagataagcataatcagaaatgacaaaagtggaattacaaccaatatcacatacaaaagatactcagagactattatgaacacctctacacacacaaactagaaaatttagaggaaatggataaattcctggaaactcaaaactcaagattgaatcaggaaaatattgaaaccatgaacagaccaatatcaaattctgaaaacaaatcagtaacttaaaaaacctaacaaccaaaaaaaaaaaacaaaactggaccagatgaattcacagctgaattctaccagatgtacaaagaagaactggtaccagtcctactgaaactattttaaaaaatcacag

SEQ ID NO: 818891 - DNA, 593 bp, Homo sapiens
atcctcctgcctcaacctcccaagtagctgggactacaggcacacgtcaccatgcccagttttttttattattattatttttggaagagatgggagtcttgctatgttgcccaggctggtctcaaactcctggcctcaagtgatcagcctaccttggcctcccaaagctccaggattacagatgtgagtcaccatgcctggccaagaaaacaaatattcttcaatgacacctctgagccaggcattgctcaaaagtgaacaagataaagtcccagagctcatgaagttaacattctagttggaaagccagtgaactgtaacagatgtgaaactagaatatgcaatatgacataaccccaggtaacagtaagtactaatgataaattaaacagtgtaaagggataaagaaaacagggagggggtgctggagaggccagacggggtcagaggccttttttcatgagagtttgccagaggcttaaatgaaatgaagtgaatttatttgaagatgtggggaaaagcttccagcagagacaccagctgtcatgaagctccagaggtggaaataygctggatctgcatgaggatcagaa

SEQ ID NO: 818892 - DNA, 578 bp, Homo sapiens
aattagggacaatgttatctatcttgtagatagatagaaatctatcttgtagcataatgtggggcagtcatggcctgtgagtacagactaaatgctccgtaaatgaccactgtttttatagagagaaaaatggggaagagagaaatgaaaaggaggcccctgtggagccaagaaagaagtcccagctaatggaaagatgggccccagatacagcaaggccaacttggtgggaaaccggggcaagcccagactcaacctttatttgaacttctgtccaaacatatttacgtcttataacctttggtaacataattgctctagcattctgcaagcctgatgtgcatggacagtggttgctggagtattgatggactctgaaatagcatggcatgggatcttggagggtgagtacccatacagggtagcaatgaagcagaaacacatgtggccaccatratttattggcacctaaaggctgcttcccttgccagctctgtgtcatcacatgaaggaactggtggagtttgaattgctttcttctagtagtatttagtaccatgaggagaagtttcagtcaa

SEQ ID NO: 818893 - DNA, 657 bp, Homo sapiens
aaagaagaactaatatccataatctacaaagaactcaaatagatcagcaagaaaaaaggaaataatccccatcaaaaagtgggcaaaagatatgaatagacaattctcagaagaagatatasaaatggccaacaaacatgaaaaaatgctcaatatcactaattaacaggggaaatgcaaataaaaaacacaatgagatagcaccttactcctgcaaggatggccaaaatttaaaaataaaaaaaattgatgttgacatgaatgtggtgaaagggaacacttttacactactggtgggaatgtaaactcgtacaaccactatggaaaacagcatggagattccttaaagaattaaaagtagatctaccatttgatccagtaatcccactactgggtatttacccagaggaaaagacatcattacaagaaaaagacacttgcacacacatgtttatagagcacaattcacaattgcaaaaatatagaaacagcctaaatgcccatcaaccaatgagtggataaagaaaatgtgatacacacacacacacacacacacacacacacacacacacacacatatatatatatatatatatatatatatatatatatatatatatatatatatattatggaatactactcagccataaaaag

SEQ ID NO: 818894 - DNA, 657 bp, Homo sapiens
aaagaagaactaatatccataatctacaaagaactcaaatagatcagcaagaaaaaaggaaataatccccatcaaaaagtgggcaaaagatatgaatagacaattctcagaagaagatatagaaatggccaacaaacatgaaaaaatgctcaatatcactaattaacaggggaaatgcaaataaaaaacacaatgagatagcaccttactcctgcaaggatggccaaaatttaaaaataaaaaaaattgatgttgacatgaatgtggtgaaagggaacacttttacactactggtgggaatgtaaactcgtacaaccactatggaaaacagcatggagattccttaaagaattaaaagtagatctaccatttgatccagtaatcccactactgggtatttacccagaggaaaagacatcattacaagaaaaagacacttgcacacacatgtttatagagcacaattcacaattgcaaaaatatagaaacagcctaaatgcccatcaaccaatgagtggataaagaaaatgtgatacacacacacacacacacacacacacacacacacacacacayatatatatatatatatatatatatatatatatatatatatatatatatatatattatggaatactactcagccataaaaag

SEQ ID NO: 818895 - DNA, 667 bp, Homo sapiens
atttataataaaattctaatttgtaaatgtaaaaagaattaatgaaatagacaaacccaggaataattgacaaacaccacagtaacacttgtaggcaagaagcatttgatggttgctaaaattagtggacaaagatagatgagaagcatgatatttgcatagtctccaaatatctctacaagatacttatttttttatatggtgtatgccccataatgcccccttttttattattatactttaagttctagggtacatgtgcacaacgtgcaggtttgttacatatgtatacatgtgccatgttggtttgctgcacccatgaactcgtaatttacgttagctatttctcctaatgctatccctcccccagaccccatgccccaacaggcccctgtgtgtgatgttccctgccctgtgtccaagtgatctcattgttcagttcccacctgtgagtgagaacatgtggtgtttggttttctgtccttgtgatagtttgctgagaattatggtttccagcttcatccatgtccctgcaaagaacatgaactcatccttttttatggctgcatagtattccatggtgtatatgtgtcacatttccttaatctagtcyatcactgatggacatttgggttggttcctagtttttgctattgtgaatagtggt

SEQ ID NO: 818896 - DNA, 558 bp, Homo sapiens
aaaaattaaacctaaatcattaatgtgacttttttttaagaaagcatggaaatagaagtgtttgtgggaaagggtttgacaaactgttgactgttstacctgtgacacattagtgaaatgttaaatggaaaagaccataatttatggaggtcgtctgacatgtccatccacagtactgaccattcacatagttgtgaatatggacaagagagagagtgagcactctggcggggtcatctgtattgcctctccagacagggcaagaaggcctgtggttgaagtgcagcaggaggaagttctgccttgggaacccgtgcctgaggaacttcatgggaccaccagaaacagcatgttggagggtattaaggggatcctttctctcgatgatgatttgaaaccagcctttcctggtagcttgcccatcacagttcctctggccttctgtctatggaaaggaaactcggaatgaagggagtcattcaaaagtggaaaaaataagaggccacctgggtcttacgaggatcaggactcttctctggaatgttctacaaatggagc

SEQ ID NO: 818897 - DNA, 469 bp, Homo sapiens
tcaaacaattctaaaaagttgaggagagaagaaattttctctaattcattctacaaagccaaaattaccctgatacaaaaaccagacaaagacacaacaacaaaaaagaaaactacaggctaatatccctgatagacacagacgcaaaaatcctcaacaaaatactaacaaactgaattcaacagcacatcaaaaagataatacaccatgaacaagtggggttcatctcagggatgtaagaatgtctccacatatgtaactcaataaacctgacatattacatcaatagaatgaaggacaaaaactgtatgatcactcaataaatgcagaaaaagcatttgataagattcaacattgcttcatgataaaaaactatcmacaaactaggcatagaaggaaacataccacaaaatataataaaggccatatataacaaacacatagttaacattatactaaatggaaaaga

SEQ ID NO: 818898 - DNA, 469 bp, Homo sapiens
tcaaacaattctaaaaagttgaggagagaagaaattttctctaattcattctacaaagccaaaattaccctgatacaaaaaccagacaaagacacaacaacaaaaaagaaaactacaggctaatatccctgatagacacagacgcaaaaatcctcaacaaaatactaacaaactgaattcaacagcacatcaaaaagataatacaccatgaacaagtggggttcatctcagggatgtaagaatgtctccacatatgtaactcaataaacctgacatattacatcaatagaatgaaggacaaaaactgtatgatcactcaataaatgcagaaaaagcatttgataagattcaacattgcttcatgataaaaaactatcaacaaactargcatagaaggaaacataccacaaaatataataaaggccatatataacaaacacatagttaacattatactaaatggaaaaga

SEQ ID NO: 818899 - DNA, 629 bp, Homo sapiens
aaactagagctaagttatggaaaatgtttcatatcaaaatggatgaaatatacaagccaaagttatggcatctactttcccattccatgcatactttcatagttttcattttggaagattttgaatatgttayaagaaaatccttgggaatttaaactgagtagactactattatagtgtacagtcactcagattactatgttttgttgcgtatgaatgttagggcacaaatggaaaaattcacctgttgctaaaagtggcacattttcagagacctctattgtggtaggctgttctttaataatgaccacagcaattgctcttatcccacatgtccttttgtaatgtggctgtgccattcctcccaccttgggtctatttcccctcattctgagctggtcctgtggtttgctttgaccagcagaatgtggtgacagtgatgctgtgtgttggctgggcccagagcttcagagatcacatggcttctgtttttgccttgagcctccatgtttttgccttgagccccgggtattctgttggagagaggccaatggaggagcactgaggcatacctgccaacagataggaccagggccccaaacatgtaggtgaggcccttttggatcctc

SEQ ID NO: 818900 - DNA, 614 bp, Homo sapiens
attgcgaacaggtatatggaaaggtggccaacmttactgagcatcagagaaatgcaaatcaaaactacaatgctgtgtcatcttacccaagttaaaatggcttttatccaaaagtcaggcaataacaaatgctggtgaggatgtggagaaaagggaccctcatacagggttggagggaatgtaaattaatacaaccactgtggagagaaaagtggacattcctcaaaaaactaaaactagaaataccatatgatccagcaatcccactgctttttggtatatacccccaaaaaaggaaatcggtatattgaagagatatctgcattctcatgtttattgtagcactattcacaatggccaagatttggtggcgacctaagtgtccatcagcagatgaatggataaaggaaatgtggtatgtatacacaatggagtactactattcaaccatgaaaaacaatgagatcctgtcatttgcaacaacgtggatggaactggaggacattatgttaagtgaaataagacaggcacagaaagataaacatcacatggtctcacttatttgagggagctaaaaattaaaacaattgaactcatggagaaagtgagtagaa

SEQ ID NO: 818901 - DNA, 628 bp, Homo sapiens
cctgagacacccaagtacaagacagaggaggaagattgctggaatccccaaagctagtgtcatacccgggactaaaaattagaggccagcttaactcaccactatgcaaatcaccatcctggggtttgattctgaaacacagacacacaaagaattgttgaattaaaggaatgtcggcacagcctgctctggctctctatctctgtatctaagctgagtttttaagcatgtactagaggccaaggcaggtgggtcacgaggtcaggagttggagaccagcctgaccaacacagtgaaaccccatctctactaaaaataaaaaattagccaggcgtggtggcacgtggctgtaaccccagctacttaggaggctgaggcaggagaattgcatgaaaccgggaggcaagggttgcagtgagccaagatcgcaccactgcacttcagcctgggtgacagagcgagattccgtctcaaaaaaaaaaaaaaaagatttggtagcaactcttaataaaattaygtgagtgtttacatagtcaaagtagtccttttgtaagctgcacaaataaatactattccccctaccctgaacctctgctttgaagaaagaacacatgcttagctgtctttt

SEQ ID NO: 818902 - DNA, 565 bp, Homo sapiens
  misc_feature 540, 541, 542, 543, 544, 545, 546, 547, 548, 549, 550, 551,552, 553, 554, 555, 556, 557, 558, 559, 560, 561, 562, 563,564, 565: n = A,T,C or G
acataaattgttaggatcattgtcaattgtgggaaaacctctatcaagctattttcacaggagagctgtaagattttaagatagtttaagtttcttgtgttgcaaccaatgagtctgtcatcagtttmttggggttaagacatctgaggtgaatgccaggtaaaatggcacaatggatgtgtgtggattactacagtccattctaacaccaagacatcaacaaaaaccttttttttcctcctatctaaatgtctggtggagtatttttttatatatatactttcattttttaattttttaaaatactttcaacttttattttagactcaggtgggtacatgtgcaggtttgttacatgggtatattgtgtgacactgaggtttggggtataattgatcctatcacccaggtggtgagcgtagtacccagtaatttttcagtccttatctgcctgcctcctcccctctcttgtagtccacagtgtctgttgcttccatctttatgtcgctgagtactcagtgttcagctccactatacatnnnnnnnnnnnnnnnnnnnnnnnnnn

SEQ ID NO: 818903 - DNA, 526 bp, Homo sapiens
  misc_feature 516, 517, 518, 519, 520, 521, 522, 523, 524, 525, 526: n = A,T,C or G
aattgtgggaaaacctctatcaagctattttcacaggagagctgtaagattttaagatagtttaagtttcttgtgttgcaaccaatgagtctgtcatcagtttattggggttaagacatctgaggtgaatgccaggtaaaatggcacaatggatgtgtgtggattactacagtccattctaacaccaagacatcaacaaaaaccttttttttcctcctatctaaatgtctggtggagtatttttttatatatatactttcattttttaattttttaaaatactttcaacttttattttagactcaggtgggtacatgtgcaggtttgttacatgggtatattgtgtgacactgaggtttggggtataattgatcctatcacccaggtggtgagcgtagtacccagtaatttttcagtccttayctgcctgcctcctcccctctcttgtagtccacagtgtctgttgcttccatctttatgtcgctgagtactcagtgttcagctccactatacatnnnnnnnnnnn

SEQ ID NO: 818904 - DNA, 574 bp, Homo sapiens
aattttaggtaaatattgaacctggttaacctgttagtttggatatttcactttttgctattttcagagaagggtatrggcttacatgtgttaggggctcattctagattcaccccgcctcaacttttaacctcaagtggaccagaaacaaagtcaaggaggtgcccaccagcaagtcaagaaggtgctgctaaccacacccagtgggataaagggttccaggttgacgcaaggctgtgtatgcccagatatgagagcgctgtggagttcaggcatctcacttcctgcactgcttcaaattaaacccctgaatgcaccgttaagtgctacagcagacctcttgctatgtgtgtgtgcatgagacaggagatgctaaggaaatagggaaagacagcctctgtttgttttacacaaatagctaaaaattggacttgacttatgcaattttgtgaatcgccctataaggaaaataccgcaaacctttaatgcacatactgctttttttccggatttgtgcttggtgaaaggggaaaataaaacaaaaccaaaaacaatgaaatctgactacacacca

SEQ ID NO: 818905 - DNA, 484 bp, Homo sapiens
ttagctctttgatgatacctctcttgctatttgtttgggataagacttcgccatttttttcccctcagaaattaagtttgctgttattaagtaagaagtgcaatctgtcactactgatgttccgtatagtaaatctgatggaattcatttgtatttagactgtgtgttttgtacctccatgtgcatatgtccattgtatcaagtctctataatactccattccttctgcatgcatatctggtgtgggagggttatttctactgatttgttatagtagctgattgctttgccagtccctcaacaacgctcagaaatgttgttttggtatttcaagtgacaacatttttgttttctaatataagattgctttttaaaacattttgctaccactttacttggaaaaattagagaagacatgacaattctccaccctatgtaaagagcaaaatggaaytgaacatcatttcattacaaatcctgaaga

SEQ ID NO: 818906 - DNA, 616 bp, Homo sapiens
ttttttaatttaagaaatatggcatgaaagctttctacagagactattccaagtgcaggagataattcactgaaaaaaatgacaaaaacaaaatgttaaaattcttattttataaagtttacattctagtgggtggagggagaaaaatatattattaaaacaaactacaccagaatgtgttaaaaataagaagaaaaataaagcagaaataccagttatgaagtgtcagtaggatataggaaggagaaataagtatggccctgaggtcaaaacattcctagaagttcaaatcaagagctatagagttgggacaaatagagcaagggaaaaatagttagaggtgacttacagaggggatcagagtcaaatcctagaaccttgcagtccactgtaaggacttagcttctgccataagaaagaataagatataaaaggacccagatgaatgaagcctttatggccacagaaaccaggtgggaggagatgccactgtctaggataggtaagattcttggcagaatcacattttggtagatgagtgtcaggggtttgattttggacatgcaacatttgaagtttccttyaaacctttagatagttggttgtctctatctgg

SEQ ID NO: 818907 - DNA, 560 bp, Homo sapiens
  misc_feature 541, 542, 543, 544, 545, 546, 547, 548, 549, 550, 551, 552,553, 554, 555, 556, 557, 558, 559, 560: n = A,T,C or G
gtctcccaagtagctgggactacaggcgcgcactatcacacctggctaatttttgtgtttttagtagagatggggtttcaccatgttgatcaggctgatctcaagctcctggcctcaagtgatccatccaccatggcctcccaatatgctggtattacaggcgtgagccactgcaccaggcctgattgacttttatagccaaatctctgcagagagcagagttgggaattctaggtccatgaggtgcagagtacaaacactagttctgtcctttttgctgctgtgctttaaggatgcgaatgtgaattggaaggataaaatgacttgggatgtaactccacgaaccctatggcagggtatttaggtttgagtttggcattgagtagagagattgtctcctctagaaacatcaaggattatctatgtgagtttcaggtctctgaactgttatctcagtagtgtaccctcctctttggggctggatagagcccayagatgacacagagcctgggtagcaacaaaaagcaagacaatagaggannnnnnnnnnnnnnnnnnnn

SEQ ID NO: 818908 - DNA, 541 bp, Homo sapiens
gtttgaactgctttgttgttgttgttgttgccattgttgttatttgcttaatgggaattctttagcaaaagatctaatcagttattcgtactgattggttaattggaatgcatttaaccaagtgcaaaacatctggtcaatttgactctattatttaagctgccaattttattttaaagaaagaaaactgatagccacacttgcatcattacagccccaaattcctaaatggtttgaattactccctttcctcttttggtgagaatgtctggtagacttagcaaccagcataagtattcaagttcaattatctaaatagaaatggtaccccaaatttgtgtacttcaaactaaaacaaagccagcaaggacaagaaaacatgttgctaaaaatagttgactctgttctgatctctcaaagcagatggaccggaccatggtaagggtggggagagcaacctaggcaacaggcttgctycatgattgctttaatcccagcccagctaacacattacctcagaagaaagagcctctttctctgc

SEQ ID NO: 818909 - DNA, 541 bp, Homo sapiens
gtttgaactgctttgttgttgttgttgttgccattgttgttatttgcttaatgggaattctttagcaaaagatctaatcagttattcgtactgattggttaattggaatgcatttaaccaagtgcaaaacatctggtcaatttgactctattatttaagctgccaattttattttaaagaaagaaaactgatagccacacttgcatcattacagccccaaattcctaaatggtttgaattactccctttcctcttttggtgagaatgtctggtagacttagcaaccagcataagtattcaagttcaattatctaaatagaaatggtaccccaaatttgtgtacttcaaactaaaacaaagccagcaaggacaagaaaacatgttgctaaaaatagttgactctgttctgatctctcaaagcagatggaccggaccatggtaagggtggggagagcaacctaggcaacaggcttgctccatgattgctttaatcccagsccagctaacacattacctcagaagaaagagcctctttctctgc

SEQ ID NO: 818910 - DNA, 536 bp, Homo sapiens
taggcgtgagccaccatgcccagcatttttttttttttttttttgagatggagtctcactctgtcgcccgggctggagtgcagtggcacaatcttggctcactgccacctcyacctcctgggttcaagtgattctcctgcctcagcctcctgagtagctgggattacaggcacccgccactacacccatctaattttttgcatttttagtagagattgggtttcaccatgttggccaggctggtcttgaactcctgacctcatgattcgccctcctcggcctccgaaagtgctgggattacaggtatgagccaccatgcccggccaaactatggctatctacaaaagtgatatatttcacaaacataatgttatacaaagagtacttacaaaacgattccatttatataaagtctaaagaccagtcaaaaattaacatatggtgatccaaattagaatattggctaccttagggtggttattgactgaaaggaggcatgagagagaggcttctggggtgctggcagtgttaatctg

SEQ ID NO: 818911 - DNA, 536 bp, Homo sapiens
taggcgtgagccaccatgcccagcatttttttttttttttttttgagatggagtctcactctgtcgcccgggctggagtgcagtggcacaatcttggctcactgccacctccrcctcctgggttcaagtgattctcctgcctcagcctcctgagtagctgggattacaggcacccgccactacacccatctaattttttgcatttttagtagagattgggtttcaccatgttggccaggctggtcttgaactcctgacctcatgattcgccctcctcggcctccgaaagtgctgggattacaggtatgagccaccatgcccggccaaactatggctatctacaaaagtgatatatttcacaaacataatgttatacaaagagtacttacaaaacgattccatttatataaagtctaaagaccagtcaaaaattaacatatggtgatccaaattagaatattggctaccttagggtggttattgactgaaaggaggcatgagagagaggcttctggggtgctggcagtgttaatctg

SEQ ID NO: 818912 - DNA, 529 bp, Homo sapiens
tgtgtgtgtgtgtgtgtgttgagaacatttaagatctctcttggcaaatttcaagtgtacaatacagtattactaacagtagtcacyacattgtacctcagatctccagaacatattaatcctgtacaactgaacctttttaccctttgaccaacatctccccatttctcccacccctgacagccatcattctaccctctgcttccatgagttcaatgtttttagattccacatataagtgaaatcatacagtactgtctttttgtggctggcttattatacttagcacaatgtcctccaggatcacccatgctgttgcaaatgacaagacttcttccttgtgaccaaataatatttgtgtgtgtgtgtgtgtgtgtgtgtgtatcacatttttttatccattcatctgtctacagacacaggttgactctatatcttgactactgtgaataatgctgcaatgaacataggaatgcagttatctcttagagataccaattttatttcctttggatacatgcccataagt

SEQ ID NO: 818913 - DNA, 631 bp, Homo sapiens
tttgaagctgccaagttttgatgtaatttgttatgcagcartagataactaatatactgtctaaagattatatttgtatgagggatagacagtaagcaaataaatgacataattgaggaaagtagtgagtgttgtgaagaaaacaaagcagcgtatggtaaaggtgtgtggctattttggataggattgtcagaatgtgctttgtttggcctgcacagtatgttttgaggaactttaattccagaccctttagattgggcatgcctccatgtccagatgttgaccagagaggtggcatactgctgtcgttttgagcatggttctggaatcaattgcctgggtttgaatcttgtctccttcacttactagctaggtgatattggtcaagtgatatatttttctgaatttgtttcggcatcttaaaatgcaatgaataatgatatctactcttatggttgttttgaggttaaatgaatttacatatgtaaggtggttagaacatagcactgcagtcttagtaagtttagtaagtgttactgtgttattgctgttaatttcctggataatccaggtacttcctccccaaacttaactgtctttatttgatcagagtttttggttgcaaacagca

SEQ ID NO: 818914 - DNA, 575 bp, Homo sapiens
actgaatctataaattaccttgggcagtatggccgttttcacaatattgattcttcacartgcttgtgatttttgcatgttgattttgtatcctgagactttgctgaagttgcttatcagcttaaggagattttgggctgagatgttggggttttctaaatatacaatcatgtcatctgcaaacagggacaatttgacttcctcttttcctgatagaataccctttatttctttctcctgcctgattgccctggccagaacttccaacactatgttgaataggagtggtgagagagggcatccccgttttgtgccagtttttgaagggaatgcttccagtttttgcccattcagtttgatactggctgtgggtttgtcataaatagctcttattattttgagatatgttccatcaatacctagtttattcagagtttttagcatgaagggctgttgaattttgtcaaaggccttttctgcatctattgagataatcatgtggtttttgtctttggttctgtttatatgctgggttatgtttattgatttgaatatattgaacccttatgggctat

SEQ ID NO: 818915 - DNA, 515 bp, Homo sapiens
aggagaatggcgtgaactcagcaggcagagcttgcagtgagtcaagatcacgccactgcactccagcctgggcgacagcaagactccgtctcaaaagaaaaaaaaaagaaactataacttgtcaaatttaggtataataaaggaaaatatccacaactatctgaaaagtctattaaaattctcctttttttctccctttagcctgtgttagcctgaattttcttcataaacttcaatcaataggacatattgcaacagactaaatatgcatttgagaatcctgctgtcttttatcagttcagacacttaaaatatttgcaaaaataaagcaatgcctaccctattcagtattgttttgctagataggattttctttgcttaaagaacatatttttatattaccatataatgarttttttatttttaaataaataagaaaatatttttaattatcagttttaactttaatatagtaaatattgatggatataatgcatataaacaaaaggtctttc

SEQ ID NO: 818916 - DNA, 604 bp, Homo sapiens
ccgtctgggaactgaggagtgtctctgcccgaccgccaccccttctgggaggtgaggagcgtctctgcccggccgccccatccragaagtgaggagcccctctgcccggcagccgccccatctgggaagtgaggagcccctctgcccggccgccaccccatctgggaggtgtacccaacagctcattgggaacgggccatgatgacgatgttggttttgtcgaatagaaaagggggaaatgtggggaaaagaaagagagatcagattgttactatgtctgtgtagaaagaagtagacatgggagactccattttgttctgtactaagaaaaattcttctgccttgggatgctgttaatctataaccttacccccaaccccatgctctctgaaacgtgctgtgtccactcagggttaaatggattaagggcggtgcaagatgtgctttgttaaacagatgcttgaaggcagcatactccttaagagtcatcaccactccctaatctcaagtacccagggacacaaacactgctgaaggcctcagggtcctctgcctaggaaaaccagagacccttgttcacgtgtgtttatctgctgaccttccc

SEQ ID NO: 818917 - DNA, 633 bp, Homo sapiens
gatggagtcactctgattcaaatgcctctgacatattttcccactcccttttaccagggaacccttaatcctaaggattgcagtgggataaagatccrtcttctataacttcttcagactaaataggggcaatgatattcctgtctaattattagggtctcttgtgtccagggtagagaggagctcagtcacaaagtgtcagtatggtgagacattcataactctgaggcttcccaaagtgttgagattacaggcgtgagccactgtgcctggccagggtcccatttttataccagatcctggatcccaaaagagggaatcagccctcttttgggggatcagccatctcccctgggaatcttatctctcggtggggatggagacatttccataccttctaggtagtcaagagaatgcttcttgtgatccaaaagtgcaaatagccaagtattcacctatatttgcctttagctatccccagaagtatatttcctacctggttattacacaccagatctccctcataatgcaaagtaatttctgatacccccaaaagtcaaaaacatcagataacataatgcaaagccaaacagagccttagattttgcgaaggatctatccacttccagttcc

SEQ ID NO: 818918 - DNA, 636 bp, Homo sapiens
ctattttatttatatgtgtctgtgtttctgagtatgtcctgagttgcacgataatactatatttcttaytgggtaacattgtcagaaaagtttctaaaaactttctctgctgcacttattttatacattttatttatgttaataatctcacatttaacacacttatgatttattctcaacagaaaaaggtggtatttctttcatttagtcttttaaaaagctcacattatcaaatgattgctcaatcatttaatctctttgcttctcttatatgcattgatttaataaatatgtatactagtttctccatcgattctttagatttgaaccttattttccttttattcttacaaaactgacttgtctataggcccacttctacttcctttattctatcatcttcctcaacttattctgtggtcaaagaatggagaaataatattaataatatgtttttctcatcaatgacttccacctgttctctgagaaattcagcttcaagaactttagtttgatatgactgcaaagataatacacagtctaaatcataaaaatgtctcaaaggttttttttttatttgtttctttgaaatatccatgaacaggcatgtttctcccctgtagtgcaatttgtgtg

SEQ ID NO: 818919 - DNA, 618 bp, Homo sapiens
cttgagccccagaaggttgaggctgcagtgagccgagattgcaccattgtactccaacctgggatacagagcaagaccctacctcagraaaaaaaaaaaaaaaaaaaaaaagtagaggtaccagagtgatattttcaatgtcactgacccttcattccccaaatgaaaatcccccaataggtgttcaatttttacgtgtccttcaggagttacttctaagatgaaccactctctaccctaaatgtccctccccaccaccaaaaccagggacctccaggcagacatttttgatggtttgttttctttactagactgtagatacctaaaaggtgatgggtctttcttccctgttttcaggccctactgcatggctttacatattgtggtttttcaaatgatattcatggtgtgaaacaagaaaaaatgcgggtgtttggtttgagaacaacctgttctaaagcaaaaagaaattcatcataacacaaatggatagagataagagtccaaccatcccattgaaggtcaggatggacagtctagataattgagcaagaaatcatcataaactatttttcagaagaatgacatgatgaaagctgtatttccaagtcataatgt

SEQ ID NO: 818920 - DNA, 563 bp, Homo sapiens
tcttcatcttttgataatctgattatgatgtgtctaggtatggatctctttgagtgtatcctacttggaattcattgagctcctaaaatatgtatgcaagttaatgcttttttgccaaacatgggaagctttgagaaattatttctccaaacattctctctccctgtcctctcacttttctccttctaggagtcccattatgcatatattagtatgcttgatggtatcccctgtctctaaggctctatttctttttcttcattctgtcttctttctgtttttcagagtagatcatttcaattgacctatctttgagttcactgattacttctttttgctgctcaaatttgctgttaaagccctctagtaatttttttttcttacagatgagatatcatgctgtcgttcaggctggagtgaccatgatcctcttactgggatcacagatcacgcatgctccagtctgagcagcagcatgagctccagcttgctccagcctgaacagcagcmatacattctttcacacacaaaagggttattggatctcacacaagaaggaattt

SEQ ID NO: 818921 - DNA, 636 bp, Homo sapiens
atcaaaagtgtctttgtgtttcagaaatagtggaatatcaccacagacttacactgcagcctcccctaatgtgcttactgttgtgtggagggcttagtggcagaaaacttgctggataatcaagtaaagaagaaaaagtgtttacaaatttattctgaagatgatattcaaatagttctagctggtatcttaatggttagccatggacaggtttggaaaaaactaggtttaatatatttaatctgtttcatgtagttaataaattgatacaaattttggcaaaagaaatactgccaagaatgtttgtaaaaagtttctttttaatgtcatctttgggaacataaacaatctcaggttctcagttgcttaccaccccactataaaaaggagtacagtgaccagcagtttcttgtggtattataaaatatagagataattttagttttatttgttgaatttcttttttattttacttacacacacacacaaacacacacgcatacacacacctgacccaatataatgggtcatccactttatttatagttgagttgggaacatttagggagatttaccaacataatgyaagcattaatttttggtttggaaagaacaaactgaatgaaataagagtaa

SEQ ID NO: 818922 - DNA, 558 bp, Homo sapiens
tgtcactgggatctgatgtacactgtgtatgtgtggggccattcatgtcagcgcctgggtgtccaccctgccctgatcctgaggkcttaccctaccctctcatctctctaatatcctattcaatatgtcaaaaaagaagttattgtggccaccaactgtgagccctgcacttctggcatctacctatgtaagacctgttgccttggatgtcagagagtagattgcatgaaataagaagcaatgctgtctgcatgtccccacatacagttggacaatcagatttaaatatgggctcaaaataactaggaaaattaagttctcaccaggaagggttccactttattttttaacctttatgtttatcctaggtgctctaaaagttctagctcttcctgtatgtataataaaatgtttacagaaggaggttatgctggttgacaatagaataatttgtctatcatcttgtcctggaactgtagtccagttttaggatcaagctaaaaaataatctagtaaagaatctaaagtagtaaattttattaatatgacaagctgaaa

SEQ ID NO: 818923 - DNA, 645 bp, Homo sapiens
ttattactactcctgaaatcttactgggaagctgctgatcagtttcaggtgttttctatctagtaggagcctgcctttcccgggggctggctgtgaccaattattactactcctgaaatcttaytgggaagctgctgatcagtttcaggtgttttctgtctagtaggagcctgcctttcccgggggccggttgtgaccaattattactactcctgaaatcttactgggaagctgctgatcagtttcaggtgttttctatctattaagagcctgcctttccctggggccggctgcgaccaattattactactcctgaaatcttactgggaagctgctgatcagtttcaggtgttttctatctattaagaggctgcctttccctggggccggctgcgaccaattattactttaccaaaacagttaacaaccgcctgaccatcagctgattgttgcccaacactgctggtgtgtgttgggagtggggcttctctctcttgctctgctcatacatgactagctacctgctgtaacatttctcacctcaagagtccaggacctcaaatctttggatgaaggtctgtcatccaaaatggatgacttctgttttctgtaactgcttcctgctgacagaggggtggtcgtggt

SEQ ID NO: 818924 - DNA, 580 bp, Homo sapiens
cctgctggaggcctggtccctggacttcagatttgcctagtgttaccccacaatcacatactccagttcttcgaaataagcctcttaatatttatcttccattggttctgcttctttgcctgaaccatgcctggtgcacaggggtgtccacggagaacaaactcagccatctcagagcacattcctctcatcactccctcctggttgagatgtctcaagatgtgaaggaactgcattggaatgggacgtgcaaaggagaatgattctgggagagcccctgctgccaaaatgccccctgttcgcaggccagggatgctttgtatcttgggcaagtgtcaggagtctggtggttttataaggtactcaaagttcctgggttctaaacttgaaggggatccttccttccataggtatttgtaggagaaggaggtgtatggtgtatgttttgtttggagtcccaaggaatcttcctgagtttctcagttctctaagaaagtccraacctcagaattttgatttttggcaagctttcttagtttaaatgggcctttgctttagtctagaaataaaatccataatt

SEQ ID NO: 818925 - DNA, 596 bp, Homo sapiens
gtaagcattacttcacccccctcttaaaggtagagatggggtttatttaatgcaggtactgttacaatacaactgatgtgttttgytgtcgttccccctgcttaaagcacttgatgcataactctgtctaccttcattccgtagtaagacagagacgcttggcttcagacattttcctttgggtattaatgtgtaagttgtgctacaacataattttctctttttaaggttgtgttgctttctgccacaatgccaactgatgtgttggaagtgaccaaaaaattcatgagagatccaattcgaattctggtgaaaaaggaagaattgacccttgaaggaatcaaacagttttatattaatgttgagagagaggtaactgtctgattgttagacattattttaccttcttgtataagcactgtgctaaaattgcagacactaggaccatgtcttggtttttgcaataatgctagcagagtacacacaagaagaaaagtaacagcactagattgtaaagactggggtggacctctttcttaatgtccaatgtcctttgtcttaagatttggtgcaatatctcattagacctaacagaa

SEQ ID NO: 818926 - DNA, 670 bp, Homo sapiens
tcttatctatatatattatatatattctattatatgtatcttatctatacatattatatattctattatatatatcttatctctatatattrtatatattctatttatcttatctctatatattatatatattctattatatatcccttccaccaaaaatatattcttttatattaataaaatataaacccagggtccaatggaaaagacttaagggcagacacagagtgggatgtggtttgtgttaggagagggctgaagggacatcatggcaggcatttgtgtgacctcccacaaaacaccctcctccactctgacctcactttgttcttccttccctttgtccttattatttcctttctgcttctctttcttttctgtctccctctgccctgccctagaacggtgcctttctaattgtgggttataacacattattagtaggtcataaaatcaattcagtggatgtggaccagcattttaaaaagggaattaatagaatataaactccttaaaaggcgtcactcatactcaggataatactgctgtgtaaaatttgttttaatatgtgtcagcatgtgtacactgtgtcaagatgtaacacttacatcctattttaagaccctgctgtagactaaaccaggacccccatggtgctccaggcgtcccc

SEQ ID NO: 818927 - DNA, 504 bp, Homo sapiens
gtgtcctccaactttacttaatttgcctactagttctaagagttttctgatggagtccttaagatttttttttaygtaagactaagttatttgcaaatagagaacatttaactgcttcctttctgatgtggatatttttattactttctcttgcctaattgctcttgctagggcttccacactatgtaaagtaggaatggtgactatggacaaccttgttttgttcttaaacttaaaggaaaaacttttagcttttcaccatcaaatataatgttagctgtgggcttgtcatatatggctgttattatattgaggtacatttgctctttacataatttgttgagatctttcttctaatccaggaacaaatcccacttgatcatggtgtatgatctttttaatatgctgttgaatctggtttgctagtgttttgttgaggatttttgcatttatgttaatcagggatactagcttgaaaagtaattttcttttcttgtagtgttc

SEQ ID NO: 818928 - DNA, 504 bp, Homo sapiens
gtgtcctccaactttacttaatttgcctactagttctaagagttttctgatggagtccttaagatttttttttacgtaagactaagttatttgcaaatagagamcatttaactgcttcctttctgatgtggatatttttattactttctcttgcctaattgctcttgctagggcttccacactatgtaaagtaggaatggtgactatggacaaccttgttttgttcttaaacttaaaggaaaaacttttagcttttcaccatcaaatataatgttagctgtgggcttgtcatatatggctgttattatattgaggtacatttgctctttacataatttgttgagatctttcttctaatccaggaacaaatcccacttgatcatggtgtatgatctttttaatatgctgttgaatctggtttgctagtgttttgttgaggatttttgcatttatgttaatcagggatactagcttgaaaagtaattttcttttcttgtagtgttc

SEQ ID NO: 818929 - DNA, 451 bp, Homo sapiens
atatccccagccactccattatgttcacagaggacccatgaaagtagctgtggtgacagcaatggcggttaaatacagamtccctctaaacaaacctttcttaactactgccattggcgaatgtccaatttttcagcaaagagcccaacactgggttcttaatgtgtcacaattaaccttatacttgaaagcaaattgattgtatcagaaccctttaccctacaaagggtactggtttatcattaacaaaacttatctattctggacttgggtttactttggttcctcatggtgccttggcaagcaccatcatctgagagcttatagaaaaactcgtctatcagcatgataacccatacatcttgtttcagaccaagtgagacctgttttatggtaaaagaagtgcaatactgaatgaatggtagtggactttttttggtcttattacata

SEQ ID NO: 818930 - DNA, 482 bp, Homo sapiens
catttatatagatgcttgaaagtttcttcatggcagagtctacagtcagcattaagtgaatttacactaacttatctttcagtctctccttgaaggtatagattttaatccagttcagagatctgttgcatcagcccactacctgagtggccatagttttctattaggttgtgagcagaaatcagcgagataaagagaacaacctgtgccctgcctgaccatcctctgcagttggggttaatgtcggccaggaatcaggcatttgggagaacttctctttttgctggttgcagggagattctggaagaccaccgcaatgtgcccggcatgggaagtacaagcttgttgacattgtgagctgaggcagcagtcactgccatcccactgcaccaycttcacaagaatttctgcctgcagggattggatcacatctgccactagaggagaagtgagatcactgaaagagcagtgtggtacaactg

SEQ ID NO: 818931 - DNA, 576 bp, Homo sapiens
attctttcattggaagacagtttccaaaatgttcataatgcttatctctggtgggtaagattatagattgattttttcctttrtaattttttgtgtgttccaggtgttccacaatgaacatctattccttttgcaatgaggaaatgtcattttttaaaaggcatattccttcaagggtacatataaagtatacttgggctttaataattaattactatttatcaattttagatggcattcttgaagggagaaaaagggcagtaagtttgcctgaaacttacatggttggtaggaaatgtatcagtatctttttaattggttttattataacagactattttctgtcaagttcaaaaagaaaagtaaggcagaccctcaggcataacttggagcaaaggtataaattaaacaaaattctctggcagttgattttacagaattatagtagctggttgggtacttccgtttctttgctgtgaaacaatacaaataaatgtttgcttcagcaactgtgcttctggaagaaatatgtcccttgagacatggggaaaaacaattaaagctataaatatatta

SEQ ID NO: 818932 - DNA, 648 bp, Homo sapiens
taaaggaagctggatagagctgtgacagatgaggaggaataaggcaaaaggatgatcaggaaatagcarcaatagttaagcttctttgtctttaatattgtgacttttttgaaaagtcagactcggaaacaaaaagtagaagggtgattacctggaatttgagaatgagagaaacgggaagatgtggttcaaagggtgtaaatgtggaattgtatgacaagtaagttctggaaatccaatatactgcatgggaactatagttaatatattgaatacttgaaatttgccaagagagtaaatgttaagtattctcactacaaaaaagttaactctgtggggtgatgtaatgttaattaccatgattatggtaatcattttgcaatgtatacatatattaaaacatcactttgtactccttgaataaatacaatttttatttgtcaactatacctaaagcttgacaacaatacattgtgattttttattttataaataattttaggcagggcgcagtggctcacgcctgtaatcttagcactttgggaggccaaggcaggaagatgggagcccagcagttccagaccagcctggataacataggaagaccttgtctccacaaaaataaataaataaataaataaaaaataa

SEQ ID NO: 818933 - DNA, 596 bp, Homo sapiens
tttgattgtattatattaaaaaaaagttctccaacttagtccttttccaaaattgtgttggataatttaggccctttgcattttcatataaaygttagggtgagcttgtcaatttatctaaagcaaatctgctggcattttgactgggattgcattgaatctaaacactacgttgtggagaattgacatcttgataatatccagtctttcaatccatgaacaagatgtgtctatgtatttagccctttaattcctctcagttctgtaatttccagttcatgggtcttgtctttcttttattgaatttttccctgggtgtcacattttttccatgctgttattaaacggtatcgtgttaaaatgttcaatttctggtagtcacttgtatacagaaatacaataggtgtttgtatattgaccttgctaaactcatttattagttccagtagtatttttgttgattccttaggattttctacatagacaattatgtcatctgcaaataaagagagtttcgtgtcttcctttccaatgtgtatgccttttacttattttgctcaccttatctcactgactaggagcaatgttgaatacaa

SEQ ID NO: 818934 - DNA, 672 bp, Homo sapiens
aacggtatcgtgttaaaatgttcaatttctggtagtcacttgtatacagaaatacaataggtgtttgtatattgaccttgctaaactcatttattagttccagtagtatttttgttgattccttaggattttctacatagacaattatgtcatctgcaaataaagagagtttcgtgtcttcctttccaatgtgtatgccttttacttattttgctcaccttatctcactgactaggagcaatgttgaatacaaactgtgagagtggatgtcctagcctcattcctgatcggaaggggaaagcagcctttaccataagcatgatggcacctctgggataacagggtgcccatctagggcatggatggccttgatcgggctggaaaaggtgccttgaattcttggtttgctgaatattaatgatcaggaatggctgttgaattttgtcaaacgatctttctttgtttatttggatgacatatggcttttctgttttggcttgttcataatttggtttgttaaccttgattttaaatgtaaaactaactttgtattcatgggataaagtccacttggtcatgatgtattgcactctctctctctctctctctctmtatatatatatatatatgcacacacacacctatatataaaatataaaactacacacacat

SEQ ID NO: 818935 - DNA, 580 bp, Homo sapiens
gccttggttctcagattgtcgctagctagattgtagtcttctgctgaaatactgtcttagactaccatcaccatrttagtctggtctcactttctattttatctgtttactatgctttttcatattttgttcatgccactatatagtagttaatatattgcattataaatatgaagcaacaataaactgtgcaatgaggttttagcaatcatagttaatatcacaccatatttttattcaaaaagaagcatgatgctgggtagattatgaatatttgtagcattataatctcagattgtaatgatcaattttttgaaaactgaatatctctcaattgtgtaagactcctggctcaatttctttgctatgttataacctttcctctgtgcattagactctttactagactgtggatggataagaaattttaaaaaagcaattttaaattaaggtttaatgtttctgtgctctttgaagtagcagccaccttccccacctctgccttctatagctctccttagcaagaatcctagaagccttccttggacatcctcttgtgtcaagcacatatactcttccc

SEQ ID NO: 818936 - DNA, 628 bp, Homo sapiens
gggaacccgtcattccctctgcaaaacctgttcttgagaagccctttgtccagagcctcagtaggcagctggttcataccaaccaatggtaagcaatgctcatctgttctctcccttaaggcctctctttgtgtraagacccacaagcataagtatctgtggtggggctgtgtcatgagggcaggctcacagtgctctcctctgagttaccactactgaacataatcagggtgtgtaaacttgttttatttggcattaaagccgttacaacaagttataaacatttccagagcttcttactagtggaagcagaggtagtctctcaggcagagtgtggttaggaccgaatgcactctgttgggaaaggcctgtggtaaatgcaacaccttggcacaagaaagttatacttttgttgtagtgtaaaccaaaaataaaattctaagccccccaaccaatagaatgaaccccttctgtcagccaaggacatcctacagtaaatctgaaacactagttcaggccatgataggagtgggaggtcagatgtatctgattacaccttccccctttggaatacaggcactgctgatcagcattaacatcaaaacagagagcttaagacaaaatactc

SEQ ID NO: 818937 - DNA, 617 bp, Homo sapiens
aaaattttactttaacttctggtataatgtgcagaatgttcaggtttattgcataggtatatatgtgccatggtggtttgctgcacctatcaatctgccatccaggttttaagccccgcacccacaatatatttctttgacatattttgaaatggatctgcacagttgtcttttgtggggaaaatctacattctacagagaatcgccatccttttccaggtcattttcctgatccaggagagacttaactaagagtttggcacctttttaagtctgataagagacatttacaatctgttctctctgaagcctgctacgcagaggcttcatctgcataataagaatcttggtctccaaaacccgttatcttaacccagacacttcctcctatcgattccagctctttagataaactatgttaatcaagtgccaatcagaaaatctttgaatccacctaggacctggaagcacagttccctgccccctttgagstgtcctgcctttctagacctaaccaacgtgtaccacaaatgtatcgattaatgtcgtatgtctccctaaaacatgtagattcaaactgtggcccaaccaccttgagcgcatgttctcaggatctc

SEQ ID NO: 818938 - DNA, 617 bp, Homo sapiens
aaaattttactttaacttctggtataatgtgcagaatgttcaggtttattgcataggtatatatgtgccatggtggtttgctgcacctatcaatctgccatccaggttttaagccccgcacccacaatatatttctttgacatattttgaaatggatctgcacagttgtcttttgtggggaaaatctacattctacagagaatcgccatccttttccaggtcattttcctgatccaggagagacttaactaagagtttggcacctttttaagtctgataagagacatttacaatctgttctctctgaagcctgctacgcagaggcttcatctgcataataagaatcttggtctccaaaacccgttatcttaacccagacacttcctcctatcgattccagctctttagataaactatgttaatcaagtgccaatcagaaaatctttgaatccacctaggacctggaagcacagttccctgccccctttgagctgtcctgcctttctagacctaaccaacgtgtaccwcaaatgtatcgattaatgtcgtatgtctccctaaaacatgtagattcaaactgtggcccaaccaccttgagcgcatgttctcaggatctc

SEQ ID NO: 818939 - DNA, 475 bp, Homo sapiens
ggaaaaacactccttaaattgcaaagtgagggcagaatctatttacattgggttgaattaactcctccccttgatgccactaaagcaggaatcacactgcagatggcactgatttgattggcaagagacatgccaggaagaatattaagggaccaggcccctataattaggcctaatcgtagcctgttgtttgaaaagggtatgaaggacattcatcaggcttggcactgtgccctagacctgctctcctgggtagtggggccctccattgcaacagaggtgtgggtgggcctgggagagtgtggcaagaaatgcttaggaggctctacttggccttaaagggctgtgtgaccttgggtaaattgccttctttgaatctctggtcctttccatttcccattctccaggctaagarctgcactctgatacacggttattcccaataataataaccatccaccccgtgcagtggtca

SEQ ID NO: 818940 - DNA, 576 bp, Homo sapiens
ggagtatgctctgggccctcctagggaacactgtggggggtggrttttctggcctctatagtctaaccagtttggcatgcccactgctctggacatcctgattccttccttcaccatttgctgtggcagttcttccaattctacctcacttaacgtgggtcaatacttttccaggcctctaagaggcaacctcttagaggttgtgatgtagtagtatgttggcgccatctcccggggtcctcgtcagggtgtaaattccgtaccgtaaaagaaagttctcccttttccaatttgtattttgtttcctttggttcagcaccctcaagatccagtcccgtacatattcccccagttcctgatggttcacattgaccaggcctacaactacttttttttcttagcaggtttgttttcttagcgggcccagcacttctgtggctgggttatgttctaacttgcccttagcttcgggtctgatggccaagagaggaggcagagctgaatcctgagcagagcacgagttttcttgcaagacacgatcctccacatgatcttcaaataagccggaggctctag

SEQ ID NO: 818941 - DNA, 631 bp, Homo sapiens
gctcactgcagtctcaacctcctgggctgaaacaatcctccctcctcagcctcctgagtagctgggactacaggcatgcaccacaccctgctaattttttttgtattttttttagagatggggttttgcaatgttgcccaggctgaaagatcatatttcttaaagtcattctactaactagtccttccagttattacaaattataaatctgcaataattaaaatggagtcatattgacaagaatagctttcagtgaaatagaatagagagcacagaaagtcacaagattttaaaacaactcaacatataataattaccaatcaacaggaaagaatgaaattgttctatttattgcataaatagcattgtagaaattggcttgctatttggtgataaaataaataataagtcgggtatggtggtgcacgcttgtattcccagctactcggtagctgaggcaggaggatcgcttgagcctaggaattcaaggctgtagtgcaccatgatcacacctgtgaatagtcgctgcagtcyagcctagacaatatagtaagactctgtctctaaagataaataaataaatcccagccgaattagagatccaaatataaaataaaaccaaaaactatat

SEQ ID NO: 818942 - DNA, 586 bp, Homo sapiens
agagaattttatttaaaataaaaactagtgatggcttgcctggaggagcatttgtacttttaggagacttggacgattaaaacccagaactgctacccagmcactggtcaaaaactaccccaaattttgtaatgaccaattttgtccacctctttatgtcttttgtctgaaaacttcacattctcccaaatgagatattacaaaccttcctcaggagggctagaagttttaggaaatacagcacatagcagtttttctgctttcaagagggaagtttctcagtcattcacttccaggctcaattctaggataatttgtgtttcatatcccctcactttatgccacccaggtggcgatagctaatttttaaaaagttggaagacaatctttggttttatcattaagtgtcagaaagagggcatttatggaaagaaatgtttactaacatgcagaaagcagagtcccaagggtccgtgcagacctttgcctcaaatgtaaacgagggaatgaagggaaatgccaccttttagtatgtaggcaagaatgacaggaatgaatgttcagaggagttaagaatttaatgata

SEQ ID NO: 818943 - DNA, 616 bp, Homo sapiens
actctgtctcaaaaaaagaaaaaagagcccgggtgcggtggctcatgcctataatcctagcactttgggaggccgaggcgggtggattgcctgaggtcaggagttygagaccagtctggccaacatggtgaaaccgtcttaactaaaaacataaaaaaaatcagccgagcgtggtggcacacacctgtatccccagctacttgagaggctgaggcaggggaattgcttgaaccatggaggtagaggttgcagtgagccgagatcatgccattgcactccagcctgggtgacagagtgagactccatctcaaaaaaaataaaagaaaaaaggaaacgaatacagttttattagatatttactgggctacgtaatactatggggcacatgatttgaccctagggatataaaaactggctgagaaaagttaatattacaaccagactctactatagcaatgtaatatatgtattgaaggacatgaaaagaattggtaatatcaggaaagaggcttgatataggacggctgatgtgatcaaaccaagttaaaacaaaacaattaaaggcaacgcttttaaagaaaaagaacaaagaaaaccccataaaaacaatacttta

SEQ ID NO: 818944 - DNA, 598 bp, Homo sapiens
aaattctccaaatttggtaaaagatatacacttacaggttcaagaawctcagtgaacccccaaaaagataaactcaaaaaaattccacatccaaacacatcatgatcaaactgctgaaaataataaaggaaattaaaagatacttagaacttaatgccaatacataccaaagtgcatgcaactgagctaaagcagactttagaggtctgctctaaagctgtatttacagcttttactgtattcaccaagaaataagagagtttaaaaaaataaatgagttaaacattccacttaagaaattgtaggctggggcagggtgcagtggctcacacctgtaatcccagcactttgggaggcggagacaggtggattgcttgaacccaggagtttgagaccagccctggcaacatagtgagaccccatctctacaaaaaatttttaagtttgtaaaaataaaagagagatttcaagctgggaacagtggctcatgcctgtaaccccagcaatttgggagactgaggcaggaggatcacttgagggcaggagtttaagaccagcctgggcaatgtagtgagacccccatctctacaaaacaaag

SEQ ID NO: 818945 - DNA, 598 bp, Homo sapiens
aaattctccaaatttggtaaaagatatacacttacaggttcaagaatctcagtgaacccccaaaaagataaactcaaaaaaattccacayccaaacacatcatgatcaaactgctgaaaataataaaggaaattaaaagatacttagaacttaatgccaatacataccaaagtgcatgcaactgagctaaagcagactttagaggtctgctctaaagctgtatttacagcttttactgtattcaccaagaaataagagagtttaaaaaaataaatgagttaaacattccacttaagaaattgtaggctggggcagggtgcagtggctcacacctgtaatcccagcactttgggaggcggagacaggtggattgcttgaacccaggagtttgagaccagccctggcaacatagtgagaccccatctctacaaaaaatttttaagtttgtaaaaataaaagagagatttcaagctgggaacagtggctcatgcctgtaaccccagcaatttgggagactgaggcaggaggatcacttgagggcaggagtttaagaccagcctgggcaatgtagtgagacccccatctctacaaaacaaag

SEQ ID NO: 818946 - DNA, 587 bp, Homo sapiens
gccttgttttgatcctgcgccattcaattgtaaaatcttgcctgattagagtcccatcaggcaaggccagtwccgtctaggtatggccatgttcataccaactctaaggacacaaacattcattttactgattaacagttgaaatacactctcagattcagctgggcttgcacctatggtgtgaagtagatttaatatttaccagtgggaagttaactctcacagaaatataatattgccttttagaactatatatgagacacactcagctattcatggagaagaagcagtaaaggacaccagcatgtattaaatgcctactgtgtgctgggcaattattataggatttcatttaatctgccagcaacactttgagttggagaaccccagagaggtggtagagtgttcgggtgaagcatatggcttctgaagccaaacttcttgcctgcttgaattccagccctgccaattcccagctgtataacctctttctctgcctcggtttcttcctctgtgaagtgaagataataacaccacctacccaggattgtggggaggattacatgacttactacatgaaaagcact

SEQ ID NO: 818947 - DNA, 513 bp, Homo sapiens
gcctgggcgacagagcaagactccatctcaataaagaaaaaggttggcggtggtaactctgaatcactgaggcaggttacaaagtaggtgtcccagcactggggaatgaaaacgcagcatgaactagcagccatctgaggagacagggccaggggagggagacgccatgtttgttgagaggactttgctctgatatacctgagaagaaagggtgagcggaaggctgcaggagaggaacactatccatttacctttcgtagctgattcgtgaaaaaataatgtctgttgcaggctgttcatgtaacaagtcgctccctgattctttaagccgacgtagcctgtgtgcttctttgaatcccacctgaaagatcagttcaaggttgaggggatcttgcagatrccccattgctcctgcagtgtgtgtgaagcaatctgactcaaggtcagccttaaggaaaccgaggccaggaacacttatcacacagcatccttcaatggtcaccgattcccttc

SEQ ID NO: 818948 - DNA, 521 bp, Homo sapiens
caacagacacttaacggagacctgcatgctcacacccaacatgcctcatggtagagtttggttacataattacacttatcacacgcaaggtcagcacaacgtggaaaaagctgaaactcattctttcctgtagacccacacacaagaaggaaccggagtggtgtattcaccaagtttcacctcagacttctaaactcccagagctttttttattttgtgattttggtggttgtttgggagcaagataagattctcagaattaactgtgtctcgtaccttcccacccccaccccaagtagtaaaaggaagccacagagaacggtgccagaaagcaaagcaatcctcccacctccacgcccatctccctctgtacacaatgccacgacctgaacacacgaccgtcaccaagcgggaccagtgctgggggagacacctactgcrcagtaccattcaccagcaccttgccactccaggggttagctcccagccttggaaacactcaaatacacctaacggccttg

SEQ ID NO: 818949 - DNA, 355 bp, Homo sapiens
agccaaccaaccaaccaaccaacacacataaaacctctagaaatatgtgacagtcagtacagaagtatcccagagcatttttccataaaactaataaataatgaattctgtctgacacatttaaaacatcyaggaccagaagcttctacttctagtgaggaataatttaaacatcaacaagtaatgcaggccttatgaaattattgctctgctatacaacaacccaaaaaaggttgtcatggcaacccctgtgctcccaacacctatttgtattgcacagtacttaggggaattaataaggatgagaggagttgggttgagggctcagttttattaaaataaatgaacgcagttg

SEQ ID NO: 818950 - DNA, 552 bp, Homo sapiens
cttgggaaagcttaatggagaaagggggttttgagtatatcagtcctcctattgtcagactttgtaggtatcaacatcctgcctgttggttgaaaagagtccagattcccaggaccctcttggatctactgaatcagcatcttcaggggcagggcccaggaatctgcattcctaacaggcactcccccaacctccccacagggtttctgcaggattctgaagcaggtggctctgcctggacccttcttcttaaggttttatgaggaaaacagtctcatctgccacccccataaaatgtgtttcctgtctcatccgttttagttcttgattaaactcaatttggcatgtcgttatatctgattacttattcatcttcttctttagtctttttctgggggacaattgattacgagctcttggaggaaccatgcccacaggcctcccatccctcccagagcacagtcccaggagagagacacctgcctggccttgccccttgcacccgccgcccatgagtcttggygtcacagggaagttggggaagaggaagaa

SEQ ID NO: 818951 - DNA, 467 bp, Homo sapiens
gggctcttgtcttcattttctctcattggatacatggctccttcagttgcttcatcygcctggatctgaatttctcagtctgtgaaatggggatgaactgagattatagctcatctggtaggagcatttggtgagaagatgcgtgcaaatcccttagcacaattcccagggcacaggaagacttgatacttgtcaaccgtaactgttagtaggcagatagtaggcccagcacagaagtcagttctgcctctctaccctccttaggattttttctttgcacaaagggcttcagaaagtgtaaaccccctcctctctctcgtgcatgtgagggacagaggtgtccctgatgtgaggcagtggtagaagccaagggcacgggaggagctgtcggatggctggagccgtttcagtgcaccagctgatcgcagcacacgtccaggtagggggatgcccttggtttcaagttc

SEQ ID NO: 818952 - DNA, 640 bp, Homo sapiens
aaaatgtagctctaactgataaaaagatcaatgcaatgctattaataattatatcatcttaacagacatcatttgttgagtgatgactcaccaggagtcattattttaaggcctttacatgcaatygctttttaattcttacagcaatcctaggatctgggtactaatattatccccctgggatcttggccaggagggctgggtaatggtctatcgtgttcatgcctctgttctcactgcctggcacagtaactgacaggcaggcagcacacaaaagtctgtgtgggtgaatgggtgactctccaggttccaggaacaaggggtcttaagttacttgacttccccaaggtcacactatagcaagtattagagctgaatgcaaattcacatctggctaaccacagactgcattctagagagtagaaaaaaattagcacacacacacaaaaaccctcacatgttggacatcatgtattcaaaagtaagcaatgcaataagcatatgacatgtttgatctgaatatcctttgcttggtttccacttaaggccactttgctctctggaaataaagaggtggagaaaatggcaattgtcactgtcatccttatggaggttttgggaagaaccagcaagatgactg

SEQ ID NO: 818953 - DNA, 603 bp, Homo sapiens
tcttcctctaactgcccgtttagaaaatgcaattcctttgagtggcaagactcccagttgcttaatagttatcattagtggctgctttcagctcctagggctgcccacagttcttgccacatgatttcttccatattaaaggcagcaatggagaatgtcttgtgagttaaatccccttgtgctggaaatctctgaattcctctatttctgacctctagaactaagatttaaatgtttatgtgataggtcaggcccaaaaggataacctctctatcttaaggtcacctgatttgggaccttaataacatttcctttccagaagtggttggattcatgtttgatttaatatttggaacgaggagcctatacaacaattctggaaatctttaaagctgtcttacaattttttataccatatgacactttatagaaaacgcttgctgagtctggtctgaatcctggtgtgtaattcagackcatgtctcaccatgagccgcttggttcgtgggccccagccacactgactttgtatagctctcacactaaacaagctatcttctaccatgatccttcttaaatgccaatttcactacataaaacttt

SEQ ID NO: 818954 - DNA, 635 bp, Homo sapiens
tggatgggccaaagaggaaagggagaacactcgatgataggaagaaagggttcagagtagttatgaatatgggaatggatgagccttatgtaaagasaatggttacgatttgattgcaacaggaagtctacattaataaataaaaataatttggatcaagaataaactgaatttcatcatcttatcagaaaagagcaacagaatgggaattggagagtcagagactcagggtgaactcacattcataacttaccgataatgagcctcccagagaggttccttatagaagctcttccaactgtagcaatgtgatcaaggtaaatacttttgtcattcacacacagggagaaaatactgaatctattaagagaataaattagttatgaagacagattatgtgcatcatatgacaaagtatccatatggagcgcactacatcagaactcgggtagaactttaaacatgtgaatgatagaagataaaagtataacattctttaattttcaaccgtttcaatgggctgggagatcaaactttaggcattttatgtctaaactgagtgcagaaataggaggattcagaaagtgtactgaagttgatagctgaggacctgaatgaaaaaaatacctcaactt

SEQ ID NO: 818955 - DNA, 571 bp, Homo sapiens
actggaggagggagctagggacactccctgcccaggtcttcatgaagctccaaggtgagaatcactgccagatgatttctgaccatcttgttcttttaggagctaagctctacctctcatttgtrtggttctggactcatgcaacccttacaaatccagggaggatgaattttccatcagagtcataaaagacttcaggcaggaaggacctaggggattggcaagacagtccttacccatggagctccactagcagaaggaaagtctactcatgtctgattctacaatcctgtctgccttaaggtgattcacaaattgttagcagtggatgggtggagaattcaagggtttctgcttgtgtttttaccaccctccattctggctaaatatagttgagcttctgtgatagtaatacatctaaataccagatttttctgctattactgtgcccaggatcaacccatcattaccctatccttggccctaactgtgcagacaccaggtctgccagggtccttcctcactttggaatttaaaccacagtaattgtttcttatttatttttccttgc

SEQ ID NO: 818956 - DNA, 586 bp, Homo sapiens
gttttatttatgtatttatgtatttatttattttttatttgagttggagtctcactctgttgcccaggccatagtgcagtggcttaatctgggctcactgcaacctctgcctcgcaggttcaagtaattctcatgcctcagcctaccaagtagctgagattacaggcacccaccaccatgcctggctaatttttgtaattttagtagagatggagtttcaccatgttggccaggctagtctcgaagtcctgacttcaagtgatctgcccaccttggcctcccaaagtgctgggattagaggtgtgagccactgcgcctggtgtaattgttttatttctaatttatagtggaggacactgagtcacaacaggtcaagtcacctgctctgagcctcgtggctgagaagcggtcgggccagggccgcagctcccgaccactgtgcttgattgcttgtgttttgagagacagctctgacctcgctaccaaagagtcatgagaagagttatsctggtagaggggagggggcggttcattttacaagaggaagatctttctccataccctgtccaacaagacagcataagcc

SEQ ID NO: 818957 - DNA, 620 bp, Homo sapiens
ttaaatatctgagttggagaataaagcctggacttttgctattcagtctgtattccttgcagaaggaaattcagtgtctcatgggccttgtaagctgacgttttatatattcttattttattkcagtaatagtgtctaatgaaataaccaaacatgctataaacccttatggaagttcacccaaatcttgaaactgctcaaattaaaaaatttctctgttcattttctgggctttatcagtaatgaacatctctttgcacttgaaaaaatccttgaggcgctctccgtgtaggcaccacaaaagggagctaatgaaaagcgagtccacaccgtctgataagcccagaggctctccaggtactggtaggatttctgttgtgctcatctgaaaacagtatcttatttcatccttcctcattttctccataagtagttttttatctttgtactaattttatccaagagaagtttttagaagaggtcattcatttgttcagaaattggcaagaagggtttgggagaggttcagggagcattttacttagaatgagctgaagcaaagtaatggtacaacttacattcctgtcttcttagaatgtggatacttctccattgcacta

SEQ ID NO: 818958 - DNA, 572 bp, Homo sapiens
ccagttagaatggcgatcatttaaaagtcaggaaacaacagatgttggaaaggatatggagaaatagggacacttttacactgttggtgggagtgtaaattagttcaaccattgtggaagacagtgtggcgattcctcaaggatctagaactagaaataccacttgactcagcaatcccattactgggtatatacccaaaagattataaatcattttactataaacacacatgcacacgtatgtttattgtggcactattcacaatagcaaagacttggaaccaacccaaatgtccatcaatgataaactggataaagaaaatgtggcacatatacaccatggaatattatgcagccataaaaaaggatgagttcatgtcctttggagggacatggatgaagctggaaaccatcattctcagcaaactatcacaagaacagaaaaccaaataccgcatgttctcactcataagtgggagttgaacagtgagaacacatgaacacagggaggggaacatcacayaccggggccttttggcagggtaggaggaggggggagagataacattagg

SEQ ID NO: 818959 - DNA, 623 bp, Homo sapiens
ttcccttctgtgtcctctttcgtgatcttgaggtgggacttgggtttgaaggctttgtcactcacctggcatgcaaactcttttgttattgtgaactctctgacagtgctttaagtctggggcacgaataaataattttccacacagctcacaactgtagggcttacatccagtgtgtgtgcgttatgtctgtgtgtgtatccttatttttttgagacggagtctccctctgtcacccaggctggagtgcagtggcgcgatctcggctcactgcaacctccgcctcctgggttcaaacgattctcctgcctcagcctcccgagtagctgggattacaggcacccaccaccacgcctggctaatttttgtatttttagtagagatggggtttctccatgttggtcaggctggtctcgatttcctgaccttgtgatccgcctgcctcggcctcccaaagtgctgtgattataggtgtgacacaccacacccggtcctgtgtatgttttgagacggagtctcactctgtcacccargctgaagtgcagtggcaggatctcttctcactgcaacctccacctcctgggctcaagtgattctcctgcctcagcctcccaagtagctgg

SEQ ID NO: 818960 - DNA, 608 bp, Homo sapiens
catgatgtaagtatcttgcagtgggaactcatttgatttagagtagccgtaagatactgatgattgaaaatgttcaagtaatcactctatcatcacattttcttaaagaaaaaattttaagtatcaaatatgtttagtacatccacttttttattttcttaggtttttttttttttttttttttttgagacagatcctcactcttgtcacccaagctagagtgcagtgacgctgtctcggctcactgcaacctctgactcctaggttcaagtgattctagtgtctcagcctccggagtagctgggattacagacatgcaccaacaagcccagctaatttttgtatttttagtagagacagggttttgccaggttggctaggctagtctcaaactcctgagctcaaatgatctgcctgcctcagcttcccaaagtgctgggattacagacatgagccactgcgcttggccaatgggtgrcttttttgcagccatgttatgtagtagtatatgatgtctgtcctacacttgtaagcattgtcatgaaaccagaaacctaagagaagatttatttctgcagataccttttgtatgttttttaaaaaactaa

SEQ ID NO: 818961 - DNA, 647 bp, Homo sapiens
ccctcctttatttgtacttgacttttttctcccccagcaaattaaacagctttgcttctgggctttgggggagtcaggagtgacttttcctgatccggccaagctcttggcctgaatttccatgcccacctcccccgattcccctccccagctcagtccttgagttacccacaggagaatgggtgtatcaggacagagtcttggagaggggagatgatgaaattcttatcatagactctttgaagtgaaaaggacacatgggcctggctcttggaaaaatggtcttttcttgggctggtgtggatttttctggggacctaggtgtaagagggtttgggttcgagtcttgggtcataaccttgcttattattaggtgggcttcttgggcaagttatcctaacgcctctgagattttattcctcatctaagaaatggggttataaatctcagtgtacctcccagagctcatatgagatgagtttctttttatctttttttagacacaaggtcttgytctgacacccaggctacagtgcagcggtgcaatcatagctcactgtagcctcgaactccaagatgagttttcctatacatgtgatggaggatggtttctgcctcttcctcctcctcctctcagtccgccccag

SEQ ID NO: 818962 - DNA, 613 bp, Homo sapiens
ccattattcttcgtcttattttttgagatagagtctcgctctgtctcccaagctggagtgcagtggtgccatcccggctcactgcaacctctgcctcccaggttcaagsaattctcctgcctcagcctcccgagtatctgggattacaggctcccgccaccacgccgtgctaatttttgtatttttagtagagacgggtttcaccacgttggccaggctggtctcaaactcctgacctcaagtgatctgccctcctcagcttcccaaagagctgggattacaggcgcgagccactgtacctggcccataacattccactattaatctttaaatatataaagattatatattaatatatttatatacatttaatatttatattaatttaatatttatattaaatgtatataaaatctcagcgaggaccacagttttattactattggttctctttcaatctctttctctgtctttttctgagtgtctctttttctcttcgttcatttttgctgtggattaatcaatattattaatcttttcaaaaattattttttgacttgatttttatattgtttgcctattttctgtatcatttatttctgctgttattttg

SEQ ID NO: 818963 - DNA, 611 bp, Homo sapiens
agctactacctagtgtgatagctataacccagaatacatatgttaggaaaaaaagaagctagaattcaatcatctcaaaaatttagggaaaataaacctggcaaattaagcccaaagaaagaaaaaggatgagaataatgtacaaaaattatcaggttaggtaaaactaatgtaaaatggagaagaccaacaaagccaaagtatgttatctggacacactaaaaaaaaaaaattgaaagacttagagtaagactaatgaaaatgaaagagagaagtgagagtgtgtaaaaatgatcagtgtcagaaaggaaaagagagacattactacagatgttttacacttttaaaagaacacaggaaatagtatgaacatttattctaataatctctaaaatttaaattacgcaaataattttttaaataactaaatggacacaagaagaagtaaaaaaacttaatccgtaaataaatcatctcacaaaaaagaaaaggaaagatgaaggaaagagaagaaggggtgggtaggagaggggagggcagaataaatgtgaagacccagatagctttackgttgattttagggaagaaattatgccagttctacttatgct

SEQ ID NO: 818964 - DNA, 462 bp, Homo sapiens
ggcacagagccatgaaagagtgtatcacacttaaaacctctggggtgaagtaactcttcaggtatccagagaatggaaataggtgggaaaatttttgaacttacaagtgtcttgaagagtggagtatttaaataaggattaagggagaagggatcagaaccaattctattgctgaaatagaccagatgagggaaatgagcactgaagatctcaaagctgccacagaggcagagtgaggcagtaagagttcaactattcaggaacaatgtgtgttatgagctggctgacattcagtttatggctaatatccatttggattggctgatcttttttttttaaactgactgatagctatgccatacttgttaaatagtacatttctgaggttttgtgagtttataagctgtacggttttattcaackacaaaaacatctgaaattccccaaactgtttctgccacc

SEQ ID NO: 818965 - DNA, 655 bp, Homo sapiens
acaccctagttctgcagagacactggagtgttaagctatacaggagcactcccctctctttggccttctaacctgagtktgacccctttaggaccatgatctatttgtaccatcattccaaagacccccacccagaggaaaaaacacaaactcactaaacagtcattgggccaaatatttaacttgaccttttggctcatagagcaagcctatgccatcagattgtcttctgtcctgtctttctggaaatggtaacaaaacagttggcttgaaagcttctctgctttactccccatctttcctgccttctcacatttttctctcaggttgtgatgccctgagtcctgcctcttgagagacaattaagccatagcaaaaaggtggaacttgatgctaaggaacaaccaggtacactgcataatgtgtgcagagcaatttcagatggtaaactagccagtttcttgcttttttgtctaatttcaaatgattatcatactcatgagtttctccatatttgaagctcttattgaaatttgatcaggggtggagagtgaaaggcagtggttagaagtggctttctggctgatttgttttaaattacgcattatcgttatttttttttgtttcattgtcatggctgactaaaacatggatc

SEQ ID NO: 818966 - DNA, 589 bp, Homo sapiens
ttatccttttttcggtgttttatgtatatgtatcttctaattcacaaaaatggcattggatcataggacttatttagtttcctaatttttctcatctgttattatatttttgaagtctatttatgtggcygtgtgcttcttttgtttcttgctaccaactgctacatggtattccattgtttgcatctaccactttttatatatccattcttccaggcatgtaaactcagattacctctaatatcctgctgcttcaaatagcatcatcatgaatataaaggatactgttgtaatataattattatatggtattttgttggatctgcctactaggttttcttttaaaaaggagcacaaataagttgttcattttgtttaaaaaatagcatttttttagttacttgttataggagttggatttagtcagattaggataaatgtgaaaataatatcaccatgtggaatgagtttacaaatattaatatatttgattttaataactagttttcagcaagaaaactaaagtatattgtgtgatgtagggaatgaatgtagtgagtattttaagtatgatttaacttctatatat

SEQ ID NO: 818967 - DNA, 635 bp, Homo sapiens
ttatttgtatttctaggtattttattattgttgtggatattgtgaatgggattatgatctggatttggctctcagcttgaacactgttggtgggctgatgttcctttagtctttgaagttactgttctttggatggagttttttacaattttattttctttgatgcctttggaagtttggttgtggtttgaggtaggttcagtagactgactttatttctggaaggttttagggggccaaggatcagcttagcactcctggactgcctgttaactctggatggctgtactaggccctcagctgcagtctctggccctttgaggttaggaatctgattcactcggggggctgaggtgtcccagtctactggccacaactctacaaagctggtgctggcagggtttactcctgttggcttgggtggcacactggtgggagtgagcctgaagtggtcctgtgtatgctcatgcctatggcagtggcagtgtggctggtgcagggcggtggcagaggcagagttgccagygtccatgtacacatttgtgctgttggtggaagggtaacagggcactcctgcatcagcaagggtttggacagttagctctgtttgcatcatctgtggtgacacagtggga

SEQ ID NO: 818968 - DNA, 612 bp, Homo sapiens
cctgtgctcttttttgtaactatataaatatattattctgaaaaaatagaagtaatagaagccatttttctaatactgtagactcataatattaaaccctgtgttggtaaaatttcaggctcaggcatgggcaatgatttggtctgatttatctcaatacatttcaaccaatatttgttaagtttctactctgctaagcctattccattcttcttgaaatctctgcttaaatgtttttttcctccaagaggctatttctagctttttagtttaggttatattttcctaatctctgttcccattttacgtgtttatttattgcctgcattccctcctagactttaagctctgtaaaggtaggtaccaccacttttatttagttttatcctgctccacaatagaattaaatcatcttctgaagtgcagcatcaaataaaggcagaactgaacactggcgagtgactcagagattcagagtgctttagcaaaagaaggtgaaagtcatgaagtaaaagaggcatttaaaagtggtataggcagcattgtatcttaacatactgacaataataacatagtctagatggayatcttttaaggattcctgcactgaag

SEQ ID NO: 818969 - DNA, 593 bp, Homo sapiens
agcatggcttattacaaaaaaatgaagatcatcctcatttccttcttttcattttataaagcaaaaataaaagggggtgtgggagaatcttatttgctttcatctccatcccttcagcaartcctactgacttgacatttcctaacctgagctggttttccaggtcatcggttcaatttctcactgttttcccagtctttggtgtgtattacaaaaataggctgaaatcatccatggaagattgttgttgctaggtcttctatatttttcctcacctcctttagccttctacaatctcaacaaaactttcagagagagaaaggggtactatgaaagtctagctgaggaaagacatgagtcagaattagaaagcatggtctttggagaaacactgcctggatttgagttctggctctgccacttactagttgtgttcttgttacctggtgaagataaatgacctaacatcagagaacttgcattagagctgcatctgggacatgaatgtgttcgtggtagaatgttagctgttgattatttgctcaccatggctacaactgaatccccgctgcagtgaaaacagtggttcaagg

SEQ ID NO: 818970 - DNA, 599 bp, Homo sapiens
ccagcacggtacggggtctcgcccatcacctgctgtaaccactccctggctattgcctatgttcattcaaggccctgggtctctacagtcagcatatggcaaagccagccacaactatgtccttcccttcagggtggcaaggtcccccaggccctgggtgggtccagaattgccgttcaggagtcaaggactagagtcaaaaaccttagaagtctacttggtgttctattttgtcacagctacgctggcataccacaagatgcagtccttcccactctttcctcttctttccaaaggcagagaggcctcaccccatagccaataccacccctggccacaggagtactgccagactaccaccactaggtatatatgggataaggcccaaggtctcttaagtcagcttgtggtgaatgctgcctgacctgagattcatcctttaagacagtgggctccctgccaagggcaagtccagaaatgctatccaagagtcaagccctggaatcagggactctaagaacccacttggtsctctaccccccatggtagtgctggtacctaaggtgcaagacaaagtcccttttacttttccccctgct

SEQ ID NO: 818971 - DNA, 548 bp, Homo sapiens
gttcatgattcattagtcttcctaataagggtttttctatgcatttaatcattcaaacctcacaaatmcccatgaaataggcactagtgtctatatttaaagataagaaaactaagactggtcaggaaactgtccaggattatccggttactaagggggaaattaccggccaccaagttctgattaaatgtatggaaaagaggccagaaaatatttatggagtatccatatgcactaggttatattctgggttcttagttctaatgaaaaaaactaagtccttgcttcagtgagtttatgtcttaatgtgtgtggatagatagtgaaccagttagtatatacaatgtaacatccagcagtactagcaaagaactgggtaagaggatagaggggtttcccatagtgcgatgagggaaggcctgtctgagaagtgacatttaaccagagattagaagaaagcgtagggatgagtaatggaatttctaggactgtccctgtgacagcctcttcatggtacattttaccactattttagaacagggtggtcc

SEQ ID NO: 818972 - DNA, 639 bp, Homo sapiens
ggaacaagggcctagcgcagtttaaaggtggagatggcacgtcccagtgcgcagagagcagaagtagagagaacttctcaggagagatccccttaaattagcattaaattactcatttagggcctggcgcrgttgctcacgcctgtaatcccagcactttaggaggccgaggagggcagatcccgaggtcaagagatcaagaccatcctgcccaacatggtgaaacccaacctctactaaaaatacaaaaattagctgggcgtggtggcgcacgcctgttgtcccagctattcaggaggctgaggcaggaaaatcgctagaacctgggaggtggaggttgcagtgagccgagatagcaccactgcactacagcctggtgacaaggcaagactccatctcaagaaaagaaaaaaatactaatttagttgcaagagtggaggcgaggaagatgagaattatgaaaaggggcacctacatacttaaaacacaatttcactgacatttatttactgtttatacttggatagaatataaagaaaacaagattctaccccgctctagcaaggagaaagctaacattatgcatgcactaagctcacatgcatatactatttcatttaatcctcacaacaacacaac

SEQ ID NO: 818973 - DNA, 611 bp, Homo sapiens
aattaaaatgaggtcaccagggtgggcacaaatccaccatgactggaggccttgtaagaagagatgaagacacagacatgtacagagggggaccrtgagaagacacagggagaagacagctatccccatgccagagagaggcctcagaagaaattaaccctgctgatagcttaatattggacttgtagcccccagaattgtgagaaaattgatttctattgtttattcagcagcccccatccccaacctttttggcaccaggggctggtttcatggaagacaatttttccaccgattggggtgggggggatggtttcagaatgattcaagagcattacatttattattagattctcataaggagtacaaaacctagatcactcacatgtgcagttcacaatagggtttgcactcctataacaatctaatgtcgccactgatctgacaggaggcggagctgaggccataaggcttgcccactgctcaccgcctgctgtgaggcctggttcctaataggccacggtctggggattggggacccctgatttaagtcacccagcctgtgatactttattatggcagcccaagcaagctaataattactctccatc

SEQ ID NO: 818974 - DNA, 611 bp, Homo sapiens
aattaaaatgaggtcaccagggtgggcacaaatccaccatgactggaggccttgtaagaagagatgaagacacagacatgtacagagggggaccgtgagaagacacagggagaagacagctatccccatgccagagagaggcctcagaagaaattaaccctgctgatagcttaatattggacttgtagcccccagaattgtgagaaaattgatttctattgtttattcagcagcccccatccccaacctttttggcaccaggggctggtttcatggaagacaatttttccaccgattggggtgggggggatggtttcagaatgattcaagagcattacatttattattagattctcataaggagtacaaaacctagatcactcacatgtgcagttcacaatagggtttgcactcctataacaatctaatgtcgccactgatctgacaggaggcggagctgaggccataaggcttgcccactgctcaccgcctgctgtgaggcctggttcctaataggccayggtctggggattggggacccctgatttaagtcacccagcctgtgatactttattatggcagcccaagcaagctaataattactctccatc

SEQ ID NO: 818975 - DNA, 408 bp, Homo sapiens
gattgcctggcatggaatgagatgcttcatcaatatttgtggagggactgaatcatttatttgcactcacgtgtgttgacaacaggggyaaaaggtcattaatgttcatactggcattcacaggatttacatcaaaagtctaacatttcatcattaatgaggcacatgtgcatatatatacacacatgtgtatgcacaaatgcaaatataggtttgcatatccctctagcactgtaaagacagatttctctatgggttatacaacaaacaaacatgcttttatgcacataaaaatattaatcattattttagatgccttatatgtatatattttcatatataattactaacattagctaatcttgaaatattcttgaaaatgaaggaaaaacgcactcttcatgaaat

SEQ ID NO: 818976 - DNA, 408 bp, Homo sapiens
gattgcctggcatggaatgagatgcttcatcaatatttgtggagggactgaatcatttatttgcactcacgtgtgttgacaacaggggcaaaaggtcattaatgttcatactggcattcacaggatttacatcaaaagtctaacatttcatcattaatgaggcacatgtgcatatatatacacacatgtgtatgcacaaatgcaaatataggtttgcatatccctctagcactgtaaagacagatttctctatgggttatacaacaaacaaacatgcttttatgcacataaaaatattaatcattattttagatgccytatatgtatatattttcatatataattactaacattagctaatcttgaaatattcttgaaaatgaaggaaaaacgcactcttcatgaaat

SEQ ID NO: 818977 - DNA, 484 bp, Homo sapiens
agaacattggataatgttataataattgataacaattggtgccatttcaatcatttccattttattataataaccaactcaaataagtargtctccctattttacattcccatggaactattttgatttaggtaaaaacctgggggtagactagggaggatttaggtaagattgtttttttactactcagaccagttaagaagtcattctacaataagcggcctcaaattttctgcctgatcgaagagaaactcagagagaaagcaaccctcaacataaattattacattctctaaaatattacattctccttttttttttttttttaccatccatggttagggcaaaagggcaccaagacaccagagtacaaacctgatgatgtcatttttttttttttttttttttttttactttaaaaccttcaaaggctccctttttccaaagataaagtccaacttcctggcatgtatgcaaaggtctt

SEQ ID NO: 818978 - DNA, 621 bp, Homo sapiens
aaagaaagaatcctacaagcagcaaaagagaaacaaataacatacaataaagctctaatacatctgacagcagatttctcagctgaaaccttacaggccaggagagagtacytaaagtgctaaagaaaaaaaaaaaacttctagaataatatatccagcaaaaatatccttcaaacatgaagaagaaataaaaactttcccaaaaaagttgagtaatttcatcaacaccagacctcccctacaagaaatgctaaagggagttatttaatatgaaagaaaagaacattagtgagcaacataaaatcatttaaaggtacaaaacttactggtatggtaagtacacagaaaaacatagaatattgtgacactgtaattgtggtgtttaaaccattcatatctggagtagaaaaactaaaagataaactgatcaaaaataaaaactacaacttctcaagatgtagacagtacaataacatataaatagaaacaaaaaatgtttaaaagtggggatgaagtaaatgtagagtttttactagttttctctgtttctttatgcaatcagtgttaagtttcattagtttaaaaataatgggttataagatattatttgcaagatttctg

SEQ ID NO: 818979 - DNA, 631 bp, Homo sapiens
acttactagttctgtgactcctcttctgcaaaacrctaattaaaaattttttataccaagaacaagttaactggcagtggggtacagtaaaggtgttatgaaatcccattttttttgccttttaccttaaggggtattcttattttttaattattttttaggcagggtcttgccaagctgcccagggtggtctccaactcctgtcctcaagtgatcctcctgcctcagcatcccaagtgttgagactgggactataggggtgagccactgggtctggcctaagaaaaggtgttttttttttggagaccgagtctcgctctgtcgcacaggcgagagtacagtggcgcgatcttggcttactgcaacctctgcctcccgggttcaagcaatcctcttgcctcagcctcccgagtaactgggattacagacgcataccaccacgcccagctagttttttgtatttttagtacagacggggtttcaccgtgctagacaggatggtctcgatctcctgacctcatgatccgcccgccttggcctcccaaagtactgggattacaggcatgaaccacggcgtccagccagaaaagcatgttcttatgtatagctaagcggtaactctcctctgctt

SEQ ID NO: 818980 - DNA, 623 bp, Homo sapiens
gataattttcctgtgttttcctcatttcttagcacatattgaaaaacgtatttatttaaataaaaataaacagaagaaatatacatatatactatgaatggttgtcaatccttaattgctaaagttatagtttttgacatctcccttcctgtctaaaagtactctattatatttaacagagacaagtattacagcaagactgatcaaggggaaattcaagagaaaagctctgtggaagagtaacaaagcagagaatgacattcaacttcctctgctctctcaagagaattccacactggaatccacacaatatatctaattaaaaacagcaatgagaataggagaaaatgggtccagatgctttttaaattcagctggcatagtccctgtgttcccaaaccttccctttgtcataaaagccaaggccagccctgcacccagctaagctgcacagctgcacggtgcaacgtgaggcaaaagggtagtagtctgtcytaagactctcataccagccagcctgcctacctagagctcaagccaaaacctatgattacaagatggagcatcagtagagattctgtgaaggtgaaaattcgcatggaaaactaagctcattgctagag

SEQ ID NO: 818981 - DNA, 577 bp, Homo sapiens
ttccagtaaagtatttccttttgattccactctaacccaatctaccatcatgactcagattygtttgccttcagagtcaatgacaattagccataggtagtacagaaagaaaagaatataaaaataaaatataaaataaataagtatatatttcaatatacagagtatgttatgtataatttgcatgactatataaacagaagctatcaaatatttatgaataaatacaataaataaatgagacaataatgataaacaagaaacacatttaacaagaaatctgctgtaaagtttcattgatgatctatttattacattgactattcccaaacacactgtttttaaggtaacttgcttagcactttactgttttgcttttaatgaagtgaagcattttataaactatggtattgagaaactttgaacactagatggcgagattgcaaagttagacaatgggatggtgtaaaaattgtgaaggatgaagggccgcagaatcattcttcctctaccagcaattttcttagcaccaaagctgcagtaatgttccaagaatagaaatatttgagccatgaat

SEQ ID NO: 818982 - DNA, 512 bp, Homo sapiens
aagaatgatgtaaacgttggagataaatgtgagattgagagawttttttaaaagctaatatagcatgggtaatagtgctggtggggccaacagagagatagcaaaactgataatgcaaaagagaaagggatatttatttgatagagtaacatgcttgaaaagggtggagggacaggctccagtacatgggcagaggcgctggccctggacagtaactgcagcaggcagtgaggtggtgtgcacagaggcaggtagtttgggaatacggtgacgtgatgggcataagtacatactcatctgattttttttttttttgtctcagtaaagatagaagtaaggttgtcagtagacaatgaagagtttgtggaagtttgagaagtgtgaaattgaccttggaaactgtgacaataagttactggacagtgatgaaaaccatgtgagccatattaatataaatacaaaggaacacaggtcaacttggtggtcttttgttctccagtcatgtttagttt

SEQ ID NO: 818983 - DNA, 512 bp, Homo sapiens
aagaatgatgtaaacgttggagataaatgtgagattgagagatttttttaaaagctaatatagcatgggtaatagtgctggtggggccaacagagagatagcaaaactgataatgcaaaagagaaagggatatttatttgatagagtaacatgcttgaaaagggtggagggacaggctccagtacatgggcagaggcgctggccctggacagtaactgcagcaggcagtgaggtggtgtgcacagaggcaggtagtttgggaatacggtgacgtgatgggcataagtacatactcatctgattttttttttttttgtctcagtaaagatagaagtaaggttgtcagtagacaatgaagagtttgtggaagtttgagaagtgtgaaattgaccttggaaactgtgacaataagttactggacagtgatgaaaaccatgtgagccatattmatataaatacaaaggaacacaggtcaacttggtggtcttttgttctccagtcatgtttagttt

SEQ ID NO: 818984 - DNA, 656 bp, Homo sapiens
agaagactataaagagaataatgaaacagacctttgggagccacagttccagcactcctttcctgtagtttgtgagttcaaacaaggcaaaatgtttccagctctggatgctttctytgaataagagagtagaagccgcgtgggtactaagtgtgttttcaggtctcatgacgtgctgctaaggtgttaggcacaatgccatcttgatggcatgaacttggtaggtcatgtttattttattgaaaagactccctagggtctaccctgaaggcacatttgccatgctgttccatgggctaggaaggccccttaccaaaactgcagctctgtctgatgacttcctactggtctttaggactcacaccaaagtcacggctctgcagtgctctcctgagcttcacctttatggtctctttagttacttccacagcacatcatataacatggcaataactgtaagtttatgtaccccagaggacctagtccacagccctcagtttattcatgatagccctcagaaacattcattgtattttatccaatacctttaacacccaacatcatctttagtgtagacatggatagagttgatgaaggacagttacacgtagttgtttagacatgattttcagatcatggatgtaattgtattatct

SEQ ID NO: 818985 - DNA, 654 bp, Homo sapiens
ttaactttctataatttcatggctaggccacgagcggtcccccaccctccaccctactgcagagctctcccttggcctgtcaygagggtaagaatgtgacactgaaatggcccattaagatgacctctattgggaagttctatcagtttatcaaaatctctgaaatataccgtagatctcagaacatatatgcatcagcaacatcctcagaaatgaatgtatccatctgcaaattcatagtgataacttttttctttttctactacatttaaagtgtgaccccttgcctcaaaatataagcttcccagtgtgaaatgctaatttatcatcatggattggcagtaattcagaattccaatacatagtggttccaaaaactacattcagaaagaagagtaaccttttaagataatgaccctatatttttctttaaatctcctgtcactctccattatatagaaaaattcaaaccacaattccactcagtgaaacttaccaaaaaaatactttccaaggaagtaatttttcaatctcatttataagtagtattttttaatatttattttgccatagcttctgaaagtacgttatctttttgtctgataattgatgaatggataggaaacatattaaggtaaattaaagccaacttaa

SEQ ID NO: 818986 - DNA, 591 bp, Homo sapiens
gccccatgattcaaccacctcccaccagggtcctcccgtgacatgtgggaattgtgggaattacaattcaaaatgagatttgggacacagccaaaccatatcatattccctcatttttaaggttttctttttatttaaaatgtatattttttcctattgtaaatatatttcttctgttttacttttttccatttttatttagaattgcgtacaggtttgttacaaaggtatactgtatgatgctgaggtttggaggaggaatgaatctgtaacccaagtagtgagcgtagtacgccaataggcagtttatttcaacccttagcaccctctctccctctcctctcttgtatgcccagtatctgttgttcccatttttatgtccatgtttacccaatgtttagttcccacttataagtgagaacttgtgatatttggttttctgtttcttcgttagttcacttargataatggtttccagctgcatctatgttgcagcagaggacattatttcattctttttgatggtggcatagtattccatggtatatatgtaccacttttgctttacccagtccaccatcgatggccact

SEQ ID NO: 818987 - DNA, 569 bp, Homo sapiens
aaaggtatgatggtgtgacaaaatttgataactattgtctttaagtatttctcaaacttctctcattcacatactacccttgttacccgggggttcttgctcccagagctcccaagatggaggtgggccgcttccaaaatggtggcgggccactttgaagatggtggcaagccttgtgctctctgacctggggttcttggcctcacggattccaaggaatggaatcttggtccatgcagtcagtgttatagctctattagaagccgtgggtcatagctctattagaagccgtgggtcatggaagagaaccgtggaacccagtgactagtgttcagctccattaggaggaacccacttagcgatgcagaacaatggcaagcctttagcccgatcgggaggggcaatggacgcctcgctgaatcaggagcacagccgacacccagccagggtggaagtcagcggcaggcrgcaaaaagcagtggtggatggcgagtgaaaactcagctccagccctaacaaacacggaccagaagagagtgcagttgcaagatttaatagagtgaaaacag

SEQ ID NO: 818988 - DNA, 569 bp, Homo sapiens
aaaggtatgatggtgtgacaaaatttgataactattgtctttaagtatttctcaaacttctctcattcacatactacccttgttacccgggggttcttgctcccagagctcccaagatggaggtgggccgcttccaaaatggtggcgggccactttgaagatggtggcaagccttgtgctctctgacctggggttcttggcctcacggattccaaggaatggaatcttggtccatgcagtcagtgttatagctctattagaagccgtgggtcatagctctattagaagccgtgggtcatggaagagaaccgtggaacccagtgactagtgttcagctccattaggaggaacccacttagcgatgcagaacaatggcaagcctttagcccgatcgggaggggcaatggacgcctcgctgaatcaggagcacagccgacacccagccagggtggaagtcagcggcaggcagcaaamagcagtggtggatggcgagtgaaaactcagctccagccctaacaaacacggaccagaagagagtgcagttgcaagatttaatagagtgaaaacag

SEQ ID NO: 818989 - DNA, 629 bp, Homo sapiens
caagatcttctgcttaataattagaagtamcaatgtgaactctttctacatatcaagaactgttctaacaactttgcagtttagagggaggtatagtaaaaaaataaaagcagtttattaatattcactatgaaaatggctttagaggaggtatgcacccgattgtgtgagtgcttaatagactctccagtcttgggtggttttgtcactggataatcttctctaagactttgagccaattttgaagaaaatgaggaaataattgtatttatctatgtatttattcaatggtgtgtatatatgtgtgtattgaaaacaggtggaaagagagaaagttaatgagggtggaaaaggaaatgggaactagatgactgaggaatgtgtgcaaagacatggaggccagtgtatatgggactgtaacattgtatttatggaagtagagttgaagatgctgggtggccagaaattaaggtagagttgcaaactggatatgaagaggtttctattacagactaatgaattttggacttatccttaaagatttgatgacctacacaatatgcaaaacaaagaagtggcatgataatatttgcattttaggaagatcattctggcattattatgtcttg

SEQ ID NO: 818990 - DNA, 619 bp, Homo sapiens
aagggacccatatccagaatacataagaactttgataactcaataatgaaagatagataacctaactgaaaaatgagaaaaatatttgaacacacatttccctaaagaagatatacaaaaatacagatatactattacacatgaaaagatccccaacattcccagagattcaaatgaaaaccacagtgagataccattttatgtccactatgatggctgtaattacagagatggaaaataatgagtgttgacgagaatttagagaaataaatctttcatacactgctgatgagattgtaaaatgttctgttttagaaaacaatggggaagttcctcacagtattaaccgatgagttacaatgtaacattgcaattccactgtcaggcatatacccaagagaaatgaaaatgtatgttcacataaaaaccagtgcacaaaagaggaaataacataaatatcaaggaataggttttaaaaatacagtgtatccatacaatggaatattagtcaacaataaaaaggaatgaaatactgatscatgctacagcatggataagccttgaaaatataatcatacttgaaagaatccagtcacaaaaggccactttttatatgatt

SEQ ID NO: 818991 - DNA, 592 bp, Homo sapiens
acagctttgcagggccatttcaaaatatggcaaagaaacacgttgtggagtaaaatattttgattttctttttgtcatgtaatgttatgycagagttaggttagaaagtaagtcatgatatatagggttaaataaaacccatctaatgagaatttatggtttgcagggcatgactctccagacccctaagataggaatttgggcaagataaaaaaaaaaaaaaaagaaaaaaaaaacgttgcttagtcctcagtttccttgttttcttttgccctcaagttttggaagtaatcaattccaatgaaaattctttgaaaacttcccaactcatcaaaaataacaagctgtctttataaaacatagatgctgaggacagtttgactatgggggaaagatccttcaggtatggggtcaagagaccatattttgtagggtggcaaattacattttccaaaaatgaattcatcaatatatattccattccacattttcttcttccaatgtgaccaaaatgctcctctgttgagagacagaatctatgattccctacttgaaacacagtaggaaagacttttgtaacttcttcagtcaa

SEQ ID NO: 818992 - DNA, 340 bp, Homo sapiens
ctagcttctaacctaatttgtctagattttggttgctgatatgagaaaatatctcatctctctagaaagtgctcttatttgagtttataaaagaattttgcatatctaaggtccaaaattctataaatttgagtatttgcacttagatttactgtaacagcattctcccagatatgttaaaaataaattactgtgtttactatttcaaacactgtgtaaaacattttatttgaaaaatcttatttttagaaaaacctcataagagtgtatttatgaggatattttattttttaaaaawactgcctcaaactggcataaacaataaaggaattcattatct

SEQ ID NO: 818993 - DNA, 579 bp, Homo sapiens
ttggccacaaccaatggaagtagaaataaaattagccaagaatgtgttctctaatttaattttaatctttygaattctccgatagaaatttggatctctttcacaacattgactgtggagaaaacattcttcacttccatgaaccaaaggcctgagaagattgtttttttattagcttttttttcttttcttttcttttttttttttttttgagatggatttttctctcttgttgccccggctggaatgcagtgacgcgatctcagctcactgcaacctccacctcccgagttcaagcgattctcctgcctcagcctcccgagtagctcgattacaggcatccaccaccatgcccagctaatattttgtatttttagtagagacagggtatcaccatgtttgccaggctggtcttgaactcctaatcttaggcaatccacctgcctcagcctcccaaagtggtggtattacaggcatgagccaccacgctggctgtttgtttttttttttaagttcctgagggtaatttctaaacatgtcttatattctattccaccattctccacatattggacatcc

SEQ ID NO: 818994 - DNA, 579 bp, Homo sapiens
ttggccacaaccaatggaagtagaaataaaattagccaagaatgtgttctctaatttaattttaatcttttgaattmtccgatagaaatttggatctctttcacaacattgactgtggagaaaacattcttcacttccatgaaccaaaggcctgagaagattgtttttttattagcttttttttcttttcttttcttttttttttttttttgagatggatttttctctcttgttgccccggctggaatgcagtgacgcgatctcagctcactgcaacctccacctcccgagttcaagcgattctcctgcctcagcctcccgagtagctcgattacaggcatccaccaccatgcccagctaatattttgtatttttagtagagacagggtatcaccatgtttgccaggctggtcttgaactcctaatcttaggcaatccacctgcctcagcctcccaaagtggtggtattacaggcatgagccaccacgctggctgtttgtttttttttttaagttcctgagggtaatttctaaacatgtcttatattctattccaccattctccacatattggacatcc

SEQ ID NO: 818995 - DNA, 587 bp, Homo sapiens
tttgcagggccatttcaaaatatggcaaagaaacacgttgtggagtaaaatattttgattttctttttgtcatgtaatgttatgycagagttaggttagaaagtaagtcatgatatatagggttaaataaaacccatctaatgagaatttatggtttgcagggcatgactctccagacccctaagataggaatttgggcaagataaaaaaaaaaaaaaaagaaaaaaaaaacgttgcttagtcctcagtttccttgttttcttttgccctcaagttttggaagtaatcaattccaatgaaaattctttgaaaacttcccaactcatcaaaaataacaagctgtctttataaaacatagatgctgaggacagtttgactatgggggaaagatccttcaggtatggggtcaagagaccatattttgtagggtggcaaattacattttccaaaaatgaattcatcaatatatattccattccacattttcttcttccaatgtgaccaaaatgctcctctgttgagagacagaatctatgattccctacttgaaacacagtaggaaagacttttgtaacttcttcagtcaa

SEQ ID NO: 818996 - DNA, 623 bp, Homo sapiens
ttcaaccctgtggagcccctaagatataaaaagttggccatctaaatcgaygggttttacattccatgaatactgtattttcaattgcatttggttgctaatgtcaaatctgtagatagtggagggcaaactatatattaaaaaaaaaatctgcatataagtgaacccatacagttcaaacccatgttgttcaagggtcaactgtagtaggaaatggagatattcaatttggaaacctaaatgcaataggagtaatgctattctgggagtaataaaagtaattggatgtaagtggaggcaggcactcaatggccaaaggcaaggtgggcacgcttactgtaagggacagcaaaggcaaagcagcaattggatagtctgacttgtgcagacctatgacattgatttattgattatggtgttcctacaataatcaattagtcagatagataggaagcctactaaagtcttacttgatctctatatgcaaaaatgttctaagtcaagtgaacaaaattctaacccaaatcatgaaaacagagagtcatacctgacaggccacagacttcagaaaagaaaaaaatgtcatgaccccttaatgagggtcttgggcctgtatacagact

SEQ ID NO: 818997 - DNA, 648 bp, Homo sapiens
tgattcttgagagcacttaaaatatgttctagatacataggctttatgagatacatgatttgcaaatattttctctaaaactgttagacttatggaggtaacctttgtgacctcatgttgggaaaaaatttattagataaaataccaaaagtgcagttcacaaaagagaaaattcatagactggacttcatcgaaattgaaaacttctgatcttaaaaaaaaaataccgtttttatggtgagacattcaaaatttactcttagttattttggaatgtacaatacattaatagatctcaagtccctactttatttctcccatctgtctcaaactttgtacccttgagtgaaaaaaccaaagctggaggtaactccttgattttgaaacatattataaagcaataataatcaaaacagcacaatgatgtcataagaacattgacatcaaccaattgaacaggacagaaagcccagaaataaacccaaacacttgcagtcaattgattttcaacaaaagtgccaagaacayacatgttaaaaagaaagtttcctcaataaatgatgttgggaaatccacatgcagaagaatgaaattggatccttacctcacaccatatacaaaagtcaactcaaaatggattaaatactt

SEQ ID NO: 818998 - DNA, 455 bp, Homo sapiens
gctgcttttcctttggaggcctttttaagaagtctccccatctcatgaacctcttcaacccacagactccatyttaaaaataagggcactaggctggtggctcacgtgtctaatcccaggactttgggaggctgaggcaggcagatcacttgagcccaagagtttgagaccagcctgggcaacaatggaaaaccctgtctctataaaaaacacaaaaattagctggtgtggtggcctgtgcctgtagtcccagctacttggtaagctgaggtgggaggactgcttgagcctgagaggtagaggctacagtgcaggccactgcactccagcctgggcaagaatgagaccctgtctcaaaaaaaaaaaaaaaaaaaaaaaaggctgtggttcattctttcaaaagctaagtggagcccacattggcacagatgccagctacagtgtctgtggaatca

SEQ ID NO: 818999 - DNA, 616 bp, Homo sapiens
aatgccttcttctgtaatgcctcctgaaggacttgcctaaagctgttttttytgtaagtagaaggagtacactctaaaataatgataaaaagtatagtatagtaaatacataaaccagtaacatactcttttactattgctatcaaaattatgtattgtacataattgtgtgccatgcttttatatgactggcagtgcaataggtttgcttacacctggatcaccacaaacatttgagtaatatgatgactgcagtgtctctaggaattagaaattttccagctccattataatcttagaagttgaccatccatatgaggtctgttgctgactgaaatagcattatgcagtacatgactatatctgtgtattttcacgaagttaacacactcatataattagcatgcagatcaagaaacagaatagtaccagtgccccccaaagtctccctcatactgcctattagtcatcacctacacccacaaggctatccctcagcctgacttctaataccatcgattagatttaaatatttttaaatgttatataaattgaatcatacagtgtcactttgtgtctggattcgtttattcaaaaatatgttcgatggcataat

SEQ ID NO: 819000 - DNA, 659 bp, Homo sapiens
ccttcttctgtaatgcctcctgaaggacttgcctaaagctgttttttttgtaagtagaaggagtacactctaaaataatgataaaaagtatagtatagtaaatacataaaccagtaacatactcttttactattgctatcaaaattatgtattgtacataattgtgtgccatgcttttatatgactggcagtgcaataggtttgcttacacctggatcaccacaaacatttgagtaatatgatgactgcagtgtctctaggaattagaaattttccagctccattataatcttagaagttgaccatccatatgaggtctgttgctgactgaaatagcattatgcagtacatgactatatctgtgtattttcacgaagttaacacactcatataattagcatgcagatcaagaaacagaatagtaccagtgccccccaaagtctccctcatactgcctattagtcatcacctacacccacaaggctatccctcagcctgacttctaataccatcgattagatttaaatatttttaaatgttatataaattgaatcatacagwgtcactttgtgtctggattcgtttattcaaaaatatgttcgatggcataatgacagaaatatagaccaacagaatagaatagagagctctgaaataaa

SEQ ID NO: 819001 - DNA, 500 bp, Homo sapiens
agagaagacaattattcatattatatgtgtgtatatataatacaacatatgatattagcagtcacagaatctgagygaagaatatatgtgtactattcctgtaataattccacaagtcaaaattatattaaaataaaaagtaaaaacacatctgacaaacgactaatatccagaatctacaagtaattcaaacaattagcaagaaaaaaacaaacaatcccatcaaaaagcgggctaaggacatgaatagacaattctcaaaagaagatatacaaatgtccaacagacatatgaataaatgctcaacatcactaacgatcagggaaatgcaaaataaaaccacaacgcaaaaccaccttactcctgcaagaatgaccataatcaaaaaataaacaacaaccaccaaaaatagatgttggcgtggatgcagtgaaaagggaaaacttctacactgctgatggaaatgtaaactagtacaaccattatataaaacagtatag

SEQ ID NO: 819002 - DNA, 600 bp, Homo sapiens
tgtttatatatacatatacacatataaacatatatacatacacataatttttctaaagtagaatcacatgatatgtgctgttttataagctgcattttcaaaagtatgaggcattactatattttaaatgttcaagaaattttacacagatcctcagcatcaatttccaaggctacatacaattctaacatttgggtttactacattttacctaactattcccatactgatagatatttaagacatcagtgctaggtaatttagaaatctcattcttcccgcttatgaacagcactgaaatcagcattcttttgtatatatcttttctcatatgtgcagttatttccttgggaggtatcaaagtgggattcttaaaggtatacccaacttaaggctattggtttatattactaattatcttatgtttcataaagtcattttaatataaatatatcatttaaatttttgtctttawcataaccctgctgtgagactgtttgggaagtgttaaaataacctcacttttcactaaagggaacagtggctcataaaagtataacctcttctcccacatacctctggtatgcgcattgtaaaaat

SEQ ID NO: 819003 - DNA, 580 bp, Homo sapiens
attacaagtaatacaaacactaaaactacagaaaaggtgaagttactaggcaactttcttacatttctgtcagaaccaaagcaatagtgaagagtgttgtataaaaacaaaagcttatgagaacatatggttgcatccttttaactttaatttaaacatttgtatgcatacacacagcacatgcatgtgtgtgtttgtgttatgtgtgcataaagactgaagctctcaagggaagatgagggaatgaagagagggaaaagcatagggaactgagatggtgtctaatactaccaaacaaaaataagcagtagcattcttattagcattaatattgaacaaacatttgctaaacacatcaacaagatttgtcattagagttctctgtcacataacagtgatagaaaagcaataaataatgaagccctcatgatgtaaaaactgaaacttgtccatttttcatgagacttttatgagagttaagtaaaattaggttaaaatacaataaggaaatttgttataaaaaataacttatttcatasgctattatctccacaaaaatcagaactccttttcctaacca

SEQ ID NO: 819004 - DNA, 627 bp, Homo sapiens
actgctctcccaggcctgtggaaacagctaaatcctacaatatctctcaattgccctgaaaatagaatccatgttttcgtttgatgagcacctttatgatctggcccctctcctactcacctctcctctccatctcttgacctcccataacactctatattccaggcccactgaatcaatctcagttccctaaactagtcgctattcctctagccactaatttggaactagtatactgtgtccgacatgccagaatcttaagtagctaactcctatttgttatatgtgtctcaaattcaatccttttttcatctataagttctctctatctcgtttcttcccaaggcatttacttccttatcactgcctcatcaatataaggtgaggcaaatctcatttgtatgtgttcgcattatagtcctaacttctgctagagcataatacattgcacctgtcagtcacgcccaagctcattcacagtaggaactatttaatgttacsgtggaatcgtttcctagcaaggtgcctgaattttaggagtcctttgataatatgcttggaagtgaacattcttttgcacctacaataccagcacacgttttgttatgtggaggccatgcatctaaa

SEQ ID NO: 819005 - DNA, 542 bp, Homo sapiens
cagagattgaactacatttgtaagtttttagcttttttattcttagaaacaaagtattatggtgtagtgaagtagactatcccttatgttttcaaatgaaaaacagatttacatataacaagacaagaacttccattccaagaaggctaaaatatatagtttaatcatactttgctgtttaaacatagtatttagcagtatttccccacaatttcacataagttcttttattcttttcctacccaattgaaacacatggattgagtattctatattcaattgaaattaaaattaactttctacatgtctattttagatttataattatatttgaggactatgtttataactactagtcagcatttagtttcctatttcctctttgttttatataatataaataaaatttaagtacgtataagtatgtatatgcaaaatcatatgttaaaacaactatagaaacattgttgtccagtaaagatggcagctaccaaattygaaacatcaactgtcaggttgtgttaccagaaagttacttcagc

SEQ ID NO: 819006 - DNA, 606 bp, Homo sapiens
ttaaaaaaatgcccaagctaattaagaaatacatttcaataaaatrttactttttatatttattcaaattgggatatttgttattttgatcagctgaacactaattatagttgtaatcatacaaaaaattcctatgttagcatttaggagattatgatcacaggatatacacaaaatttaaatacagttgtctgttggtatatacctgggattggttccaggacccccggtataccaaaatcctctcatacacaagttctgcagcctgtcctgcagaacctgcttacagtaaaagtcagctgtccttgggtttcatatacagcatatactatatttttgatcctcatttggttgaaaaaaatctatgtatgagtacaattcaaacctgtgttgttcaagggacaacggtatacacatattttttgctgcaggaaaggataaccaataaggcttatgcctaaaaccgtactatatagaattcttgttagtcagggtttctcaacagcacactattgagatgttgagtgggttaatttcttgttgttgggggttgtcttttgcaatgtaggatattttgcagcatccttggcatgttcccactagaca

SEQ ID NO: 819007 - DNA, 619 bp, Homo sapiens
agtcagggtttctcaacagcacactattgagatgttgagtgggttaatttcttgttgttgggggttgtcttttgcaatgtaggatattttgcagcatccttggcatgttcccactagacaacagtagtaccccactccctagtttatgaaatcaaaaatgtctccagacattgccaactggcccctgggaggcaacagtcccttgctgagaaccactgcagtagagaatagaatagtaatacaatgtaaaactttgactatcaaaatggatgttagtatcaaactactatggtatttaattccatctgataatatttaaaacagtgatagttactgtaaaatgacattttacaatgcactggaaattacattatttgccattacttaaaataatggtcaagaactttaaatgatccactggttgaaagcatcctgtagtttataggaaaggtgagtaatgcacattaaccttcacttagagtttttttttttggaaacggagtttttgctctgtcgccaaggctggagtgcagtggcgccatctcggctcactgcagcctccgcttcctgggttcmagcaattctccagcctcagcctcccgagtaggtgggactacag

SEQ ID NO: 819008 - DNA, 619 bp, Homo sapiens
agtcagggtttctcaacagcacactattgagatgttgagtgggttaatttcttgttgttgggggttgtcttttgcaatgtaggatattttgcagcatccttggcatgttcccactagacaacagtagtaccccactccctagtttatgaaatcaaaaatgtctccagacattgccaactggcccctgggaggcaacagtcccttgctgagaaccactgcagtagagaatagaatagtaatacaatgtaaaactttgactatcaaaatggatgttagtatcaaactactatggtatttaattccatctgataatatttaaaacagtgatagttactgtaaaatgacattttacaatgcactggaaattacattatttgccattacttaaaataatggtcaagaactttaaatgatccactggttgaaagcatcctgtagtttataggaaaggtgagtaatgcacattaaccttcacttagagtttttttttttggaaacggagtttttgctctgtcgccaaggctggagtgcagtggcgccatctcggctcactgcagcctccgcttcctgggttcaagcaattctccrgcctcagcctcccgagtaggtgggactacag

SEQ ID NO: 819009 - DNA, 686 bp, Homo sapiens
gaaactctctgagttagattacatgaaaaaataaaaggaacttctatatggaaatatctgaaccttaaaactactcgggttttacactaaatctaaagttcctataagtgaattagagataggggagactttaaacagttcctatttgcctgcagatttacttcattctgctttaacatcacatatctgtaatagatcatattttaaaagacttgccataggcgtgacgattaagtgaaataatatgtgtacaagcaattgaacttcttttccactttggatatctggtgcctcatccagccctgactcctctttaagattatatttaggattacatttcaggcttccaggacatatctagttctggccccacatttcaattactgattaggtatttacttggtggttccctgactgcccctcaaatccccacattggccacctcttcctgtcctctcccacctccccttttgagcttctccatgtttaaccaccatgtcactgaatgacaatgctaccctctcagactcacacatggtacatcttctagaaaggaaggagrgggggttcctctgacctcttcctctctcatctcttcaggcacttgattagtcactagactggatattacctgcttaaactggtcttcctgcatgcaagatcttctcactttagcccactgttct

SEQ ID NO: 819010 - DNA, 476 bp, Homo sapiens
aggaggaagaggtagctctcaaggtttcggcatgctgggagccctgcctgttgttgactggtgggagcagaggcctggtctttgtcaccctgcccagtgaaggggagggaaatgatcatgggaaagagacctcattcttgctgaggtagcaagaaacagcagccttgccctagaagccctcatcatgggcatctcatgagaacagctttacttttattacaagctgtctttatggttctggctggtcgcaaagttctaaatcatcttgttaacacatgccctgccaagttgacttatgctttctcaagcccaagtgagagcaagttctttccatgaatccaggaagggctcttgtggactgcaaaatggatgaccatgtggttaggtgaggggatgaagcctcagatcaacagtgcaatgagttatcagatcggtrtgatatgcacaatttttgagaaatgactcaaagggtattt

SEQ ID NO: 819011 - DNA, 593 bp, Homo sapiens
cttacaaacttcaccatgaagtttctgcagtgacagctttaccagacatctccgtgtgggattttaaaacaaacacaaggctgtttggaaatacttggtatatataaatatgcaaaatatgctgaacagcgctaacagctgtagggtgaactccctcatccttgagcagaatattttggtggcagtgtggttattttttccatctttgcttttaattcccgcccccccccccgctcttttctccacccactcacccatctacaatccactccaaaagcacaaatttaacacccttccccctacttccacactgcttccaagaaaatcattttagtagattcccactggaaaaggtgggtggtggcttgatggaatgtttctgagttacacgatgttgtaaagcctgagcttcggggaacttgcttggacttgatctgacatcaggctcacacacagcccagacactytgcaggccagattccattaaggcttatcattgcaagaagaggaaaagtcctgttgtgagtggccctccagccatgatgattccaaagatggcaaaataatcattttaagtgtgtgctatcaggttc

SEQ ID NO: 819012 - DNA, 700 bp, Homo sapiens
aaggccaagtgatgcccgcacacgcaacgggttgcattagattacaggggaggaataccaaatttaggaaatctcaggcttttagaatgggctgcaagcaagcctgcccaaacgttgtccctgaggaagacattacttattttcataatggatagcaaacaagcctggtctctgccctcaaatgagacactttctatcttcaaaagttgtcttctatacaaacctgaaacttctctgaaaagatagaacaaaaggctgtcagtacttccgttcccaagacgcacagaaacgctagagatccatagaaattgtcttgcaataatcatacctgctagatttcaagttaccatgaaccagatcccatctttttcatcaccatattcaatttcttccccactgtctagtgcatagtgcacagtataaggagctaagacttactgaggtctcatgatatgtcacaacttttcaaataccgtgtatgtaaactcaattctaactactattatatagttacaaatgttaccttcatttggcacctgaggaaactgaagtcaaaataatttagaaactcatctaagaccaaacaactaacaacagttggagcatatatatatatatatatatatatatatatatatayatatatatatatatatttctagaagacgtaaattggattaatagatggctggaaaattat

SEQ ID NO: 819013 - DNA, 654 bp, Homo sapiens
aaaatgttttactttcattttttggttaatgtagttattacagtttttaaaactagggtgaaaggactaaatacctacccccccacacacactttagagatgtcttcctatttttttaaaactccagatcagaatccacttttattttacttaaagccatagtttatccaaggtgtggcttaggcctttctctcaaaacccattctcagaagagggacccttgactcacaggtgttctcctctcacctgccgtgactcacgggatgcttttggatagaacccaggaaaccttacttcatttctctgcctgagcagtggtgtttacgcccaccagctgtagagatctgggatggtgattcattggctggttttggtacagttttgttacatgtagagatgaaaagggttatgtgtgtatatttaagcagtatcactcagaaaaaagctgcatttcattaagtgtgtttaggtgaaaagcttagctgtgggtttcccgaaattgtaccttgccgtctttcccagtacagcacacttgtcttcccggccagatgcagggctttagcacgggaagtattaaaatctsttgtttccctgctttatgtagggtaggtcataaaaagcatatgaccctcataaagtatctgaaggaataca

SEQ ID NO: 819014 - DNA, 503 bp, Homo sapiens
catggctttgtgaggctctgatgggaaaagccacaaaagggttataacacagggctaggtatgtggtttgtgctacataagtcctgacactgggcagagaggatgtctaggtgaccctgggagggtccagacccatctctgatggatcaggagcctgggcctggtgttcatgggtataacagcaggtaccccttgggaagggccttggatgccatctctggctcggggtcccaaagatgtggcctgattggcagtgctaggactagcctcgtcatttaaggtatgaagggaagaaggacatctgagaggatagcggtgtccagagcctgctggggttgggggctggtgtgccccatgtgtcccagtgatgggtaggtgtccagctgtgcctggtatcaaagtaggggctggcrtcagagtgggggatgggttgcagaggttgagtagaagcagagaagctgaccctgttggggtggaggggccagctggacccagggatctgg

SEQ ID NO: 819015 - DNA, 580 bp, Homo sapiens
catcagataggccacagtgaccgtcactgagcggctgatgcytgccaggcagtgcaccaggacaccacacttcttggagcgggcttcgtctgaaacacattggcatgggtcagggaggtgcctccttcaaggagccttcccacatgggtgggcaggtggggctggggcacagagggcagcatggtggctggctggtcttgcccgacccctgagggacctggccaagcccagtgtgggtagggcagcaacttggaatagaggtcaacagcactgctgtggagagggctctgcacactttagccccaaggcactggacacccgtgtctgtttcctcatctataaaatgggcctatttatgcacagtggtctcataaggacctgagccaagtgaggggtcaacaaacatgaactactgtaatgcctgtgatcatggctagtcctaccactgccatgtgcgttaacgactgctgtcacgggtgtcacctgcatcctcttgggtcatctgcaccatggccagtaagcccattttatcaacgaggaaacagacacagagacaaagtggcaagcccaaggccacaca

SEQ ID NO: 819016 - DNA, 602 bp, Homo sapiens
tctgagcattgttctaagccccatcatgggcatattaatggctctaaaggaagccccagacaaaagaggaggataaaatgtagatttttttttttagtttggatctcgtaattatgagccttcagagtcttcctactcccatcagcaggtttcagttaatttttaaatataagccaaatgtctttcaaaaaatacccactcccaattggtgaattttggagcttttgaagacttagtgacagattcttctcaggaagtggccttaaagctgttacagagacttgcaactgagaaagtttccacatgtccacaggtattcattcagggtttacaaattgttcatggcacgggagccatctatttacttcctggtcctgaggacttcagagttatccttacacatgggagtatcttctttgaattgttgctagattaatatctctatgagatcagagagatataaaactagaaaggttgtatctttctaatttgcctattgaccacataaattgaactggctttacttggagttgccatttctttttttcctgtttttcctgaagtcctytggggacactgctccattattatccagaacttgc

SEQ ID NO: 819017 - DNA, 564 bp, Homo sapiens
ctcaagctcctgacctcaagtgatccgtccgcctcggcctcccaaagcgctgagattataggcctgaaccaccgcgcctggcctaaagagatctaattcttagcaaagtttcaccagggagtctctcctcacccccaccccatccttcccacaaagaattagaacaatgtccctactacccctgctgtatctctgactttttactttaaatctcagcagaatattttactaaatgttttgatgtggttatataaaatcatccctgctgacaaggaaacactttttgaaaaaagttttcattatcaaacagtaagtacagctgactgccgtgacctttaacccatttctgagtctcccctcattggacttgggtggaggggactggtaccaataaagtcaaatgcttaataatttatgcaagtgcttgaagaaatttgaagttgaatatttctatcatcttgaaatggagaaagaatctgtaaacagcaaagccagacgccctaraggaaaagatttacagattaaaataagattgcaatctggtaaaaatatttgcaacacatg

SEQ ID NO: 819018 - DNA, 531 bp, Homo sapiens
aacaaatgaaatgtgaaagatattgtttatctatctatctatctatctatctatctatctatctatctatctatctatctaatctatgtatctatgtatctatgtatctatgtatstatgtatctatctatctatctatctatctatctatctatctttaaaatgcttagacacactgcactaaggttctgctgggcaaatttttcacttgataactgtcatcaatcaatgtgctatcatcaagtgattgtgtaccagtttacttagtcaaaagttataagaagcaaaaatggcttaactgtgtcaatgagccctaaaaaatcatacaagacaagctagtgaaacagaacggagacttgaggagaccaagtctaaagacagagaacactgatgaaatggaagacgaattgggaatgagatatgtaaaaataccctgggactaattatatagaaatgctgaggatatatcattcatgaacctgtaaaagcatacaagaaatatttttctaacaaagaacacctcagtgcatg

SEQ ID NO: 819019 - DNA, 607 bp, Homo sapiens
aaacatgcaaaccacctaagcatggaagaagcttcctgagctgatccctgcaaactcacacaagtttccttccttctccacctcacttcccctcacgctccacacatcctgaaacctatgtgctggtacatgcccaggcatcttccactgtcccaggcacactccacgtgtgctatgtctttaccgtctgtcttctctcttgttcagagcaccttgaaagtggaggccaaatcctatttttccttgttccctagcacttagcacacagtaggcattgttgctgggcattctgaagagcttgaaattcaccttatagatacaaaagccctcaggctacaaatattgttgttatttataattgagtacccaccaaaattattaggaaccatgaagagagaagttttcctgaaaattcacccccaatgcaaaatggtttttccttccctcatctcttgctgccaggataatgtttytaaatcctgcattcctcctgtgaccctcccattcaagaatccactttggcccactgcctccagtctctgctcctctgccaagcccaccacaatgcaaaagcagcagctgctggcgctcacattttcagaactct

SEQ ID NO: 819020 - DNA, 568 bp, Homo sapiens
tttttttattgtgttttttccaggttttggtatcagcgtgatgctggcttcataggawgagttaggaatgagtcctgttcctcaatttttttgaaatagtttcagtagaattggtaccagttctttttgtacatctggtagaatttggctgtgaatctatttggtccagtgatttttatcttattttctggttagcaggttattattattattattattgattcaatttcagaacttgaaatttatctgttcatggcttcaatttcttcctgattcaatcttgggaggttgtgggtttccatataattatgtggttttgagacatcttcttggtattgatttacattcttattccactgtatttcaagagtgtgattggtattatttcaattttttaatgtattaagacttgctttatggccaagcatgcattcaataaaagagtatcatctttcatgtgcagatgagaagattgtatattctgtggttgatgggcagtgtattgtatagctgtctgttaagtccaattggtcaagtgttgagtttaagttcaccatttttttgttag

SEQ ID NO: 819021 - DNA, 496 bp, Homo sapiens
attaaactcaagatttcttcaagtgatttgaacatttgacaatccagttggggaaccaggtattaattaataattaatttgtcgcattcttcagcatatattttctcccttccactggcttgactttgacaaaatatgaagtatgaatgtttgtgacatgaaaaaaataggtcatgaaatgatcccatagattatttcccaaaatgatgtttgatatcaataggacctaaataaactttcaagagttattatttaaggataagataaaataagtcttgaagataatatgagaaaaactttatttttataatggatgaaaaaattctagtctaaatattataaagatatgactatttattattattaagagcaaacaataaatcactttttataaaagtcccaggttcaataatcaataatattacatgcctrtctagtaggttagttctatatctgcaaataaaagtgaagaaaagatcaagtaggtgaaataatt

SEQ ID NO: 819022 - DNA, 548 bp, Homo sapiens
gcttgcaggtgtccagctgtcctttcgcagtagacacatggtggtctcaggagctaacatcggcccttctacaagccagggggacaccaaacacttgcctgtcaatcgagctccactcagctgggttcagacaagctcaggggctaccccaggctcagcagtgccgactatagccttgtgcagttactgctgcacacacgtgaggacacacaggaagggtacgcatttgacacaagcttcccatggaaataccttctcaaacctggagcagggtgagaatgttgcagccctgggcccctcctgggtcagaagctggctcagcccagcgttcacagaggccagcctcccagagcctgagaagaggcctgcaccaggcgtgggcacagaaggatgcagattgtgcaacaggagccaagggctggagaggcattctggcgagagatttggaaagcttctggaacagggtgaaacattcatcaggtgacccargggataggctctccaggaaggaggcccagctccagcagtagccagagttctgggcatgt

SEQ ID NO: 819023 - DNA, 573 bp, Homo sapiens
accatgtcttttatttgccttttaataatttaaaggcattatttaaatatcaatattttaaaataaatacataaataagattcaattaatctcatggatraaaacataagctactatgtttaagaccaacaagattaaaatccagttttgctgcttactgatgtgttattatagcttcttggaacttcagtgccctttacatacaatgaaactaaaataggagatttgagaagcaaataagatggtgcatttaaagcatattaaaaagtgcctgtgcaggaacagaaaaccaaatactgtgtgtcctcacttataagtgggagccaaatgatgagaacacacgcacatatggtggagaggggacagcacacactggggcttgttggagggttggggatagaaggagggagggcttcaggaagaatagctaatagatgctgggatgatctgtgcagcaaactgtcatggcacatgttaacctacataacaaacctgtgtatcctgcacatgtatcccggaacttaaaataaaagttggaaataaaaatttttaaaggtgcctgcacaaggtaga

SEQ ID NO: 819024 - DNA, 585 bp, Homo sapiens
gggtcatcccacagaacctctgacttagaagaatcacttgggacactgctaagtctatagattcctgcccccattccagatttcctgaatcatactttagagtacaacctaggaatgtaaatctttacaagcttytcagtggttttcatgcacactaacattttagaatcagtgctatataataaaagataaaatgaccgagaagaggagaatatggctaaaaatgaccagacatgtaaattaaaatccttaatacattcctgggaacatgctcagcatttgtggaaaagtgaaaggcaaagcaacactgaacagaaataaattctggaaagtaccctgaaaaaactgttttgaacaaacaggttaatttatctctggtttgcattcaaatccagtgacaccacgatggtaaccagaaagcatcgtggaatctctttatggtaagtgatagtttagggaagtcaacattgctggtttgacattcagccttaaaacaaacatcagatttttttctattcacatgttttctcttacccgacaactgtttaaggaagtacaggaaaagacaatctttttcttcattac

SEQ ID NO: 819025 - DNA, 605 bp, Homo sapiens
tagataaacttcagggtcctggagccttaggtattggactttcctgctttgggaaaataatcaactcctgagctccgtaaacaataaccagtatagaatagaaarcaggatgctctgaggagaagccagaccccccaacgtgtgggtggcacctgaagcatgacccttagcatcagggagggaccaaggcctgtcgcagggtgccctaatgctgctgactgatcaccaaaggagaagagtctaaaatgaaaccaaataacagatggcaatcttaacccactcccctacaaaagctccctttcttaaaacgaaaacttacctgagaaggagtttctactccctgatatttagtgccattggttttatctgttcgccgttctccaaaatagtacaatctttcctacaaaaaaggaaccatggttcatctgcactctttccttttctatattaggtaccttagtctttctaaaaccaccttctttcctaaagtcagtgattttttttttttttatggagtctcgctctgtcacgcacactggagtgcagtggcagaatctcacctcactgcaacctctgcctcgcgagttcaagcgattatcttgcct

SEQ ID NO: 819026 - DNA, 612 bp, Homo sapiens
cacctgccactgaacttcattagatcaatgttaatgccttagtcaatcagttgcactactggagtggtgttgagtatctggctgcatttgtgcatatttccctctgtgatacatacttctcctcatataaaagctagtacaatgcaagacatgcaagttataaaagaataagttgataatgcaaagcaaagtaaatgcccaaaaatggaagcacatgcatacattaccttattccaatgtcttcaatcaattcaaaaaaatgtgacctgtctgcgtgtggcacaggggatctctactcctggctcctaccattgcatgagagagaattattaaattttcaggaatttctgagagttgatggttaaataaaattattaaaaattataatacaggccaggcatggtggctcatgcctgtaatctcagcattttgggaggccacggcaggcggatcacctgaggtcaggagttccagaccagcctggctaacatggtaaaaccccatctctattaaaaatacaaaaattagctggstgtggtgacaggcacctgtaattccagctactcgggaggctgaagcagtagaatcacttgaacctgggaggcggagact

SEQ ID NO: 819027 - DNA, 621 bp, Homo sapiens
gtaactttaagggcacacaagaaggcttctgactttattcaggatttatactcctgcagtggtttgtgaactctaaaaatatcgcatccaagctccaaaattttatcaataacaccttaggattttatcamtttgaacacaaaatatttaaagcatatgagggcagactgtattcctaatgtagcatagaaaaagatgagactaggttatcaataactcagtgagcccagcctattgtagaaatgattataaccatactgactgaaagttcgaaaatgtgctgcattcaaataagatattttaatatgcaaaatagaagggtaaaatttatagttatagagacctctaacaggaaatacaaaatgttgcagcagaatagtttaaagtctgttctcagctggatctcccttgaaactaatgccgcagaaaattaaagagagctacaggtctgtcacagaggacatgtgattctaaagaactatctcagctcatcctttaagcttttggatggttaccataatgctggaagctatgcttggctcacaaataaccaaacgataaacaacttcttctcagcagccaactggtcaagtgtattttgtggtttaaaataatcttctt

SEQ ID NO: 819028 - DNA, 524 bp, Homo sapiens
tgcattaactctcaagactctacctacctctctctttgcctctggtctctccttgttccaatgtatcctgttatcatatgtatcttttcaaagcacaactctaatgctatcaaaaattcagctttctacaatgcctaatctattctatatttggtaagcagggccctccacaacaatgacccaaattatcttaccaatcttaacctctgctatatgcctaatatcttaagctgtcatctcatcaaccttatcatagttatccaaatgcctcttatattctcggaactcacctattcccttatactgcttcactgacttgtaaatctcataaaaatatactctatttatcaaggccaatatcaagcctttctcaatgttttcaattagacattctctcttccttctccggtrcctacagcagtatatttgtgtggggaatgacacttactgacaccacaatatagtcaagtgtgtccttgtcttatttcctagatttaatggaagcttctccaatgaacccaatg

SEQ ID NO: 819029 - DNA, 527 bp, Homo sapiens
ggccaggtacaagagagacgaagaatgtgcactagcttttaacgatgccctgagtcacacagtcacatccatatataatccactgatccagactagttacatgtttctaatataattgcaaagcaggctgggaaatgcagaggaacaaatggatattgccatgagatttgcctctaccaaaataaactatgcataaaacaaatatttggattcttaggtgttctctcttaagagtttttatatttgggggaaacacattaccaaaattttgatggcaaacctagtgtaatggacattattatttaatctgttcaacaatactgtcttccttcccttgcattttttggtaaaacaaagtaagaatattagtctaacaatcgtttttgtaagaaagcttcttgtgctgtctgcagccatagggattaagccactccagtrtgaggaaaataaaaaacaaagttaaagaaatgtcaagagatggaaacactgccaacagcatctaaagctgtatttccagtcattcctgg

SEQ ID NO: 819030 - DNA, 520 bp, Homo sapiens
atccattccttttccacatggactaggtaccatgacaacccagatacttgactaacacagtttctctgattcaattcacaggaggggcacacttcccttcctcactattccaaagccattgccattcctagggaaattcacacacacacacacacacacccctctcaagagcttgatatttaaaaatgcacttccatctttagggttttttgggttttttttacattttacaattcatcatttaatcccacaacaatcttgtaggattattgttattgcaaacttcgaaaaaaataacttgcctaaattccagcagctggtaatgaaagaaggtaagattaaatgccacacgtgaccccaaatcctttctttttttcaccttacttcatttcctccattgggtagcatacttgttytgcttctaactaaattacaattgtgaagagaaaaagcaggaaaagttaaataacttttaaagcagcaaataagtgccagatgagtgttacagaaaataaattac

SEQ ID NO: 819031 - DNA, 622 bp, Homo sapiens
caaagacagggagtgtcaagtactcatwgcctcttacctgctgtacttcactttctccatttgagattttctcagtgtaaacaaaggagttgaatatccgctgcaatgaaaagaaaatgaacatgagattttctaaataagtcattttctacatgagtgtgtatgtgaataatttgtttacaacaaatagaatctagtagaaaaaaaatttaattaaaatgcagtaattttacagagagaaacccaagtatcagccaaagtcaatcacacttatgtaagcaatacccaggcacctctgtagcaaaataaaccaggtgttacactatatttttcattttcaaaaatacatttaattatagatttctggagtccatgccattttatccgactagtataatctgaccaagttgtgtttctcatttaaatcctgcgctccctgaatgctgtaattgtttacggacactaacatctaatgcaataaagatctttaaaagggattctttccatattctctcatgtccctgttcagtcagtacctacccaatattatctatcaccttcgttactcaagtaccccgtcaggagagtaacataatagggcttgccaaatatgtgtggactt

SEQ ID NO: 819032 - DNA, 656 bp, Homo sapiens
ccagaggcccagaggaagccgggggaggtcagcatgtgtaagactcatggaggtggccctgagggaggtggcctactaaacattgctttaaaagtcctttactaggggacgtttcaaatggagacatttctactgtcaatttcttgaaatgtcagtaatggtctccctatattgaatttctgtacaaatccaaattcccagagctggctgtggtggctcatgcctgtaatcccaacactttgggaggctgaggtgggtggatcacctgaggtcaggagtacgagaccaccctggccaacatggtgaaactctgcctctactaaaaatacaaaattaaccaggtgtggtggcacatgcatgtaatctcagctacttgggaagctgaggcaggagaatcacttgaacccaggaggcagaggttgcagtgagccaagatcatgccattgcactccagcccgggcaacaagagcaaaactctatctcaaaaaaaaaaaaaaaaaaccctccaaattcccatcaactatacttaaaagtaagctctggctaaaagaaatttcttaacaaagaggtggagaaagayggagggagagggaagaaagaaaagcaatatctactactgctaaaccacttagagggggcaaaagggacatattccc

SEQ ID NO: 819033 - DNA, 611 bp, Homo sapiens
ggagtgagccatgatcacaccactgcattccagcttggacagagcaagactctgtctcaaggtaaataaataaataaataaatamatacataaataaataaataaaatctctctaaacatcattgtgtgatcaatttacaatatattcctattgccatctttatctactatgcctctaagtcctctgagagaacgcactcacttgcttggaactctgtgttattgtttgtacttcgaatcagctgaaatgccttttggaatcccactgcgtgctgggtaggactgtctgaagacttcacgctgctaacaaaggtggacattttcctttttgtctcactggtggctggagacaagaaggtcttatagcactggtctagtgagcaagtccggacggtatctgccacagttaacacagaaatctgcaggaaagaaaaaaaaaaaaaaccaccaaacttgttatcctaccgtctaaagatttatttatttatgtaacagaagaggccaaggagtaagaaggcctacagaacagattctgagagtttcaaaataaatccctggagccatccatctatcaaatttgaaaaggatccataaggattggtaaagtgggg

SEQ ID NO: 819034 - DNA, 244 bp, Homo sapiens
tcaaagtttggtctttcttatagtttctcataacgaccctattacactgacttcagaagattttgttagccatatactggcatatatacatatatacacaacatatgtatataaatacaaatatatatacacactcacactcatactacatatcataatggatatagcctttttttaacttagcaaatgtatcctgaacttttttattttcatraaataagattttatgcagtaaaatcaataa

SEQ ID NO: 819035 - DNA, 555 bp, Homo sapiens
agttaaggatcctctttgggattcagaatgcagaggggagtgtgaactgagaacccctctcttggggctgccgatgtcaggaacccagagcaccagaagttttcctttaagccttgtcttcccacagtgcttccaaggacaggacactgcaggtacagttatctgctctgtcacatctgcacagcattggtcatcttgttctcttcagatactggacacttgaaagtttgtctcaatgatctattaatgcactcaaaccacactaaattagctttgtcatctggtccaggttaggctgggcaattctgctggtttcatttaggctcacccaggcagctgaagacaccttggtgcagcatggtctaagttggccttgcctggcctggggtagctgccgttggctgagccgtacatctccagcaggctagcctgggctcctccattggatgcagccttcccagagcaagccacatgtgcaaccgcttcccaagccgctgcttacattgcatttgctgctgycccattggctaaagcgggtcatgtgaccaagccggc

SEQ ID NO: 819036 - DNA, 640 bp, Homo sapiens
aacactgcccttctccaccagcctcttcagccctccgtcgcttaacagctgtgtgattggcttctccgagcctcacttgcctctccgtgaaatgggaggatcttgyccacttggcagggatgttgagaaagatttgaaattattagagtaaatctgcaagtgggagataactgttaacccatgtcagcgggctgggtgagctctttggttgcaggaggagtgggttccaactctcatctcctctcacaatttgttaaaaaaaaccatgtcccagctgggtgcagtggttcacgtctgtaattccagcactttgggaggccaaggcaggcagatcacctgaggtcaggagttcgagaccagcctggccaacatgacaaaaccctgtttctacaaaaaaaaaaaaaattagccaggtatggtggcacatgcctgtaatcccagctacttgggaggctgaggcaggagaatcacttgaacccaggaggcagaagttgcagtgggccaaggctgcgccactgcactctaacctgggcgacagagcaaggctccatctcaaaacaaacaaaaaaccgtgtccctcttgggtagcctggatggcaacaggcatctgcctccacatggctgactcctctaccctgtc

SEQ ID NO: 819037 - DNA, 535 bp, Homo sapiens
tcaccttcccctcataaaaacaytggcaggtgaacataaggtctggggactgggtccaaactgttttatcatctccttggaagtggcaggacctggcccaaagccccagagaaccacagtctggcagcagaggagaggcagcaaggagagtgccaccgtgccagttgcagggggaggggtggaggcacggcaggctcccggtggcaggatggcctgagaagggccaggatgaggcagggtggctggcgctgccccagatgaaggtgtttgaggcacacaccatactccaaacggaggtgccccacagcagagcccaagcagctaagtcggggaaagggcagtgggcgaggtcagaaagctgggtcatgcaggccaagtcacttcccctctgcatctcagaggtccagggttagaacaaaggtttgagtggctttggcaagcagtggctgttaactcaccctactatgtgccaggcactgctctaggaactggagacagtgggtgagccctaccaagctgacctgcagaaggggag

SEQ ID NO: 819038 - DNA, 661 bp, Homo sapiens
ggctggggcatgagaatcgcttgaacgtgggaggcagggtttgcagtgaaccacaattgtgacactgcacttcagcctgggtgacagagtgagaccaygtctaaaacaaaaaagagagagagggagaagcatgagagctgggcacccattagacatggtctagcatcttcttgagaagtgaaggggacctgagaagcttatggaaatattttcctaatttagtctttcatattggcccatctttgtgagaatttatatgtgaacatatgtcaaaatggtggcaatcatgtcaaaaataatagaaacatcttagcaggttgattatttttgtagacttacacgtagtaccttgaagacaatagaacgttatttaaaaaaaacatttggctcagtgttttgagcttatatattctgtcaataatgggtggtagagaaatcaattaactataggtctcttatacacactctatacatgttgtccttcacattaagagatgatgctatagaaataagttttcataatgtatgcacatgaagatatatgtataaatacaaattaaatattctatgcatgcatagaaataaatacttgatttcctgttaacaataataacattagtaataataataatagctataatttataagaatttgccaggca

SEQ ID NO: 819039 - DNA, 599 bp, Homo sapiens
tacaaagaccaaatatcttcttatatcactgcaggccagcagactggaaactcccatagaatttttatcatgcagtcttgaggcagaattctttcatctttgggaaatttcaatckttgctctaaaggctttcaactgatcggatgtggccaacccatactatgtagggtaatttacttaaagtcaactatctataaataaatgttaatcacatctaaataataactttatagcaacatttagattggtgtttgatcaaacaagtggataccatagcctggccaagttgtcacacaaaagtaaccatcacagatgtattattttatttaaaatcatcagtattatatgaattaattcagaaataaaaaaggtgttgtcatagtgtgaacacttataagtgtctttcccacagaaatgtcaacagactgtgatttgaaaattgctgttttaaaagagaaaagctcatcattctacagaaatgattcaaagatagacaatccattaaatatcttataatgggccaaatactactagttgttaatttacacttgcaacatcaaacactttaccagctttttaacatgcaactgttgcatatg

SEQ ID NO: 819040 - DNA, 493 bp, Homo sapiens
cacgggcttagcaaaggggaagggctagaaggagaccactgcctttttttttttgattgatgatgacaacaatagccacagcaacagctaatatttattgagtctttaatgtgtatcaggcattgttctacatgctttactagtgaggctggagagcagtggtgcaatctcagctcactgcaatctctgtctcctggactcaagcacttcccccacttcagccccaaaagtagctgggactacaggcatgagcccccacgcctggctaatttttgcactctttctgtagagacagggtttcaccatgttgcccaggccggtctcaaactcctgagcttaagtgatccactttgcctccatctyccaaagtgctaggattacagatatgagcctccatgcccggtctactagtgtgtcatttaagtcttaaaacagtttatggttaagtgttactattaagcctattttaatgaaactgtagcaaacttagtta

SEQ ID NO: 819041 - DNA, 590 bp, Homo sapiens
catcaacttaatgtgtgaggtcaacctctctgggctgtttttttaggtgaactaggggatcggggtggccacagggcatctgtaaactccctgtgaatcttatggaagagttstatttgtgtgagtacgtgtacatgcatgtatgtgtgtgtgtcacagttttcaaatccatgacctcaaaagcctagggcctatttgacttcttactaggacccttagctctaaagccaacatctctgatacaaagagaagaggccatgaacagactaagttcctggtttggcctcattagctcccatccaccaagtgacaaaacctgagacttcatccctatccaatggacacaggctcaagcagtgccagaggctcatgaatatgaagaacactctgcttcttccctccaaaagccaccgtctggctgtaaagctagacacaccacgaacagctggattaaggattttatgcaaactctggagccagggtactggggtggggctgggattgtgaactatgaagttgacatattccttccatcccctgaaataatcccagtcaagtaaggttaggatgagagtgacttaattaattag

SEQ ID NO: 819042 - DNA, 590 bp, Homo sapiens
catcaacttaatgtgtgaggtcaacctctctgggctgtttttttaggtgaactaggggatcggggtggccacagggcatctgtaaactccctgtgaatcttatggaagagttgtatttgtgtgagtacgtgtacatgcatgtatgtgtgtgtgtcacagttttcaaatccatgacctcaaaagcctagggcctatttgacttcttactaggacccttagctctaaagccaacatctctgatacaaagagaagaggccatgaacagactaagttcctggtttggcctcattagctcccatccaccaagtgacaaaacctgagacttcatccctatccaatggacacaggctcaagcagtgccagaggctcatgaatatgaagaacactctgcttcttccctccaaaagccaccgtctggctgtaaagctagacacaccacgaacagctggattaaggattttatgcaaactctggagccagggtactggggtggggctgggattgtgarctatgaagttgacatattccttccatcccctgaaataatcccagtcaagtaaggttaggatgagagtgacttaattaattag

SEQ ID NO: 819043 - DNA, 602 bp, Homo sapiens
acgggttaggggtgctgacccctgtgcagtcaaaaatytgcatataacatttggttccctaaaagcttgactactaatagcctactgttaactggaagccttacttataacataaacagtcaatcaacatatattttatatgttctatgcattatatactgtattcttataataaagtaatctagagaaaagaaaatgttattaagcaaatcataaggaaaatatatttaatattgattaagtgaaagtagatcatcacattttttttttccttgtcttcatgttgagtaggctgaggagaaggaggaaaaggaggggttggttttgctgtcttaggggtggcagaggtggaagaaaatctgtcattgacattttgctgggctgagctggttgcctcctgttgttgtggaggtggctcacttcatcccaacttcttgatactttcacttctggaggtcatatttctctaagatcttccagaaaagtcttaacgctgccttagccttttttccagtccagctcttaaattttttacttctcttccccagtaataacatgagtgtgaatccagcttgtccccaaacctgcctggcttcaaagca

SEQ ID NO: 819044 - DNA, 527 bp, Homo sapiens
ttgcggatcctggatgaaacccatcttactgcttttggaggtggagtctgtccacctacctgagggtaacaattgtttcatcctcagctatgtccagttgatttctgcaatgatatccatagaaactaaaaatatctgtagaaaatgatagcctataactaattgatggaaggaaagataaaagaagagaaagatgattatttggaaaatttccacaaatggctatgctgctgctaaaaggagcttcaacaatgttaatattaaagccattagtcccaggaagggcagactctttaagctgcttggtgcaaatgagaagatggatgttactcaggcaatggctgatgtcacctccatctgccaggcatggtctgctagtaaataacgtggggtgctggaacagttagtgagtgctttcttygtctcagaggaggcagaaatgtttgatgctgcaggacagaacacagtctatatttcatattctagtttctcttaagtggatgattccttttagattgaagcacatg

SEQ ID NO: 819045 - DNA, 613 bp, Homo sapiens
aactacttgggaaaactgttgagcggtcagtgctgaagctgaactgatgctctatgccaagtgattcaacacccgtgtatattcctgacaggaatacgtgcctatgtgtcctggagggcgtgcataagacyatccatgacagttattctgaataggcattaatgagaaacaagccaaatgtccatggaaagtgaaatggataaatgtattgttacagtgaaaaggaacaaagcactgccacacacagcaagatagtgtgcacggtgttacgtaaagaaaaccagcgcaaagaagtataaggataatggataatggccattgtacttgctaaggataatgccttccagctccatccatgtccctgcaaaagacatgatctcattttttttatggctgcatagtattccatggtgtatatgtaccacattttatttatccagcctaccgctcatgggcatttaggttgattccatgtctttgctactgtgaatagtggctctatgctgtatgcttttgaaactgtatgctttcctttatacacagtttgaaacagggaaagtgcagctctggttttgagtgaagtcagaatgattaatttgaggatgggaacgag

SEQ ID NO: 819046 - DNA, 594 bp, Homo sapiens
tttgctgggttacatgtaaacatatatttractttataagaaattgccaaacagtattccaaagtgaactgtattacttcacattcccaacagcaatatacaaaagttgagatttctccatattttcagcaacacttgatattgtcagcatttttagtataagccattataataggtgactaacggtatctcattgtggttttaatttgcatttccttgatgactaaagatgttgaacatctctttgtgtgcctatttgtcatttgtatgtctttatgaagtgtctatttaaatctttacctcatttctcaaaattgagttgtcatattgagttataagagttatttatatacagacagtccccaacttatgatggttcaacttgtgatttttcaactttacaatggtgtgaaagtgatacacattcaatagaaactatacttcgggcacccatacaaccattctgtttctcaattttactacagtattcaataaattacatgagatattcaccactttactataaaataggctttgtgtcagatgactctgcacaactgtaggctaatgtaagtgttctgagtacattgaaag

SEQ ID NO: 819047 - DNA, 556 bp, Homo sapiens
aaagtgaactgtattacttcacattcccaacagcaatatacaaaagttgagatttctccrtattttcagcaacacttgatattgtcagcatttttagtataagccattataataggtgactaacggtatctcattgtggttttaatttgcatttccttgatgactaaagatgttgaacatctctttgtgtgcctatttgtcatttgtatgtctttatgaagtgtctatttaaatctttacctcatttctcaaaattgagttgtcatattgagttataagagttatttatatacagacagtccccaacttatgatggttcaacttgtgatttttcaactttacaatggtgtgaaagtgatacacattcaatagaaactatacttcgggcacccatacaaccattctgtttctcaattttactacagtattcaataaattacatgagatattcaccactttactataaaataggctttgtgtcagatgactctgcacaactgtaggctaatgtaagtgttctgagtacattgaaagtaggctaggctaagctttgaag

SEQ ID NO: 819048 - DNA, 479 bp, Homo sapiens
tgcagcatgacattataaatgataaataatgtgaaattagacaccgcggagaactgcatatttggccgtttcaagttctaggcctctttcctttcctctcataagagccagcttatgtggaggtaggctgcctgaaggttatacattttcagtttataatatctgctcttaacaataaatattatatttctatacaactgctccattgttccccccaacaaatctcactagacagttccccttggccagcaagaattactttcagaaggaaataatccccgcaacctcagtgatttgtaagtgggtaagactcagcctaagatgaaaacacaccagtgatccgagtcttcattttyaatttcagcattcacttgcaataggaggaaaaccaaattaattttccactttacttcattggcaaactatttctcactttgctgaaggttcgaggcacggtgataaatggtgaataataagct

SEQ ID NO: 819049 - DNA, 614 bp, Homo sapiens
tgtctgggtggctgctatggattaagaatccaaggtcacgatttaacccactagaaatgaacttgacgattaccttgtcccttaaagggtgatttgttctcccgtggggacctggtcccacagccaacaatacactgccggtgtattgcactctgctggagttccacaggctggttcataaattgaatttcattttcagaatcaggaggaaatgaagaaataattttatataccgtacatttattgaaattatatcaaaataagcaatgaaggaaaatttctgttggtaatataatttcaaggatcacttcatgagtttgcagctagaacagcatctgaaaatatctgggtttgataagcacagggagaaactgcccgtgttctatttaaacgtggagggagaagggagcgccctttgcagagtccccactcagctctcctcccatctcgcttcttgcatccttgtccctctgtagtactcgctgttgacrttttgcaattgtgcatatcccaatttagataccatttctttgtcttgatagagggcctgaaattatagttacaggacacagcactcaaccccggccattttggttcccacattggtgtaactt

SEQ ID NO: 819050 - DNA, 620 bp, Homo sapiens
aagcttctgaaacccaaggaggaaatataaattctcctagttaggtacattaaggaccctttgtcttttagttacttcgtaagttttaaaacatggttaacataattcacgtgtcatggagctaagagtcggtatgaaaaataatggtaatttctaaattttactggttgatgcaaacgcgtttcataaagataacatattcaaaacctatacaaaatctacccatcttgatggtattaagaaaaataacccatgtcatcactgtcctactgcagtgcaattaaataaagatgtttttgacaatttattttctgagaacataaacccaactcaatgtatttttcatttgtattattttcccatttcacaaaaccaagggaatttaaaataactgtggtttgacccagtaattttctcttctaataatatatcttaagaacatggaagatattactaaaagtttatgtaatgggatgttcatctcaatattatttataaagaaatcatttaaatgcctcaaaataagaaatgaataagtgatagcrttctatctaaatgatacatgcaactatttaaattctatgtctgaagaacaatatgagaaaatgctcatagcataa

SEQ ID NO: 819051 - DNA, 498 bp, Homo sapiens
gggccctgccccacgcacctcctttcttggctgatcttcatttgaatcccttcactctaataaccataaccaagactagagccgctcacaggaagttctgccagtcctcctagcaaattatcaaacttaaagatggtcttagagctccccaaacttgcagtgggtgtcagcagtgagggtggtctctgggctgttccctaacttcatgctctaccttgaccaatcatggcaactgctaccaggaatggggcatgggtcaggcagcgacccatgagaccggaagagacttagccgggagccttcagctgacggcactggcagcggccagccagaaggatgagggctttagtcctattggtgggaccagcggggagtgtggacggtracacaacatccacgtgtgcgtgctcatgcacgggtaagtgtgtgtgtgcgttcatgcacaggtacatgtgtgggtgtgcatatgtgtgtgtgcatgtgtgcgtgctcatgcat

SEQ ID NO: 819052 - DNA, 498 bp, Homo sapiens
gggccctgccccacgcacctcctttcttggctgatcttcatttgaatcccttcactctaataaccataaccaagactagagccgctcacaggaagttctgccagtcctcctagcaaattatcaaacttaaagatggtcttagagctccccaaacttgcagtgggtgtcagcagtgagggtggtctctgggctgttccctaacttcatgctctaccttgaccaatcatggcaactgctaccaggaatggggcatgggtcaggcagcgacccatgagaccggaagagacttagccgggagccttcagctgacggcactggcagcggccagccagaaggatgagggctttagtcctattggtgggaccagcggggagtgtggacggtgacacaacatccacrtgtgcgtgctcatgcacgggtaagtgtgtgtgtgcgttcatgcacaggtacatgtgtgggtgtgcatatgtgtgtgtgcatgtgtgcgtgctcatgcat

SEQ ID NO: 819053 - DNA, 540 bp, Homo sapiens
aaatataggggtagaggaagacacagaatagacccagagagaggtgtccttgttactggaccgcctcaaacagtagaatatgctatggggcacagcagtaggagctttatgccagaggaaaagttctaacattatagaggggacttacgtgagcccagaaggttataaagatggtagaaaatgtggtcctaagtgtacaggattttgataggaacttaggacacttttgatgaagtgtgcacctctgccactaagttgtgcatgccatgttgcctgctcgtttctgccactgcctctgttgaacagacagcaatagggagtccatcttcatgatgtcaatttcatcacatctggtcctttcatttctaagaggtaagcaaacacctcagctctgttgcctggtttccatatctgagagcgagtgccacaggccttcaggttcccacacctatccatcgaagactttcccttgagtggatgtgcrgaatccaggcctgtcagtgtccaggctcagcctagcaggtagactgaggtggctcc

SEQ ID NO: 819054 - DNA, 605 bp, Homo sapiens
accttcagctcagttggaaactgaacttcgggggttagaagggaagagagtmggtgccccattggtttgttaccttcccaacatgcgacaagtcagtttccacgtagatgaaagaggaggtggtctgatttacaaagacagatgagcccccagcttcctgtttggccaccgacgggctcactgtcacctcaccgagggtgcctctgtcctgtcccagcaccgttaaggtgcaatgggtccttggtctaggagtgaagacgatgggatgaagatggggggatggagttaaataaaagggcctgactctcacttcgctttcttcatccttcctgctccttaagatagttggatgtttttcccacttggtaaagttattcctacaattggcctacaggaaaaggaagacaggcaaaacaaacaaagcgtaaaaagactcccctggcctggcagcaatgataacccacaccattgacaccagtatgttcccttattattttacaacaaaagggattgccttttgatataaccaaatatggcattttagaatctttttgacagggttcagtttatcttgttgagcttaatttttttttatgtattctaga

SEQ ID NO: 819055 - DNA, 609 bp, Homo sapiens
gaaagaactccggagctcaaagaaaaggctttcatattaacaaaatttgacaaagacaaagaaaatagaattttaaaaaatgaacaaagcctccatgaagtttgggattatgttaaatgaccaaacctaggaataattggtcttcctgaggaagaagagaaatctaaaaggttgaaaaacttatttaggaaataattgaggaaaacttccatggccatgctagagatctggacatctaaatacaagaagctcaaagaacacccaggaaattcattgcaaaaatatcatcacctaggcacatagtcatcaggtcctctaaagttaagatgaaggaatgaatcttaagagctgtgaggcaaaagtgttaccaggggttccttgctcccagagctcccaagatggcggcgggccacttccaagatggtggcaagcctcgtgttctctgacctggggttgttggcctcacagtttccaaggaatggaatcttgggccatgcagtgagtgttatagctctattagaagccrtgggtcatggaagagaaccgtggaacccagtgactagtgttcagcttgattaggacaaacccaggcacttagccatgcaggaa

SEQ ID NO: 819056 - DNA, 522 bp, Homo sapiens
ttctgatatagaccagagactatataagaatataatgcataatatatatgtgatatgatacaaaaagcattacaaaacaacacagctaaggaatggagatattctaataaaggctagaacacacactgtcctgtaaattctgatcatcagacagatatgtatatagttatacggtaatttttatgcacttgcgcatagtatagtttctatatataagagagaggctacggtcagattgttgcaaatatcttgagatggtggttaaggaaagtgctaatttattaaagcatatataatatagctatcagtttatagatttatatataaatctatatatccttttacatatcctctctttccaaaaactttggaagatacaacacacacaaacaaacaaacagtcaggcctctgagccagarctacgccattgtaacccctgtgacctgcacgtatacatccagatggcctgcaggagccaagaaatttggagcagctgaagaaccaaaaacgacgtgaaacag

SEQ ID NO: 819057 - DNA, 512 bp, Homo sapiens
aaaaagataatacaccacaaccaacttggatttatactggggatkcaaggattattcaacatatacaaattagtaaacaagatatatcacatcaacaaaataatatgatcatctcaaaagatgcagaaaaagcatttgataaaattcaacatcacttaaaaatgatatacattctcaacaaactaggaacagaaggaatatgcctcaaaataataaaggccatatgtgacaaaatcctactaaatggggaaaaactgaaagtatttcctctaagaactggaacaagttaaagatgcccactttcaccactgctatttgacatagtcctggaagtcctagtaagagcaatcagtcaagagaaagaaacaaaagccatccaaagtgaaaaataggaagtcatattgttcctctttcctaatgacataatcagatatctagataaaactaaaaactccaccaaaagccttgtagatttaatcaataaattcagtaaagttgcataatataaaacc

SEQ ID NO: 819058 - DNA, 381 bp, Homo sapiens
ttgacttgctgctgcaaatgaggtcataaggaggaaacgtagctataagaawtgtactcccagcttcaggatacgaatgccagaaagaacttcaatctgaatcaatgcatacagagtcatgtaaaataatgaaattatattttagtatgactatgaagagttgcatgaccacccaacctctcagtaaaccaagttatctttcttgtaatatggagctttgtttatacttctatttcagaaactatttatttctaattaaaactaaaaattgtaacttacttatgttttcctgcagcaagtagcaccagaaaaaaagtcctcaagaggtatttgttgagctgaactaaacacaggaagataggctataggaactcagatttt

SEQ ID NO: 819059 - DNA, 585 bp, Homo sapiens
attccatgtacaccgcctttatttgggcctccatcacctctcccaggcactctaattaaagctctctaagtagtttctttgccttcagtctctcctttcccaattctaccttacaactcttccatgataatyactttcctagtgtaaatcttgatcatgtcagctaccaaactccaactgttctcaagagtcttctgagaacagaaaattagttatttatttttctaattataggatcagggttaagtagcattttttttttttttgcattttatctatgcttgctctgatgcaagattgctttacatgcatatgatgttttaggtcttaactatttaaaccaggtaccatgtaggccataacacataaagacagagtatgacactattggtggttccaatcagtctagaacagcaatgtgaaagctacatctgcaattttaagttttctagtaactatgaattctatagacagaatttgtatgatcccccaaattcctatgttgcaatcttaccctccagtgtaatggtattaggaagtggggtttggggaggtgatgagtcatgagggcagagctctcaggaa

SEQ ID NO: 819060 - DNA, 528 bp, Homo sapiens
gaataatgtatattctgcaattgattgaaaattttctgtaaatgtctataatatccatttggactagagyccattttaaatccaatccttctttattgattttctgtctaaattgtctatctaatactgacagtggggtgttgatatccctcactatagttgtagtagatctatctctctttttatatctagtaatatttgtgttatgaatctgagtgttccaatgttgggtacatatatatttagaattgctatatcatgttgctagattgatcaatttttacatcatatagtgaccgtctttgtctttttttaaactgtttttgatttataatctattttacctgataaaattatagctaattctgttagcttttggtttccacttgcatggaatatctttttctatccctttatttggaatctatatgtgtattttcaagttaaatatgtttgttctaggatagttggatcatttttctttattcatttttctctgtctttcaagtgaagaatttaatccattca

SEQ ID NO: 819061 - DNA, 488 bp, Homo sapiens
ccagatgattacattatctaactgtctgagccactttcaggtrtcggtgtcttcccatctaaagtcctaggaatgagagagcagagataaatccttcccattgtgtcctacctaagtttctctcccacagaaacagtgatcataacaaaatggcggtagttttaagctgctaaacctgggatagtttatttttcagcaatagtaactggaacaataactatgtctacatttggtgcagcagttgatcaacatcatctaagagacaggctcgttctgcctttcctctttgccatcctctgtgtgttggtgatgtcacgtctctttgaaacgagatgaaacctacaactctaaacctttcatttatatagtacagtgctccaagaaggtaggaagaaagcaggggattttaccttgtgctacaatttttagaaacattttaaataaaatttttaatttccaaataaaaattatatacatttatggtgtat

SEQ ID NO: 819062 - DNA, 480 bp, Homo sapiens
tattggatgatgagggtggatccattatgaatggcttagtgctattcccttggtgatgagtgaattcatcagttaattcacaagagatctggttgtttaagagtctaggacatcccccttctttctctmtttctcctgtttttaccatgtaatgtgtttactcctccttccccgtgctccataattggaagcttcctgaggccttcaccagaaggagatgcagcactattcttggtgtacagcccacagcactatgagccaattaagcctcctttctttataaattactccaccttaggtatttctttatagtaatgcaaaaatagactaatagacatcttacctactcatgccactgtttcagaagccacccccgttccacttaaatatcatacatgatggaaaacaaaacaatacacaaggtagaaaacatcctagatagcagctcctgagggaaggtacacttctacaaaataaaaa

SEQ ID NO: 819063 - DNA, 643 bp, Homo sapiens
cagatatttacatctaaaattcacattacttgttggattttgaacatgctaccacaatatatacagtaaaatacctcttgggacaatggtacaaattttgtttcctttaactttgcttttctggtacaggtaaratcatttttaaatcactttttttctttaaacatgaatacacaaaagaaatggttagaagtttccttgttttaaataagcacagaatgcgggaggttaaaaacacatttatagtgctgaataccaattggacatcacactctatacattttttgctcaaattcctgtacaaatacacagcattcaaataggtatttacaaataagcttgaaagaatgaaaatcagtattttacaatcttttcaaagggttctcatctctggcctcccatttcccctcagactgacttattctccaacaaaagggatttcagaatgtgtccttttcatttagttagggaaaatggagagggaaaacaaacggtttcaccttgcataatgcgaagccaaatgaacccatactcccctccctacctcttgtgccaccaagtggagaaggtagctgttcttatgtgatgactgccttgtccagggattgactttcagaagtgccttaaaatctaagccctccta

SEQ ID NO: 819064 - DNA, 561 bp, Homo sapiens
gaaagaactacaatattatgaaagtaagccacatcataaatggccacataggccacactaaaaacttyacattttactctgtaggaaaaaggaagtcggagaagaatgtaggtatgaatgaaggtaggaaaatcctatttgtgtatgagaaaaaggaatctttcagcaagggggaggatgtattaaaagagggtaaactggagggtaaacttataaggcacactgcttaatgggccagtcaagacatgagcaatacctaatgcaggccaggcgcaatggctcactcctgtaatcccagcactttgggaggccgaggtgggtggatcacctgaggtcaggagttcaagaccagcctggccaacatggcaaaaccctatctctactaaaaaaaacagaaaaattagccgagcatggtggcttatgcctgtaatcccagctactccagaggctcaggcaggagaatcacttgaacctaggaggtgggggttgcagtgagccaagatcgcaccactgcctggggcagagagcaagactccgtctcaaaaaaaatgaaaggtaaaa

SEQ ID NO: 819065 - DNA, 555 bp, Homo sapiens
ccaatgccctggcctctcatttccttgactcctcttctctggtgacattgtactccacccaatgytccatttcagacacttactcccatgagcgtcccctagaatttgtcattatcaatagctgcatcccatctataatttctttcatgaatccactctctgatcatacctcctgtctttctagcacattccctctagtactctgaccccaacaatcctgtcccttcaccagatatccaatccaaaatcttgctgcctcttttctggctccaccctcttgacatcctgacttttctgcttatccattaagtctgtggtcaattattttattcactcctttgcatatgctctacattcccttgctcctctctcactttgttgagctctcttggcaagtttgcaattctgattaaatccaattttctaagttggctccacacccatgcacctgagtgtagctggggaacggggtggaaaaccaaaatcctgttaattgaactcaatttaaaatcaaggccaagactctcaagtgggtcctttatgccactggacaag

SEQ ID NO: 819066 - DNA, 642 bp, Homo sapiens
ctgtaaaaactacatctttgactcgaaaatctttgtctttagttctgatcatttccctaagatctatatattcaactgttatctagatatctctttccakatgttccacagacatcttaagctgtctacctccgagctatgatcttgcccatctttcctccaaactagttgcccttcctgtattttatgtcttagatagtgacattgtgatccattcaaattaccttgtccctatccccgttatccagttggccatcaaaccctctcaactctgttgtttaacattccttgaacccatcacctcctcaacatcctaaaacctttgctttagtttaggcctgtagtcatagattcacagaaaacaagtaagacaggacatgtgtcattaacagggaacagttatgactaggaccaattagagacaatagaccttatttaaagggagcacagagtacttagtttaaacagactctctcctgcgagaacaaaggcccagtattcccagatattttaaatttaaaagaaacctacatttttaacgtgaaatctttttaagtggggcaagtagttcaattttttaaataacttatatattgaataggaagtaaacatacactgtccctacctccaacacacatacat

SEQ ID NO: 819067 - DNA, 600 bp, Homo sapiens
caaagtggtatgacagagttaagacaacaaatgagtcaataacacagtaccatagagaygcaattacatacagagtagaaattataataaagacatgttagattacattcagtcaacagacatacatacaaacagcatgtagtactagtatccactgatagtgaattctcctctttctagacacacagtagcattgtacttccccatctatttgaaattcatcatgaccatctgacttactttgaccaatgaaatgagagcaacatgtcacttcagggtagaagcatttaattgggggtgaccaattctccacctctgattatttcttgctttgtgaggttcaacagtgagtcatcatataatgaacaactgccctggagagttatgtgaaccacagtagatttcaaactaatgagaataaatctttgttgtatgaatgcacttaatgcactggggttgtggaattgtttcttaagtcatcagaacctagcctatccttcctgacacaatagtgatcatgtaatagttgcgtttggtggatacagttgaaagacataaggaaacagtaatggcccttgccaaaaagtctctataatttaa

SEQ ID NO: 819068 - DNA, 516 bp, Homo sapiens
cagagggacatgaattccattctaggagtttggattttatcctgagtctatcatagagccatgcaagggttttaaacaaggagttgacataatcaraatataaacagcactggccttcgaggcaggagagctgtattccaggcctgacaccacccgtgagagttgtgtggagccaagggctcaggaaggagctatgacatatatcgtgcagggacagagaattggaagcccggagatccggtgtcaaacagcaggtctgtaccttactgactaatgatactgcttcccttttctgagcctcaggctttatcatctataaaatgagaatgattaatgttgtttgtacaggttaaatgagataatatatgtgaaagcactttgtaaactgtaaagctctctatatgtatttttttaattacgtgtgtgtgtgtatatgaaggtatgttgtatggtgtattaattacatcaagggttctcacatctagctgtacatccaaatcatccgaagcttctaac

SEQ ID NO: 819069 - DNA, 637 bp, Homo sapiens
ttgaccccattagatgatagttggatgtaaagatctaaaaaaaatcttaagattttataatggtgtatatccttccaaagggcgatggtacaacagatatatagtatatttgtggcattaaaattttattgagggggctattaggaaaaaagtacctagaaggctacttaggcggggaataatgaaaacaaggttgagaaacactgtcccagaggaaatgatccaagaaagagcaggaggaagccataatcccttttatgacttggtcttagaagtagcaccctgccacttttgcatcattctttttgttaggactcacttgaagggagtgtcaaagaactgtgacttaccataaaccactacttcatgtaaagaatgataagggcattccaagtagaggaaagagcaagtgcaaaggccctgaagcgggaaagtgactaatgtgggtaaagcatggtgaggaagagagagagtgctgagatgagattggaaaggttctacatcatgtgggaccttgtaggtcctataaaatctttcacattttattttaagtggaacgattatttaagtatttaagcagagtcacaygatatggtttactttacataaaaatcactttgacagagtgtgtggagaa

SEQ ID NO: 819070 - DNA, 442 bp, Homo sapiens
atgtaccagtaagtctttcaaaacacaatgctgggagaggtggctcatgcctataatcccagcactttgggaggccaaggtgggtggattacttgagtccaggagttcaagaccagmtcaggaaagatggtgaaacctcatctcttcgaaaaatttttaaaaattagccaggcatggtggcacacacctatagttccagctacatctgaggctgaggaggtaggattgcttgcgcctgggaggcggaggttgcagtgagcctgattgtgccactgcactccagcctgggtgacagagcaagaccctgtctcgaaaaaagaaaaaaagcaaaaaaacaagcaaaaaaaaaaatccacaatgctaagtatgtaaatatgaatggactacttccctatgtcaccagaaccaaataagcactatgctccggacaatttcacataat

SEQ ID NO: 819071 - DNA, 425 bp, Homo sapiens
ctagggtggggggagtctgtgaaggatgaaggggaagcagccaggcaaggctggcatctgtcagaggagagagacggggtactgggtggaagagctcaggtggcagcaccacctaagaaagtcttagcggggcatgggcgcacccccgagccaaggtccagcagtagaggatacctgtgcttggcagaagtgacctggtcccagtgcccagctgtgctcattcagtgccggggacagcccaggggatgcatggtcttggcaagacggctgcagtgagagccatctgtcacctgggtccccatggcagrtgccctccatggccacacagaacccctcctgcatgtgtgtgaggacaccactcccagtgcttgagagcctctttcagaagggaaacacagaagagacagtataatgggacaaccact

SEQ ID NO: 819072 - DNA, 632 bp, Homo sapiens
accgggtggccctggtaactccataacaagtattttggggtgggggcagccacaaaaccaaagccaccactcactaatgaartaaatgactctcctcagctgagtttaagaagtttgtcctatgtagaaactaaaatctagaagtatattagaatttctgttctttggaccaataaaaattcatagtataaaacttaagacataaaataacagtgatttcatgtatctgccagtagaaaaccacagttatcattttgtaagaaacaaaaacactacgttttcaaatccaacagtgattcacttttgtttccactcatttgttgcattttattagtgaaatgaagtataaaggaagctgcatttatcgggcaattacaatctacaagaggctatgaaaatgcagtgggaataaaccacatcttttgttttgaaggagagaaaagtatgataattaattagtgaagagagtgagtgttttgagggtattaaaattatcgctgttaaaaccagacctgactaggttcaaattttgtttccaaatctcactagctgtttaatcttaggcgagttattctccaatctttctgtgcctcaatttccttgttgttaaaatgcatatattcagagaccac

SEQ ID NO: 819073 - DNA, 465 bp, Homo sapiens
tcagagttttgcagaaagagcaacactagacagacagacagagttgcctgtatagagttgagagggtcgaagctctgggaattggtggagrtcaccgagaaaataagtaatggagtaaggaaacaagaaatgcaggggagtgattccctacatttcagaggtgtgtggaggatgaagagccagtaaaggagcataggatttaaccagtgaaattgaggggtaggattgcatggtgtcaagatgctaagggtaagagaaatttaaggactaagtgattccagatgtcagatgcaatcaagtcatagaagaaagtgaggtctggagaaaagacatgatatggcattaggaatttgtgagtatcttgagagagactcagtgaaatggtgacagtgaatgccaaatagcaaggggttatggcaaaagtgggggtaaaacaaagatgtgggccatgctcccaagaagctt

SEQ ID NO: 819074 - DNA, 465 bp, Homo sapiens
tcagagttttgcagaaagagcaacactagacagacagacagagttgcctgtatagagttgagagggtcgaagctctgggaattggtggagatcaccgagaaaataagtaatggagtaaggaaacaagaaatgcaggggagtgattccctacatttcagaggtgtgtggaggatgaagagccagtaaaggagcataggatttaaccagtgaaattgaggggtaggattgcatggtgtcaagatgctaagggtaagagaaatttaaggactaagtgattccagatgtcagatgcaatcaagtcatagaagaaagtgaggtctggagaaaagacatgatatggcattaggaatttgtgagtatcttgagagagactcagtgaaatggtgacagtgaatgccaaatagcaagggrttatggcaaaagtgggggtaaaacaaagatgtgggccatgctcccaagaagctt

SEQ ID NO: 819075 - DNA, 615 bp, Homo sapiens
gagtaatagactgatttcatcttgttagtctgggtcaatcaccccagccaacactgtaactcctttgttagtctgttgacttaaaagtaagaggaccccaaagtgtccaggttgcaawcttaacttccattttaatgggattgttgtgtctcctggtggtagcattcctccctctggaactaagacctctaggccagcagaacacaatgtcacgggaacaggaagcaaaaattttgctactggatcactaggggtgatggtgagtggtgctacttccacctcttgattcctggacccataaatcctggttataggagaaacagtactatatattggttgctgattcagagcatacacgaccttctggagaactctgctccagccctgcatcgtattgtcacctagttggcattgtaactgtgacttcaaaaggccattccaccattctataaatccagctactttaggataatggggacatggtaaaaccagtgaatttcataagcataagcccactgctgcacttctttagccataaagtgagtgccttggtcaaaggcaatgctgtatggaacaccatgatggtggataaagcatttcatgagtccatagatg

SEQ ID NO: 819076 - DNA, 491 bp, Homo sapiens
ccagcagtgtcaaatgcatttattttacgtaactctctaaacaaggcctatcagttccttgttcacagcaaggactatcagtgttctccatactattagacgtatagtcctaagaatttggagtctaatcatattaagtagccaactccagaaatcccaaaaccaacaaaagaagtccatccttaatattttgttcctctagaaccactcctggtagcaaaatctgtattagtcagggttctccagagggacagaactaataagatatatataaagaggaatttattgagtattgacttacatgatcacaaggtcccacaataggctgtctgcaagcttgaggagcaaggagagccagtccaagtctcaaaactgaagaactgggccaggcacggyggctcatacctgtaatcccagcactttgggaggccaaggcaggcggatcacaagatcaggagttcaagaccagcgtggccaacatggtgaaactc

SEQ ID NO: 819077 - DNA, 648 bp, Homo sapiens
tgaccattttccgagaatagaaaatttgggctaaataagaaatactctttaaaattgctttattgctatgttggtttttctttgtaattatggttgagttattccataaaatttgctgctacaatagtcttataatggcaatacagtccaaccaatttgtttttcactggagtagatggtaaatgggccacggaatataaacttgttttgctggagatgctggttaggttttccagaagctgttggttgggttttccataagaattggactagaagcaaggctgaatttgaggtatcctagaaatagcatgagaaaaatgccttttaagccatatttccatcttaaataatgagcagaaccgtgcgttgaaagggaatcgtttgtgttggactcaagcagtgaaggagggaaaaagaaaaagaagaaaacatggaaagaccagaacaaaagtaggcagagtgcctggaaataaatatgaatatacatataattttaaaatgttaaaactatagacttgaagaaatagaactctcaaactctgaagacaggagtcaactggcataattttgctttgcaaagtgatattgcagaaagtgtggatccaycagtatttaatttgaatcagaattatagtatattagaaattt

SEQ ID NO: 819078 - DNA, 624 bp, Homo sapiens
cctatcccagtctgtcttaaatcctggtgttcacttcccttccttagtaataaatgtccttcttgkcatttatttttccagaatagggcaatgttgtctttattaaaaacctgctcaggcaaatatcctttctcctccatgattttcttaatggtgtctgaaaactctgctgcctcttagtcagaagaagctgctgcttcttttgtcttaacatttttaaagctgcctttttctaaaattatcaaaccatccttcactggcattcaattctccaactttagatccttcacctttcttttgctttaagttgccatacaatgacttcatttttcatatcatatcagggtctccaggtatgcctttctttactgcacccacataatagctgcattttgaatatgagataaaaaggtattttgcaaaaagtgcaaggtttttatgcctatggcacagtgcagcaaattttcttttctttttttttacaatggcccttaagctggactcatttatcttgaaatggtgggcaaacgcagtcacagacctcaatctacagtatgtatcaagcaattcaactgtttattgtaatgtcatggctttgcttcttgagagcacttccagcattac

SEQ ID NO: 819079 - DNA, 624 bp, Homo sapiens
cctatcccagtctgtcttaaatcctggtgttcacttcccttccttagtaataaatgtccttcttgtcatttatttttccagaatagggcaatgttgtctttattaaaaacctgytcaggcaaatatcctttctcctccatgattttcttaatggtgtctgaaaactctgctgcctcttagtcagaagaagctgctgcttcttttgtcttaacatttttaaagctgcctttttctaaaattatcaaaccatccttcactggcattcaattctccaactttagatccttcacctttcttttgctttaagttgccatacaatgacttcatttttcatatcatatcagggtctccaggtatgcctttctttactgcacccacataatagctgcattttgaatatgagataaaaaggtattttgcaaaaagtgcaaggtttttatgcctatggcacagtgcagcaaattttcttttctttttttttacaatggcccttaagctggactcatttatcttgaaatggtgggcaaacgcagtcacagacctcaatctacagtatgtatcaagcaattcaactgtttattgtaatgtcatggctttgcttcttgagagcacttccagcattac

SEQ ID NO: 819080 - DNA, 624 bp, Homo sapiens
cctatcccagtctgtcttaaatcctggtgttcacttcccttccttagtaataaatgtccttcttgtcatttatttttccagaatagggcaatgttgtctttattaaaaacctgctcaggcaratatcctttctcctccatgattttcttaatggtgtctgaaaactctgctgcctcttagtcagaagaagctgctgcttcttttgtcttaacatttttaaagctgcctttttctaaaattatcaaaccatccttcactggcattcaattctccaactttagatccttcacctttcttttgctttaagttgccatacaatgacttcatttttcatatcatatcagggtctccaggtatgcctttctttactgcacccacataatagctgcattttgaatatgagataaaaaggtattttgcaaaaagtgcaaggtttttatgcctatggcacagtgcagcaaattttcttttctttttttttacaatggcccttaagctggactcatttatcttgaaatggtgggcaaacgcagtcacagacctcaatctacagtatgtatcaagcaattcaactgtttattgtaatgtcatggctttgcttcttgagagcacttccagcattac

SEQ ID NO: 819081 - DNA, 623 bp, Homo sapiens
gcaattcaactgtttattgtaatgtcatggctttgcttcttgagagcacttccagcattactactggcactttctgtgggtcccatggtgctgatcaaagtttacagtattgcactaaacatgatgaaaaacacatgagaatgactagaaggtactttttactacaatacacagtttactggagacacgaactgcccaagcaaagacgattagtgacaaacattatttttaagtggattctctcaacacttgagctcaccaaaatagcaatagtcggtaggtaattttttttttttttttacactgggtctcactcccgttgaccaggctggagtggagtggagtgatcacagttctctgcagcattaacttcctaggctcaggtgattttcccacttcagcctctcgaatagctaggactgcatgcgtaccatcatgtccagctaattttttgtatttttagtagacacaggatttcaccgtgttgccyaagctggtctcaaactcctgtgctccagcgatccacctgcctcagcctcctaaagtgccgggattacaggtgtaagttattgtgactggccccaaatttttatttatttatttagtataaacttggggataca

SEQ ID NO: 819082 - DNA, 604 bp, Homo sapiens
aattgagacagaatatttagggccagagcatagtacagcatcaaatagacctgataggcatttatagaactctccaccaracaaacaaaaaaagcaaataaaaacccagaatacctaaaacttaaagtataataataataaaattaaaaaaaataaaaataaaaataaaaaacccagaatatacattattctcaccaccacatgggacaactgtaaattgatcacataatcagaagtaaaatactcctcagcaaatgcaaaagaatggaaatcataagaaacaatttctaggacaatagcacgatcaaattagaaatcaagactaagaaatttactcaaaaccatacaatgacatggaagttgaataacctgctccggaatgacttttggataattaatgaaattaaagcagaaatcaagaagctctttgaagctaatgagaacaaagttacaaagtaccagaatctctgggatgcagctaaagcagtgttgagagggaaatttataatactatatgaccacatcaaaatgttaaaaagacctcaagttatcaagctaacatcacaataaaaagaactaaaaaaccaagagcaaataagtccca

SEQ ID NO: 819083 - DNA, 586 bp, Homo sapiens
tagttttgttcatgacagttaggtgatttttttactttttttctcacagtgaactacatagaaattcaggtcaacattagaaacaaattaatatatgaatataagtctcagtcaccccatccctcaatgtccacatgtaatcaaacactattagtaataataactatcatttattgattactatagttacctggctaagcacttgacattaattatctcatttaactctaaccacaactccatgagggatttctattacacatgcttgatacatgaagcacctgaggcttaaagaggttaagtggtgtcacacgtattcactgagtttgtatgtggcctagacaggaatccgtttcgaatctctgacttcagagtccaagatctaaaccaccatacacactgtctgccttcacagagctcctgctgcttcttccatccactaaacaataactggaaaaattaagacattcatacacrtggacaaattcacataaaatgcccagcctctgtcatgtgcccagattcccacaaacactttttctttaaaacttgattctggctatttgtttgacccaggaggtgaaat

SEQ ID NO: 819084 - DNA, 544 bp, Homo sapiens
agtgtgctccatgcccaccacaacctacaacattctgcttctaatctgcctcttagaattgtgagtaaattaagagcaattaaattttgaatgaagaactaaagaatgcytctgtgagtacaaaagttaaactgtcacacacacagactctttaaaataataataaaataaacatttcataatcctttctggtatattatgcatttttacattagtgattttttttctcctttaagctctgtgggacttgatagtgatcattttttattcttatatcccctgcatctacattgactgtttagatattatgtttgcataatgctatactcatgtctccatttctgttatgaaggttaccagataatggcaatcgtgatagcttgcataatttttctcaagtatttgttcttcccttccctgtaagaaaacattgattccctgcctttgccatgtgatttgcagggcctcctattggaatatacatctctaccccactgaaatcgggcttggtcctacgacacactatagccaatggaacatgggc

SEQ ID NO: 819085 - DNA, 590 bp, Homo sapiens
tactatgataataatctttttctattgtaattgtaagctcaaaagttacaccggggtttgtgactgagttactgtgttataactagtggggttgggacaattaggataacacagtttttgaaagtggcccgaacatatagtttgttaaaaaccagggatacgcttatgggtttttaagaatcaagaatgctgttatagtagctagatttgggattcatctattcattcattcatccttttattcttttttttttttttttgagacagagtttcactcttgttgcccagactggagtgcaatggcactatctcagctcaccgcaacctctgcctcccaggttcaagcaattcttgcgcctcagcctcccgagtagctgggattaaaaccatgtaccgccacacccagctaattttgtatttttagtggagatggggtttctccatgttagtcaggctggtctcgaactcccracctcaggtgatccacccgcctcggcctcccaaagtgctgggattacaggcatgagccattgctcatgttaagatgttaaagccatcctttaacatctgcatatgggtccagcactgct

SEQ ID NO: 819086 - DNA, 554 bp, Homo sapiens
attgtaggcccgcattaaaagtttcagcarggagaggatgttaataaaattcctgtgtgtgtgcatgtgtgtgtgtctgtgctgtcaacgccttgatgcttccatttagaaacatgatattgcttaggcctttgctgataccagtttgtgcattgtcaagttggctggtattttagccactgctttgttccatgaatccccctcctgaggtgagaaggcagtgaggtagggtggttaagaacgtggcatttcaggccgggcgcggtggctcacacctgtaatcccagcactttgggaggccgaggagggtggatcattcgaggtcaggagtttgagaccagcctggccaacatggtgaaaccccatctctactgaagatacaaaaattaggtgggcatggtggcaggcgcccataatcccagctacctaggggctgaggcaggagaatcacttgaacccaggaggcggaggttggagtgagccaagatggcgccactgcattccagcctgggcaacagagtgagactccatctcaaaaaagaaaaaaaaaaaaa

SEQ ID NO: 819087 - DNA, 644 bp, Homo sapiens
cagggttttaaacccaaaccaaccaaacaaaaacacagcttgttttcaatccttaaatttgcagaatatatatacaaaktttgctcaataaattactgttaagtgtcacaggaatccatttccataatagctaggaggactacgaagatcccaggctctcctctctctgggaaattgctcccaggtgcaagctctggttctttcttgagcttgagagaaatgttcaatccttgatagtttcaaccaggaaagagttagttttaagcagagaataatgaacaatgaaatggtaggaaatgatttgtgtaggcacactactgagaggtagagatgcaaagaaaattcagaagttcacaatttttcttgtatgtgagtaccagtttccagcctatgaaattctgctcctctttcaaaaccctaattcaaatgctaccttatacattaagtctttcttgattcagattctatttggaaataagcttactcttccccaatttcccttcccatttaacttgtattgtggttatttacatggttctattaggtcctacgtgactgtgagtgactagcttttatttgcccttcattttatccatacatcctacttgatactgtatgcaccattgcataccctttctttcatt

SEQ ID NO: 819088 - DNA, 652 bp, Homo sapiens
atattttattaaatgtataactatatatttcatttttggagctattataatttttttaaattttttaagtgyactttccaattgtacattgctagtatatagaaatgcaatgatttttgtatgttaaccttgtaacctgaaaagttgctaaattcacttattatgtctaagagatttttggaattttcttgggattttctacctagaaaatcaagtcgcctgtgttttatttatttccaataatcttctagtacaatattgaatagaagttttgtaggtagaccatccttgctttgttcctgatcatagggagaaagcatttagtgtttcaccattaactctattagctgtagatattttgtagatggactttatcaagatgaagaagtttcattctatgcctactttgcagagaattttatcatgaatagatgttaaaatttggcaaacattttttctgcatcaattgacataaacctgtcaatgtgctttttttttttttttctggaggattacattgattgatatctaatatcgagacagccttgcaatcctggtttacaaaataaacctcactttgttattacatgttattcattttacatcttcatttgatttgctagtattttattgagaatgcttgcattatggt

SEQ ID NO: 819089 - DNA, 538 bp, Homo sapiens
acagaacatgggatgaaattgtaaatatacaacatacacttgcatacaggcacatacaaacatttgggggttgttaatgacttccctaaggatagtaatttcaagtggcaccaatctttaacccagattgaatcacaggacaaatcaagtttcccaattcctactcatgcatttgacatagttatggtctgcttttatagcttttgatcacaatttcctaggaggcagctggtctctaaatcaacaagtcagaaaaaaaaaaaaaacagccaaagcccagtcctttaacaaaattacctattgaggaggtcaatgctgtttggaacacatttaaaacatttataagagtgattttttaaatgtctgctattggatgagggttacattcaaagattccagttgtacttttgtatgacactagacttctgctgtagtgcttcacccaaaacagaggtttaaggaaataaaaaaayaaaaataatacagaaaaaaaaaccaaaacactttactgaaaattttcatttcaaccagaagcaaa

SEQ ID NO: 819090 - DNA, 657 bp, Homo sapiens
taactctcttcaattctgtgaaggctgagagaggtgaggaagctgcagaagaaaagatggaagctagcacaggttggttcatgaggtttaaggaaataagccatcactgtaacataaaagtggaaggtgaagcagcaggtgctcatttcaaagctgcagcaagttatccagaagatctagctaggatcgttgatgaaggtggctacagcaaacaagagattttcagtgtagatgaaacagccttctattggaagaaggtgccatctaggattttcctagctattaatagaaaggagaaatcaatgcctggcatcaaagcttcaaagaacaagctgactctcttgttagagtctactgcagctgttgactttaagttgaagtcattgctcgtttaccattttgaaaatcctagggctcctaagaatgatgctaaatccttctctgcctgtgctctatcaatggaacaacaaagcctggttgactgtttacagaatggtttactaaatattttaagcccactgttgagacctcctgctcagaaataaagattcattttaaaacattactkttcattgacaatgcacctgattacccaggagctctgatagatggacaaggagatgaatgttggtttcattcatctgttcaatagatgaa

SEQ ID NO: 819091 - DNA, 657 bp, Homo sapiens
taactctcttcaattctgtgaaggctgagagaggtgaggaagctgcagaagaaaagatggaagctagcacaggttggttcatgaggtttaaggaaataagccatcactgtaacataaaagtggaaggtgaagcagcaggtgctcatttcaaagctgcagcaagttatccagaagatctagctaggatcgttgatgaaggtggctacagcaaacaagagattttcagtgtagatgaaacagccttctattggaagaaggtgccatctaggattttcctagctattaatagaaaggagaaatcaatgcctggcatcaaagcttcaaagaacaagctgactctcttgttagagtctactgcagctgttgactttaagttgaagtcattgctcgtttaccattttgaaaatcctagggctcctaagaatgatgctaaatccttctctgcctgtgctctatcaatggaacaacaaagcctggttgactgtttacagaatggtttactaaatattttaagcccactgttgagacctcctgctcagaaataaagattcattttaaaacattacttytcattgacaatgcacctgattacccaggagctctgatagatggacaaggagatgaatgttggtttcattcatctgttcaatagatgaa

SEQ ID NO: 819092 - DNA, 628 bp, Homo sapiens
tttatcaaatgcatacatagttaaagtataaaatacaatagaagttacttttactggccaggcacagtggctcgcgcctgtaatcccagcactttgggaggctgagacgggcggatcacgaggtcaggagattgagaccatcctggctaacatggtgaaaccacctctgtactaaaaatacaaaaaaagtagccgggcctggtggtgggcgcctgtagtcccagctactcaggaggctgaggcaggagaacggcgtgaacccggaaggcagagcttgccgtgagccgagatcgtgctactgcactccagcctgggcgactgagcgagactccatctcaaaaaaaaaaagaagttacttttactggcctcctaagtgatttgcctgattaagcaactctgtccgttctctcattatatcctatcgactgatgttcacagccacctcagtaccggatgccctctagcccgcctgtaaactcctgatccctcctgtggagatgtrtgtggaccaagcgtcagtggtgtttgtacccagatgtgctgtgccagttttgctagttcatataattattcaatgataattatgtaaaccaatgatatatgggtgtgtagaagagaactgctattt

SEQ ID NO: 819093 - DNA, 575 bp, Homo sapiens
tgagaattacatgaagtaacacatatgagaacacttatgggatgggggtggggtggactattaaatacaatataaacaggaaaatcttgatgattgcatgataatgaagagcttgtttgtttgtttttgccctatttcctagaatctcaaggctgaagtggacattaaagcattgtataggtgaaggtgagggaatgagggctcagagaagctgaatgaatgggtttcccatgagatcgctgaagaatcaggcctgggatcaggccctccaccccttttcagtgctattctcactttagaggctgcctcttgagctagtcctgtctctcagacactccccgaatatgattcgattttcactctattttacacaaagcgtgctctaaagtgctggattctcctgcacagggggtctggcacatggacaagcacacccggcagccggcagtgcacaggaagctgcctccgcacaggcaaggctttatgcagggcatcctgaaaagaagcacttatttcagacactgatcttgcatctcgccrtcttttaagcttgtgtttccttttaattaactaat

SEQ ID NO: 819094 - DNA, 558 bp, Homo sapiens
aacactctaaacttgtatctatcatatatactttctacacgatgcctaatactttcataactgtaatctcagatgtcagtaaagtctttaacatctaggcaatttaggttatatttataaacaaaatttaaggcagatttcaaaagcagctacacaaaaaatggatactattaacttccataccaatagaaaaaagactagtaaccaagaatgaggacaattgtttatttttaaaatatatattatagcaaaaaaaatcaaaagtgtaaatgtaagctttcaaattaaataaaatgtttattcatgctgttgttactacatatatttctgtatctttttaaacttaagcttgaatatttatatgtataatcaatgcaatcaaattatcactaaaatatttattaaatgctgagattatcatatyttgatatcaagcacctatgaatatgttttatggaataaacatgcttccctccacacaaaaagctttagaaaggttacaaaatgtataaacattatgttttacacaggcaaaaaaagagaggaagagaaacagag

SEQ ID NO: 819095 - DNA, 588 bp, Homo sapiens
tctatttgattcttctctcttgtcttctttattagtctggctagcagtctatctattttgttgatcttttcaaaaaaccaactcctggattcattgattttttgaagggtttttcgtgtctctatctccttcagttctgctctaatcttcattatttcttgtcttctgctaccttttgaatttgtttgctcttgcttctctagttcttttaattttgatgttagggtgtcaattttagatcttttctgctttcccttgtgggcatttagtgctatacatttccctctacacactgctttaaatgtgtcccagagattctggtacattgtgttgttgttctcattggtttcaaagaacatctttatttctgccttcatttcattatttacccagtagtcattcgggagcaggttgttcagtttccatgtagttgtgcggttttaagtgagtttcttaatcctgagttctaatttgattgcactgtggtctgagagacagtttattatgcttcccattcttttgcayttgctaaggaatgttttacttccaattatacggtcaattttagaataagtgcgacgaggtgct

SEQ ID NO: 819096 - DNA, 633 bp, Homo sapiens
cagaggtatcaaaactcaccaattctatatttaggcatccatatgttcctgctgccagagttgcccatagatacaaacatttcagggcacacagcagcagttttcagaaagatttcccttttaggagagggagacgctacaaagcttaatcggttctaagtgattctcaaatattgtatcaatttacagcagaaaggtcactgtgaataaacatgaggattctgttcagtgtctgggatttagcagactaactcccactaatgttcatggggccatgctgccaaatccccaaccatcaccctgcatatttgctccaatccctaacttttgagattgaaatgtcttttccaaatcaaagctgatcctgaaacaggcccaatgagcctctgtatggttagacagggacagtgtggctgaagcctggggacatggcagtgctcaaagaaatggtattaagagggtttgttggagccaggcatggtggtgcatgccggtagtcccagctaccttagaagctgaagtgggagatygcttgagcgatcttgaggttttgaggttgcagtgagccacagtcatgctactgcactccagcctggacaacacagcaagatactgtcgaaaaaaaaaaaaagt

SEQ ID NO: 819097 - DNA, 618 bp, Homo sapiens
cttgcgccatcccaggtggttgagttcagccaggttgagcacaacacagatgccacttacagcaaacatgaacactagaaagacagtcttctcagttggccgggacacataacattccacctccttgatgcaggggtagcggttacactcatacaaccctgggacactaaagccatagagaaaatattggccaaccaggaacccaatttccagggcatttcggaacaccacttggataatgtagaagcgggagatgccttcctgccttctgagcttggattttgatgcagtgcgtagacctgatgggtgtggagtcagctccttaacctctaaacaatctggctctgtctccttactggtgttctctgtgttctgcagcaccccattcacaatagcattttgcaacttcttatcttctcgtttgcccccaccactgcccccacccccagttcctccaggacctcctatggactcaggggggtctctgtccagggctaggaagacwgtagagtagcggcgttctcgctgcttggcggactggtgcacagagtaggtgatgaagcaaagactgggggtacacaccattatgatctggaagacccagtaacgtatgtggga

SEQ ID NO: 819098 - DNA, 576 bp, Homo sapiens
ttgaccagcactattggtctgaaaaaatgatgracaggtctcaggctctcactggaggtatttcattggatgcaggctttgccaccttccctgtagtttaactcaaactctttttacccctgggttctttgaatgaactcaagccatttctatgaagtattctgtatggattaatctatcaagttaactctgtctggttaacctgtttgtccttcactttccttcccacgtaattgttatttatctaacatcacttagatggcagaacttggagagcattgtttgctattactgtgttttggttgaaaaccatttttcaagaggtcccatataatgcagctcatggaacctaaattctggtttggcctctgtccttctgtgtgatttgagcaaatctctttcacatttttctgtcccagttcctctgtgtctgagatgagagtgtaatttatcttcctctctcagggatgctataaggtaaggagagaaggaagagaagtgctgaggctatgacaataaggtcctccaagaaggtgacattggttgccagagaaagtcactttgattaggagacat

SEQ ID NO: 819099 - DNA, 612 bp, Homo sapiens
ataagaaatgtaatgaaagtccactgtattagtctgttctcacgctgctaataaagacatacccgagactgggtaattcataaaggaaagaagtttaatagactcacagttccacatggctggggaggcctcacaatcatggcagaaggcaagggaggggcagaggcgtgtcttacatggcagcaggcaagagagcctgtgcaggggaactgacctttataaaaccatcagaccttgtgagacttattcactatcatgagaccaacacaggtaaaacccattcccatgattcaattacctcctaccaggtccctcccatgacatgtggggtttatgggagctacaatccaagatgagatttgggtggagacacagccaaaccatatcatccatcgagtagaagaaaaatgctacctaatggaaatatgaaaatacacaaagaaatgaatagcactggaaaagataactaactacatatgtaaatacrtaagatttgtttcttatcatttaaatctttaaaaagataatcatactggtttgctagggctgccaacaaaataccacagtctgggtggcttaaacaacagcaatttattttctcacaattctaga

SEQ ID NO: 819100 - DNA, 568 bp, Homo sapiens
tgatacccaggcaaacagggtgtggagtggacctccagtaaactccaacagacctgcagctgaggggcctgtctattagaaggaaaactaacaaacagaaaggaatagcatcaacatcaacaaaaaggacatccacaccaaaaccccatccgtaagtcaccaacatcaaacaccaaaggtagataaaaccacaaagatggggagaaaccagagcagaaaggctgaaaattcaaaaaatcagaacacctcttctccaccaaaggaacacaactcctcaccagcaagagaacaaaactggatggagaatgagtttgacaggttgacagaattaggcttcagaaggtcggtaataacaaacttctccaagctaaaggagcatgttctcacttgttgcaaggaagccaaaaaccttgaaaaaaggttagacaaatggttaactagaataaccagtgtagagaagaacttaaatgacatsatggagctgaaaatcacagtacgagaacttcataaagcatacacaagctttaatagctgatttgatcaagtggaagaaaggatataagtgaat

SEQ ID NO: 819101 - DNA, 550 bp, Homo sapiens
gcatataatttgcaaatattttctcccattccgtggactgttttttcactttcttgaaagtatcctttgatgaaccaaagttttagattttgaagtcaaatttatttttcttttgctgcatgtacttttggtgtcatattttaaaatccattgcagccgggtgtggtggctcatgcctataatcccagcactttgggaggctgaggccagtggatcacccgaagtcaggagttcgagaccagcctggtcaacatggtgaaacatggtctctactaaaaatacaaaaattagctgggcatggtggcgcacacctgtaatcccagctactcaggaggccgaggcaagagaatagcttgaatccaggaggcagaggttgcagtgagctgagatcgcaccactgcactccagcctgggcaacacagcaggacgccatctcaaaaaaaaaataaaaaaataaaaaaataaaaaaatccattgctaaatccaaaaaagtcatgargttttaatcctttgtcttctaagagttttataactttagtgcttacatttg

SEQ ID NO: 819102 - DNA, 646 bp, Homo sapiens
cagggctccaaaacacaaatgtttaataagtgggagagttttgaaagcagcaccattattctgaggttgataatatccaggtttgtgctgtctcctatgggttaaaatgaaaaggatgtatcctacaggtgacgrtagggacagaggccctcccagtagtcacgttaagctagtactgacagaaaaaggaaaagcctgtccaggtggctgggcaaccctgcagcgaggcatagatgagcttgtaaatcaaaggaaatgaccaaggtgagtctcaatccttttagaggtttattttgccaaggttgaggacacatctgagaaaaaggaacacaaaatcacaggaacatctgtgatctgtgctctttccaaagagggcttgaggacttcaatatttaaagggaaagagcaggcagtaggggaaagtggaaagtaaaaagggaaggtagataaaaggggagagtagttgcattctttggggcctttgatcagcattcactgaatgcgcatgttacattcgtgaaaggaggtcgtagaggaatagtcagttatgcattcgtctagtgcttggtgaatctgcatttttacaagattaaatatagggtagaggaagcggtcaaattgcatttttctccagcgagaggaagga

SEQ ID NO: 819103 - DNA, 338 bp, Homo sapiens
atactttgttacagaagccctagcaagctaatacagtacatccatcaacaggtgaataaagtatggtatatccataccatggaatagaaaggaatgactactgacacatayatgcagcaacataagataatttcaaaataattatgttgcatgaaagaagcccgacaaaagaatatacactgtgtcactccctgtatatgaactaccagaaaatgcaaactagagtgacagaaactacattactgacaaaggctaatgaagaagctctgaaggaacacaaggaaacttttggggtgatggatgaatttatttatttatttacagatggagtcttgctc

SEQ ID NO: 819104 - DNA, 464 bp, Homo sapiens
tttcgagatatctgtggagtatagctttatgactaaattttgtgtcccaagatgcttcctttactcttgatgctgaaataactacactaggttaaatacagaaagggtttgtaggtcaacattcaggaaaatagcacactgaacatgtggttttaaataatgttttaatgaagaagaatgagaaggttattttgcaagacagaggggattgtcacattacgcttacctagaattctaaggcaagaatattaatggagactcataaatcatttgttcaattattttcaaattagttcttaaaatttaaaagtcaaatacaaattataagattgaaaattaaaaattcaaatcaaaaatttttaaagcaaatatttttaatttaaatgaaatttattacacatttttatataaatttgcaattctaatrtttattatttatctagttgtcaaataattggtatcaa

SEQ ID NO: 819105 - DNA, 569 bp, Homo sapiens
atgcagactgcaagtgtgtggagctggtgagctccccagtgagcgcaggccttctaagagaggaagtggagggcrggctggggggctcagcaacctgggcattcctggagctcccaggctattctggacagagtcctgagcacacaggctccgcgtcacagacccccgccccagtctctgcacaactactttcttcataacttagcagaccaacaagggccttaaaaagcacataaatacagaagccggtgtggctggcagggcagcaaagcactgctcccccacggaagtctgagcccctgcccagtctgcatgggggtctgtcctggaggaggatcgagcaaatttacaaagcgccgagagcaagtgaactgtggtccatctcgaggtggcagataactagtttttccttttctgggcagcctttctcttcttctgtcgcttcttttttcctatcttttcttttttccccactttttcttctctgcgcccccttagataaaattagtagaaccattaataatgtggaaataaacaaaagttcgtctcagtctgcataagatttaaca

SEQ ID NO: 819106 - DNA, 678 bp, Homo sapiens
  misc_feature 52: n = A,T,C or G
catgtccatcagggatccactcattattcaccatcttctcccctgcttgctntggtccatgccagccttcccaactctgacattagcagtgccatttcgccttcctgggaggctgtccttccaggtctccatcttccacattcctgtcttcaaaagttctttcccaacattctccaaaaaatccatcctccacaccccacctccagatactctactacattaaaatatttcattgtcttaagagcatttattgttctcagaagttattatttttatttgtttgatggtttaccatctgtccctttctcagtctttttaaaagtaaatttttctagggcaagatttttatctgtcttgtttcttccacatcctggtatctagaatagttcctggtgtgcaatatttgttgactgattggacgaatgaatatatagataaatgatggcttcaaggataagtgcatcttgagctccaaatgattgctttgtaaagaattttcaattaaatatgagttattaataaacacagtataaagtcatatggagttttaaaaaattatttcctaaagttaggtacagttgtaagtggattgtacctttacagacataawtacatattcagtcataatatctatctatctatctatctatctatctatctacctctatattgtatgta

SEQ ID NO: 819107 - DNA, 631 bp, Homo sapiens
aaccactgtgacatgtgtatacctatgtaacagacctgcacgttctacacatgtatcccagaacttaaactataataaattttttaaaatttttattggcacatagtaggtgtttatatttatagggtacatgagatattttgttacaggcatgccatatgtaataatcacaggaatgatacacttttaaataaaacataggtatacaattcataagaaaattgaggattacatagacttataaaatagccatgaaccccaaatttagaagcctataaacaaacaaaatcccccacagactaagtaccattgaaacaataatgtgtcagtgggcccagcctgccagtcccaggaagccctggtctggttattcttcaattagcaacaagactatgagctattgaaggccttgtgaacaacttgtgtttttccacaatggaacctgtactttaatagtctaagaattcctgtaatgtagctgatgcaatgcaaacaaaagaaagaaaagctcaaactaaatctsgtcagctgagaatagcaatgatgcaatgactgcatagcttttagttctcaatgatgtcattgcaagtgtgaatttgatgctgtgataacacttatcaaggaatgagta

SEQ ID NO: 819108 - DNA, 511 bp, Homo sapiens
tttagtttcgcaaggtgaagagagttttgaagactgcacaacaatgtgaatgtacttaatgctaccgaactgtacccttaaaagtaacatggcaaattttatcgtatatatgttttkccacagttaaaagtttaaaaaaaattaaacatttaagaaatgagtggagaaaaagtaaacattcttcccatgttataattccctgtctttccagtttcctaccttcccatagttaggatgaccgtacaatctgtttgcttacgacagttctggttactcctgttgtccttgtgcatttttccatgggtcgccttcactcttaaaactgttgtgggtgataatctttatgctcaccttgtccaatacacctttggcaggcgaggacagccagagaacttaggcacggtgtgcatactgctagcatcattagtcattcattaactgttcattaactcattcacaaagagcctctgtgcacctcctgcctgtgatcatactgtgccctacatgggtg

SEQ ID NO: 819109 - DNA, 635 bp, Homo sapiens
gctctctcagaggaggaactggaacgagctggtccctggcaggcctccttccccagcgaaggcaccgacagggccctggagggttcccatagtgggcggaaggaaagccrcctcccccaaggctcaggaatgcccagaatggttgtttcctcacggcctacaagcccatgtgacccaggctgagggtcccacgtttggggaagtgcctgggaaggggaaaggacaagggtagcccgtggctgcatctgggaccttccagactgaccaaggctggtcgctcctcctccccatcagcttctctggctgcagcattgagtttggccactgcctgggaaagctgagcacagccaccgctgccagccacagtcctgagctcttggcccttgcctcagctcctccccggaggttggccatcttgctcaggtctggctgggagcatcagcctttaggccaagccagcagcagccagggtagcctaaggcctccacctggtagggcagtggggaaggtatagagaacctagaggggaggcaggggggtcctatggttacaggcttaggtttggagccatacagactcatgtccgaatcctcactttgtcacttcccagctgtgtccatttttggaaagactca

SEQ ID NO: 819110 - DNA, 613 bp, Homo sapiens
gcttaacttcaaaaacatacaaaaattctgctcctttacagctgcatctgcatcccttttgattattgatgtcacataattatgtctttatacattttgtgcccaaaaatataaactaataattattttaagtgtgttagtcttttaaattctgtagaaaacaaatgtggcattacaatccaaagttataataatttaagcttttagactaatcattgttttttaaagtagtctcttaaattatgtcacaaagtaaacttacaaactgttgtttcaataatactagctcttataattgcctttattgagatcctcatttcttcatatggtttcaagttactatctactgttctttattttactttgcaggacacccttggggcatttcttataggacaagtctagtggtaatgaattccctcagcttttgtttatttgggaatgtcattttctccatcacttttgaaggacagtttttccagatacaggattcttgtttgatttttttttttsttttaacattttaaatatgttggcccactgcctctggtctccaaaatttctgatgagaaatttgctgataatctcattaaggatcccttgtagctggatg

SEQ ID NO: 819111 - DNA, 531 bp, Homo sapiens
attagtttagtttgggctgtacctcctcttactccctgctcccagtagttatgatatctgacacatccaaggttaaagaggcaaggaataggaaaggtctcaactgttattccctggactttgaaggtattaggctgagtctgtctgaatttagtagtgatcagacttccttggggcaccttagtggtttcttcagagatacattgctggggatctccacctgcaggtgccttgacagggttgaatgacttcctttggctggtcacttatgatgacctcagtatctcagtatcccttggacatatattcgtacatctttagcatctttctgcagaggtcttcacactattccaggtagccctcattagcaaaatccaagactgttccactcctgcttgtcctcccactacatttcccctgactcccttatccccctaatragaaagtcaaataattaatggatttatgggttatcatgagagtaggactggtggctttataagaggaagagagacctgagctagcatgttt

SEQ ID NO: 819112 - DNA, 607 bp, Homo sapiens
tttgtgaagaatatatggcattttgctacactgaccacttgtaaaagtgtagaaatgaaaaatggtctaatgtcatcatatgaaagaacagcaccaaacttgwggtatgatgtttttaatataaaaatatttcagtgttgaactaataattttcatttagagtaaaaaatacagcttctgtattacatatcagttatgtgattcaatactccattttgcagctattgttttcccaaacgttagagacctagaatctcctactgttttgcatttatgatcaaaatgtatttcctactggctctttactgaaaaaaagactgcagattagtatttgaaaaaaagcattttttcttttctcaaggtcaacaacatagcgatctcattacctgttgtgggtcgtgctgagattttttcaacctctggtgttttagattcggcaggtaatgccaaggtttcattcttagctaaaaagtcagagaacaaacaatttatctcacttgcagtgtccaaaaatacctccctcaatgcataatcaagtagcagactaaaaatctaatctcacactccttccccaccagccagtcaacaactttattgtgtatctcta

SEQ ID NO: 819113 - DNA, 599 bp, Homo sapiens
ggtgtagactatcaacatctcttgctggtcaaacactcttttcatctactctcttttaaaaattaatataagattacaaatatctaatggcatttcatatcttttccacaaggaaatctttcttctgagtggagagttatttctaagggctctaatcatcatatgcatgtacttgatctctgtggtgtccatcctcgtccaggcatctcatactagtcattcacagtaatgggacaacctgttttatggggctgaggccacgtgcccagggaacattacattaatcccagcacactaaagtcaactgaggataggatgcgcccaaaacctctcaaaagaacaatgtggactaattcttaacattcatctgccacactaactgctcaccggagagtaacaaaatatctattatttcccacaccagcattagaataatttcgatgattttaatgattctaaaaatgtctgagacaagtctagtgcagactggagaatcccatgtttcagacatttgtctgaagttctcatttcccataactcctctctagcattgcagacctctgaccaccctaatscatctgccctcacatgtgtatgca

SEQ ID NO: 819114 - DNA, 607 bp, Homo sapiens
cccaaataagtactacaccaagaatgtaagcagacattcaataaatatcaaattaaatcaagggtatcactatgaactcactaattgaaaactgttggactatatcctttctaactactgctcattataaaggctaccatctcagatgaactctaagctgttcaacaatttagtagactagagctctaggaattttatgccacgggcataactcacaaccactgttaaaggtagatacagaaaaaaaaattatccccctctttcccttccttcctccttccctcacttccaaatactaactcaaaaatctcccagaaaatctagttttgggcaggcccttttttcttctctcctctaaattttctccttcatggaaatggacaagaacttctttctcagtccttcccgggacaccgctgttctcttcaactcctcatcttccttcactgcactaagcctccttcttatgtgctgtgtcatccccctgaggaattaaatctatttgaaatatgttttctgtggaagaatcaacttgatttttcaaaaataagaaaagcactgccayggacttgtcatttacctgaattttgttagaaacagaacatag

SEQ ID NO: 819115 - DNA, 610 bp, Homo sapiens
tttattgaaactggaggaatatgaaagaacatctgtgaacacttagttgttcgtaagttctgtaatttcttttctttgtttttttttttttttgagatggagtctcattctgtcatccagactggagtgcaatggcgtgatctcagctcactccaacctccatctcctgggttcaagcaattctcctgcctcagcctcctgagtagctgggattacaggcacacaccaccacgcctggctaatttgtgtgtgtgtgtttgtgtgtgtgtgttggtgtgtgtgtgtttttagtagagacggagtttcaccatattggtcaggctgatctcaaactcctgacctcgtgatccacctgccttggcctcccaaagtgctaggattataggtgtgagccaccacacctggtcaagtttcgtaatttctatacaggtcttaatgttgctaatttagtaccaatatctattctctcctctatctcaatgatagacccttcacatttatccttastcaggaccagagtagagccctatattttcagtctttcttgtggacatgtaggtgtatggcaaaattctggtcaatggaatcaacagagatatcatgaagaaaa

SEQ ID NO: 819116 - DNA, 557 bp, Homo sapiens
attttacaacaaaattcagaaatatgggggcggtaatcagatgaggctaaaaataccaagtagaaattcatgaataaattacataaaataacaaaaatccagcccacttccctcctacccccacccytatttttcttgtacaacctacctgaattgaaacgaaagttgtttaagtaacttcaagaattacaagagggttcacttagttattaaatctgacattgaaattggaaaaatgatttgttcagtaactgtgtaagacgtcgttttggagacatgcatgtgagatgtgtagttctaataaaacctctgcatcacaaactcaaaaagctgcagcctggtttatgcccaacagctttatccatagtctaagtactttaaaaaagaaagaagataatacctgcaacattgatacctagtcagagaaatcacacaaatcagttttgaaccgttaccagagatgacagaagaacatgcactgcgaagtgatgagaaattctaaattgtttacttactaaggaaactgacttacttgacctaatgtctggcagtttcta

SEQ ID NO: 819117 - DNA, 557 bp, Homo sapiens
attttacaacaaaattcagaaatatgggggcggtaatcagatgaggctaaaaataccaagtagaaattcatgaataaattacataaaataacaaaaatccagcccacttccctcctacccccacccctwtttttcttgtacaacctacctgaattgaaacgaaagttgtttaagtaacttcaagaattacaagagggttcacttagttattaaatctgacattgaaattggaaaaatgatttgttcagtaactgtgtaagacgtcgttttggagacatgcatgtgagatgtgtagttctaataaaacctctgcatcacaaactcaaaaagctgcagcctggtttatgcccaacagctttatccatagtctaagtactttaaaaaagaaagaagataatacctgcaacattgatacctagtcagagaaatcacacaaatcagttttgaaccgttaccagagatgacagaagaacatgcactgcgaagtgatgagaaattctaaattgtttacttactaaggaaactgacttacttgacctaatgtctggcagtttcta

SEQ ID NO: 819118 - DNA, 551 bp, Homo sapiens
ccgctccatgatagcccaggcccagtcattcwtcccatttcatagatggggcagaagagtgtatctggcctgggcttgtgctgtagcagcagagcaggtctgggagccaggccccctccgaccagctaaccctagcaaatgtgccctcagcccctcctgctgtgcgtctctggaagcagaggtggcttctatgcatgtataaatgaacacagacacaagtcatcacacctctcctcacccagctccacattccctgtgaccagaccagagtaggccctttgctgcacccgcagcctgctccttctgtcattcaggtctcagttcaagtgtcacctcttccaggactgtcctgtctcactggctacccagcatgcccctgcttccagctccctcatggtcacacggccctcatgctcatctgtggcacctgacgccgggcctggcgccagcaggtgctcaataaatgtttatttaatggctcaggtgccattgtcacctagctttgtccctcagcccatcccctctgcttctcttaaaagctttatgaggct

SEQ ID NO: 819119 - DNA, 641 bp, Homo sapiens
ccgcgacgtgggtgtaaaggaacgagctgggctttggcagctagggagaccgggggtagggtccaggcgacttcaccttccagctctgtgaccttggtcaagtcacgtcgtctcctggagcctccagcagtgaccgctgctggagtctcctgtgccccacccccattccctaatcgggttaaaataaacagagggctgccttgaaggagaaaggaaatgacagccgcgtgcggtgtgcctggggggagtgatcggaaaaagagagggtcctagtctgggtcgggaggggaatgagcagggtgagggcagggtcgcaaactcaaacgcctacggggccggtcgataatataaattggcgctgcaggctaggcgatgtaagggatggtcttgcttccacaaagagatatgagctctcctatatttcttgagacacgaggccctctctcggtctgtcttttgtttcccacttttgatagagaagggttatgaaaaatgttttgctttcctcttaagtctactataaaaaacaccagctaaagctccagaggcaaccatacagacgctgggctccatcgccagggaggcaaagggcagtgctggggacaggcacaaggatccsatctcaaggggcagctgccttt

SEQ ID NO: 819120 - DNA, 538 bp, Homo sapiens
actctttgctgtcttgtccctgctggtctgggtcccttttctctttccccctccctactcagctycccccacccaccttaatcccattcctggctccacctcctacaacctggcttccacctccgcctagccatttgccaaaagacccctctgtctctggttccaatgctccttttggctcagcctccagggctcctccctcctctgtgctctgttctgctctcccatctctcctggagagtgccaggctccagtgaggacctcagggcagaaagtgcccccatcctcatcaggacctccaggctcgccactgcagaacatttcgcctcagccatcctatgtggctaccccagatgaccagctccctgtgcaaacagcatggccaccaacctggccagaaacctgctgaatgtgggccttccacctccttttctcctgtcacttcagatgccacaggccactgtccctttcactcaccaggaaccccccgccctttgttggctctcccggtgctctgctcagtcctgcttcaggggct

SEQ ID NO: 819121 - DNA, 610 bp, Homo sapiens
cgcaccacagcatctgtcccctcacctgggctgtttccacattttgatgaytttcttttctttttttctttctttctttcttttttttttttttgagacagagtttcactcttaccgcccaggctggagtgcaatgacgcgatctcggctcactgcaaccactgcctcctgggttcaagtgattctcctgcctcagcctcctgagtagctgggattacaggcacccatcaccacacctggctaatttttgtatttttagtagagacagggtttgccatgttggccaggcttgtctcaaactcctgaccccaggtgatccacccacctcggcctcccaaagtgttgggattacaggtgtgagccacagtgcctagccctttttgtaaaaaaaaaataaaaattatttttccataagtgattggggaacaggtggtattcggttacgtaagttctttagaggtgatctgtgagattttggtgcacccatcacccgagcagtatacactataccctatttgtagtcttttatccctcaccccttcccactcttccacacaagtccccaaagtccattgtatcattcttttgcctttgcgtcctcatagcttag

SEQ ID NO: 819122 - DNA, 533 bp, Homo sapiens
tccaatgaggagataggacagtccccagtgcaaagggtaacttaaaggaattatctgcattgcacatacagatttgctcttgcagctgtgggctggaggaagcagggcaccttcaagatgatgcacagtaraaaggggcagatagaactacccctgcccagaagaggcatgtaggggaattagtgaactggggccaactacctagcacattccttttccaggataggtgctgtaacactgctgcctgcttcccattgcccatcagctctgccagtttttagtctgggcgttcctctgttcactccaagacatctcctgtttagctacctgtctcaatactggcttcacacttagccaagtttccctggtctcctgttattcccaatgcacctcactgtgtctctggcccaccagctccatgcaccctcatcctgttgggcctgacctggggaatcatgagcataattaatataagcataatatttgagcaaggtgacagaagtggcagtttatctgtcctcatgattctcata

SEQ ID NO: 819123 - DNA, 495 bp, Homo sapiens
ggaggatcccttgaacccaggagtcagagcgcagcctgggtaatataacaagccacaactagaaaagaaatttgattctcaatgtgggagtgttgagaggtagggcctagtagaagctgtttgtatcamgacggcaaatccctcatgaatagcttggtggttgttctcaccacagtgagtgatttcttgctcttgtgagacttgattacttatgatggaaatagattagttcttgtgagggttagtgactaaaaaagctgggatgcccttcagattttgccttttcacacttgtccacatcctctttgaccttatttgttatgttataacacatcatgaaagcccttcccagaagccagagccatgcccttgaatttcccagcttgcagaaccatgagctaaatacatctcctttctttataaattaccgaggctcacgtattctgttatagcaacacaaaactaagatagaaaattggtactaacaattgatca

SEQ ID NO: 819124 - DNA, 611 bp, Homo sapiens
aaaaaaataagagttgggtaagagctatccagtggggagtaatctgaagagttagttaggcatggctgaccacctcaaagggaagaaaggagaaaagrgggctatgacccacttaaccacacgatttaccagaaccatcaaaacgtgtggcccatgttttgatagaaatctagatttttgaatgtgcttcctttgccagaaaacttcagcaaaatacattgaatttgaatgactttaggttgggtatacatttccagtttgctacaggcactacaactctattcccagctttccgatgcttgtgtgagattatatatttactttgtcacccataagcactgacttttttacattgagatattaggcaaataactactatttaaataaggcttgactttttcatatgaaatgaaatattacaagtatacgaagaaaaaagctattaatgaaattctgatttaaaaagaaagagttttgaaggttttatgtcctgtctgcattattaaattatcaatttcacatgcccttatattgtcagctcaatgttctttctgtcattcatttctttatatttatttttattggcccctaataatagaaagtcatttcta

SEQ ID NO: 819125 - DNA, 635 bp, Homo sapiens
aaaaagctcatcatcactgatcattagagaaatgcaaatcaaaaccacagtgaagtaccatctcatgccagttagaatggtgatcattaaaaagtcaggaaataacagaggctggtgaggctgtggagaaatagaaatgcttttacactgttagtgggagtgtaaatcagttcaaccattatggaagacagtgtggctattcctcaaggatctagaaccagaaatagcatttgacccagcaatcccattactgggtatatatccaaaccattataaattattctgctataaagacacttgcacacatgtgtttattgcagcaccatttacaatagcaaagacttgggaccaactcaaatgcccatcgatgatagactggataaagcaaatgtggcacatatacaccatagaatactatgcagtcataaaaaagaatgagttcatgtccattgcagggacatggatgaagctggaagccattattctcagcaaaataacgcaggaayagaaaaccaaacactgcatgatctcactaataagtgggagtagaaaaatgagaacacatggacactgggaggggaacataacatcacacaccgaggcctgttggggggtgggaggcaaggggaggaaga

SEQ ID NO: 819126 - DNA, 641 bp, Homo sapiens
ttagaaatataatgtatcactcagtacttgtcattactcrttaaataatataaaaggactactctttgcttggtgcactaaaggtttttagaaatacatttgttgcacctgaaaaaatgagtgtgccatataagattaatatgcataagatactgccagctgcccactccactcagagaaaaatacatgcaaatcactttggctgcaggtggtacaaggttctgaaccaactctgtccaggggcaagtcaccgccttaaattgtttagctaggttcctgcctcagaataccccgactgtggccacagaaggatagacaagaccattagatgcaaaaatgaaacctattgagggagacattcaggcccttaaatcttgagcagttcttgaaaatgaatgccattgtcaactctgtctctctagaaaagttaaataagtaccttttcaagacagtcattaaaatgaaggtatttatgtatctctcccccagctgtttggaaatgaatgctgtaaagtaaaatgagaaaatctgtgccttttaggttgctgtttaacatgaatatatttgctatagagtctttcctacaaactctattgtgaaaagctagaccaaccctgccataaataatgtaatattaaatt

SEQ ID NO: 819127 - DNA, 603 bp, Homo sapiens
tgggctttgccatacagtaagaaaaggaaagtacaattttccatcattctagatattacccggcctaattgcagatctaccctgtrattgagccactctagagaaacagcatctttgtagtatttatgagaaggaagacacataaccagaacacaacatagggaaacctcacccttgtgaagcttatttttgatgcagcaaagcctgcagcttgccttggtgaagaggccagtgggcatcatacacagaagcaactgctagaatcagtaatgtgtcataagtgtgacttgtcaaaaccttccctgaagaagcaaaacttaaagatctaacagatcctcaagtgtctagaaaggtgacttttagtttcaatttcaaaataattcctcaacttctttggaaaatatgtatgtgttccccttgaaggtctattctgcagaacagcccaaagtttaagacatatatattagctagatagggttcctctataccttttgttgacatttaagttcttcattgacttcatagttatgttgagtcatgtataattaagctaatattgatatattgatgaacaaaggctgttactgatgaaacattgtgaaa

SEQ ID NO: 819128 - DNA, 619 bp, Homo sapiens
atcacattcatttttttaattaggagaaatttgggcaatatttaaatgaaggaaactcctgaaatggacttaaggtaaagaatttaataagaaaaatcactgactctcagaaatagaagggaagaaacaagggaagatatggttttttgagtttcaacacctaaagtcaaatcaattcagactgaagtatgttcaccgaccctctagtcatatacttggatgtatagcagcatggcaaatagaacctacggcctttatttcaggctggtgttctctgagtgatacaatatcttcttctgtaactgtttttcaagttcattttgtcaattatatgtgccagtcaataatttatttgatctaactctgtcctgagcagctaatatggaggaattttatttccattttacagatcaggaaatagatacaagagatcaaagtctttgcctgaacatccacatgtaacatccaccaaacatcttaattgttgcacatggtatcctagaacagacgtatyatttgttccactttgtcatttttacctgacttttcatgacgaattttatccatctcaaggataaaggggataaatttagtggggggaagaacaaaactcagaatg

SEQ ID NO: 819129 - DNA, 593 bp, Homo sapiens
atattcaaatgattttatgagaatggctcatgacagatctacctatccactttggggtgcctttggtgtaaaattcatgatccttaacacaaatctttttctgaaaatggtaaacacactgctcaatcaggccatgaattggcatctccacacataaacaacacctaataatttaatgtatgaaaatgaattgaattctttaaactcagatgtgggaacacagagccattcacacttccaagagtatttgttttggggtttatggaaggaaaggagagtagcccttttcttccttgaaagggtcaagaagatttttttttttttattcgctcacagaaacagagaggataggttagtaaaatgtttctgaataaaaaggaaaagacattggtggaaacagtcactcactactaaccttttaatcagggacccaaatgctcaaagttatactgactaaaaggaacatcaaccgctgtgtaaaatccatcaaatttgaactcatttttrtgcttccaagtttgtgtcaactttttatatgttaactaaattaaaatagtgtttaaaaacaaaaacaaataataaaaatattaatg

SEQ ID NO: 819130 - DNA, 593 bp, Homo sapiens
atattcaaatgattttatgagaatggctcatgacagatctacctatccactttggggtgcctttggtgtaaaattcatgatccttaacacaaatctttttctgaaaatggtaaacacactgctcaatcaggccatgaattggcatctccacacataaacaacacctaataatttaatgtatgaaaatgaattgaattctttaaactcagatgtgggaacacagagccattcacacttccaagagtatttgttttggggtttatggaaggaaaggagagtagcccttttcttccttgaaagggtcaagaagatttttttttttttattcgctcacagaaacagagaggataggttagtaaaatgtttctgaataaaaaggaaaagacattggtggaaacagtcactcactactaaccttttaatcagggacccaaatgctcaaagttatactgactaaaaggaacatcaaccgctgtgtaaaatccatcaaatttgaactcatttttatgcttccaagtttgtgtcarctttttatatgttaactaaattaaaatagtgtttaaaaacaaaaacaaataataaaaatattaatg

SEQ ID NO: 819131 - DNA, 627 bp, Homo sapiens
tatttttgccgtgttagagacagaatactggattgactaatggtcttatgtttgcaaactctcattgaataaaatattttgagactsgccaatgaaaggatgaaacatggaataaatgtgtaatatcctatatatttactttgtatatatatatatatatacaaaaacacatatatgtatacatagcaatgacatttgactgtatccagttaatctatttctctgtaacatgatgacactttacatttataaagcactcttatttttttcaaattcatcataaaaaaaatttatttcctttcctttgctacaaacattaacaaaacaggcattctacctattttgtgactgggcccatattgttataaaattataactacatatgggtccatataggtgatcacacgggttagtccatgttttatgctttgtaaggtcatgctgcagttgctatcactaactgtctttgtttagccttatcaatgtcattttttatttactccaaaaacattgtcttcattctaattcaagaagaactgataccattgctgcaagtggggccagaagaagaagtctctaggaaaatggattgtggaagggtggatttccctcatgatattctctggt

SEQ ID NO: 819132 - DNA, 627 bp, Homo sapiens
tatttttgccgtgttagagacagaatactggattgactaatggtcttatgtttgcaaactctcattgaataaaatattttgagactggccaatgaaaggatgaaacatggaataaatgtgtaatatcctatatatttactttgtatatatatatatatatacaaaaacacatatatgtatacatagcaatgacatttgactgtatccagttaatctatttctctgtaacatgatgacactttacatttataaagcactcttatttttttcaaattcatcataaaaaaaatttatttcctttcctttgctacaaacattaacaaaacaggcattctacctattttgtgactgggcccatattgttataaaattataactacatatgggtccatataggtgatcacacgggttagtccatgttttatgctttgtaaggtcatgctgcagttgctatcactaactgtctttgtttagccttatcaatgtcatttttyatttactccaaaaacattgtcttcattctaattcaagaagaactgataccattgctgcaagtggggccagaagaagaagtctctaggaaaatggattgtggaagggtggatttccctcatgatattctctggt

SEQ ID NO: 819133 - DNA, 633 bp, Homo sapiens
caaagcatataaaatatgggaatgtgcctaaagtagagcttagagggaaatttatactctacatgtttctattgaaatgaaaattttaagtcaatggtctaagattccacagcaaaaaaacaaaaacaaaacaaaacaaaaaaaactagaaaaagagaaatggggaacatttttaaaaatgaaaactagaaatttatgaaatactgagcaacaatatagcaaattatcaaagccaaaacgtagttctttaaataacttaataaattaagtaaaactctaggtaaactggtcagaagtaaaagagagaaagcacaaatgccaatatcctgaatgagcaagaggatactatagattgcacaaaaatataaatatagattgcacattataaagcactattcatgaatgatatatcaataaatttataatggataaatttcttgaaaacatgatttactaaaactgacactagaagaaatggaaaattggaataattaatatacataggataagwtgtatttataattaaataccttctgacaaggaatactgcagatccagatatttttactagtaaattctatcaaacatatacagaataaataataaaactctttaaaaaactgaaaaaattct

SEQ ID NO: 819134 - DNA, 552 bp, Homo sapiens
tactcatcccacagcctgtgagcctaaattgagggaataggcaaatctatggggaacgcccayggcagactgggctgtgcctctccagtgcagggggcgaggcgagaactctgaataggagggaggagacccccaaatcttctctcagaacctggcacccattccgcctccctaaagcacctgcgttcatgagcaggcaacttagacatggtcactcagagctccaggcaatggcaaggggagggtacacatgacatccaggcaggtgcggacaggagggcccggacaccatttgacctacattactttggggccagttggtggtcgaaaatgaattgcctcctttcaaagataaataaacaactaggaacagaaatagaggaaaataaccataacaagcagaatatgttcgcggaatgttttggaagatttacatcaggaaacaactattttatcaaaacagcacatctttgagaacgtaaaaaaaatctgaaataaaaaattatttgctgacaaattctgaaatacaaagaaaataaaggagaaaggtaa

SEQ ID NO: 819135 - DNA, 552 bp, Homo sapiens
tactcatcccacagcctgtgagcctaaattgagggaataggcaaatctatggggaacgcccatggcagactgggctgtgcctctccagtgcagggggcgwggcgagaactctgaataggagggaggagacccccaaatcttctctcagaacctggcacccattccgcctccctaaagcacctgcgttcatgagcaggcaacttagacatggtcactcagagctccaggcaatggcaaggggagggtacacatgacatccaggcaggtgcggacaggagggcccggacaccatttgacctacattactttggggccagttggtggtcgaaaatgaattgcctcctttcaaagataaataaacaactaggaacagaaatagaggaaaataaccataacaagcagaatatgttcgcggaatgttttggaagatttacatcaggaaacaactattttatcaaaacagcacatctttgagaacgtaaaaaaaatctgaaataaaaaattatttgctgacaaattctgaaatacaaagaaaataaaggagaaaggtaa

SEQ ID NO: 819136 - DNA, 603 bp, Homo sapiens
tcattttttatttgatgattttttctttcattcactaaatatctagtgatcacttaccatgggttatattcttacttagacataagagataaaaacggtgatcaaagtcagagtattgaaaaarttacaattcttcaaaacagagatcagattgtgcaaagactgcaggaggggacatagcacactcaggaaattaaaagccagtgtgcctgtaatgttgagaggaacagaaagcataaggaaaatagttagagtctagaaaattaatagagatacagggtgttaaaacctacctaatcatggtgtatttccttttgatatgctgttcaatttggtttgctagtatttgggggaagatttttgcatcgatatttatcaggcatatgagtttgtacttttcgtttttttgttgtatttttgtctggctttggtttcagggtgagactgggttttattccaggaaggtaaggatggtgcaacatatgaaaattaacaaatgtgattcgtcacgtagaattaaggacaaaaaacatatgatcatctcaatagatgaagaaaaagcattgataaaattcagcgtatcttcatgataaaaacctgcag

SEQ ID NO: 819137 - DNA, 598 bp, Homo sapiens
tatctgaaagttggcagaataacagaggtgatgggatttaattatcattttacattaattgtctattcttttaatggagarttatattatgatgaatgacaaaatactttcttaattaataaaatatttgtttcttccgtagtgtgtatatagtatatatatgatgtttttatattagaaaaatccctaattatgtttttattaacatgacttcacattatgactttacataaattcctttgaaaataattctaaattacacagtttgagtcattgtagttctttcattttataaattaaatttgttttagcaaagctgcttttacagaagtagtagcaattttagttacttttatgaatgtcactaaatttcttaccatgtgcaattgtatgttttttcagctatccataggaattacaaataaaatgcacacgagtttacaacgttttattatattatgtatatggatgggtaatatctacctatattcatgataattgataacttataactctaattaaaatgtcaagaatttcaaagatacaaataagcaaagtaagtcatccacaactttatttctgagaccatatatagtcc

SEQ ID NO: 819138 - DNA, 546 bp, Homo sapiens
caccaaaatctcagaaatcaccactaaagaatttatccatgtaaccaaacaccacctgttcccccaaaactacggatataataatttttaaaaactgaagaaataaggtagatgtgagttttcatattacagagaacatgtaccatatatactgatatataagcagccaaaaattaaatacaaaaataacaagaatacagatacatattctttcaaaacctaaataatatgctagataacatttcagatgatcaactctcataatatttttttattacagtcgactttctagtggtttcagtcattttgacacttatcaactttggaggaatcttgaagcatcaccacattcatgtagttactgatttattgatgctattatttgttaaacaaatacatatttcctatctgcagtatacagtgatccctaaggaraagaacattaagtgcttgttaaaatatccacagacctagatagaatgcattatatatgtgaaaatcttgctgtcatctagagggaggaattatttctaataggactgggaa

SEQ ID NO: 819139 - DNA, 581 bp, Homo sapiens
agcttttgttagtctgggtaagtctttatttattcttcatgtttgaagggcattttctctggtgcactattctagagtaaaagttttttcctttagcactttaaatatgtcatgccactctctcctggcctgtawggtttccactgaaaagtctgctgtcaaatgtattggagctccacagtatgttatttgtttcttttctcttgctgcttttagaatccttcctttatccttgacctttgagagtttgattattcaatgccttggtgtagtctactttgggttacttctgcttggttttctataaccttcttgtacttggatattgatatcttcctgtaggtatggaacttctaggtttagaagttctctgttattatcttcttgaataaactttctacccatatctctttctatacctcctctttaaggccagtaactcttaaaggctattttctgtatcccgttggcgtgcttaattgttttttattcatttttctttcctttcctctgactgtgtgctttcaaatagcctttcttcaaactcactaattcattcttctgcttgatcaattcttctt

SEQ ID NO: 819140 - DNA, 581 bp, Homo sapiens
agcttttgttagtctgggtaagtctttatttattcttcatgtttgaagggcattttctctggtgcactattctagagtaaaagttttttcctttagcactttaaatatgtcatgccactctctcctggcctgtatggtttccactgaaaagtctgctgtcaaatgtattggagctccacagtatgttatttgtttcttttctcttgctgcttttagaatccttcctttatccttgacctttgagagtttgattattcaatgccttggtgtagtctactttgggttacttctgcttggttttctataaccttcttgtacttggatattgatatcttcctgtaggtatggaacttctaggtttagaagttctctgttattatcttcttgaataaactttctacccatatctctttctatacctcctctttaaggccagtaactcttaaaggctattttctgtatcccgttggcrtgcttaattgttttttattcatttttctttcctttcctctgactgtgtgctttcaaatagcctttcttcaaactcactaattcattcttctgcttgatcaattcttctt

SEQ ID NO: 819141 - DNA, 581 bp, Homo sapiens
agcttttgttagtctgggtaagtctttatttattcttcatgtttgaagggcattttctctggtgcactattctagagtaaaagttttttcctttagcactttaaatatgtcatgccactctctcctggcctgtatggtttccactgaaaagtctgctgtcaaatgtattggagctccacagtatgttatttgtttcttttctcttgctgcttttagaatccttcctttatccttgacctttgagagtttgattattcaatgccttggtgtagtctactttgggttacttctgcttggttttctataaccttcttgtacttggatattgatatcttcctgtaggtatggaacttctaggtttagaagttctctgttattatcttcttgaataaactttctacccatatctctttctatacctcctctttaaggccagtaactcttaaaggctattttctgtatcccgttggcgtgcttaattgttttttattcatttttctttyctttcctctgactgtgtgctttcaaatagcctttcttcaaactcactaattcattcttctgcttgatcaattcttctt

SEQ ID NO: 819142 - DNA, 505 bp, Homo sapiens
ttaaaaggtttgtaaagatcaatttgtataaaagatcagataaattttaacaacaggcatcagtttcaacgcttagacaactacacagttttcttacaaaattatcccttcttggtgttttgggataaataataagacatgaaatggaaagtggtcaggcctggtgaggtggctcacgcctgtaatcccagcactttgggaggccgaggtaggaggatcacaaggtcaggagtttgatacccgcctgaccaacatggtgaaacccccgtctctactaaaaatacaaaaattagccgggcgtggtggcaggcgcctgtaatcccagctactcaggaggctgaggcaggagaatcgcttgaacccaggaggcagaggttgcagtgagccgagatcacgccactgcactccagcctggatgacagagtgaractgtctcaaaaaaaaaaaaaaaggaagtggttaaattctgaaatagaaaaatgaaagttacaaaactgagtaaaaa

SEQ ID NO: 819143 - DNA, 589 bp, Homo sapiens
gtgtctgtttccactcttggagttccataagaaaaacagaagtttctccccaaaaasgagtctggtgccttcttttctacacaggggtctgtatatgtgtatgtggcatacggacttaattaagctactatgttggaatatatccgatattagcttttagttaagtttacttttgaccattaagcccttttaaaaatcctcttggctgggcgtagtggctcacgcctgtaatcccagcagtttgggaggccaaggagggtggatcacaagatcaggagttcatgaccagcctggtcaaggtggtgaaaccccgtctctactaaaaatgcaaaaattagccaggtgcggtggcaagtgcctgtaatcccagctacttgggaggctgaggcaggagaatggctgaacctgggcggcagaggttgcagtgagctgggatcgcgccactgcactccagcctgggcgacagagcgagactccgtctcaaaaaaaaagaaaatccttttaaatctttaaatctcactaccttatttcagccgggacaaactgctgatatttcaaaagtaacacaaatttcaaaccagaaaggatg

SEQ ID NO: 819144 - DNA, 583 bp, Homo sapiens
aggcctgtgcgccagcagctcggccagtatgcagcccacagccctgcagagaacagtggacctcactgcggccagacgtctgctgaccccgccagcgcgaggaacagaggacctgactgcagccagacctttgctgaccctgccagtgtgaggcacgctgggtcagggacactgtgaaggacaggcagggaccactggctcccctcctgggccccgcaggcctcccggggtgacaagtgcaggggcaggcgtgcctcctccagacctctgtgctcccagcctgagaacagcaagctaagttctcacacctcctcctgggtttccaggctcaggcccacctccctgggagtgggaggctggcaaagaccccactgcactcctgcccctcccctgaggctgagctcaggaaccaggtgacccggctcctgtcccagcccttcctgaggccccaggagcggtaaccrtatctcctcaccacatgtcgatgctggtggtctgcgtggtggttcccaacagcagttcaggggctcggtacctacacacagaagcacccacctcaatacggccggctcctctcccccag

SEQ ID NO: 819145 - DNA, 607 bp, Homo sapiens
ttagcctcagctttggccctgcagcaggctccaggctgtgacacacatctcaggtctcttttctaacaagtsaagggattgaggatccagatgtgcttggagcccatgtgaggcatttgacatatgtaatttcacttaagtctctcaataattctgaattagcccacattgtataggttagaaaactgatacactgacaggttaagtaactggcctaaggtcacacagctagtaaagtggtagagttgggattaaaatccaaagtgctctttcctctccatcaatggacgctatcatcaaggccagctttatagtagcgaaagagacatgctttattctcatattgacctcaataaaaaaccaaggacctcaaaattcaatcttcatttatttattccacagtgacttattgaatgcctattattttccaggcatttctagcaacggtgaaattaatacagtgcaggcactcacatcctttatgcatctcaaaggctatctagctaatgcgctggatgttgtgaggcccattatccatagtgtacacacgcccgcagcccctccttctgatggtttaacttggagcaatcctcaatggttgtgcata

SEQ ID NO: 819146 - DNA, 643 bp, Homo sapiens
ttttatatctatttaattttgatcctgggacacccaagaatgtgaacgacaaaattgtttccatagcagaaagttttaaaaaattgtttactgatttaattgtttggtactaattttaattttgctrtatatactcaaagctgggaaaaagacacagcctgtattttaaggtcagtcatatagattctcatgaactggaattagaactgagtgatgtttatatgcgatgctgtatcttaaggagcttaagctaagtgggatgtgaattgttttgcgtattcaatgtgtagagcatgttaatcatcaacatcatttttaagggtttgaaatttcattagctttaagtttttttataattagatacaggattaaatagacaagctagaaatatataaaaagaaatatgttaaagcaagacttttattactttcaaataaaaactgtgtatgattattttaaagattattaaggcttctttgtaattagcatacatttattcacataaaaaccttaacttattcaccattctccatattgtttatgctctatacttgtgtgtttaacaaagctaaattaacacaaaagaaagccagtttgattcagcataagttttctcataattcatatatttttattgatatat

SEQ ID NO: 819147 - DNA, 489 bp, Homo sapiens
ttctgaaataatgcctcttgtatacacatgtattacatgtgtgtgcagttgacaaaatagacaaagctattttccattaaatcagataaatgcaaaatatatgaccactctaaaatgattttctttttcaaagaaataatcactcctctgaaggtgtgtcaattattttgataattataaatcttaagctttgagggcaattcacatgtttttcaagtaattcatgaaacaatttcttatttttcacaaagatcctgtcctatacctattttcctaccatctgcatcatcttatatttccctttattctctacctgaataacaagttaatttttttctttgcctttactattagggcaaacattctcagttkgaaaggaaattgagattttagtaatcccaagtatctaaggcagctaagtaatcagaagtcttataggtaaaaactatctccaaaaacgtctaacttttttgcttcaattgacctttc

SEQ ID NO: 819148 - DNA, 622 bp, Homo sapiens
cttgccacttcctccaacataacatggtagtatagctaccatttcagctttcaactgtatctactagaaaacaattctggaaaaaaaatgcttctgtktttttatatgaaaaatggcccttaacccattgcagttaggcttccatccaaatgctgcctccaagaatctttccctgaagtcatcgggcttccttccatgttgtcaaattcagtgtttcctttctggcagcatttaacacagacaggaactgcagcctcttaacttttctcctacctgcataggaggctttaacgtaatcttctttgtaaaatcctcttcctctggttgtcttctaactgttggaacccgaaaagctttgtctgaattggacccttttctctctctatgcgtactctccgagaacctaaagttccatggctgtggtggcatctgcgggccagtgacttccaaatctataccttttgacttgacttctcattagaacagcagacttgtacatcaaggcctgctctaatacttttatgtagatatctactaaaatttatctcaaattttacttggctcccattaacttttaattcttaacttgcaaactggttccttgtgtttttcacaattgttt

SEQ ID NO: 819149 - DNA, 599 bp, Homo sapiens
taggagcagatattctatgagaatggaaaattagatccatggcctggctaataggccagtgtaagaatattggattttacactaaataaattggatgttggtaaggaaattgtaatatttggcttagaatttgtaaatgatttgtgtagctgctatgcttagaagagactaactgaagcaagagcagaagcagagagataatgtatggagttagagtatttcataataaaagttaatgggtgacttggctcagaatggtaggcctagaggtattaagtggttggaatctggttatatttaagccatggtcaaaataatttctggatgaattgaatcaggtgtgtgaaaaaacaaaagagttaagtatatcataaaatctttcacacattttcatcctcctatccagactgcacttcaggttttctgcttaaaaattgcttcccatcaagtcctagaattctttctgagtgccttgagttaattatggttttgacatacatttttaaatggtttccattgttaamaaaatatttcaaatttggcataaccaaagctagtttatttttctaatttattatagtgtacacttcaagactaca

SEQ ID NO: 819150 - DNA, 516 bp, Homo sapiens
tattgagttacaaaattcaagaatgactgattataacaagtttaaattttaccacagtgtacatcacatgtaccagtagaatatatatactccactgtagatattctactacatatattctaccagtagaatatatatatatacattatgtatagaatatatatacacacgcattatatataatgcttatatatcacataatacctacatgtatgaatagatgactagaagtgataagaatatatgtccttgtctgatcttaggttaataacattcactttttcatcacatagatggcctctatcttatttaggacactcccttgcactcctaccttatagaaaattttgaacaggcataggtgttggatttagtcaaatgatttgtccaagtatattgaaatgatataccagatttatccttaagtattgcgtattttgagatattttgatacatttttaaattcastaattcttactcaatatttaatcagttttttatcttatccatggagca

SEQ ID NO: 819151 - DNA, 632 bp, Homo sapiens
tttatttttttattaatcattgaagataatagccaagtactgagtgggaaacaactctcatgcagcatattgtccatttagtaataaaaaaaagcgataacaatagaaatttgtgtttttgacttaatattttctttgtgtgagattcacaacatatttttcatagtattttttattttagtttaatcaataagagagaagaaaagctccataaaaacaagtccttctgtcagttttgttttgttcaccttaagactgtatagcaatgcgtgatctttattgggcacttagtaaatttttgttagctaattgttgattttcctgcttactaattggtttaaactctgtgctagaaaagcttccttttctgtctttttcttttctttgatcttcaggaggtataaactttgtaaaaataaagttcaaaataattgcttttgaaataagccgagataggcagaggaaagtttgcctttgtaattcccacattaagaaataaatagcctttggaatgatcactgttagaataattaagataayaatgctagttctacatgtcataaaaaatacccatgaatggaacagaaacttatttatttatagctgcaataaggagactgggaaagacataa

SEQ ID NO: 819152 - DNA, 533 bp, Homo sapiens
ttatgcagaagacttattgtagaggcaaaacaataggtagacaaaactgttgcttctaaaatatctttcatgtcatcaatagcaagttcacatytacccttaagaatgtcactatttatacaagagataagttgtaaaaataacgaatacatttgtaatatttaccggatttcatgaaggacctacctttttgactatgaaataatatttataccaacacaattagagcaaataagtgaccagtatattaaatacttgaatgttagagtgaaaatgacacccagtatcaagtatttaaatcaaatattgatttgaaattttagtcagtaatttttacaaaattcaattagatttggtaaaagaataatcaattcacactttgtataatatcaggaattttccaataataaattatgtaatatcaaattattacccttgtgtttatttaaatattgaaattgatcactgtgttgatcaatatgttgactacattgtgatcaatttgtgcatattttatcactgcactgaatctg

SEQ ID NO: 819153 - DNA, 613 bp, Homo sapiens
tacaaatgggtaatataattaactttaaaaattaaaatcaaatttgatcactttaaatataaaaaaattgcaatgtwtcaaaataaatacaagaaaaataaatagaactacctaaatgcaacaaaatggaaaatacataaaacattataattctgattttcattgatcatactgtgaaccatgtacagagaaacatacactctattgctagagagtttatcttttttagaaagcaattaaaaaacaagttttaaaaggctttaaaacgttcagatatttatttcactagtatgtaaaagatagaaaaatgaattaaatattagatgaaaaacagatgaaaacaatgattatatctgggtggggacattatgggtaatttgatgctgttcttgaaactttcttgtacaataatacttttttttttaagtgagaggattatgttatattgtgggaaaaaaatacaataaaaagcaattcttatttagataaatccttgcaagttttcggaataacattgcaaattacatttcctacgataagctgccaagaaaaggtatttattagtttgacattgtacttctctgtctcactaaatgtgaaagaagtgtcaata

SEQ ID NO: 819154 - DNA, 645 bp, Homo sapiens
agggaattcattttcagcaaaggtgtcaagaacatacactggggaaaggattgtcttttcttcaataaatggtgttagaaaaactgtaaatccatatgcagaaaaatgaaattagatccttatctcttgccrtatataaaagtcaaataaaaatagattaaagacttaaatctaaggcttcaaactatgaaactattataagaaaacatcggagaaaatctccaagacattgatctgggcaattgcttgaacaataccccacagcacaggcatccaaagcaaaatgggtaaatgagatcacatcaagttaaaaaacttctgcatagcacaagatacaatcaacaaagtgaagagacaactcagaaaacgggagaaaatatttgcaaactacccatgtgacaaagaattaataaacagaatatataaagagctcaaatgactctatagaaaaatatttaataatgtgggttttatatttaagtctttaatccatcttgagtttatttttatataaggtgtaaggaagaggtccggtttcagtcttctgattaaaaaacaggcaaaatatttgattagacatttctcaaaggaagacatacaaatcgcagacaggcatatggaaaggtgttcaatgtctttgaacat

SEQ ID NO: 819155 - DNA, 499 bp, Homo sapiens
acagtgactatagttaataatatactgtacatttcaaagataactagaagatttgaaatgttcccaacacaaatgtttgagaygatgaatatcctaaatatcctgattcaatcatcacatattacatacatgtatcataacactacgtgtaccccataaatatgcaattattatgtatcaataaaaaaataaagaaacataaaaaaacaggttggctctggtggctcatgcctataatcccagcactttgggaggccgaggtgggcggatcacctgaggtcaggagttcgagactagcctggtcaacacggtgaaaccccgtctttactaaaaatacaaaattagctgggcatagtggcgcgtgcctgtaatcccagctactcaggaggctgaggcaggaaaaaagcttgaacccgggaggcagagattcaagcgattcgcaccattgcactccagcctgggcaacaagagtgaaactccgtctaaaaaaaaaaaacca

SEQ ID NO: 819156 - DNA, 473 bp, Homo sapiens
ccaataactccacagaatggaaccctttttctattccacagaatggaaaaggaaacacttttcartgtgcatattggagggcctatgaaaacctaggaccaaacctcttagttaaactgtgcatgttagaccaaaagccagataagaatcccacagcctttatggaaaagctgagagaggcactaataaaacacatctctttattccctgattcagtcaaggaacagctcatcctcaaggacaagtttattatataggcagctcccagtattagaaggaaattgcagaagcaggctataggaccagatagcaccttggaaaacctcctgagggaggccacctcggtcttttataaaagagaccaggaggacgcccaagataaagaaaggaaacacaagaggaagacagaggcttctagtagctgctctgcgggcttgcaaagtccaggatccccaaggtgcatccactagttg

SEQ ID NO: 819157 - DNA, 392 bp, Homo sapiens
atgaaaacctaggaccaaacctcttagttaarctgtgcatgttagaccaaaagccagataagaatcccacagcctttatggaaaagctgagagaggcactaataaaacacatctctttattccctgattcagtcaaggaacagctcatcctcaaggacaagtttattatataggcagctcccagtattagaaggaaattgcagaagcaggctataggaccagatagcaccttggaaaacctcctgagggaggccacctcggtcttttataaaagagaccaggaggacgcccaagataaagaaaggaaacacaagaggaagacagaggcttctagtagctgctctgcgggcttgcaaagtccaggatccccaaggtgcatccactagttgcta

SEQ ID NO: 819158 - DNA, 604 bp, Homo sapiens
ctggctttccttgctcctccacttacagatggcctattgtgggactttgtgattgtgkttccatcatagcagacgggaagaggactagattgcagctccagctcagaacgacagagcagtgtgtagaggcccacatcgtgaattttagctccagaatgacggcaggaataaatcaagaaacccgagaggacccacacaccctctgaaagaagtggactgctcctgcaggacccaggagacatcccaaatactgtgctggtatccacagccaagagacccatagacggttcacatcacaggactctgtgcagacaacccccagtacaagcccagagcctggtagacttgctaggtggctagacccagaagagagataacaatcactacagcttggctctcaggaagtgacatccataggaaaagggggagagtaccacatcaggggaacaccccatgggacaaaggaatctgaaaaacagccttcaaccctagaccttccctctgacagtctacccaaatgagaagaaaccagaaaaccaactctggtaatatgacaaaacaaggctctttaacacccccaaaaatcacactagctcacgagcaa

SEQ ID NO: 819159 - DNA, 554 bp, Homo sapiens
atttggtaaaaggaggattataaattacctcagcccattaactgtttacatgtttcactgcatagagtatggcctaatactttcatgacatctgtaggcattattgacctgcttctgttgtaattctttaaaaataactattaacagaaacgggaagaaaagaaatgaaagcaatatggaatgctgtgtggttgggtaaaacaaagtagagtggttttaagttcactgcactctgtttatcttctgttaaaagactagcttgcttattactgcaggtttttcctcaaaaaaggggggctgtattacaaaggagggaagcatataataaaagccttttatagagtgtagaatgagtaaaagcagctttagttccggaggtggtaaatggagaacagcattttctctgggaaagcactctcttgtgcctggctgggtgagctttgtccagttgacatcagcaaatacrtatggccatcctttcattcatggccccaaaccagagtgcagttaaatcgttcagggacagcaaattaaagtaagactccttttgccat

SEQ ID NO: 819160 - DNA, 681 bp, Homo sapiens
ccaagctcctatgcatttcacagaccagcccattgcctgatgcacaagaaagtttctcctggtaaacaacaatcaagcataaaagctactgcaactgctgcagctggctctaacctgcamgtgtcatctactggactagatgtcaaactacacaacccaatacaaaagctgctaacacaagtaaacagtgcttgggaaccagataagctttaagacctcactaacctggccccacaggagaccaagagcctactcacacacctagtaaaccactactaaaaccacatttagaaagccactgcactaatactgtctataaccaaggaatttatagagtctttgtcaatgaaagcactcagaaaagccaaatgaccctactaaacacacattatagtcacatcctcaagggaaaaaatagtcccatctaaacagcagtaaatgcaaaaataagaagtgatagtttcttcagataagaaactaatgcacaattcttggcatattaaaaaaactcaggtgttatgatacccccaaaggattgtactaactctctagcaatggatcctaaccaaaatgaaaatgtaaaaatgccagataaataatttaaaatattgattttaaagaagctcagtgagatccaagagaaatcataaaacctgtacaaagaaatcagaaaataaattc

SEQ ID NO: 819161 - DNA, 337 bp, Homo sapiens
acctacaaagatatttataatatactattgagataaaaagcagtgaatgggactggtaccctgacatatgtacatacaggtgtcgtgttggctgaagccaggatttcagggtgtacagaagagagttaacatgacacgtccgaaactgccatctttaggatctgcctgctacattggccgttggctagcatctggaacctggatgtggaaggcaccccccacccacattcccagagctgawaagagtggctcacatgcctttatggcttgtacagacaacatggcttatgctgaagctttgctgtccttctgggagcctggaagcttgcaatttcct

SEQ ID NO: 819162 - DNA, 492 bp, Homo sapiens
tagaactgtggctttagaaatacaccacgacagctatgattcagaaatcgggaagctcaccagtgtagcagctgcttaaaatcaatgaccacrgcaactggttttagttttcgagacagtctcgctctattgccagggctagattacagtggtgcaatctctgctcactgcaacctccacctcccaggttcaagcgattcttctgccctggcctcccgagtagctgggattataggcctgtaccaccacgcccagctaatttttgtatttttagtagagatggggtttcaccatgttgaccaggctggtctcgatctcctagcctgaagtgatctgcctgcctcagcctcccaaagtgctgggattataggcgtgagccactgcgcccagccaactacagcaactggagacaagccttctgttacagaagagtccagcgtctgtgtgttcatggaagctggcagcaaaacaggcagaagatagactccactc

SEQ ID NO: 819163 - DNA, 550 bp, Homo sapiens
tctattacagtgtaagtgtgtatatggcatcagtacatatgcacataagtgccatttgctaaatttaaaagaaagatggttttcccacttctaacacttaaggacttagaaaagataatgctttaagaggcagcaaaatccacgactacacacagataaaagaccctcttatttttctaaatatttagagaattagtctacagaaggactacaatggaaactaccaaagtgagatgagataaaatgataaaagtgcacctagggaaccgtttaagtatgcgagagtgtctatggagtgtgtgtatgtgtgtgtgtgtgtccccatttacacacacacaagagaatgaataattttaagcaaaagcattcaagaattttatcattctgtcttgacttgtcctttccacatgttcaggttcagtaataacggcagctttgaaagtgtcaggaccagatcagtcaggaggattcatttagaaattgtgactggtcmcaatgtgcctttatttagccaaccctcataataagcgatttctattacacggggctg

SEQ ID NO: 819164 - DNA, 634 bp, Homo sapiens
tccgatatatggtggggagaagagggaggcgttggtgagcaagcacccgtgggcagaccctgcccctccgacctctcccagggcccggggaagctctctccttggttgcctttgcctgccttttggcaaacccttgaaattgctgtttgcttgggatggagcggggagggcgagccaggtcctgtaactggggtgtgacttctcacctgctccctccaaggccttaggaaagagattcaggaaggacgccgcctcctaccgaagcctctatggagtggagcaaaaggggaaacacctcagcatggtccctggcagctacatcaaggatggccccaagaaatctggtaagggaaaaaccttggccccggccgccagaatcctgctccataatctcctcctctagaagaaaccgaaagctcacgccattcttagagcagtagcgtccacatcaatccaaccattgtgcacacaggagtcagaagcccacatggaggctcagtagggaccactcctggggtcgctcttggcaagcrgggtgtgacatgaacaggaggcaagtgtctgtcaaggccctgccccatctcgagtgttcccttctcaggaaaccagcctcatgtgtccaggttcctgaagc

SEQ ID NO: 819165 - DNA, 572 bp, Homo sapiens
tttatggcatgtaaaataatgctatttataatactgatattagcactagttgtaataatgttaaaagctacactcttgggaggccaaagtgggtggatcatsaggtcaggagatcgagaccatcctggctaacatggtgaaaccacgtctctactaaaaatacaaaaattagctgggcatggtggtatgcacctgtagtcccagctactcgggaggctgagagaggagaattgcttgaacccgggagtcggaggttgcagtgagccaagatcatgccactgcactccacactccagcctggtgacagagtgagactccatcaaaaaaaaaaaaaaaaaaaaaaaaaaaaaaaaaaaaaaaaaaaaaaaaaaggccgcactctgagtactttatgtgccaggcatcaactatgtgttttctgggtggctgttattgttttaatccacagagctatgccaagggatagttccaactattattgctatgttgtagatgaagaaattgggacatagacaagtagtttatgggaggtcacctagtacataaatttaaaaatgctatacaattattgg

SEQ ID NO: 819166 - DNA, 663 bp, Homo sapiens
tgggatgttgctgtgttgcccaggctggtctctaacttctggcctcaagcaatcctcccacctcagcttcccaaagtgcttggattacaggtgtgagccatcgtgcctttcttctgagagtattttctagaggaattgtaatagcgggacaatctggaagaaaagacaaagaaggtcccttttgtctttaacttagaccctacattagttgctattgtgatataacagattaccacaaatgtagtggcttaaacaacattcatttattgtctcacagtttctgtaggtcaggcttggcttaaatgctcagtctcacaggaagagacaaaataagaaatgtatatttggtctttgctcctagttcctggcacagagcttttaaaatccttgtaatttcttgagcgatagaagcatcttttgttacaatatttagttttagtccccagtctgacacaaaagcttctaagacctttggaatctctggagtggtaagtgtctctttttgtgtgtgaatgagatgactggtggctggggtctctagatrgcttcaggatgaggctggttgctagaggaaccaaacaggtgattagagggttagaactttcaaccccatcccttgacctctggggaagggtgaggggatccagattgagatcaatcacc

SEQ ID NO: 819167 - DNA, 688 bp, Homo sapiens
aaacagttcactgtagctcaagcaataccctacaacagggtgggtagagataatgagataaccacacaccacaagtgagctgttcatctttgtcttcaagcatctaagaacacagttatctcagtaggatggtgcaccctggagagttataaatatctttcagaaaggtaaagaaaaacagtcaaagaaaacgcatctgaaaaaaataagcaaaagaacactggtggacaattttttaaagcaaaatttcagctataccagaacttattgaatcaggtcaataagttttgtgtgctttttttttggcattatgttttattttaattgtatgcagatttattctaatgttatgatgctaatcaacctgtgtagctataataaaataaaggcaatgtcaacacctcatcaactaatcacactgcttctttcattctggacactgtatcctccctacacaacaccgaagtactataaaaattatttatacaaataaactattatctaaagactgaaaaggcataataaattatgcgtaatatggcccaattatgtggtaatttctttgtttgaattatttgcatagttttaatgaaggggttgctagaaggtggaaccatttttatatttaatggaaaaaacaaatttgtttttaagaatgaaaacaaarataattagctcttaaattaga

SEQ ID NO: 819168 - DNA, 537 bp, Homo sapiens
acagatgtgcatacactcatttgaatggtaatactaaaatgttgatttgttactataattaaggctcttcttgtaagcccccataataaagtcrtattctgctaaactggcaactataaggaagcataaggtactcatatttgaacaaacatgaaaataaaataaaggatttcaaaagaatgactctacttaaacttcaaactgaaatcctgaaaaagccaaaataatgtgagagaagaaaatcccagctaaagctcagagcaaagtattcttttggattttctagctctgccagttggtctcatcagaagtttttaaataatcaaagtaaaaggccacaagatgaacatattaaaggactctttggatctatcgaattctcacttgtgacttttaaaagctagaaatctcagaaataataaaacatctcttaaataggtcacatccacttccagttgaatcacatgttaaagcattaccaagtagcattggtagcattctactaccaatgattttcatatcttgaaaaaaattaac

SEQ ID NO: 819169 - DNA, 622 bp, Homo sapiens
taggggcattggggcatgcaacaacaggttaccatccgtttccatcctggtcataggaggtcatccttcctcccataggtcttgccacatggyctagccccacatgggccagtggccaactagccacttctgtattttccaggtgcctaaccacaaggttaagcctcgatagaccacacagctattggtgcagattatcatatgtgtcacctctttggtgatcaccattcatattgctctgacttcagcccattgactactttgtccatacccggtatgaaaccatatggagtcagtactaggctggactgtgagcagtccaggcagtagcagcaccccagctagacccatctgtgtaccgtgccccatcgggcatagggggggatgcccttccttaaatggtgaaggctcagcatgtaggggtgcttcaggccccatgtccttaggccccatggccttatcttgcattaggactgctggtctcaagacctcttgcaactctgctgctaagggacttgtactcagcgtactctgttgcttcaagtaggtgccccactttgctaaagtggatgtctgcactgtcccagtccggggggttgttatcaatgaacacatccatcct

SEQ ID NO: 819170 - DNA, 569 bp, Homo sapiens
ccacatcttcctttccctgtaaaatgtacatggagttatggtaccttattaggctattgttagtatcacatataaaaccatgtaaaattcctaccktatgcctggttcagtcagtgctcctcaggtggtagctattggttaaccctattctttataacataattgaaattaggttatatgacttttaaatatccaaacagtcagaatagaaatattgatgagaaattttgcttcatctcaaaaacagtgttagaactacaccaatggagtatttttctcctaaaaggttaatcaggatatgacatttataggatttacaatcacaatcctgataactgtgaaatataatatcagactgtttcttactattttatttttaacattgacattaagttaaataatatattttgttactgtagcctaggattttattttccctgttatgagaacaaggataattattttacaaatgaaattttaagggattagagtgccatagacatgctcattgcattattaatgtgcagaatactggagttctgccatcttcatgaatccccacattacat

SEQ ID NO: 819171 - DNA, 535 bp, Homo sapiens
tacatacacaaacaaacttaaagcagcattgcctttgcatttaaagtcacttactgatatgcacagtattagtcatggcaaaatattattagcatttgaaattgatgctcayccctctttgttgatactgtctcatttactggattaactttattcatatgagatctcccttttcttttcattgtctctgtttccagcaccttaattgaaagtacccccggttacataattattcctttgaccttattcagtatgttccctgcaccacaagtgtctctcctctgttcaattccaactgtcagctcttttaataaaccctactcttaaacctcatttcccaggctcaagttccatatgcctcctctggacatttccacgtggaagatccactcttaatttatatttaacacgcacaaaaccaagcttactgtgcccccctttttgatttttctacttctgtttatctggccattatcttcccaaaaaaccagaaaaaatcatatttgacttctgccttgccctccttctgcctagg

SEQ ID NO: 819172 - DNA, 604 bp, Homo sapiens
tcatttctttgagttcactcaagcgaagccatttttaaagatggtcatgaacaatgcccattgagcaacgtcctgaaatcagctgagtgaccctaagggctactttctaaagtcctcttctgtgtcactcattctttctctccagtcaaccaaacgccattttcctgagccccgtggggatctttggcttgatacctaatagtttgctacttttgtatcctgcaggtggttgcaagatggaagatagggatacatctatttctaaagtgtaatttatttttttttaatttttattttattttatccttttgagatggagtcacccaggctgttgtgtagtggtgccaactcagctcactgaaacctccacctctccgattcaagggattcttctacctcagcctcccaagtagctgggattacagcacctgccaccacgcccggctaattttttgtactttacattagtagagatggggtttcaccatgtttgccaggctggtcttgaacttctggcctcaggtgatcygcccacctcggcttccccaaagtgctgggattacaagcatgagccaccgcacccagcctaatgtaattaatttta

SEQ ID NO: 819173 - DNA, 553 bp, Homo sapiens
tctctttgcctgctgccatccctgtaagatgggacttgctcctccttgccttccaccatgattgtgaggtttccccagccatgtgaaactgtacattcaattaaacctctttcttttttaaattgcccagtctctggtatgtctttatcagcagcatgaaaatggactaatacatcatcctatctgactaatacaggagagggaaaaactcatagcaccatatgtcatctggagcctctccaatcttttttttaataatgcccaatttacagttttataaaaattacttgacctgtaaagaagcaagaatgtgtaagtgatgaacaagagaaaaatcagactacagaggatccagatatttgaattagcacacaagaacattaaaataaacatgattagtatgttcaaggagacagaataaaagatagattcaagcagagagaattacacaagagatytgaaatctttaagaaggaatcagatagatattccagaactgaaatacatattatcatattaaaaactcagtaagtagacttaacagcagaacaca

SEQ ID NO: 819174 - DNA, 575 bp, Homo sapiens
ttttccattattagtgaaatcttgttattttcacaagttaaattctatttaaatacatttatgtgttacagaattgtcaagtggcagcttaacctgctgagggaatagaaaaaaagtgtgcctagattaaaagaatgcacttacacgaaaataaagataaatgaactaataaattactagtttttaataaataatctccatactgaataacttatccttctggtaaaatatttactatgctctttaaaagctttttaatcaaccgaaacactcaggaagctttaaatgattggatatccttttgtggcttaagagttgaaatgattttttactgaagtacattttaataagaagcaaattgctttaaagtgattcaagtcttcatggcgtcagggctcttcacgctcagttcctcgggcttaggggtggactcctcggttcagaaggcagaagaggtcacactaggtcctagagcgtggaygttctgggtaattaagaatcaattccttttcaattattttaggactagcccaggcctgagactcccagcatgggagcatcgcccacactcccat

SEQ ID NO: 819175 - DNA, 624 bp, Homo sapiens
tattttagttttatttctactaagtcctccagataggctctttgtcttcaaacccttatctamcattttttggcagttttctttcagaaacatacctgagaatctgtcatttttcttccctgccttcccctcctcacttttcttcaccccctcccttccttcatttcttctttctcttccttccttcttctctttcttcatgctttcttcctttcagagcttcctataactttaaagttcaaacttcttattttcatttttattaagttcacatgacctacaatcaaacattttaaagtgaaaagttagtgacaacacagtgcattcacagtgttgtgcaatcaccacttctatctagttccaaaatattttaaccacactagaaggaaaccctatacctattaagcagtagttccccattcctcccctctcccagctcctatctaacagcaactggctttctgtctctatggatttacctattttgggtatttcccatcagtggaatcgactataagtgaccttctgtgtctggcttccttcacttagcatgtttttgaggtttagctacaatgcagcatgtagcagtatatgatccctttttatggctgagtaatattccag

SEQ ID NO: 819176 - DNA, 565 bp, Homo sapiens
tttacctgaaatagcccaatttctttatttttctgcacaccraatttcctgctttttatcctttccagaacagaaaattttatgaagaggggaaattagagagaactagaaaataataattctttgttccttatgtcattaagaatctctaaagagaaaagatacaaatccaatgaaaagctgctcagaaaaaggagacttatctctttgaaatcctgatttcaattcttttgggcacataccagaattgggattgctggatcatatggcaattatatttttaatttttaaagaatttccatcctgttttccatagtggcggcaccatttaacattcccaccaacagtgcacaaagcttcctaatttctccacaccctgaccaacacttgctctctcttatccttttaatcatagttgttctacatgttaggtgatatctcattgtgttttaatttgcatttccttgatgactataatgttgagcacctttccatgtacctattggccattattatgtcttctttacactcctgcgttcaatgaagctttatacacagtggtcaa

SEQ ID NO: 819177 - DNA, 618 bp, Homo sapiens
taagtcagttgatagaatctcaagaaataatatctacttaattataatttaaaaatttctctttttatgttaagctacctatagatagtttcttaatatgttcccctatgcattraggattcaggcttattttaaattcagtgcttcttaatctatcctataacctgggaaaaatgaattgctagtgaattttaaattagttcttcaatactagttaaatgaatccctcattttttaaagatagactaatattcagaattgcagatgatctgtattctgttattaatgtgagggacctaatcacactacagaaaaaagtgtatcagtgagtatccttgggaaatcagaaagaaattgagcttgttcattgctgtcagcctgaccttcaagatatgacaagatgccaaaggggggaaaattacttaagattttcagaaactcagagacataaggagagtattttgaaaaagaaaaaaaaattcccctcctttcccaattcacaattagggttgtataatgcttaagttctgtgttatttcatgtgcagacagtgatggttgaaaaccatatacctactcaaaaatcacagaccaaacatatttatgcatatgtatatat

SEQ ID NO: 819178 - DNA, 552 bp, Homo sapiens
agattgcattttatcctgtgtgatgaaacacaatttgcaatttttgttcaattctaggtatcttcattttaagtggtaccttgactaatcatagctcycctaagaagggtataaggactttaaaagttctggaagtcatctgataactattgcagtagacttctagttcactctgaatcttcttaaatgctgcttcttctctaaatactatcaaatgcatttgtacagcgggggagattttctctaactgtgattggtagcttattcatttgcacgtgtacacagtgcttaccacttgttatcccaattatgagattctgagattatgaatgtttgcataaactggcagaagaaaataaaagaaggaaatttacagtttaaaaccaaaatgctcacatttttacaagcctatttaaagaggttctataaccaaagtaatacatttgctcatcataaaggcacagctataaaccaatgtactttattaaacccttaccttaaataaattttttaaaaaataaataaagcaaaaataagaaaacaggaaagaaa

SEQ ID NO: 819179 - DNA, 629 bp, Homo sapiens
aacattatagaacttttatttaaaggtaagtttaaatattcctattatttcaatttgcattaaataatctgatgggatttggaacagggtatttggcaccacagaattgtttcaaataggcacatacaaaaatatggtctccgcaatacaatgactatttcaaattcaagatggtaacaaagacagcagtgttcatttgggttcatgttgcctttactaccacatgctatgttacagatcaatcctctttaaaccactatgggaccttcagttttacattgtacgatgacattttttgcattctcttatctagccaaacacaaccaaataattgtgtttctagagaaaataccaaataattgttctggaatgcagggccatcaacactgctcgctgcagccttgacctcctggggctcaaacaatccttctaggtcagcctcctgagtagttgggactataggcccgtgccactatgctcagctaatttttcatagagacagagtctcactttgttscccaggttggagtattttgttataagaggttactaagattatttgcattatcattgttaaatataattaaaaagataaaagcacaattttaaactgttgaatttttttttat

SEQ ID NO: 819180 - DNA, 622 bp, Homo sapiens
tggggtggctgtggcagttccttttttcttttcttttcttttttttttttttttttagacagagtcttgctccatctcccaggctggagtgcagtggcacgatctcggctccctgcaacctccrcacccagggttcaagcaattcttgtgactggactgtggcagtttcttaaaatgacacaacaatgaagtctgctgtgtcaattgactcttcttttcatgaaagatttctttgtagcatgtgtgctgtttgacaacattttccctacagtacgatgtctttcaaaattggactcaatcctctcaaatcctgttgctgctttgttaacaaaatttatatattattctaaaacctttgttgtcaatgtcaacaatgttcacagcagactccatctcaagatggagtagattccatgttaagaaaccactctctttgtttattcataagaagcaactccttatccactcaagttttatcatgagataaaacttgggaatattttgaaaggaatctttttttctgagcagtaggtctcaaaagtcggcttaaaatattcagtaaaccatgctgaaagcagatatgctgtcatgtaggttttgttattccatttgtagagaacag

SEQ ID NO: 819181 - DNA, 622 bp, Homo sapiens
tggggtggctgtggcagttccttttttcttttcttttcttttttttttttttttttagacagagtcttgctccatctcccaggctggagtgcagtggcacgatctcggctccctgcaacctccacacccagggttcaagcaattcttgtgactggactgtggcagtttcttaaaatgacacaacaatgaagtctgctgtgtcaattgactcttcttttcatgaaagatttctttgtagcatgtgtgctgtttgacaacattttccctacagtacgatgtctttcaaaattggactcaatcctctcaaatcctgttgctgctttgttaacaaaatttatatattattctaaaacctttgttgtcaatgtcaacaatgttcacagcagactccatctcaagatggagtagattccatgttaagaaaccactctctttgtttattcataagaagcaactccttatccactcaagttttatcatgagataaaacttgggaatattttgaaaggaatctttttttytgagcagtaggtctcaaaagtcggcttaaaatattcagtaaaccatgctgaaagcagatatgctgtcatgtaggttttgttattccatttgtagagaacag

SEQ ID NO: 819182 - DNA, 629 bp, Homo sapiens
tttgtgtacagattattttgtcacccaggtaataagcatastatgtggcagatggttttttaatcctcatcctcctcccactctctcaagtacatcccagtgtctgttgttccctactctgtgtccatgtgaactcaatgtttagcttccacttacaagtgagaacatgcagtatttggttttctgttcctgcattagttcacttaggatactggcctctagctctatacacgttgctgcaaagaccatgatctcattctattttatggctgcatagtattctatggtgtctgtgtaccacattttctttatccagtctatcgttgatgggaatctaggttgattccatgtctttgctattgattccagcagtgttttgtaattttcatagtagagaccttttatctctctgattagttgtactggaaggtgttttattctttttgtgactattatgaatggggttgcattctttgggatttggctctcaggttggattttgttggtgtatagaaatgctactgatttctgtacattgattttgtaccctaaaactttgctgaagttgttgattacatctaggggcttttgggcaaagagtatgaggttttctaggtatagaattatat

SEQ ID NO: 819183 - DNA, 553 bp, Homo sapiens
ttctggctgcttttaagagtgtctcttcatcactgttctttagcaatttgattawgatatgtgttggtattgttatcttaacgtatttatattttaaaatatattttgtcaggggctggttgagcttcgtgaaaatggatggcttatgatgttcacaaaatttggatcatttttagtcattattttgttttgtagtttttctatatactcccctacccccaccaacttctttttttcagtaacacaaattacgttattttaggttgcattggcatgcagttgtcccataactcaacgatgctcttttcttgtcattttcagtagttttgcatatttcattttgaatagttctcattactatatcatcagattcactaatctcttctttttcagcatgtaatataccagcaatctcattcaaagtactttgatttcatatatttctgtggtcatttctaggacttaaatgtaggtgttttttaaatgtctttcatgtctccatttaacttgttccatcaatactctaccctccaggacaaatggattacagtta

SEQ ID NO: 819184 - DNA, 565 bp, Homo sapiens
cagagtcaggggctgctgctggaggagctttgtggtttccagaaggactcagccccaagggacccaaagaggttaggggtggccttgccctcccaccctttgcccacaggatctcctttatcaattgattccatattctctgcagacatctccacatcacactgtgctcagcctcattcctgggctcacttggtcacagcagagctcagaggtgactttgtatttcctaaggaatatgaagtccttcatatgggatgatctttgatctggtccaggaggtgatcatagagtcatgctggtaactgtggaattatctggggtccccagtcccctcctccattctatcctggctcaggagggcagtgcttaattttggtctaggcctctcagtgtgtcctgatcataaatattttatgttagagaggagatttctgttgcaggtctaaatatatttttagatgktactttccagaacccaatgcaggttccctcttcatctccactgtgcagatgataacacacaccttggaaaggtgcaggtcccaccgcagggcacagctcctga

SEQ ID NO: 819185 - DNA, 632 bp, Homo sapiens
tatttttctggagatggaaaatttggaaactatgtagttgatggggatgtgattgggttctttgttgaccagggtgtcctgcagtgggttttgatgtgatgaatgatccgtattttacgtagttcgccacatctacatatctggttggagttgtagaaaggagcaacatttacagaggatgtggagggtggaggtgggcagcatccatcctgcagctcaccttgtgggtgtatctgtggttcctgtgaggggtgaggctgctccccctgccccgggctttcctgcagggagatctgactccaacaatccctcaacccagagcacctggcatgtcaggctcccttttcattccataaaaattcaaggaaccatcagattgggcatttcaacatttactctgcaaatttggacagaaaccagagttttcagtttatagtggcctactcaggtccctgatgacccatgttggggacagctggccatcttagatggggttctctggaagctaactctgcaatagagatgtccatgcacagragattcagaagggagtgggggaggcaacacggggcagaaggagaccctgactcgtgatggagttgacattgaggcctcaggtatccacacaggga

SEQ ID NO: 819186 - DNA, 527 bp, Homo sapiens
cctgagggccggtcgctatcatcatagacgaccagcacaggggcctggcctggcttctgctggtaccagtgcacacttttacttccaatgttgtttcccccacaggtaatcctggccgtctktcctggggccactgacaccgagggtggctgagtcagcacataggaggtcacagagcctgcaaagataaaaataaataaataaataaataaataaataaataaataaataagagagaggttggcttgcaggtgaaagatgcttcttatgaaatcccttgccctgctgtcccagacaagctccagagagtctgtgaaccctcagggtatcccctgcaatcagccccagccccagtggcccatgactttcctgttgtatggagactttgaactgaaaactcactactctctcctggcaggtgcagtccctcaggctctcacaagcctttgagcacagtttggggggagttcagccccaccagcctcccaccctgcagcagggtcatgagcatcctgcccaccacagga

SEQ ID NO: 819187 - DNA, 612 bp, Homo sapiens
aggggtgggcaccactaagataattgatcaagaagtgcctctcctcctcctggagctcttggctcatgcctttatcatggtgcctgttgcctgctttgcactttatctgtttcatgatcagatccccaagtacacaacaaagtcttctaggacacacacaatcacaaatcaatgttttcatacccagcagagctagcactcaatttaaatgtttgttgaatgaatgaaggaatgcacagtcacagaacatgttaaatcaacatgatgtttgcaaggctggctgattggaaggatatgatcaccaaaggccctgcctacacttggcctgatcacccagggcccaaccattcttattaagaatcacgaagttctggctcttacatagcctttgtttctcatttgtatgctgtgttagtccattctcatgctgctaataaagacatacatacccgagacagggtaattcataaagaaaagaggtttagttgactcacagttccacatggctggagaggcctcaccatcatggcagaaggcaaaggaggggcaaagtcacrtcttacatggtagcaggcaagagagtgtgtgcagggagagtgtgcgcacaaaact

SEQ ID NO: 819188 - DNA, 646 bp, Homo sapiens
ggagggaagaaatattttcagcaagtctgctaccacactcctcaaattcaactaagagtggtgatttaatgtaagatttatatttttattaactggtgctttgttttcatgttgatattaaaagtgcctgtcttctgaattactttttatttttagggaggagaaatttattttgcattttccgggttcttgggagctgcttcagcactctagagtctttatggataagatcctgggtcgctggcacctgagtgaattagtagtgggttccctgatcttccctcaggtcagaaaagctctgcatccagccctattagcaggggcagaaacagacgccaggagacactgcccacctcctgggaatcggaatcagccttcacagcaccaggagcctggggtgggctgctgtttctgtaaggttttaaaaagtcagagagcacagagttcttccggagcctattctgactcctcctgagttttgttcacgtgagataatatcctcctgggaaaaaatcttgatggaaagccaaggcccccctgctggctgcaagaaaccggaattcggccttttcggcgcgcacccggacacggygctgggatgaaggcgcccagttcatgcccagccagggcctgcagggacaacggg

SEQ ID NO: 819189 - DNA, 617 bp, Homo sapiens
gttttacagtccttgatttttaggggtgtccctttgtacagtgtctttgcctgacctaccaaattaggccaccccatraggcagaggtcaaacgaaacgcaagaggggaaaaggagatctgaaagttttggcttaaaaaaagcactatggtcaaatgaccgacttgccctggtctgcccaggaccgtccaggttttaacactggacaccccatgaccctggaaatccttcagtcctgggcagaccaggatggtcaccctacactatgtaaggccagcagttttagttctgggatatgcagagatggaaagatttgtggttaaacgaggcttggggtggaaatggggagcgactgtaaacgggcacaaggtttctttttggagaaatgaaaatgttccaaaattagatggtggtgatgacggacaactctgtaatgatactaaaatttgtctacttgtattcttaaaacaggttaattttgtagtatgtaagttatattcaatgaaacttttaaaaatagattattaaatggcatcttcataataaagcatttgactttttggacagaaaaataataatactctgtccataaaataaatatatgcattaagaatttga

SEQ ID NO: 819190 - DNA, 626 bp, Homo sapiens
atagtattttgttaatatctaggacattatcattatcatgtatcattatcgctgcagttcatttgttttaaatgccatattatattccattggataaacattctattgtttatatagtcactctcttttgatgggcatttgagtcttttccagaattttgtcattgtaaacagttctgaacattctgacacacgaacattcttatatatgcaagacttccattaggtatatatgaaaagcagaatttctgggtcagaatattcactgtcatgagaaagttatatctatcagctctaagtgtcccctcctctgtgaaatatctattcctagtttttcccatttttcttttgggtgtttgtatttttctcatcaacctctttggcctgcttcctgcctgtagaatactatcgctcaagatcctttcatgtccttaaaaatcagtcttatttaacctaggctggcagcactttcagcaatgtaactctctcgaaaacccttttcgaratgtcagtagccaaatccacaattcattttgagacatgtcttgctctccctctatatgtagtttcaagtactctgacatcatcaggctttaggagacctttccatgagacattctgtctaat

SEQ ID NO: 819191 - DNA, 638 bp, Homo sapiens
tctaattctcattagttgactttcagtaatcgatgttggccccakgcagatgttttaaatcactaacacaaacattgctgtctttggtattcttgcagtgttttcatttatgagaaaacctgcagaagaaactgcttgaaccaaagcaaagtagcaaggaaacaggttactatataatcagaaggccctaagaaaggtagcagcaggtcatataattacctccttgtggataaaatccctgtcctcaaactacgcaacctactacctgtacttcttccttaggaaccaattttttcttgccagtcttctacttggcagatgccctttaaagaaacctgtgaaattaagccaccttttttgatttttttttccaaattcaaaccaattagaattgtttcacagatgcttttaaaaagttattggccatatgatgttcatcaaaaccacaaatgcatttgcttaaaaccaaacttcaaataagttaggaaggggcgaaagtaattcaattacattagaagatgcaaaccagtagtctaagcctcagcccaccatatattgttggagcacatattttattgaaagcgtttaatcttcaaaattcaaacatcaaatctcataaaatctccggccttccttga

SEQ ID NO: 819192 - DNA, 627 bp, Homo sapiens
ctcccctgcaacacggagagcctgagctagcacaaaggtccccttccacatgctggccatcacacatctgtgggggagatgtcactgtggccacaaactccgtcgtctgtgatcgataacggatgactgatgtgagtggaaattttgaataaaggaacatgatcgtgccagagaagatatgagaaataaacatggcgaagcgggtcctcttctgcaggagcaggctcttgcctgtgccaggacctggcacataacatggtcacattaagcattgaataaacatttgttaaatggatggatggattatgattatcctgtgaatccacacaaatttggtagtaccacaggtatttcaaaatcgatgtgccacaatctgaattcatcatctccgcaacattctcttttctctcatggtccattggttatccaaccaggacatagctgccagccttgactcctccctgtcccccactccgccccatcctccctgtcaccaaagcctggcaagtctgtacacgttaagtctcaaaygtcgttaaacccctgtctttcccccaccctggaggccaccctcttggtcaggagagattgagatcacaagctcaggagtaggcatgcctgaacaag

SEQ ID NO: 819193 - DNA, 541 bp, Homo sapiens
gctgtatgctgagggttacatctgacagcacaagtgagagccttagcccaggacctggcacccaytgggcactcagtaaagcttagctctttttcctctcccttctttcttgtcaggagagtgtaggaggaagttgggatcaaaccctggagggagaggtcccaaagggtggagaaagtgaaggggaagagtaccgtgaaagtcaggctggcagcccagcctgtttcatcaggacacccccagagagctgccccttgctgagcagaggtatccagtgagccatccatcagaagcactggcagtgctggtaaaatcacagcttccatagccccatcacactctattctctaaatccccatgcagtaggcctgggcatgacctgggagtcagcattataacatatatcccaggaggccccactgcttagctgggtttgggaagccctgctcagtgaatttgcctttgataagcagcccagaagcctccttaaactgaagctattccttggccatctttttggtagataaaaagtggcagcaac

SEQ ID NO: 819194 - DNA, 513 bp, Homo sapiens
gtttacttctgtatggcactgggttagaccctggggcttggggtgtggatataaagatggacactgtcctcaccctcagaggcacctgttttggtggagacagtccatgtgcacagagtcatgggacggtttgggtggtgaggtgtatgccaggtactggaggccatggaggaagtgagggaggactgggaggagattgggaatctgcacagaagaggcaacagaacttggtcttgaaggaggagcaagaaaacttcaggttaacatgggagagaaagggcatgtgggcctgaggatgggcatgtgcccaggcatgagggcctgagggacaggaggagtgtttaggggaagagggtcttggtggcgggagcgtaggttgtggcatgcatgasgaagtggaaagctgggctataaatgagccacagacaaaactacctgggcctgatcagggaagactgaggacttctatccattttgagtgggccatctgtccattaataataatagtaataa

SEQ ID NO: 819195 - DNA, 576 bp, Homo sapiens
gatgctaaagggatccatgaaagagtgttaatggagagtgaggagtgcaggggctcccatccgctatggccttcctacattactggtggayggtgcaaggtcagaagcctgggtgcagaggctgcatgtgctcctgggcagggtaggggctatgacctagtaacactagtaacaatagtagttagggatatgacctagtaacattagtaacactgctatgttacatacgatgggagcccaggctagagtgcagtggtgcgatctcagcttactgccagctccgcctcctgggttcacgccattctcctgcctcagcctcccgagtagctgggactacaggtgcccgccaccatgcctggctaattttttgtatttttagtagagacagggtttcaccgtgttagccaggatggtctccatctcctgaccttgtgatcttcccaccttggtctcccaaagtgctgagattacaggcgtgagccaccgcgcccagccccctatttccttctttctgttgagagagttttgctggggaaagaactgcaaccttgcttctcactctccacttttcctttc

SEQ ID NO: 819196 - DNA, 593 bp, Homo sapiens
acccacatatgcaaaatgataagccctttcccctgcctgacttcaccttccaaaacactttcatgtccrtatcccactttttcactccaataacatccttgtgaggtgggcagagcagtgagcattcctgttttatagatgaggagaccgaggctcagagaggctacctggtctggacaggacattcctgttttatagaagagaaactgagtctctttattctatgttatgtaggttgagagagacaccctaagagagacagagaggctgcactttgacctgcatcgtggtcactctgagtgaccgtcccctatgttgaaaggcaggaaggagaggagaggccctaaaacgagttcctgcaccccaggtgtccactctgtgctttcaggacttgatggcaagttagatgtctttgaaatctgcagaaactctcctggcccgcaagggggctcctgtgagcccgggcaagaagttaaacaacgtggaagcctttcaggcatgctgggcaggaaggggaggcagagatatggccccgtctggcgcctcctcaaccagaatggctctgaattatctgttttctagattggggtatc

SEQ ID NO: 819197 - DNA, 622 bp, Homo sapiens
cctatagtttacctatttcacttaacacagatcagtgcacatctttcttgatctaaatctttcactagctgcaaaacatttcatattgtgaatagaccaatttttcaaccattcctccaccgataagcattcagattacttccagttctgggccactagaaactctgctaattaacatccttgctcttggatacaacccactggtgcttttatttctgtaggatagatgcatgaaagtgagcattgcaggtcaaagagtagacacatttttaattgtaaatgtttacatattttctgtagtgtttgggttaattccagtaaatatatgttacctttataataaagactatgtacataaagctaaaaagtcacagctgtgggccatcttgcatcaaacatggctagagaaggcctgtttactcttattctgcagaaggacatggggcaaggatggctgcggcccccacactcggtttcagacacagtcaacactcatttcccaggtcccgrctctcctctcacttcctggtgcccctgccctttggccactgggatcctggcacacaggtgacagccagctcttctggggctgggcagtccactgggtcatcactgccaagga

SEQ ID NO: 819198 - DNA, 341 bp, Homo sapiens
aggagagcattccttttgggatatgatgatgggtcagcctrtgggcctggagcttccatggcctgtctcttttaggagtggccatggggtcacagagttctctcgagatagaggctgcataaatgtggccagtgattttcttgggggaaaataggtgttcctgtaaaggtctagttcctggtttatcctgtcctgccaggggctgtattgatgagagtgacttattttttaagtgaacttttaattgaagcataatatacatagataaaaatgcacacattactgtaatcccagcactttgggaggccaaagtgggaggatcgcttaagcctaggagtttg

SEQ ID NO: 819199 - DNA, 585 bp, Homo sapiens
aaattcttgtctgtctttgtttatcttttggtggatatatgtatccatttctattagttgtatatctagaaggttgctggactgtataggtgtatgtttaattgttgcaattatgggcagagttttccayggtggatggacaaattgacactcctatcaacagtcccagtcgctctgcatcctcatcagcacttggtaggttgggccttgtaaattccagccattctgggggtagattgtggtttttatttgcatttctctgatgtgaaattagaaccttttaatatgctttttggccaaaaaaaaaaaaaatacccaaaacaaaaaagcaaccatatgtgagggttgatgtgctaatttaaaaatatgtccacaaatactttgaagaggttgagtccatgcgtccccccattgagcctgggtaggcctttgtgactgcctcagtggataaaatgaggtagaaatgatgctgtgtgacttggctgagttagaaaaggccacatcatttttgctgttttctcttgggacactcactttgggaaccttgagccgccatgtcaagaatcagctgctctgacgatcact

SEQ ID NO: 819200 - DNA, 595 bp, Homo sapiens
cagtctcccaagtagctgggattacaggcatgcgccaccacacccagctaatttttgtatttttagtagagatggggtttcacataytggccaggctggtctcgaattcctgacttcaggtgatccacccacctcggcctcccaaagtgctgggattacagtcatgagccactgcacccggccacaagggcaattcttacaggatctcttcttttgccaggttcttcagctctggttgttaagtaaagacaagtagggctgcatgggttgtggcctctagagtctccagcagagctggagctgtggtcatgttcctaagttagcattgccacatagtgtacaattgaagacaggcagtaagaaacaagcccaggttaggctgaggctcaagaaagtgcttggtccgttattatttaaaaattcagctaatatggaacatactggcttgaatgcagtacggaacatactggcttgaatgcagttcattttgaacagttagaatcttctaggagtgaagtctgttaaccctatcagccagtactgcaaacgtgtgggggtccacattggcacatcaaaattcagttccaagaacttc

SEQ ID NO: 819201 - DNA, 529 bp, Homo sapiens
caacattccttctcttagacggccattggtacttggctctagcaacataattctacctggaataactgataagggctaggaattactttgtttcctgaatatggtgggtatgaggcccctactgtgattaacttgcctgtctttgaattcttttcataggagagcaatttacagaattggcattgaactgggtcagattcataggtcctaaaggaactctgcccactgcagggagagatactcagcccaggcggcatctgctgaaagaattccagctgcccctgtccactctgcaaagaagagcccctcgacagcagaataaaaaatcagacaagggtgagttttagacttaaattgcttttaactaatcagggcaagatcatttgatgttgctcttaattccattagacttgaaagtttggggtctttaccttgaaaaaagaattaatttgagggccttcawtatttccaggccaattgataataagagcttttaaaattcaagcttagaatgcttctattgtactgg

SEQ ID NO: 819202 - DNA, 620 bp, Homo sapiens
ttataaaaacaatgaaatttataggttgactatagaggccaaatgtataatggtcaagagtgcagatttggaaacaagcagaactgagtttgaatactggctacaccgcttgtcacttaygtgaccctaggaaagttacttaatgttgaagtcatgtaaaatgttctgcagaggtcctagaacccattaagttcttagtaatatgtgttatctatggttatttatcatgactgtaaaacatgaaagcccattcatttaatgtatcaccctcaacttctcatcattcagattcttttctaattcagtcagaatcagtaaggtttgactgtacatatataaaataatgtataaatattgaaatacagggtcacataagcaactgatcattgtgctttttatttcatcttttttttttttttaagaaaaaaatcctctagattttcctcacccagaaattcttcctagacagcccctttaagaactgtagctctttcaggattcttcattatactgaaagaatttaaccttatttatgttgtccagtcaaaaacttggtagttcacttttaagagcatgttttctaaacatctctggtaaatggaaattttgactttatgccc

SEQ ID NO: 819203 - DNA, 536 bp, Homo sapiens
ggatcccattgtcaccatactataaaacattgtagctgacaccacccattagagtgtagtgaccagtggtccaggagcacttcagcacccctggcacaatggattccaaaccttgaggagccagagaacaaagttgcggccgaagacaagtcccccagagttagagtacacagtccaggagttggaaactgagtgtcagtcccctaaaatagtccagaaatgaagccagttggccaaatgcaccttataccataatcgaacccccaaggttatcaagtaggataaaagaaaaaaatccaaaggtcagcaacttcaaaattgaaggaacataagcccgtaagaggagaaacaatcagcagaattctgacaactcaaacatccagactgccttctttcctgcaaatggccacaccacctctccaggaagggttctgaaccaggctgagatggctgaaatgacagaaatagaattcagaatatrgacaggaataaatatcattgagatgcagggtacattgaaacccatttcaaggaag

SEQ ID NO: 819204 - DNA, 541 bp, Homo sapiens
gttgtttctacctgctttgtctaaataccttaccgcagtcaatgtccttagttgttttgtgtctacccccattaactgaaaacccaaggtgagaaagtcttccttcctgagtttagtgacagttctctccyaggtgaaggggatggggtaagaggcagaaacccctgtctccagaggaatctgaagagagagtgtgctttgatgaccccgggggtgcaggaaggaagtggggcccaagcaggcaatgactatgcctggccctggagttgcgtacttggcccttactgtatcatttcttgtctcacttcctctcacttgtcaggaatgttgccaggactggtgaaaagacaagtgagataccacgccaaataaagccaaatccttgaaagaaagatgcgatggtctacaaatcaaagtaatttcttctttcactattactgatgcaaatgtctttcttttcttcatctcacaaggtttttttggtgtgtttttttttaaatctttcatgaaaggctcatcatttactggctctcttaccctg

SEQ ID NO: 819205 - DNA, 646 bp, Homo sapiens
cccttcttccatcttcagagccagcagaatagcatcttcaaacctctgacctctatatccaccctcacatatcattctttcattcttctaactccttctttcccttataaggatgcttgagattacattgggtccaaataatccacaatcatctccccatctcaagacatgattaatctaatgacatctgcaagatccttttgccatgtaaggttcatattaagatgtggaggtctttagggggctgttattctgcgaccacactgagtatccagattgaggagggaacagtgaagatcaggccagagcctaggcacctgcccccacagtagtagggtagtgtttagtcaggccttcacagcaccagcagagtggggcaggaagtctgtaggtgtgagttctaatcctagcaaaatgacttacacaatggccaaagctaccctgtgttttacctggttacaggcagatttgcattcagcattccctaaaaccataaagctgttactgacaatccatgataccaaattagcttgtaagtctgggtaggactgaggacagcaggaaggtgccaccaagaacctgaacaatgagttgcccctgttaattttaaattcttaaaatcaacasaaacattgattttataaag

SEQ ID NO: 819206 - DNA, 612 bp, Homo sapiens
ctggtctcccttgccacattgactcttcagggaggactcctctctcccagggaagtttctgttagaattgatggargaggtaagggactgtctcttaccttctaggagtcagcaacttttttctataaagggccagatagtaaatatttcaggctttgcaggccatatggtcctgtctcatagccttcattatttgtttgctttttcacaaccttataaaaatttaatatcattttaacttgccaggtgtgggagtgggggggtatacagaaacaggctactaggccagtaggttgctgaccccttagggtcatattagagaaaaaatgagacaaagaaagactcatagccctcttttctggtagaataaaggaagccagcacaccaccatttaatgaggtttcattataaccaaatacatgcaaacatgtaagtgtgtaggtgtgatatagatccatatatacacacacacagcaaggagagaaactcctggaaacattaagatccccattacaattcataagtttctggttctataactctttcttctacctgtgagccacccagcattcttcctagttaccaagccaatctgagctggtttgagttggt

SEQ ID NO: 819207 - DNA, 612 bp, Homo sapiens
ctggtctcccttgccacattgactcttcagggaggactcctctctcccagggaagtttctgttagaattgatggaggaggtaagggactgtctcttaccttctaggagtcagcaacttttttctataaagggccagatagtaaatatttcaggctttgcaggccatatggtcctgtctcatagccttcattatttgtttgctttttcacaaccttataaaaatttaatatcattttaacttgccaggtgtgggagtgggggggtatacagaaacaggctactaggccagtaggttgctgaccccttagggtcatattagagaaaaaatgagacaaagaaagactcatagccctcttttctggtagaataaaggaagccagcacaccaccatttaatgaggtttcattataaccaaatacatgcaaacatgtaagtgtgtaggtgtgatatagatccatatatacacacacacagcaaggagagaaactcctggaaacattaagatccccattacaattcataagtttctggttctrtaactctttcttctacctgtgagccacccagcattcttcctagttaccaagccaatctgagctggtttgagttggt

SEQ ID NO: 819208 - DNA, 513 bp, Homo sapiens
gtcaattatttgttcaaaagtttctattgttccattttactaaagtttctaaagttccattgtacttacaggaaaagtgaaaatctttacacatacctacaagatacttcaagatctaktgcctctttgaactcatgtcctagttacctctctttactcatgtaactagtcacccccttgcttattccagttactttagacatactggcctccttgcacttccttcagattcatggcaagtcagtcatgctgtaatctcagggtcattgcccttgaagctttcattaaggttcttccctctgtgaccacccacacctgcccctcagatcaacatagcttgctgctttagcactgttgggtcttgctcaaatgtattattcagtgagggcatacaggactttcctaaataaaatggtatctcactgccccaccaactccacttccctatcttacttcctcagtttatttttctgcttaggggaaatcaacagttaacattcttttccatgaaaa

SEQ ID NO: 819209 - DNA, 593 bp, Homo sapiens
tcactgtttgggcttatttgtacccatccttcttgggaaggctttccagacaygtgaaagaacttgggtgttgtgatctaagctgtatctgctttaggggcacccaaagcccagtaacgctgtggttcttgcagattcatataggtaccaccttgatggtctaagatctggaagaattctctggattaccaggtagagactcttgttctcttcccttactgtctcccagatacatagcctctgtctttgttctgagtcacctaaagatgagggtggagtgacacaagcacccctgtggccaccctcactatgattgcgccgggtaagacctgaggccagcacagtgctggatctcgctcaaggtctgctctaaccactccctggctactgcctgtttactcaaggcccttaggctctacagtcagtcgacggcaaagccagccaggcctgtgtccttcccttcaggccagggaggtcccccaggccccaggtgggtcgagaggtaccgttcacaaacggtctaaagtctaaaacctcagaagtctacttggcattctgttgtactgaggctgagctgccactcaaaccacaag

SEQ ID NO: 819210 - DNA, 553 bp, Homo sapiens
tcattctcttaggcaataaggggcaaacacatccatgaaaactaggtatgatattcagacgtgaaattttaagaatttttttctaacacctaccttttctttatctttttgaagttgtttstccagttttttggctttactcgtggcatgttttaacttttctctaacttgaacatcttccaaatctagctgtgtaaatttttctttattctcctcaataaattttgtaattttattcagtttcctagcaaagcaagtatattgtaagtcattattttgaatgtgcacatattttaaaaccacatttcctacctggaacacttcctctataaatatgtccaggctcttaataaggcaggatcctaaaactctccttattccaagatgatccctctccccatagttgaagaagcacctgtatttttgattatgacagctattttgcctttctaagttggagggaaaataacacattttccagtgactacaatgtctaggtatataaaaattttaccataggagtaaaattttggttttaccttttacgaatata

SEQ ID NO: 819211 - DNA, 507 bp, Homo sapiens
ggagtggacgtcccctccctgccgcatccccagcctctcggttctctccagaggtcagcgctggattgtttgtgtgtcctgctggagactcccgtacacacagcattgctatgacatcttttttgtggttcttttttgttttgttggttttttggttttggtttttttgagacagagtctcactttgatacccaggctggagtgcagtggtgccatcacagctcactgcagcctcaaactccagggctcaagggatcctcccgactcagcctcctaagttgctaggactacaagcatgagccaccatgcccagctaattaaatttttttttttttggtatagacagggtcttcctatattacccatgctgatctcgaactcctgggctcaatcratcctcctgccttggcctcctgtagtgctggtattacaggcatgagcctctgtgactgagcccttttttgtggttcttattttgaacagaaaaagtagcctgtgtggacactg

SEQ ID NO: 819212 - DNA, 507 bp, Homo sapiens
ggagtggacgtcccctccctgccgcatccccagcctctcggttctctccagaggtcagcgctggattgtttgtgtgtcctgctggagactcccgtacacacagcattgctatgacatcttttttgtggttcttttttgttttgttggttttttggttttggtttttttgagacagagtctcactttgatacccaggctggagtgcagtggtgccatcacagctcactgcagcctcaaactccagggctcaagggatcctcccgactcagcctcctaagttgctaggactacaagcatgagccaccatgcccagctaattaaatttttttttttttggtatagacagggtcttcctatattacccatgctgatctcgaactcctgggctcaatcgatcctcctgccttggcctcctgtagtgctggtattacaggcwtgagcctctgtgactgagcccttttttgtggttcttattttgaacagaaaaagtagcctgtgtggacactg

SEQ ID NO: 819213 - DNA, 623 bp, Homo sapiens
  misc_feature 1, 2: n = A,T,C or G
nngaggtcatagaatgtcaaattactttaaatggtgaaactggagaattttcatgttattttcaatrcacagcagtatctaaagacataggcgatgagactagatcacattaagtgcattttgatctctttgaggtcccctgtgtcgagatgtgttttctgaaggtcccctgcatggctccacagcgtgctgggcatccacccggcttcctcagcctctgccttgggtgggggtttcctggggcttcctcatgggtgagggtggggcatggtggcagttgttgggagacggaacagagctcaccctccttgcagctcccagtggtctccagcaagcacacagggcttgtcccatgatgtcacctctcccaggtggcagggccgagcctcctgccttcccttccttctgcaaggatgtgctgggtgcctgcagttgcagcagtgccctccccagctgggggaggctgacctgagacaggcaactcctttcccaggaggggaagccctgctccagcttgtagcaggcaggggccgaggaagagtttcagagcgtgccaatgtctccactgaggtgacgagacaagcctggagtggggtgagggaacacacacggcccagttttgg

SEQ ID NO: 819214 - DNA, 508 bp, Homo sapiens
catttggggatttctgtcccttatagtatctacctcattttggatggattccttgagggctggtttatttttcttttcctttctatacatcgctgctcagagtgatgaatggygttgtattttgaataaaatatctaagcatccttttgtgagcaaggagcatgatggttggtacttagacctaccatttctcgttacagtggttatggttacagtggggctggggtgtttacctggagcctggacgtccactgggacatgatacccactgggatttttttgtgtcaacctggtctatgatgtccacctggggactgggtatccacctaaggcctgatgtttacctggagccagatgtgcacctgaggcctgatgtctatctgtggccttatgttcacctggggaccgatgcacatctgaagcataggtattcacctggggcctcatatccacctgtagtatgggtgtcaaccttggggcggatgttcagctggcgtccactctctac

SEQ ID NO: 819215 - DNA, 434 bp, Homo sapiens
cacacacaaaaagcagctccgcggtggcgaaaacgattgacaaccagcctcatgagccaggcagaaacgcagaaagaggctcaccaaaggctggcygccatgcgagaaatcgctttgtggcacacagggcacattcggctgaagacacacatgcacacggacacaaacacacaaaccggcagagagagggaaagaaacacacagagactgagagacagagagagaagagagaacggaagacacacacacacacccacacacagacagaaacacacacagtcatacagcagacgcattgaaacacacaccactaggcaacccctgaggctgcggggttcggctctcgacgagaacgaccctccggtgagacagcagccaaggggcatgctggccgacctgtcctcgacatcacagcggcatgaattttggggaga

SEQ ID NO: 819216 - DNA, 626 bp, Homo sapiens
gcttcccctggactccgcctggggtttcctcatcctggtcggccctttgtgactcctggcatccggagacgttgccgtcgatcccatgaagaggtcaggccggagcctcagcgcccsgacacccaagcactgcaaaggaggtctcctgctgtgccaagcctcagggactggtttctaagacaaccgtgggaagcactgtgacaggagaagccgctcgcgcctcgcgcatgcgcattggctgggcccacaggcgctgcactccaggtagccaggctgcgtctactttaaataacgccacctctgtgcggcggcaacgaggctcctgctgcagccgcggcgggggctgaatccggggtccagtttggggtggcgtggcagagggggccgcgagtgtcctgtcccagggccaaaccaccaggagtcctgtcctcaggacctccttgagccgacttctacccagggagggggagcttcaggaagcctgctgggttctcgggactcctcttcagatccgatataaacgcactctgagagagataggatgggctcaccacaactggtgaggcaggcagggcctcgctgcagcacagaatgatcccataggtctcaaggagaagtgtcaggtg

SEQ ID NO: 819217 - DNA, 633 bp, Homo sapiens
tacatacagaaaatattacaaatgagctttttgatgtaaaaaaaattcataaagaatacagtcrgccaagtgcgatggctcacgcctgtaatcccaacactttgggagaccaaggcgggcagatcacttgaggccagttcgagatcagcctggacaacatgacgaaactctgtctctaaaaatacaaaaattagccaggcatggtgtcatatgcctgtaatcccagctgcttgggaggctgagcacgagaatagcttgaacctgggaagtggaggttgcagtgagctgagattgtgccactgcactccagcttgggcaacagagcaagactctgtcaaaaaaaaaaattcatgtttgtgctatttatctaagcttttatattaatataacaattgaaattcctcatacttaaaaaaaaatccggaagtctgaaagtaggcaaaacaaacaacagctaatttataaaataatttaacctatttgtaggccgggtgcagtggctcatgcctgtaatcccaccactctgggaggccgaggcgggaggatcacctgaggtcaggagttcgagaccagcctgaccaatacagagaaacgctgtttctactaaaaaatgattttaacactgtcttcatt

SEQ ID NO: 819218 - DNA, 633 bp, Homo sapiens
tacatacagaaaatattacaaatgagctttttgatgtaaaaaaaattcataaagaatacagtcagccaagtgcgatggctcacgcctgtaatcccaacamtttgggagaccaaggcgggcagatcacttgaggccagttcgagatcagcctggacaacatgacgaaactctgtctctaaaaatacaaaaattagccaggcatggtgtcatatgcctgtaatcccagctgcttgggaggctgagcacgagaatagcttgaacctgggaagtggaggttgcagtgagctgagattgtgccactgcactccagcttgggcaacagagcaagactctgtcaaaaaaaaaaattcatgtttgtgctatttatctaagcttttatattaatataacaattgaaattcctcatacttaaaaaaaaatccggaagtctgaaagtaggcaaaacaaacaacagctaatttataaaataatttaacctatttgtaggccgggtgcagtggctcatgcctgtaatcccaccactctgggaggccgaggcgggaggatcacctgaggtcaggagttcgagaccagcctgaccaatacagagaaacgctgtttctactaaaaaatgattttaacactgtcttcatt

SEQ ID NO: 819219 - DNA, 498 bp, Homo sapiens
tttatttttctctatctcttattgttttttttttttggtactaaggaagggtcatatttttgctgaaatgattacctttatactaatatctgcacataatgctttcagttccctcttttttgtctgttggcttcctactatgaacaatattgaaatgtgctagtatcctcttccctttcctttcccacagcacctgatttgaattaatatccttttactcctagttattaactataaggcagtcaacaagcttattctacttttcatatgctcttcccattttccctcaaatatctcataattgtactgtaacagctatactttattccttacaaccattgtttactcctaatcgtacaagtaagtatatgctgtatatgttgaatactcaccatcagaycttatgtttatgtttctctagtcactttggttgcctgatgcttgttttctaatagggtcctcagtaggtgctcccaggaataatactcttggagttct

SEQ ID NO: 819220 - DNA, 555 bp, Homo sapiens
atgctggtctcgaactcctgagctcaagcaatctggccaccttggcctcccaaagttctgggattacaggcgtgagccaccataccctgcctactcttagcyagttctcagtgtggaccctgccctggaagggagttttaatttattagcactattccggcccctctgacctttctatgaaccccttgtaatcaccatgagtggggcgtgtagcaagacctcccagtctcagcaatgactgtcacttccagttggaagcaattaagacctggtgtgcctcctccctctttttctgttactgctgtggtgatctccaaagacacagtggcatctaaggtagagggagccttgatcctccatcatccctataaggcacacagaacagactggaggcaactagatcagaatcctactagatgtttaaagggaatgtgattccaggaaaatcccatgcctggcttacaaaagcctttgatgacttgaaacttaaaaagggattaaatgacattaggacctttgcccttctaggagacaggcagtggactgagaaagagg

SEQ ID NO: 819221 - DNA, 587 bp, Homo sapiens
aacttctcatctctcccccatccccgggcaaccaccattctactctctgtctctctgaatttgacaagttgaggacctcatataggtggagtcatgtttgtcctttcatgccttagcgtaatgtcctcaaggttcaccatatggcagcacatatcagagtgttcttcctttttaaggctgaatcttattccaccgtgggtatcaaccacatcttattcattcatctgtcaatgggctttgcatagaattaaaattttcctccttgcatctccatttgactcctcaattgtccagaaaggtacatgggtgtgtggtgtgaggtctcggcaggtggtctactttgatttccccacttctgagagccatgagaaacttgctccatttcacaagcttttgtataaaccctattgtacagggcatggtgaggaggctgaaataaagctattcttttattcaccaaatatyaattgagcccctgttacttggtgtgcatgtttctaagggcctggggcactctccgtgaagacaggtgtaaaccctgccctcactggtgctgcgggttggaagacagagaccaattctaaggc

SEQ ID NO: 819222 - DNA, 614 bp, Homo sapiens
agctcagatgcttttgggtgttctgtctctttcactccacatattgtcctggatgcagaataatactttttgtattaaagtcaccgtggccacctccaaattrcttttacattttattgttattatcattatgttgttgttaatgagaatgcagctgaaaggctaagtttgacacttaaaaacgaccaaaaatccagcaggcaggaatcatccccactcacagatagggtaagtgaagctcaaagaggcctctggttcagcagatcacaccgctgatggtagagctgggacttgaacgggggtttctgactcccactctagtgctcactacatgttgcaagatgctaagtattgaaaactgatttcctgttcctgaagagtttatattttgagaaacacaggttggcaagtgtaaggaaagttttccatggtaggactttgaaaaggaaacaggaggctgttttttatttcttcttcagaagattttttgtcaccacttctatctttctttctgttcatacactttttatattatctaatcattcctgccacgagagataatttacatggctcttcaacaacatgtcaccaataaatcaccaaacacattttaa

SEQ ID NO: 819223 - DNA, 450 bp, Homo sapiens
  misc_feature 447: n = A,T,C or G
taagcactgttgttgtattatcaaactgtcaggatggttttatatgttttcctagtacaagtaaaaaagattagttgctttgcaaggacggaacagggagttgttgatgacaaagtgargtaggtaaaagttgactgaatagttttgatatttttcatatggatttcagtttagatggttttgcgctaaaaaaaaaaaaaaaatctcaatattatggcatttccttggagtttaaaatacgctgacaatacaatttacaaaaggcctttttggggttagtgtcttttcacacctctatcttctggcatttagaatctaatcatttctttgtggtaagaggtattatatatagaaaattggttgaattaaattaatcaacgaaagtgccttgttcattttgcactccttctcaaaagaacactgagggggaggactgcttgaccctanagt

SEQ ID NO: 819224 - DNA, 615 bp, Homo sapiens
taacaagaagatgcctggacttggggagtcctggggccctttgtactttatatatgytttttactgacatcacccaaatcagtcctctctatagccctgggagtggggtatcatgattgcaccatttcacaggtgaggaaactgaggcccagaaaagttgagtgacttgcccaaggattcaaacccaaagctcagattcttatgcccacaagagtcagggcggtcagggggccgctggtgtgtccagaactgacagtatggcacttttcatgataagcaattattttagagatgaggaaactgagtccaaagaggtataaagacttacacaatatcttgcagctagtgaagggcagaggccacatttgaacccagcacccctcacggcagaccttgggctttttcctgagtctagcagtccccaaacttcatcactcaagcaccattttcactattttggcctggctcagatatcacctggaccattaaatattttttaaaaatgaactgactttttaaactctagcctcactgtaagaaccaacaataaataaataaataaataaataaataaataaataaataaataattggcttaaggcactggttgttctg

SEQ ID NO: 819225 - DNA, 673 bp, Homo sapiens
ttcaatttctgttcagcagtagctccagaatttctatgtaggagattaggagtgggtagactggtaggaaggagtaasgagcttatccattaataccagctgtgtttagaagaaagcacagtatttctcccttagctgtgtttacccagcgtggttttgggggtggtggagggtagcaggagcggttttgaaggtggtgggggtgtttttgagggtggcggagggtggtgagattctggtttgagagctaaagctcctctgctaggctatcctttggccttgtaggtccctaatagctatgggaccctggaaaaatcacttctcttgagccatcagtctcttcatcaataagattcaactaataatggccttttttatttatgtggttggaaaggttaaaataggtgacacgtgaaaagtgccttgcacatagaaagcactctattaattgagggggatattattgttactgttcattgttagtagtagcattaaaactgatatgattgctaatgaagaaacagacttaaagaggaagcaaacctcgaacagatgccacaataaagcaacaaaattgctgattcttcagggctctttctacaggacagagggactagagcttactctccctgaggttctcttgctgtttactttggaagctctgacctttcca

SEQ ID NO: 819226 - DNA, 673 bp, Homo sapiens
ttcaatttctgttcagcagtagctccagaatttctatgtaggagattaggagtgggtagactggtaggaaggagtaacgagcttatccattaataccagctgtgtttagaagmaagcacagtatttctcccttagctgtgtttacccagcgtggttttgggggtggtggagggtagcaggagcggttttgaaggtggtgggggtgtttttgagggtggcggagggtggtgagattctggtttgagagctaaagctcctctgctaggctatcctttggccttgtaggtccctaatagctatgggaccctggaaaaatcacttctcttgagccatcagtctcttcatcaataagattcaactaataatggccttttttatttatgtggttggaaaggttaaaataggtgacacgtgaaaagtgccttgcacatagaaagcactctattaattgagggggatattattgttactgttcattgttagtagtagcattaaaactgatatgattgctaatgaagaaacagacttaaagaggaagcaaacctcgaacagatgccacaataaagcaacaaaattgctgattcttcagggctctttctacaggacagagggactagagcttactctccctgaggttctcttgctgtttactttggaagctctgacctttcca

SEQ ID NO: 819227 - DNA, 603 bp, Homo sapiens
ccgaatgcccgagcacattttccacccaaactgtttagtggctaaatttgctcctggctggaaaaactccagctcccgtcatacacacgcacgcgcrcacacacatacacacacacaagctgttttaaaagtgcttctaaaaaaagagcttaggtctgaaaattgtaattaatttaataagacatcctgcccggagcagatcagaagctatatgagctttttgggtgagcccatgagtgtggtgacagacaacatcactccagtgctttccaaaatggatttgagctaacacagcacgcatttttatgatctggaccatcttgctgtctttctgctctggacaaaagaccgagcagacacaatcatcttttgagaatgatggcatcgtcattgtctgcatagcaggactgtaattaagcaccagaaataggacagctgagaagagacaaagagcagggaaggcaggggactgcgagacagcatcctggggagagactgcaccaagatagtagctgaaatccagtatctgcatggatgaggtcatcctgggaaaaagtatgtgtccagatgaaaaaacaaaaaacaaaacaaaacaaaaaacct

SEQ ID NO: 819228 - DNA, 598 bp, Homo sapiens
ccttttaccattcccatgggagactggagcgaggtgggctgcagagtcttctctgcatcttaagttaaggcattggttaaygtcgcctgggtgcgcaacccagaactgcagaatgccggatgaaggggaagattagggcaaagtaagaaaacaccagcctcagactggctggtgcagcatcagcaaactgaagggaacgagagtgacaaaagattttctttaagttaagagttgataatgcagatacctatggggctgaccaagtgatgtagctgaggatattggggaggtgtggggacagtagggaatggtagggactgtggtgaaccagaaatcattctcccttcaaaaggagcagctgctattcagcttcaagattgttttcatgtggagtgcaaacctggtgttactatgtcttttgattttttttttttttcaagaaaagccagagccagctgtggtagcacttacctgtaattctagctacttgggaagttgaggcaggaagattgagcccaggaggttgtggtcagtctaagcaacgtagcataaccctgtctcttaaaaaaaaaaaaaaaaaagaataaaagccataaat

SEQ ID NO: 819229 - DNA, 477 bp, Homo sapiens
tatgcaacagctttttaaagaattttggtgactagctaacaattactgaactttcaacctcagggcttcacaagaattatctccatttttaagacatccagrcagcgaggaaagctcaggaatggcccaaggtcccactgcttagaagtagtaggaccccaggcttgctcttggctcagtctaaatcagagccaacctcccttccaaatactggcttcacacaagggcaatgtcatgctgatccagtacctgttgtgtaagtcacacattctcgagatcagacaaagcagagatgcttagcagaggcataagaaccattccacacacaggaaagcctgagaaacgtctcctgctgatcaaaaccgccacttggggcatgcagcacactttttacctgcatgcatcccagcctgcagatagggaaccccagcgtgactagaatcttcagccaaaccccaggccacgttgtgggcagtg

SEQ ID NO: 819230 - DNA, 542 bp, Homo sapiens
actattccaggatataaaatacaatgactgactagaataaacaggtatgcctgacacccatgagtctactgaamaaattctactattgaattctttgtggctatgcccaggtttgtaaagggttctgtaattgttctgtgccgaagttcaggtctacaccctgtcagcatgccttgcctggaccactgctgcagctgcctttcaggtctccctgtttccagtctcacctctgccccttcatccatgacacagttgccacagtgatctttcaaaacacaaacacgaatctttcgaaatagtacttggggtattgttcatgtccccacacagggatcctatctcccaagcagctgctgtatgcaggtgtttctcttgtcactcccccactaaaagctttcagtggctccgcactacctccccattccccagggagtgtgcagccaaactggactcatcctgcaaggtgcagctccaaggcccctgctttctgaggcttcttccagtcatcccctgccaatgagaccctaacattgtcctcctct

SEQ ID NO: 819231 - DNA, 542 bp, Homo sapiens
actattccaggatataaaatacaatgactgactagaataaacaggtatgcctgacacccatgagtctactgaacaaattctactattgaattctttgtggctatgcccaggtttgtaaarggttctgtaattgttctgtgccgaagttcaggtctacaccctgtcagcatgccttgcctggaccactgctgcagctgcctttcaggtctccctgtttccagtctcacctctgccccttcatccatgacacagttgccacagtgatctttcaaaacacaaacacgaatctttcgaaatagtacttggggtattgttcatgtccccacacagggatcctatctcccaagcagctgctgtatgcaggtgtttctcttgtcactcccccactaaaagctttcagtggctccgcactacctccccattccccagggagtgtgcagccaaactggactcatcctgcaaggtgcagctccaaggcccctgctttctgaggcttcttccagtcatcccctgccaatgagaccctaacattgtcctcctct

SEQ ID NO: 819232 - DNA, 572 bp, Homo sapiens
tgaacaagtattttatcaaaaaagataatggatagcaaataagcacataaaaagatactttattgcacaccatgaggggaaagcaaattaaaaccacaataagacactactatgtacctatcagaatgtttaaaattaagaacactggccatatcacgtgttggtaaagacatggaggaactggaattctcacacattgctggtgggaatgtgaaatggtacagtcactttggaaaacattttggctttttaagagttaaacatatactgaccacatgatctacccattccattcctaggtatttaccctagagaaagtctacataaaggtttatatgtggatgttcatagctttatttataataatctttaataaccccaaactggaaacaaatctggtatattcctaaaatgggatactcttcagcaataaaaaggaacaaaccattgtgatacattcaacagcaggaatgaatcttaaaataattaggctaactgraagaagccagacagaaaagagtacacactgtgtgcttccattcacataaaattctagaaaatgcaaaataaca

SEQ ID NO: 819233 - DNA, 609 bp, Homo sapiens
agtgtttcacgttataaggatacagtagctattaattaatagcttaatgagcaaaccaggatttctgccattcataaagtacataaaaccttactctttacatgaaatagatgcaaaaaatcacagtagatttaaagataaacactttgatagttttttatatttcaagtttattgtggatagatacctggtttccttttaccttttggaacttactgaaatatatccatggttctgaaatagagttgtaggacagtaatggatcttttgaagttatttggcctattgccagaattttgacatcaaagtaaagttcaacagtgagcctaacactaagaaactacattggctaataaaatggcctggaagacttgatagaacacttaccatttggggctgttgtgaaattttcttaattgtacaagccagctttgaaatttttacaacataataggtacaaggttaattgtaacaaatgtagtttgcccagactatttagactagattaaaagtgatagcaaaaaattaatraaagtgattttgaagaaatatttttagttgaatatagaaatgcaaattggatccggtatcataaaatttagaaaggtg

SEQ ID NO: 819234 - DNA, 654 bp, Homo sapiens
ctttcatcatttccctcctacccaatctttcccatttaaatattgaagtcctcaaaaccctctttggaaaaggcacaggccacagatcctattgtgatttgtgtttctttttcctgggtgcaccttcggccttggcaaaataaacctctatactgattgatatctgtcttggacactttttggtttacacccttataataaaactgtaagaggccaggcacagtggctcacgcctgtaatcccaggactttgggaggccaaggagggcgaatcacaaagtcaagagatggagaccatcctggccaacatggtgaaaacttatctctactaaaaatacaaaaattagctcggtgtagtgtcatgtgcctgtagtcccagctacttgggaggctgaggcaggaaaatcacttgaacccgggaggcggaattgcagtgagctgagattgtcccattgcactccagcctggtgacagagcgagactccgtctcaaacaaacaaacaaaaattgtaagagtaagtataatgcttttctgggttctgtgaggcattcctgtgaattatccaaactgaagcactcatcagtcagaattgtgggggatccrggggggcctggaacttgctgctggcctctgaggtgagggctatcttatgga

SEQ ID NO: 819235 - DNA, 647 bp, Homo sapiens
gcagatatttttttcccagttggatccctaaatctaacaccctgcaagaaaagggtctgggaattgctaggagaagagcggtcatccagggggacacctggtgccgtacccctggtgacccctgggctgggccrtccccacagagtccagtgtcgtgctgctgcaggagcacccctgcctggtggagctgctgtcccatgtgctgaaagtccaggacctgagttctggggtcctctccttctcactgcgcctggcaggaaccttcgcagcccaggaaaactgcttccagtatcttcaggtgagcctggggcctcccacctgagtgtcccgtggagaggtgggcaggcttttcctcccgcagccaggtggggcatttgtagccatcaccatcccaagtcccagcggcctgccccgaccctgtgtcctcactagaactgcatgttttttacccccgactgtagccccctttgaaaaattcgcccggagtgatgctggggctaaggagttgaggttttttggaataagatgactggcacgggctcccagctctgaccagctgtctgagcttgcccacggccgcaagcctccatctcttcctgggacggagacaggagtcgcagctgcgccgtggcctccgtctcttcctg

SEQ ID NO: 819236 - DNA, 647 bp, Homo sapiens
gcagatatttttttcccagttggatccctaaatctaacaccctgcaagaaaagggtctgggaattgctaggagaagagcggtcatccagggggacacctggtgccgtacccctggtgacccctgggctgggccatccccacagagtccagtgtcgtgctgctgcaggagcacccctgcctggtggagctgctgtcccatgtgctgaaagtccaggacctgagttctggggtcctctccttctcactgcgcctggcaggaaccttcgcagcccaggaaaactgcttccagtatcttcaggtgagcctggggcctcccacctgagtgtcccgtggagaggtgggcaggcttttcctcccgcagccaggtggggcatttgtagccatcaccatcccaagtcccagcggcctgccccgaccctgtgtcctcactagaactgcatgttttttacccccgactgtagccccctttgaaaaattcgcccggagtgatgctggggctaaggagttgaggttttttggaataagatgactggcacgggctcccagctctgaccagctgtctgagcttgcccacggccgcaagcctccatctcttcctgggayggagacaggagtcgcagctgcgccgtggcctccgtctcttcctg

SEQ ID NO: 819237 - DNA, 647 bp, Homo sapiens
gcagatatttttttcccagttggatccctaaatctaacaccctgcaagaaaagggtctgggaattgctaggagaagagcggtcatccagggggacacctggtgccgtacccctggtgacccctgggctgggccatccccacagagtccagtgtcgtgctgctgcaggagcacccctgcctggtggagctgctgtcccatgtgctgaaagtccaggacctgagttctggggtcctctccttctcactgcgcctggcaggaaccttcgcagcccaggaaaactgcttccagtatcttcaggtgagcctggggcctcccacctgagtgtcccgtggagaggtgggcaggcttttcctcccgcagccaggtggggcatttgtagccatcaccatcccaagtcccagcggcctgccccgaccctgtgtcctcactagaactgcatgttttttacccccgactgtagccccctttgaaaaattcgcccggagtgatgctggggctaaggagttgaggttttttggaataagatgactggcacgggctcccagctctgaccagctgtctgagcttgcccacggccgcaagcctccatctcttcctgggacggagacaggagtcgyagctgcgccgtggcctccgtctcttcctg

SEQ ID NO: 819238 - DNA, 604 bp, Homo sapiens
ggtttgcatttggatccataatwctatcttaatatgctttgaaaaagattatttccaaatataaaataaataaaagttactgtatttccagaaggtaacttctattataagtctagcagtaacatcacaggtagaaattccaagtctcaagagtaaactgaaaatgttcaaatctaggagagattaaaacaaacaatctatgtgtcaggaagtcctgacacttggtaacttggtctatctcttaaaagctccaagtggttttcagaagaagctttttcaatttaaggggaaaaataaatctataaatctaataaaataataaattccttaatctatactgtcatcctaagaatggtaagtagataaaaaccatgaacttgcactgtgaccatcaatgtcaccatgtcattatttatgaatacacatgaccaagaataattcagaagaagctttgaactcagaatgtaagtgcacagactttgaccaaaatgttaaaaaaagatagaagttacatgtaattgtgaacctaaatgtatgttcttctctgcatttcatgtgcacatataatctgtgttaaatttgaatgtttgctgtttatttcctt

SEQ ID NO: 819239 - DNA, 511 bp, Homo sapiens
ttaaatactatagaaaaaataggatcccaaggtggcaggggccaagtggtgccactcaactgtaaacagcaaggtgggcatggctacataatgggcagcagagacaaagcagcaatcagaatagtctgacccatgtagaactctggcactggctaataaatcacgatattcctagaagtgaagttgatagaaagcctactgcattcctacttaatttatataaggagaaaacttctaggtcaaatggacaaaagactaatttgaattataaaaacagagaatcacaacccctctatcaatttccagacttgagccagtttacagacccagaaccccttgaatgaaggggaggccgggtcccctagaggaaggacctcactacattactgacaatttatgcagtgaatcttttccctatccttccccaaagagacttccagccttttactagggtaactgtacactkgggaaagggaaatgatcacacatttgaaggactactggacattgg

SEQ ID NO: 819240 - DNA, 650 bp, Homo sapiens
gatggttgcctgacattcctggaggacagagggggattctcctgccctgctcatgtatgcctaactacctactctaacagaattatgtatatgtgccctttgcattttgtttcttacatttagtatgatgcctctgagagtttttgtattttgtgtattagttattcattcatttttaggagagtttcactgtattaatatgcaaatttatctaccatcttttgggaggcactggagatgtttccactttggacttctatgaataaagctgcaatgaacattcttataaaaatctttttgtggatgtatgttttcatttttgattatgagaaacatttttccagcttcttcacatctgtagtgatttttctgtttatatcatgtatttgggtacaatgttacaattctcattattattatatttttaaaaagattattgagttctgttctggcatgaaatcaatttaattagataagctttacccagtagaacttttgtttcaggccttgagtcctctggccagaataattctgctttctctttgggcttcacrtccatgtgctgggaattagaaagtgtcctcaggcagaaaacttacttcaggattttccctggtcttacggaattacaactggatgctgcttgatgt

SEQ ID NO: 819241 - DNA, 629 bp, Homo sapiens
atactcccatatgctgtgacgaaaacaacatcattgattgactctrtccgctctcacacgtgatgtttggcttaacaaatgtttttcttgcatctattcctttaagaaatcagttctcttcctgtctcccttctgtctgaatttgctaggtggagaggggggtgccaggagtgctgtgtctgccaacaggtggccagacactagatcagtctctctcaatcagcaagtccccatctgctagttggagtctccatgtgttcattccgcttattacagcagctgagcctcaaactgggttctttgtgggcttcaggcagatgcttaacaaggtgagccaaagggagcctggccattaggagctgtgttaagactgcctcagctggaacctgtttttaccatgtttttcaagtgcttacctacagcttcccctgacagctttaccacaggacttccttgggggcatcagccagacacagtgatacttgaaacttcaaacaaaaatgcttatgctatgctattctttttttttagtctttggacgttattttgaattcaaaaatgttttagtaattatcaacatcctggcttaggtattactggttttgaagaagggtcttagcaggcagact

SEQ ID NO: 819242 - DNA, 544 bp, Homo sapiens
acactcagtctatggaatttttttttatgggagcctgagcttaataatacagtttgtttaaccaaaatgtttatmactatgatagacaacgaaaccttataatgaacttaagtgaaaaaaaattcacacacaaaatagtgtgcatacttataacgcaacaagatcaagagcacaaatatataacagaaaatattttatcagatcagtttcctattttttctgttttcccatactgtttgttttatctataatattattttttaaattggtgccagaggataactaatattattgaagctggctgcaagctgtccaaatcctattgacgatgataaaatgagtttcttgggaaagctctttagtaataagacatgagtcctgcctgaaagaatgaggccaaggctgccatttcatacaaacaaacaaacaaacaaacagggaaagaattcgcaagtaggtttttcttcacaagtggcaaaaataatttagtataacctgagagaagcagagatccgtaaacagtgtaaatggttaataatcagcc

SEQ ID NO: 819243 - DNA, 544 bp, Homo sapiens
acactcagtctatggaatttttttttatgggagcctgagcttaataatacagtttgtttaaccaaaatgtttataactatgatagacaacgaaaccttataatgaacttaagtgaaaaaaaattcacacacaaaatagtgtgcatacttataacgcaacaagatcaagagcacaaatatataacagaaaatattttatcagatcagtttcctattttttctgttttcccatactgtttgttttatctataatattattttttaaattggtgccagaggataactaatattattgaagctggctgcaagctgtccaaatcctattgacgatgataaaatgagtttcttgggaaagctctttagtaataagacatgagtcctgcctgaaagaatgaggccaaggctgccatttcatacaaacaaacaaacaaacaaacwgggaaagaattcgcaagtaggtttttcttcacaagtggcaaaaataatttagtataacctgagagaagcagagatccgtaaacagtgtaaatggttaataatcagcc

SEQ ID NO: 819244 - DNA, 650 bp, Homo sapiens
acatacatctggatagcatatatacatgaggttgtatggcatcatggaaagcaggttgacttgagtgcaatgtgacacaggcatgaatgacaatcttgctccactaagcatcaagatgttgaccttggtaawcccttgaactccaggctgtatagcatgctgcagtgttcactggtagctctatcacttaattactttaagtaaatttccttttgctttatttctatcccctgtaaaaggggaccatgaatactatcataagtagggccacaaatctcctattgcatcttcatgcaaattagaaaatattgcctcctcttcaagataatttatttccatttgtgagaaaatatatacacccatgctatgtgcaatatttatgtcactccagtaccttggataacctgagcaactgtacctgacactctgctcagggtttttgtcaggatcaaaggagataatccatgtaaccttcacagcacagtatctggcacatatgaatcattcattcatgtcagtaatcatcatgaatctttatcataaacatcatcttctttatcatggaaagaatagcatttaaccagaatagataaagtgagaaaaaaactagcataggttaaagctatggcacatgaaaaggtatggaataa

SEQ ID NO: 819245 - DNA, 649 bp, Homo sapiens
ccaaggtatctttcttcagtacaaaaatagaaactatgaggtttggatccctcctacccaascccttcttcacctatctttgcctgaacttctctcctttgagagcaatttctgccatcctgaaaatcagaaaagctaatgttatgaagtttttagaaaaacaaacaaacaaacaaacaaacaaaacccaaagtcagttatattgcctgaacttcaacagggccaatatagcaattaataaactgatgagatgctttgtcctactgaaaattccataggcagagagtagaggtatttcagggtagaatgatggaagacatggggagagggagagagaaaaaaaggcatcaccattaaaaataagttcttagaacacgacatcctttagtgcttcatttagcaaaatatgtcattttagaagcacttctgagtgaaagtcaaatgtaaattttatacactgactataaagaataaagcgtcctccgggaagaaatgtgctcacacatgaaaggtaagaagccttcatccacaaccccaaatgctagattagttgtagataaatgatggattgaatagtttctgggaagactccttgctcagtcttcagctttgtccctgtagagtcctgcaagatcgtttgtttacagta

SEQ ID NO: 819246 - DNA, 652 bp, Homo sapiens
catatgctttccctttaatctgtaagatcatttcagcttttctacctaacgaaaagcttagctttgtgactctcatatattagctcattgcaaagtgacctctaaatcaccrttacttagaaacacggaccatacttctatctgttttatagtttctatagtctactttcagtgccttattctactatataattttaaagggcagtatctgtttgctaataacctcccacctgaattctattttatttctctgacctatgtcaaagatagaaagttcagaaggaaattataaaaggatttctatcttatatccaaggggaaaggtcagtgtatgaatataagaagttcattaaaatcctactacctaaataaagtttaaaatttcacaacaacggaaacataatagaatcattggtcaattcatgcagattcacatctcacctaatgacttatagacattttcatttttcatagatgcttctcttcctagtacccaagagacttgttctttttattgcattgttcaattagaagtgatcactcccaaagccagtgtgaaacaatccttttgggatggccttccataattttcaaatgacaatgtatttttaaattaggtagcctgaaggattcttttaggaattggatcctg

SEQ ID NO: 819247 - DNA, 562 bp, Homo sapiens
gaattggatcctgctttatctcagtatttcaaaaaaggagggcaaattcaaagaaatgtatactctgctttccctaacaagagctaacatagaaggggagagaaggattataaactcaacttctttattttttaaaaatgagatattatctacatttcaggacttcagtgtcaattaatatttttgactattgtatttttaatacatgtatttcaaatttagtcaattattcaacatcaaggtttttggaagagttcctagaaaaagtcacctgcccccaaataatttctataccaaatgtatcccagtgtttgaatttaatatatctgatcattaaaaattatttataacttaacttgaattagcatatgtagattaaacctcttcccagccatgtccttagggaacagaactgactttcagttaggttttgagaaagaatgagagaggatcgaccgagagggggcagttagattgtgtatcaaaagaacctcaaggtaagatgcatcaytggtgctctgggcatctggaaggcagatggggtatagagtggagaaggaat

SEQ ID NO: 819248 - DNA, 628 bp, Homo sapiens
aggcctaaggaattgaagtgtctcttgctagtattccaatgatactggtaggtaggggagcaagtattgaaatgcaggtctatttaactccaaacagatgccaaggttttaaatatccctcatatttatgatagttcccctgagctaatcatgacttttctgttcctaaatagttattccatagcatgccattcaatgattatcatattctgcccccaacccacatttccagatttatttttcttttaattagtataatagattcgacttcaccattcgacaaaaatttgtttctgtttaaatagaacacgactaagtataatcaggaaacattcatgcttccattcctataaacctatatggaaatttaggtaagctcgcatgaataaagcccaaaatcttcaggatgactctggagacccttcatgctatcatgcttccctccaatgcaatcttttctaatgtatgccatctttcattctcagtggaacacttactttacctcaacgctgaggaataaattaggacactttcaagtgtttatgaccttgctcatgctgtgccttttgatwggattgtcttctccgccatgtaaattgcttacattcttcaagaaggcagacaacga

SEQ ID NO: 819249 - DNA, 613 bp, Homo sapiens
aggcctcagcccagagggactrtgctggtcccagaaacagcccacatagaaatggtttggacgattggctggccttgtaagggtggctggacgggggccagctggtaaaacatcgcggtggtgaggaaaggtgcctggagctaatgtgtatagataggagtatcattgtgccaccgggccaggcattccccacccagctgacctgattatggatggaggacaagatgctgctgctgccagcttccccagacccccagaccatgcagcacttcctggcctcagacagttcctcctctatgaagatttgtccaatcagagcagccacaggctgccccagcctctctgtattcacatcctggaccttcctggcctgacaccctcaattttatactgcatcttgtttgcttccataaatgtcatcctgtgtgtcagatcacatgtccccctttttttggtctcagaaaataagattgttatatttacattacttcattgagttttattttgtggaaggcagagggagagcgtaagtaatgagtttgttgtgtcttgctttccaacccattgtagatttcctattttttctttcctgttgtaaatgttaatcaatcaa

SEQ ID NO: 819250 - DNA, 613 bp, Homo sapiens
aggcctcagcccagagggactgtgctggtcccagaaacagcccacatagaaatggtttggacgattggctggccttgtaagggtggctggacgggggccagctggtaaaacatcgcggtggtgaggaaaggtgcctggagctaatgtgtatagataggagtatcattgtgccaccgggccaggcattccccacccagctgacctgattatggatggaggacaagatgctgctgctgccagcttccccagacccccagaccatgcagcacttcctggcctcagacagttcctcctctatgaagatttgtccaatcagagcagccacaggctgccccagcctctctgtattcacatcctggaccttcctggcctgacaccctcaattttatactgcatcttgtttgcttccataaatgtcatcctgtgtgtcagatcacatgtccccctttttttggtctcagaaaataagattgttatatttacattacttcattgagttttattttgtggaaggcagaggsagagcgtaagtaatgagtttgttgtgtcttgctttccaacccattgtagatttcctattttttctttcctgttgtaaatgttaatcaatcaa

SEQ ID NO: 819251 - DNA, 581 bp, Homo sapiens
gacccccgttcttgttaaaacgtgccttccccattgactgacagagaacagtggggtcaaatgyggtctgtcttagtgccaggggacatcctctccatcccctgcacgggcctgtttcagtgtctctggactgtccgtcctgcaggaagacccaggatggctggctggatgtgaaaaggaaagcactgaccatatacaggtggacgaacaccgtaaataccacacacaaataaagcatttatggtagaaccctgtttcccctggaacaaaacagaatttattggcaggaaagaaacttaagaaatattggcattcagttgtctgggaagaacagagaagtttctacagtgtggaaagcagggtggctgatgtgggtggagatgagtcatctcatgtgatttaggggagagcccatgggatgtctcctccagcagggcccccaaaaggcctgtggttaacagtattcaaggaagaaggaacccttttgtccccagccctaaagcagaatgggggattgcttcttcccatttcccctcagactgtcttttggcaacctctccctttgaggctgttcagtttaa

SEQ ID NO: 819252 - DNA, 581 bp, Homo sapiens
gacccccgttcttgttaaaacgtgccttccccattgactgacagagaacagtggggtcaaatgcggtctgtcttagtgccaggggacatcctctccatcccctgcaygggcctgtttcagtgtctctggactgtccgtcctgcaggaagacccaggatggctggctggatgtgaaaaggaaagcactgaccatatacaggtggacgaacaccgtaaataccacacacaaataaagcatttatggtagaaccctgtttcccctggaacaaaacagaatttattggcaggaaagaaacttaagaaatattggcattcagttgtctgggaagaacagagaagtttctacagtgtggaaagcagggtggctgatgtgggtggagatgagtcatctcatgtgatttaggggagagcccatgggatgtctcctccagcagggcccccaaaaggcctgtggttaacagtattcaaggaagaaggaacccttttgtccccagccctaaagcagaatgggggattgcttcttcccatttcccctcagactgtcttttggcaacctctccctttgaggctgttcagtttaa

SEQ ID NO: 819253 - DNA, 620 bp, Homo sapiens
ttttttttttttttttttttccccttgagacagagtctcactctggcccaggctggagcgcaatggtgcgatcttagctcacggcaacctctgcctcctgggttcaagcrattctcctgcctcagcctcctgagtagctgggattacaggcacctgccaccacacccggctttttttttttttttttagacggagttttgttctcgttgcccaggctggagtgcaatggtgtgatcttggctcactgcaacctctgcctcctgggttcaagtgtttctcctgcctcagcctccctccggagtagctgggattacaggtgctcaccaccacacccagctaattttttgtatttttagtagagatggggtttcactgtgttggccaggctgatctcgaactcctgacctcaggtgatgcactcgcctcagcctcccaaagtgctgggtttatagtcgtgagccaccatgccctgccctaatttttgtatttttagtagagacgggcttcaccatgtcagtcagactggtctcgaactcttgacctcaggtgatccaccccgctcagcctctcaaagtgctgggattacaggcatgagccgccgcgcctggccgagggatagt

SEQ ID NO: 819254 - DNA, 691 bp, Homo sapiens
ctggcactgcgctggggcccggagggtggcccaggctgtgcagggacggcagcccagggggcggcgggctgaggagcagtgcggggctggatgatgagtggtctggcgtccccgatggagtcttctcatcctccgagctgcctaacaccgacttgccgctgccattcagcgggttgtggctgttagaattggagttctcgttgttctccctgcaagtgcgggagcaaagcagcggggtcagcagggacatcgagaccacccagcgccatctcagtcacagtcagagccagccaccagcctcgggagacagatcccgggcttgtggcctgcgggtgttttcggtttctaccatttcctcgacctggtctgggttctcctttctgcccgttctctccatctctcaacacccaatttctcttgcccctctgcccttatcgtccccacctctcatgctgtcaatctcatcaatatcttttctatatttcctctttccccccttccccaatatttcttttcaggaacagaggtgcaggagaacagggttccctgaagttgtggggtgagccgggaggaagagacgatgcctggattttcagatcactctaggctccacaagccaggtttgctgggtagatgtggggctagcaggttaaggaaccctggatccsaggtcaagggatttagggcctct

SEQ ID NO: 819255 - DNA, 645 bp, Homo sapiens
ataaatacagatgtcatgcaagactagatgagtatgaaactagatgagtaattttattactgtccagtagaaatgtaagccacataaataattttaaatattctacagatacattataatgaacgttaggaaaaacagatgaaattaatgttaatatacattgtccatcttgttaagaccatttgtctttaccagaccattccttgattaaatttatctggaacccatttatctgacctggaattccaacacgcagattcttgataaaattagtaggtcaatttattaaaaataatattcatgagcacgctaacatttttaagtgctctaaattatctacatacaagtttacttcattagtttttataaatgtttagtttgtttgatattcaacacaatgaggtaaacctaataaaattgcctgggcctttgaaaggatagttttcaggacaaataatttctttaataaaatgcaaaagctatgtttaaatcatagaattataaagccagaaaattgcttcaattcttttagascattagttggcaagctacagctggctaggacaaatgtggcttactgccagattttgtaaataaagctttattgaaccctagtcacacccatttatttgcatattgtctaag

SEQ ID NO: 819256 - DNA, 520 bp, Homo sapiens
gcctcatggggagtttcctatgatcagtggacagaggaagagaagactayggcctggttcacagacggttcttcacgatatgctagcaccacccgaaactggacagctgcagcactacagtccctttctaggatatccctgaaggacagctgtgaagggaaatcttcccagtgggcagagcttccagcagtgcacctggttgtgcactttgcacggaaggagaaatggccagatgtgtgactatatactgattcatgaactgtagccaatggtttggctggattgtcaggaacttggaagaggcatgatcggaaaattggtgacaaagaaatttgggaaagaggtatgtggatggacctgtttggtcaaaaactgtgaagatatttgtatccccatgagtgctcaccaatgagtgacctcagcagacgaggatattaataatcgagtggataggatgatctgttctgtggacaccactcagcctcattccccagccacccgtgtcatggaggcaaggatg

SEQ ID NO: 819257 - DNA, 520 bp, Homo sapiens
gcctcatggggagtttcctatgatcagtggacagaggaagagaagactacggcctggttcacagacggttcttcacgatatgctagcaccaccygaaactggacagctgcagcactacagtccctttctaggatatccctgaaggacagctgtgaagggaaatcttcccagtgggcagagcttccagcagtgcacctggttgtgcactttgcacggaaggagaaatggccagatgtgtgactatatactgattcatgaactgtagccaatggtttggctggattgtcaggaacttggaagaggcatgatcggaaaattggtgacaaagaaatttgggaaagaggtatgtggatggacctgtttggtcaaaaactgtgaagatatttgtatccccatgagtgctcaccaatgagtgacctcagcagacgaggatattaataatcgagtggataggatgatctgttctgtggacaccactcagcctcattccccagccacccgtgtcatggaggcaaggatg

SEQ ID NO: 819258 - DNA, 539 bp, Homo sapiens
tttatttttatagatcatattctagggcataatatatattttcataaacttaaagggattaaaactatacaacatataatctgtcaccacagagaataacactgaaaaatcagcaacagaatgtcatstagaaatcctcaagtatttgaacactaaacacacttctcagatgtcagagtaacccatgggacagataaattatcacaagagaaagtagaaagatttttattaatgaatgaaaataaaaatgcaacataccaaaatttgtgtagaactaaagcaggacatgtatagaattaaacacctattagaaaagaaaaaagttctaatttaaattatctaagctccaatcctaggaaactagaaaaggaaaagcaaattaaagtccaagtaagcaaaagaaagagaataataaatattagagtagaaatcaatgaaacagaaaaataattgggaatatcaattaaccccaaaactgggtctttgggatgtcaaaatgaaggcacaaatatgtttaatgtaaaaggaagcaacaagat

SEQ ID NO: 819259 - DNA, 539 bp, Homo sapiens
tttatttttatagatcatattctagggcataatatatattttcataaacttaaagggattaaaactatacaacatataatctgtcaccacagagaataacactgaaaaatcagcaacagaatgtcatctagaaatcctcaagtatttgaacactaaacacacttctcagatgtcagagtaacccatgggacagataaattatcacaagagaaagtagaaagatttttattaatgaatgaaaataaaaatgcaacataccaaaatttgtgtagaactaaagcaggacatgtatagaattaaacacctattagaaaagaaaaaagttctaatttaaattatctaagctccaatcctaggaaactagaaaaggaaaagcaaattaaagtccaagtaagcaaaagaaagagaataataaatattagagtagaaatcaatgaaacagaaaaataattgggaatatcaattaaccccaaaactgggtctttgggatgtcaaaatgaaggcacaaayatgtttaatgtaaaaggaagcaacaagat

SEQ ID NO: 819260 - DNA, 261 bp, Homo sapiens
gtaatttataaagaagaaaggtttaattggctcatggttctatgggctttacaaaaagcatgatgacttctggagaggcctctgggaatttttaatcatggcagaagacaaaggagaatcaggcatgtgctacatggccagagcaggaggaagagaggagtgaggtgctatgtacttttaaacaacaagatatcatgagaactcactccrtatcacaagaagagcaccctgggggatggtattaaatcattagaaaccacc

SEQ ID NO: 819261 - DNA, 634 bp, Homo sapiens
ccccaacctacctgtgatgcagagagttgtagctagaagggagagctgcctcaaaggagctgtgacttaggtcacagtcattcatggtaacccagctgagagggagctgagagagcgattgccckggtttcactctcttcctgtcttctggcctcctgccactgactcccactggccaagccctaagggattccagagagtaaaggagtcccttgattacattgataaagttcagcttcccaggacaaaaagttgggtagaaagggagaaattgggccaggtgcagtggctcatgcctgtaatcccagcactctgggaggctgaggcaggtggatcacttgaggtcaggagttcaagaccagcctggccaacatggtgagaccccgtctctattaaaaatacaaaaattagcctggcgtggtggtgggtgcccaacaccagctactcaggaggctgaggcaggaaaattgcttgaacccaggaggcggaggttgcagtgagccgagatcattccactgcattccagcctgggtgacagagtgagactctgtctcaaaaaaaaaaaaaaaaacagaaagggagaaattggatcaggagggacaaacaaaaatatctcttataccgacgtaaaaca

SEQ ID NO: 819262 - DNA, 592 bp, Homo sapiens
ctcaaggaagttaatttcagaggtcaagcaatgactttcccagagtctgcctcttcaaactcatgccactggagattaataaacgttggttattgttatttggccccaaggaggctttgaatgcggagaattgcgacctgcatgcctaggtcaaccccatagccttagatcgagccactgtgacaccagaaggtgaaatgggacacaagggtagaaattacaaagaggctgccttcagtttgaaataaaggactttcaagtaattagaactctttcaaaaaggaatggccctgtcaaaaggtttcgttgccagaagtagttaaagagttgttgactacatgtctaagtgtgctgggaagggagaggatggttagaatagatgacctctaaggtctcagcacggagatatttaatttgtatatccttcctgtggacacatttctgtgtcctggagtacasagggagggagtggggtcagaggtcagggccaatggtcagggggctccagagcatctgcctctggacacaacacaggcccacagctcataggcctggctaccttctcagttcccctggtttcatcaacattgtc

SEQ ID NO: 819263 - DNA, 590 bp, Homo sapiens
gcatttatatgcacatttatccaaataaagttttatttggatttgagtaacttgctcttccactgactttcacaggatgcctgcaaactrtcctgtgaatgggctaagagcacaagatttagagtgagcaaatctggttctaatccttgttatgctcctagaagcagtgcaattttaggcagcttacttaaactttctaattaccacttccctgactggtaaagggagctgatggttatagctccattgttgataaatcaatgaaataacattgcaaagttatattacagtgtcagcatctagtgtaagcactcatcaaatagcatctattcttatttgatatgagccatttaaatgtaacatttaccaaggataagtattttagattgaaaatggttataatgatgggattttttttttctggtcgttgtatttcaggaaggaactcttaggtcatcatttttggcccctgggaatacctgcttcataactttcctatgcccaaatcttagcactgtttatgctgtagaactcagccctttggaatacttccttgcattcttggatcaataacaaattccaactaagga

SEQ ID NO: 819264 - DNA, 489 bp, Homo sapiens
ctgggaggcagagctggcagtgagccgagatcacgccactgcattcaattcctgggcgacaaagtgagactccgtctcaaaaaaaaaccaaaaaaacytaaatgtccagaaatgtgagatttatttaagtaaattatggtaacattcacactatggaataataggtagtcattaaaatgaaatacatatacatctgctaaaattgagacatctccaatataatattaactgaaaatgcaaataggaattttgtatagcatgatcccacaggtataaatttgttaaagaaatatacttctacatacagataaatgacaagaaaattttctaggaagataaactgtttatagtgattctttttgaatgagaaagtagaaatcatggtgtggggattaatttttggttttattgcttagtttttaattaaaggtactatttttgtgttaaattaaaaaaaaaaaaaccaccaccacaactattttacttgtt

SEQ ID NO: 819265 - DNA, 632 bp, Homo sapiens
ctggtctggcatctgtctgcctttgggctaccttttcggcacagctccctgggcctgtggctgctacaagctggactccagctcccctgggctgcagtgctgctcgcagtggtccagaaaagaggctgggcacacggctcctggctcagcagcatccttggcgcaggctggcccaggagctccgtgcagggtgctgccagttgacccagccccggctgcactcaatgtccgagaaccgggctggctggggggcctctttgacggagctttactccaagtcttgctgaatttcctgaggaaaagcactgatgttctcatggacacaagggaggcagaatctcttgaagtagaataaactgcactcctttccagtcttcctttctcagcttctcctggaccgccagctcctccatgcgcctcagacactcccaacgccgcactgcgggggttcctcccgccctggcccatctcatcccccttggctgttgatacagctcccctgtgtgcatgtcgccctgtggcagatgctcagggacttctcagactccaggatcactccgagtacactgrccacacagcctgctgcacaaactgcagcgccagctaaggaccaggaatctgacattgtcgga

SEQ ID NO: 819266 - DNA, 634 bp, Homo sapiens
cactgacatgagatagtgatacctctgttttgtgatagatcaatatgtacacaaattttgtttcatgcacaaaattattagaaatattatataaaattgccttcaggctatgtgtatatggtatatatgaaatataaattttgtgtttagacttggatcccatccccaagatatctcattatgtacatgcatatattccaaaatatgaaaaaatctgaaatccaaaacacttctggtcccacgcatttaggataagggaaacccagcctgtatttttcttacatttcctagctatcaacctgatgttacaaaatgtttttgagaatgtcttcctgattcagattattctagccaattcagtcctttctttctcattacttctatcccctgacttattaaggaggcatatttctccctaatacttaagttattatacatagtatataagattaaagagatttaagactatattcttttttactttgtttactttttatcaaayattactttcatcaaatatttcaagtatacataaaaatacagacaataacattaacaaaatgttattctgtgtaccaacttagcaagaaattaacattttgccgtatttacttcagctctttttgtagaagtt

SEQ ID NO: 819267 - DNA, 596 bp, Homo sapiens
caagtgtcctgaccttgcctgagccttttttgttttccctctcttttttgatatctactttgcagttttgttttgaggattaaatgagaaaacgtatgcctggcacatatgagctcagaaaatacwaattgccaaagggctaatacatttagttgagggagacactaggaataagacataaagctgcttttgcctctaaggcaataaaatgccctctccattctattctccacactacagcaagaacaatcttttgcaaacatgtcatgtgatgtttatctcttcttaaaatttcccctgccttcctttcagagtaaaacggaaattcctaccgtagtctagaaagttctatggtatgccaatatctctcagtcccctcaccttacaaaaccagtgcattttctaccactccatttgctatataattcagccatattggtcttgctcttctcaattactatgaacatgagtgtctgctttcagagctttgcactgtttcctccacctggatagtctttcctcaaatattccgtgattcacttccttacttcaggtgtatgctcaaacgtcatttaccagaggccaaccctggccac

SEQ ID NO: 819268 - DNA, 596 bp, Homo sapiens
caagtgtcctgaccttgcctgagccttttttgttttccctctcttttttgatatctactttgcagttttgttttgaggattaaatgagaaaacgtatgcctggcacatatgagctcagaaaatacaaattgccaaagggctaatacatttagttgagggagacactaggaataagacataaagctgcttttgcctctaaggcaataaaatgccctctccattctattctccacactacagcaagaacaatcttttgcaaacatgtcatgtgatgtttatctcttcttaaaatttcccctgccttcctttcagagtaaaacggaaattcctaccgtagtctagaaagttctatggtatgccaatatctctcagtcccctcaccttacaaaaccagtgcattttctaccactccatttgctatataattcagccatattggtcttgctcttctcaattactatgaacatgagtgtctgctttcagagctttrcactgtttcctccacctggatagtctttcctcaaatattccgtgattcacttccttacttcaggtgtatgctcaaacgtcatttaccagaggccaaccctggccac

SEQ ID NO: 819269 - DNA, 586 bp, Homo sapiens
attcccacacactggacttcctctgactggctgatggcagggatcctggctttaggcgtgagtatctttmtttctttgcatcttcctacaatttacagtttttgtataaatacaatgacttatttatttatttattttttttttttttgagatggagtctcttgctttgttgcccaggctgcagtgcagtggcacggtctcggctcactgcaacctctgcctcccaggttcaagtgcttctcctgtctcagcctcctgagtagctgtgattacaggcagccgccatcatgcctggctaattttttgtatttttagtaaagatggggtttcactgtgttggccaggctggtctcgaactcctgacctcaggtgatctgcccacctcggccttccaaagtgctgggattacaggtgtgagccaccatgcctggcctacaatgatgtttttcaagtttctattttgccattttaatatagaacttttatagaaaaaaaaatgtttctctgagaagcagtttctcaattaacctggataaacatatctactaagaccatgaagccatagacagatagcaatgtccatcac

SEQ ID NO: 819270 - DNA, 593 bp, Homo sapiens
ggcgtacactaacctactgcagtgccagtcgttgaaaagtctagcacattcaattacatacagtatgtagtacttgatataataataaatgactatgttactggtttatgtatttactccactacmctttttatcattattttagagcgtacacctacttatgcaggaaaaaataagttaattgtaaaacagtccttcaggaggactccagaagaagaaattgttatcacagacaacagctccacacatgttactgcccccgaagaccttccagtgggacaagatgtggaggtggatgacagggataaggatgatcctgaccctgtgcaggccaaggctaatgtgtgtgtgtttgtgtcttcatttttaaccaaaaagtttaaagaaaaaaaaagaaagaaaaaacttatagaataagcatataaagaaaatatttttgtacagctatacaacatgttttcagctacatgttattacaaagagtgaaaaacttttaaagaagtttataaagtcaaaaagttacagtaagctcatttattactgaagagaagtatttttagaataaatttagtgtagcctaagtgtacaatatt

SEQ ID NO: 819271 - DNA, 644 bp, Homo sapiens
tagggaagcccctgcaccccaaagcccactgaaatcaaaccagccaatcctaagcctgctcaccctgtctctcccattccttcccatggaagccacaaccacgggaaggctcctgaccacattccccacccctycctctgcctcctgaccaacctggtgcctctccatgtggccctgcatgggatgctgtgccccttctcgtgggagctgtggtaacaaccaacctgttcagcagcagtcatctcctgatctgttggcctcaccatacctcacgttttctattaatactctctattttaaagcaaagtattctatgatgagctgattggctaaaacaatttgcattctgcaccccctccctttcttatgttttaaaaaactttgactatgcaaagctcaagatgaacaggcagaataccagaaggaaatgttggcagtggctctcttgggtggtagaattgttgctctttccatagctcaaatacttgtattattttgcttagaaccaggagaaagcctcccctccagccttatctctcaccattcctctgttactccctggggtcctggttactcaaactgacccctttctctcatttccaaggggccatcacctcgctcacttctagggttggtcctgctgc

SEQ ID NO: 819272 - DNA, 523 bp, Homo sapiens
attctttttttttcttttcccagtctttttctttgctttccaattttggaggtttatgttgagacattctcaggctcagagactctttcttcagccatgttcartctactgataagcccatcaaagccatttttattttacggtgtttttactctctagcatttctctttgctttttccttaggatttccatctctcttcttacattgtctacctattcttgaatgatgccttctttatctgttatagccattagtatattaatcatagtggatttaaattcctcatctgataattccagaatccctatctgtctgggtctgaagcttgctctattctcctcagattttttttttttttttttgccttttggtatgcctggtaattttttcttggtagctggacatgatgtaccaggtaaaaggaacttttataaatcagcttttagcaatgtagcagttaggtgggggaaaggggaggggagacattctatcatcctatgattaagtctcagtcttttagta

SEQ ID NO: 819273 - DNA, 581 bp, Homo sapiens
aatggttcatttcaccttccccctgccagaagcacatagggatttttctgcaatatttacttggagaatctaattgagctcatgtaggtaagtctaacaaaattgtggtgtttccccatgagtgggtcctcctggagtttaaaactttcagagttgttcatactgaacctcctataattcatcaattacagctcaggtttttctaccatggcactgcttcctgtgggggtttctgtttgtgactgcatgctctagtaacttgtggctctcggtatttgccagtctgtctctctagtcttttggggacagtggttttccctgtgtcctcccctatcctgggtccgataagaattgatttctcagtttgcttagctttttacttgttagggttggagtggcaacttctaagctccctacatgtggaactggaaaccagaagtcctaataayatttctgtatatgtcttttggtgcatgtatgcatgtacttctgttggctgtatcacttcaaagtagaaacactgggtcatatagtaggcatatattcatctttagtagataattacaaagagttttccaaag

SEQ ID NO: 819274 - DNA, 618 bp, Homo sapiens
ctatttacacatttttaacttattctaataacttaaaaatataattcccattcatccattgatttcagggggaaaaacttccttamtataaagaaacaacagattgacagatattaggtaaagcctctaacatgaaagacagcacaacaaatataaaactcagaggaaaagacaatgaagaatcagacgaaattgtaatttgcttagagctaagagaaaatactgtatcaatgatgagtgggatataaaagaaacacgcagtaaacaaagtggtattctttttttatttttaaatttatttagttttatagagacaagttcttgctctgttgcccaagctagagtgcagtggcaatgataacagctcacagcagcttcaacctcctgggctcaagtgatcctcctgtctcagcctcctaagtagctggaactacaggtgtgcgccaccacaccaggctaatttttgtattttttgtagagacagggtctcactatgttgcccaggctggtcttgaactcctgacttcaagaaattcttccactttggcttcccaaagtgctaggattacggggatgagccactgtgcctggtcaagacagtagtatttaaaaaaaaaa

SEQ ID NO: 819275 - DNA, 603 bp, Homo sapiens
gtggatgatagcagagcctatagctattacagtgtgccctgcggtgtacacaactgctaagttcgtgtgactcattgtgttggtgctccaagagtaggaaaccccgtgaatgctctagcaatttcaggattgtgtgttggggtggggggagaataatacagaagcaaaaaagtagtaatcttatctccactatctagaatcttctttctcttatcaaccctctatatgttaaaaatgtgtcacctgattttgccagtaaatctttttcataaagttcaagtttgggagttgagttgaaagcccttgattcttcactgagtcttggggtgaactttaattaatataactttaattttcctctaagaatttatataacctttaatgataacatgttctcctcttcgaaggatatcagatccttcacaaacttaattttttatattatttggccttctgtgcataataacayagagtttcctttgtcttctggttagcaaaaatgtcttctctctgaatgaaatttctggattacttaaactcactctcttaagtaccagactattttacccaactggataaaaatttgtctaaaatatattactt

SEQ ID NO: 819276 - DNA, 521 bp, Homo sapiens
taaggtttccttggatagagcctgcagaaaatctctgcacttatgtatagacctgcatcacaattgcaatggaatctgtaagtaagcactgtggtctgtgggcacactcagaagagtaggcctaattctgtcttagaagcacaggtaacggtggaagatcatggaagtcttcacagaagacaagatatcaaaacagagccttgaaggctaagtaggtttgtttatttgcttctttgtttttccagatagaaggggccacataagcaaagatgaagaaacataaaagagcctcagtgtggattttttgaaaggtgggacatgaagctggggcagaataccagaagggttttaaatgagtgtggcatgattggatttgtgttttgggaagactgttctggcagctagtgcasacattggaatcgaaaatggaaatatgcctgaacagggagcttgaggcccaggtgccttctttttattctcttctgcctccaaagacctgagaagggctggatttgaagact

SEQ ID NO: 819277 - DNA, 635 bp, Homo sapiens
ctaatgtctaccttactgagcagtgaagttctttctagagctacaaataaggccgaccttacagagctaagaaatggattagatattaggagaaggtgaaggaatgaaaaatgaatattagtggsggcttaggagaaaaaaaagtttggggaacaccatgaggaaaagacagattttattgaaagagaaattctcattttctttataactcccattagccttctctacaaaatctgatcccaacctatgttgaagcttggcttcatttaaagactcatgctttccagtgaatgtgagctacttatcctctaaacacataaaatttgcatcctcagccattttgttcatggcattctgtctacttgaagtcttcccacccatcctttgtcttggcttagatgctctgtcttttcgctaccttgctctaacactccaatctgttaataaagactgctgaattatcgatatagaagccaaacctgtttaaactgttattggttcccaaaaatctcaactgaattttaatttcaaatggaaatgattttccatagttctacttctgaacaagatggagtaagagggactggatttaccctcctacctaaaatcctgaaacaactaaaaaaaaaaaaaaa

SEQ ID NO: 819278 - DNA, 538 bp, Homo sapiens
tctttccatagcttgatagctcatttctaagtgatgaataatatcccattggctggatacactatagtttatctactcacctactgaaggacatcttgattgcttctaagttttatcagttacgagcaaggctgttataacatctgagtataggtttttttgtgggtgtaattttcaattcatatggataaataccaaggagcatgattgctgagtcctatggtaagattatgtttaattttgtgaggcactgctagacttttttccaaagtggttttaccattttgcattcctaccagcaatgaatgagagttcctgttgtttcacatcctcatcacatttggtgttgtcagttttggattttggcagttttaatgggtgtgtagtattatctcatgtgattgacttttgtatattaatcttgtatcctgccaccttgctataatcacttactaatttcaggagttcgttagttcttttggattttctatataaacagtcttgtcatygaacaaagttttgtttcttccttcccaat

SEQ ID NO: 819279 - DNA, 576 bp, Homo sapiens
tatcacccaaggccgctgtgccctcagaaattcctagcccatgatactctcttcctgggggtggggggccctccgccctcaggagggcttgtgggttaactgttgtgatgagctatttccaaggtaggaaaagagaaactagatcattgagccctggggaagggctgtggttggcacagaaaatgacagatcccgtcagcaggcaggcggggtcaggggctcctccccatggctgggattgggggctggtcctggggggtttgtagggtcccagggacaggagcagggcttgtcctcagaacctaattcctgagcatgtgagctcagacaggtcctgcataggactcaaggcatctgcggtctgaggaccatgcactccagctttcatgttctgcctgtctgtctgtctgtcagtgtgtctgtcaggctgcatgtctgccttgcttatctgggccctgaatcacctcatatcaaaatgttgccckattcctagaacacagctgggcatcagggggtgggcctgagtcatttctgccttgtggacctgcctgccctgtgaacccaggaggcactgaa

SEQ ID NO: 819280 - DNA, 460 bp, Homo sapiens
cctccagatatttttcttagaaattaaactgcatgaacaaagggattgcattttatcatcttatttgtatttcactggaacrattgtcattttcctttccctttttgtggaatatctgcaaagcctctgaaagcccattgttccccctcaacaacattggttaccacacttgattatcacatattatttttttaaataaattttccttcactgcacagatagatcaatgatttcctccttcagaagtcaatagtacatatggttgagaaatttactttgtgtattgatagttgtccttgagttgacactgtgtctgctctttatgaaaatggcctttagaatttgggaggttggaaatgaggcttaagtagaataaagctgtgatatttgggagccattgacctcatgtgagctagagagtcttgctgagtctctgaaatctggtactgtacagagaaga

SEQ ID NO: 819281 - DNA, 615 bp, Homo sapiens
caattttatattctcactagaaatggatgagtgttacagttttgccaatccctactaccacttgatattgtcagtcttcttgattataaccattccagtggatgtgcagtagaatttcataatggtgttgagtcgcattttagtgcaactcatgatgtttcacatcttttcatttggttatcggtcatttttatatcttccatgtgaaatattccgttgttttttcctatttggggagccgagtaccttttcgtaatttaattgtgaatgtttatatattctaaataaaagctgtttttcagatatatgtatcatgtttcacagcggggttttttccactttgtggcttgtaatatattttcttaataatatttttaaacaacataggtttttgattcaataaaacacaatttattactttttcttacatggctcatgctttttctgtttttactaaaaatatttgtttatccccaaattgcaaaaattttccccatgttttcttcaagaaatattataactttagtttttttagatttacgtttatacrccacattttaagttgatattgttgtacgtaagataaaggttcaagttcatgtttgctaagttatg

SEQ ID NO: 819282 - DNA, 651 bp, Homo sapiens
ataatgtcctccaggtccatccatgttgttgcaaatgatagcattttctgcctttttagggcttcattgtgtggtacacactttttctttatatatccatttctttctttktgtgtgtgtgtgtgtgtgtgtgtgtgtgtgtgtgtgtgtgcgtgtgtgtgtgtgagatgaagtttcacttgtgttgcccaggctggagttcaatggtgtgatctcggctcactgcaacttctgcctctcgggttcaagtgattctcctgcctcagactcccgagtagctgggattacaggcatgcaccaccacgcccagtttattttatatttttggtagagacaaggtttctgcatgttggtcaggctggtctcaaactcccgacctcaggtgatccacacacctcagcctcctaaagtgctgggattacaggcatgagctgcaatcccatgggggattacatcacatgtgggcaggttccatgatgccccctgagctgtaaaattagcaaatttttgttagtgattttcaaaagggaagggagtgtatgaagagggtgtgggtcacagagatcacgtgcttcacaaggtaacagaatatcacaaggcaaatggaggcagggtaggatcacaggaccacaggacgggggcgaaattaaa

SEQ ID NO: 819283 - DNA, 378 bp, Homo sapiens
atcaaaaatatacaaagaactcttatgactcaacaataaaaaaaaccaacaacccaatttaaaaatgaaatcaacctatgtgtccaccaatggatgattgaatttaaaaatgtataccatggaaaactattcagtcatacagaagaatgaagttgttttttgcatcaacatggacagaactggaggccattaccctaagtgaaattactcagaaacagaaagtcaaatatcacatggtttcacttgaaaataggaactaaacaatgggtaaacatggacayacagagtggaaaaatgaacactgaagacttgggaggcttagagagggaagatggttgaaaaattacctattgggtacaattttcactatttgaatga

SEQ ID NO: 819284 - DNA, 434 bp, Homo sapiens
cacatggatgctgccaaggcttacgcttgtgccctctggagcagtggcccaagctgcacctgggtctgcytgagccacagctggggtggctgagaagcaatgtgccagaatacagtgggcagagacaaggggcagtgagccctgaagtcccacagacactctacacgccacccttagaaacttctgcccctaaggccttggcactctgggtctgtgatggatgtggcaacctcaaagatctgaaatgccttcaggggtcattctcgcattgtcttaatgaatagcacctggcttccttctagccatactaatctccttatcaaatggtcacttggccacactgctggtttctcctaaacatgattttttattctttacatggccaggctaagaattttccaaatatgtatgctctgcttcccttttcattataa

SEQ ID NO: 819285 - DNA, 659 bp, Homo sapiens
gcacgagaattgcttgagcccaggaggcagaggctgcagtgagccaagatgccaccgcactccagcctgggcaacagagtaagactctgcctcgaaaaaaaaaaaaaggaaaaaaaaatcccccaaatcatctcttgcagagatttcacaaaccaggcatattttgctgacaacttcccaggaattatggtagaaggaataacagcgcaaattcacagctctcacaaaaacagtcagcaacactgatctcaaaagagcccccagccacacctcattgtggcatttctttattggtctttcagctcatctcagtatcatgctctccttcccgctgtttttttcctcctcttccttccctctcctttctccatttaggatcaaaatgcaccattcttctcctctgtcaagcagggcaacctcctcctctgaagctttgttcaaggcattcttagaacaaagacagccttcttcctaagaaaaattacagtgaataaaatttcctctgccttattacacatacaagggttgggatctttttaaagtgaggtcatttataaactacaaagaagtacctrcaaaattccctcaagaggagtttctccattgattcagctaatgtccctcagaaccaggtcaccagatggctcaagctgcctagg

SEQ ID NO: 819286 - DNA, 659 bp, Homo sapiens
gcacgagaattgcttgagcccaggaggcagaggctgcagtgagccaagatgccaccgcactccagcctgggcaacagagtaagactctgcctcgaaaaaaaaaaaaaggaaaaaaaaatcccccaaatcatctcttgcagagatttcacaaaccaggcatattttgctgacaacttcccaggaattatggtagaaggaataacagcgcaaattcacagctctcacaaaaacagtcagcaacactgatctcaaaagagcccccagccacacctcattgtggcatttctttattggtctttcagctcatctcagtatcatgctctccttcccgctgtttttttcctcctcttccttccctctcctttctccatttaggatcaaaatgcaccattcttctcctctgtcaagcagggcaacctcctcctctgaagctttgttcaaggcattcttagaacaaagacagccttcttcctaagaaaaattacagtgaataaaatttcctctgccttattacacatacaagggttgggatctttttaaagtgaggtcatttataaactacaaagaagtacctgmaaaattccctcaagaggagtttctccattgattcagctaatgtccctcagaaccaggtcaccagatggctcaagctgcctagg

SEQ ID NO: 819287 - DNA, 641 bp, Homo sapiens
cgtgggagcagggggtgggtggccaaggagaggagagcagagcaggtatccagtggcctctggagagtgggcgagggagctgacctggctatgggrgcaggggtggggtggttgtctgcagtggttgggggtccagccaaagtcaaggacagggaattttgagggtctccattacatggtcaggttcaagtaggagtggggtgcatggtggggttctccgaagcagggcttctgccagcagcgtgggagggacccttgggctagggagtagctgaagggatggcccctggaatcgggactgcaggggaagatgtaaagactgagtggtcggagtgtggagtgtgggcgcttaggtctaggggactggaaacagagaagcaggagtgagtggggtgctggaaggacaggcgactgaggagcccaggagggtggggtttggatggaaggagttgaggtggagcagccctgggtggtcatcaggtccagggaatgcgcctgggcagggctgtggtaggtctgcagtgcagtggacatggttcttgggggtgagggagatgcagaactcagaggccagtgtgtaggatgtccacccacgtggacacaccatcagaagaaagagatctggtctgggctggaaggga

SEQ ID NO: 819288 - DNA, 646 bp, Homo sapiens
gtggacgccatgtaatagatctggatccatgggcaatgagagtttgatattgagataatagatgataatgaaaaggaacagattcttggtgarggaggaggacatttctcaagaaagagaaaattgtcttagcaaaacaatggtttggtcagaaagtgacaccgcatgcccagattccagcatctggggagtagccctttgctgacaaaattgggacctcacagtgaggtgacacaggagatacttgggactatagtctatgtcatgaccttagcaagaaagtagatggcaagctgaggctgtttttcacttctccaaggagccccacctcagttgaggaagttaatacactcctaaccaacatttattgagtatgtgtgtcagtccctgagatgaacacttaacattgaccagctgatttcatcttcaccaccaccccatgagctaagttctagttttatcgtatcttatataggaagacactgaggctcagagagattagggaacttgctcactgccacccaagtactaagtggtgaagccagaacatggtcccagcttggtctgactttatccacatccctaatcacactaccaagctcctgaccatttgagtgtgtcatggtggctaagcagtaagaaaagg

SEQ ID NO: 819289 - DNA, 457 bp, Homo sapiens
aaatgtgaaacaaattaaacaatcaaaagcctatstgtaccagagagtactaatccacattgtttatttgaagctcttattgctttgcttcaaatgcactgaagttcctgagcaggcggagtaaagtatgtatgtttcacaataagcttgcatgcaggtaccacaaaaaacaaacaaacaataaaagaggaaaaacaaactgtatttcattattttgggttaaaaaagtctatgattttctaatgatttataaagacagcagattttacagggggaaatataacaacctggaaatgccccaaatcaacttcaaatgcctcaaatcccagatggaatgagcgagtacacgaacataataacagagttgaagatgtgctaaattatattttttaagtatggattttttagtgactgtttttgaactgagaagaatgaaatttcctcaaatctatgcatg

SEQ ID NO: 819290 - DNA, 619 bp, Homo sapiens
gccgaatgcccgagcacattttccacccaaactgtttagtggctaaatttgctcctggctggaaaaactccagctcccgtcatacacacgcacgcgcrcacacacatacacacacacaagctgttttaaaagtgcttctaaaaaaagagcttaggtctgaaaattgtaattaatttaataagacatcctgcccggagcagatcagaagctatatgagctttttgggtgagcccatgagtgtggtgacagacaacatcactccagtgctttccaaaatggatttgagctaacacagcacgcatttttatgatctggaccatcttgctgtctttctgctctggacaaaagaccgagcagacacaatcatcttttgagaatgatggcatcgtcattgtctgcatagcaggactgtaattaagcaccagaaataggacagctgagaagagacaaagagcagggaaggcaggggactgcgagacagcatcctggggagagactgcaccaagatagtagctgaaatccagtatctgcatggatgaggtcatcctgggaaaaagtatgtgtccagatgaaaaaacaaaaaacaaaacaaaacaaaaaacctgaagtaggccagaga

SEQ ID NO: 819291 - DNA, 623 bp, Homo sapiens
gagatctttaagagatgactttaagagacaggcccccttcctcaccctctctccttctcacactgtcttgctcttctgccttctgctataggataacacaaaacacaggctcttgccmggtgcaggcccctgaccctgtacttcccagcctccagaactgaaagaaacctgttctttataaaatacccagtctcaggtattctgttatagcagcacaaaatgaacagggacaacattcaagggattgaaattgattaagatgtggcacttggagagaagggtaacgattagaacttggacagactcctgatagaagtgcctttctttccaccaagacacagctgtgcttttctcgaggttcttgcacattacatctttcagcctggaccccatgtgatacatgagaggcatacatcatagtgggcatgggaagcagaacttttctcttacctccatgatggaccctggtgcttccttcccctgctcttctgcaggagaatagtgggaaaggcagtgatgctctgctttgaagggaaaagggattttgattataatgtgtaccagtgactgggcacaaacactgaaagacagattcttggctgcttaattatgaagtgttgtaa

SEQ ID NO: 819292 - DNA, 619 bp, Homo sapiens
  misc_feature 1, 2, 3, 4, 5, 6, 7, 8, 9, 10, 11, 12, 13, 14, 15, 16, 17,18, 19, 20, 21, 22, 23, 24, 25, 26, 27, 28, 29, 30, 31,32, 33, 34, 35, 36, 37, 38, 39: n = A,T,C or G
nnnnnnnnnnnnnnnnnnnnnnnnnnnnnnnnnnnnnnnctagctgatatcagtcttatttctttgacagtaacatttmtcagcataattgaatgaacatttttatttaccagtaactctgtttgtgaggttgacaagtagatcaattcattggaacctgattattcttgggtgaaaagatgaaattgaatttctgtatcacagaactaaggtctaaacctcagaggagaggtataagtcactgtaacaaggaagcctggcttggccagtgagacttctccaactaccagataccacacgacctaagggtaatgtctgctgccaagcgatacagcaaagatagctcatagaccttgtttaaaattttgccttagaccttttttgaaatttgcaacagtgctaacttcttgcataagcccacagtggcatgtcctatagatgcctcgatttatgcttctagtttggattttggtgtgaagtggcttgctgagatggggtatgtgaatcaagctctctcggattcagtttcattgcctgtaaagtgagaaagttggaaaacattatgttgaataagaattctctgatgtaataaaaaagcaactttaggctgggcacagca

SEQ ID NO: 819293 - DNA, 646 bp, Homo sapiens
acagagcgctgactggtgcattttacaatccccttgctaagacagaaaagttcttcaagtmcccacttgacccaggaagtccatctggcttcacctctcattgagatcttggctcactgcaacctccacctcccaggttcaaaagattctcctgcttcagcctcccgagtagctgggactacaggtgcctgccacaatgcctggctaatttttgtatttttagtagagatggggtttcaccatgttggccaggatggtctccatctcttgacctcgtgatctgcccacctcggcctcccaaagtgctgggattacaggcgtgagccaccgcgcccagccctttgtctatattttaaaagatatagatcgaacttcaaataattttgatgcccgttatggggccttttcaggctctgcctcagacatctctcttgcttgcttttggggagagccctttctgagtttaatggcttcagtaactggaaagggggtcagcttatttccctcgagatgtaaatgaagcccttgagacctggacacctacattggcccatttcgaggtggttgttttttaggactcctttgtctaatgatagtgggaaggttttagaccacccggagaaggcaggtgggaggggattggtct

SEQ ID NO: 819294 - DNA, 634 bp, Homo sapiens
atatacacatatttcaggttgctgaagaagaaaatgttgaagttataactaaatacttaaaaatataattttaaaaacttccccaaaatgaaagaagacttgtatctacataagaaagagcacactatattctagggaaattggctcagaagagccaactgagacatatcataggaaagttactggacttcaaaacaacaactaaacaacattttttttggcatctgggcagagtcatttataaaagaaaaaagtggcctgtaatcctagcactttgggaggccaaagcaggtggatcacgaagtccggagatcgagaccatcccggctaacacggtgaaaccccgactctactaaaaatacaaaaaattagccgggcgtggtggcaggcgcctgtagtcccagctacttgggaggctgaggcaggacaatggcatgaacccgggaggtggagcttgcagtgagcgagatcgcaccactgcactccagcctgggcaacagagcaaggctctatctgaaaaaaaaaaaaaaaaaaaaaaaaaagmcaaaagtgtgctggccccagagtgctccatagcagtaatcaatgcctaagtcagtgaagtaacacctacaacatcttcagggaaggaatg

SEQ ID NO: 819295 - DNA, 448 bp, Homo sapiens
tggaggctgaggtggcaagagaattgcttgaacctgggaggagaaggttgcagtgagccgagatcgcgccaatacactctagcctgggcaacaagagtgaaactccatctcaaataaagaaaaaaaacaatatccaaaatagcactttagtgtattgagaatttctcctgctaataattaatactgtgggcttttggggttctaaattactctgaggaaaatctgaaatacagaaaaacccattttttaaaatgtcaaggttcttacgatgtctgactttatttccatttcaagtgcacttgggcctccaaaactgaatttcttaacttttctgactctggaaacatttccaargagtacttgcaagaagcccgcttcaaactggaatccttccgcttggatataatcatgcaaacagccgagagaatttatttaaccttcagccaac

SEQ ID NO: 819296 - DNA, 448 bp, Homo sapiens
tggaggctgaggtggcaagagaattgcttgaacctgggaggagaaggttgcagtgagccgagatcgcgccaatacactctagcctgggcaacaagagtgaaactccatctcaaataaagaaaaaaaacaatatccaaaatagcactttagtgtattgagaatttctcctgctaataattaatactgtgggcttttggggttctaaattactctgaggaaaatctgaaatacagaaaaacccattttttaaaatgtcaaggttcttacgatgtctgactttatttccatttcaagtgcacttgggcctccaaaactgaatttcttaacttttctgactctggaaacatttccaagragtacttgcaagaagcccgcttcaaactggaatccttccgcttggatataatcatgcaaacagccgagagaatttatttaaccttcagccaac

SEQ ID NO: 819297 - DNA, 640 bp, Homo sapiens
attttgatgccagtgcttgcttaatcttaccagaagaggggatcaaacggaggcatgagtcacatcatcctttygctgctttgaatgtcctctattttaagggattttgcagctcttccttcccttagttcactgtctgggctgtgagaggcactccttttgtgtatatccggtgataaaatgtaacactgatccatctccttgtgaattccttccttccttagcttagcgcttagcttagcacttcttgctttacaggaaacattgcagtgagtattggctttattggtgctccccctgctggctgtttctatgtctttgtgcaaacagggtaacagcttcagcttcaagtcatagtgaatctctgatgagcacagaggcttagcctggcggaggccgagggcaagcctacatcattggggtgttaaagccgagctttcaattctggcccagcatgcagaacctatcttcactttcctcatctgctaaactgcccactttgtaggttcattgtagcgattagaaattatatagctcatctgacactcataggaaatgttctgaaatggtgagtaaacctgaccggagccctccagaaagtttgcagatactattatgtattattttttcttgagaaaat

SEQ ID NO: 819298 - DNA, 487 bp, Homo sapiens
tttcttttaccttagcatttgctacagaattggtattcccaagggattcttcatgctctcaacttgcctgcaygtctctagttagaaaacgtgagctaccatcttttgtggatagggtgtatgacatgatggaaaaaagaaacagacatggcttataaggaggagaaatgacctgtaacaagggatgggttctaagctgagtcagaaatgagaaactttctgaaatgcaagtgctttgggaaaaaatgtttcacctaattaatttatctgattcttagaaggctctaatgtcagcacagtgccaagtcacatgtaaatctacaaaacttgttcatcaaatggcccttcattctatccaacatctatcaggccatctctcatggagatcactagagtattgtcaaagatcgaccactcatgtctttggctaactttatgatcaagtaaattgggggtgccatgttcaaattatattcaccccctgtaa

SEQ ID NO: 819299 - DNA, 604 bp, Homo sapiens
gtaaggtgtgacatttgctgctttgataaaatctccagatgatggtacttacacaggtgcaataargtccaagttgttaaccttatctcacttgcaaatctgcaatttcctttttcctcaccttctttttgagatgtgactaaagaagtgatggcaaggatgtgaaggattaggcaagagacatcctgggttgggagactgcattctatagtaaaaatcctttgtcctttatttcccaggttgaccatcagggtaatactactagctcattgctcagcttttcactttgctttgattggaagtcatcagtgacttagaaaaaaaagctttaaaaatgcaaaattattacttttcatcttagtaatagaagcagtagctttcttaatggtaatccactttttttccccctttggttttctttttagcaaagattggtcactgttgacttatctgtcatttacttataataggtatcatgtatccccttgactcaccccaatttaagacactctctgataaaacttgtagtgctttgcaccttcaagttaattacccaagtatccctttctaccagatctcctaccctaagctcatcctatacagt

SEQ ID NO: 819300 - DNA, 604 bp, Homo sapiens
gtaaggtgtgacatttgctgctttgataaaatctccagatgatggtacttacacaggtgcaataaagtccaagttgttaaccttatctcacttgcaaatctgcaatttcctttttcctcaccttctttttgagatgtgactaaagaagtgatggcaaggatgtgaaggattaggcaagagacatcctgggttgggagactgcattctatagtaaaaatcctttgtcctttatttcccaggttgaccatcagggtaatactactagctcattgctcagcttttcactttgctttgattggaagtcatcagtgacttagaaaaaaaagctttaaaaatgcaaaattattacttttcatcttagtaatagaagcagtagctttcttaatggtaatccactttttttccccctttggttttctttttagcaaagattggtcactgttgacttatctgtcatttacttataataggtatcatgtatccccttgactcaccccaatttaagacactctctgataaaacytgtagtgctttgcaccttcaagttaattacccaagtatccctttctaccagatctcctaccctaagctcatcctatacagt

SEQ ID NO: 819301 - DNA, 557 bp, Homo sapiens
tatcttggagtctgtgatgtagcctagaaaacataccccggggtgaaggctgatggagcacagccatatgtgcaacaaggaaattctcacactgctgtattcacagatracatttggtggtcaacgctatgcttcctcatacttatttggtggtgaaagaaatactcaaaaaattatagccatagatgtaagtctttgggatttattttctgggtttcaaggataaatttctgcttttccaaactgaagttcatcagggagtagagaaaaaatgaattactctatttttttttgaaaaaggcatgtttttcatacgacaccaataatacaaataaaggccacttttatttgtatcagttattcaagtgacaccctcagcaatgtatttgatgtctgaataatctgaacccttcttttctgggcagaaacattttattccaaagacatctaaatatttgaaagaaataccaaacatttgccactgttcttaatgacaattaattttaaatagggcttctctagtacagtacaaataaagactaagaaaagaaacaagt

SEQ ID NO: 819302 - DNA, 580 bp, Homo sapiens
cagcaagggctgaaattggcttcctaaccagcctcctctgataccactcaggacaggaagtgcctcggtacagtgrggtgcaggtagaaatctcagctccccactggacctttgatgacaggggaagggatgaagccttggctttgtctgtgctgtatggttggaataggatagtttttatctttctgttttgttaggtcatccctttcctgtggtggtggtggtggtggtggtggtggtatttatttatttatttatttatttatttatttattttttagtctgctcttgttagcatttctgggttgctggcttctttgggacccaggctgaaatctgttaggcaaaaagaaaacccagaaaactcatcaccgtgttggtcctatgggctgccttcttctgttcacctttcagagtcttcttatatttgttttatgtatactgtccagggtttttagttatagttagcaggaggaatagggagaagtccatctgttcaatcctagtccagagctagatattttttgcttttctgtgagtattttaaatactaggtcttggtgagtgctaaagttaggaa

SEQ ID NO: 819303 - DNA, 494 bp, Homo sapiens
ttctgcctaatgttcattaagtgggttttaagtagtgaaaaattgaagaaacaccaccattgatatgaaagtggtgactagttttgaaaaatttcaaaaaaattgtttataataaatgctttcaggcataaacatattaatagtataaatatgtacaaatatgtactcactagcaacaatgtaattaagtacagataatataatttatgatttaaaacatttaaaatttatttgttacattcattcccaatctttgagctttcaatctcatacagctttgatacattctgcaacttgcaaaaataattttcggttgtttcataaattgataatgtcttctatataagtattttctgctctttgtttaatctttctcttgaggcatctattttkatttgtcctattttctcatgaagaatgaaatgctttagtgatacggaatataggatttctagaaatcttggtaattactgaaatctttgcatcatatggag

SEQ ID NO: 819304 - DNA, 494 bp, Homo sapiens
ttctgcctaatgttcattaagtgggttttaagtagtgaaaaattgaagaaacaccaccattgatatgaaagtggtgactagttttgaaaaatttcaaaaaaattgtttataataaatgctttcaggcataaacatattaatagtataaatatgtacaaatatgtactcactagcaacaatgtaattaagtacagataatataatttatgatttaaaacatttaaaatttatttgttacattcattcccaatctttgagctttcaatctcatacagctttgatacattctgcaacttgcaaaaataattttcggttgtttcataaattgataatgtcttctatataagtattttctgctctttgtttaatctttctcttgaggcatctatttttatttktcctattttctcatgaagaatgaaatgctttagtgatacggaatataggatttctagaaatcttggtaattactgaaatctttgcatcatatggag

SEQ ID NO: 819305 - DNA, 530 bp, Homo sapiens
aggtggatcctttataaatggctkggtgccgtcctcacagtaatgagtgagttatcactctatgagtccacgtgagagctggttgtttaaaagatgctggaatttcttcctcactctcttgctctgtctctcgtctcttaccatgtggcatactagctcccctttgccttccaccatgatcgtaagcgtcctgagtccctcaccagaagcagatgctggtgtcgtgcttcctgtacagcctgcagaactgggaaccaaaataaacctcttttctttttaaattacccagcctcaggtgttcctttatagcaatgcagatggactcataaaacagctatgaatatttgcatataagtttttgtgtggacatgtgttgtcagttctcttgggtagatcctagcagtggaattgttgagtgatatggtaactctgtgtttaacattttgaggaactaactgttttccaaagtggcatttccattcctatcactgatgtatgagggttttaatttctccacatactaacactta

SEQ ID NO: 819306 - DNA, 530 bp, Homo sapiens
aggtggatcctttataaatggctgggtgccgtcctcacagtaatgagtgagttatcactctaygagtccacgtgagagctggttgtttaaaagatgctggaatttcttcctcactctcttgctctgtctctcgtctcttaccatgtggcatactagctcccctttgccttccaccatgatcgtaagcgtcctgagtccctcaccagaagcagatgctggtgtcgtgcttcctgtacagcctgcagaactgggaaccaaaataaacctcttttctttttaaattacccagcctcaggtgttcctttatagcaatgcagatggactcataaaacagctatgaatatttgcatataagtttttgtgtggacatgtgttgtcagttctcttgggtagatcctagcagtggaattgttgagtgatatggtaactctgtgtttaacattttgaggaactaactgttttccaaagtggcatttccattcctatcactgatgtatgagggttttaatttctccacatactaacactta

SEQ ID NO: 819307 - DNA, 606 bp, Homo sapiens
gtcatcaatgctctgttgacatttaatccagaatgagctcttcctactgcaaaatgarctctttttttggcgctttgttataatttatgagaactaaagtagagagtagacaagttttacttttggacaagttttgcttccacatggaaggatttaaaatgatagcttgtcattagtgtgtgcgacaacagggcaaggcaagccaggagaggcaacacaggtcaaggtcattaacacaatataatgaatgaaagatcatagctgtgggtgcagttggtgtgagtctggtggacaaaaacaaggtcagagtcttgggtgccaagctgacactcaaatatcagtgatgggtaaaattttggtaagagagctgtacactgccatatagtacaactctacatttgacattttgagtctagtctagactggtagttttcaacctgtggttcctaggccagcagcatcagcagcatctgggaacttgttaaaaatgcaaatcctttttctccacccctactccattccagacctactactgaaatagaaatactgagagtgtgacctagaaactcatgttttgttttaccagaacctttagatggttttgat

SEQ ID NO: 819308 - DNA, 594 bp, Homo sapiens
attttttaaactgtaccatattcttatttttgtatactcttattcttctgtcattcttgttggaattgagtggtaacgattagtcaacacaaataatttcgttataatactccaattacattagactgaatttgtctttgtgatgaaagttgattagttgttatgatttacaccaatgaaagggactaataattcagttcactgataagactgggaagcaagacttacaaggcattttcaagtaaatttgattaaaacgtggggtttttcttctgctctttcttaaaatgaggacagtcccctttcactacattcctaaaattaaaagtttacgtgtgtgtagagattaaaagaatagcacaatggcttgttgtgtataaaaaatatcaaattttgtgtttttcaacataaataggagttgaacagtatagattgcattaaaatgtttgaatgttttaataatacaataaaatagataattarctattaacctattaaaataggtatgaactattagcataccttatgtaggtgaggattggtaggctatacttcaaaattggcaggaatgttttgcaattattcttctcaagg

SEQ ID NO: 819309 - DNA, 634 bp, Homo sapiens
tcttctaggagttttatggctttaactcttatatttggatctttgattttttttttttccagacgaaatcttgctttgttgcccaagctggagtgcagtgactcaatctcagctcagtgccaactccgcctcccaggtttgagggattcttttgcctcagcctaccgagtagctgggactacaggagtgcgccacatgcccagctaatttttgtatttttagtggagacagggtttcaccacgttggccaggctggtctcaaactcctgacctcaagtgatctgcccgtctcggcctcccaaattgctgaaattataggcgtgagccactgcatgccacctaaatctttgatccattttgatttaatgttgcatatggtgtaaattaaggacccaatttcattatttttcatgtgggtatataattgtcacggatacatttgttgaaaatactgtcctcttcattgaatggttttgaaacccttgtcaaaaatgagttgacgacatatatatgagtctatttggaggctctctatgctattccwttggcctatatatctgtccttaggccagtaccaaactgttttgattattgtagctttagtaagttttgaaatccggaagtatggctctcc

SEQ ID NO: 819310 - DNA, 605 bp, Homo sapiens
gatgagaaggtttgctgggcaggcatatagaaggacgccatggcatgtgcagaagcacagaggcgtaggagaccgtggtgttcgggaaaataagtactgtaatttaatgatactgagcggaaaagcctggttgattgtagcctctggtcttcaagcgccttgaatgccaagcaaatgactttataactagataaaagagagccactggagaaatttgagctgaggcaagaatctgcctctcccttaactacctcagtggcttgttttctacatttgattcagaacaccactcctgaagttgtctttgggcattgctttgataacgtgtctaccagttagaccctaaatactcagacaactggtttcatatgcatgatatgcatttaggtaaaataattccgactctattgacagaaacgcatgtgtgtatatcagggtttcacaaactttttctttaaagggccagatagtaaataatttaggctttgtaggtgatatcatctctcacatttattcagctstgctttgtagccatggacatataacaaacccgtttatgttacaataaaactttttatggccactgaaatttcaatttcatatag

SEQ ID NO: 819311 - DNA, 537 bp, Homo sapiens
agccaccatgcctggcctgtttcccaatttttaaatgctcttcagattttttaaacgcttttcttcgaatcctcagaacagcattgtttctattacaaagacaagcaacttgaatcaacccaaacgtccatcaacagaacagctaagttgtggcatactcatagctcaggggctggcccactacagcctgccacttgtttatgtaaagttttatctctacacagccctgtccattcatttacatattatctaaagctactttcctgctaccatggcagacttgagttactgcgatggagaccataagactcccaagtctaaaatacttcctataatgctgacctctgctgctatagtggaatactatgtagctatcagcaaatgaataactaaatctatgcacatctcctggttgaatttcaaaatcaatttggagtgcaaaaatgtcacccaaaataccaagartatagttaagtttaaaacatgctaaattataaatatattatttagagatacacccatagatagtgaaactat

SEQ ID NO: 819312 - DNA, 538 bp, Homo sapiens
tggatctaagcttaaaagaagatcacgctgggcgcggtggctcacgcctgcaatcccagcactttgggaggccgaggcaggtgaatcacctgaggtcaggrgtttgagaccagcctgacaaacgcggtgaaaccctgtctctactaaaaatacaaaaattagcccattgtggtagtgtgcacctgtaatcccagctactcgagaggctaaggcaggagaatcgcttgaacccaggaagcggaggttacagtgagccgagatcatgccactgcagcctgggtgacagagcaagactctgtctcaaaaaataaaaaaataaaaagaagatcacagtagccagcagagagaagttacaaatactgacctcacattgcctgcccgaccccaggcctggtgagggaaagttcccagggcagccactggggacagcagtgggtggtgcctggtgatcccactctcccttgtccctgtttcaatttatggaacaggggacagacggatcccacctctgacctccatgccctgcctccctcaggat

SEQ ID NO: 819313 - DNA, 594 bp, Homo sapiens
aaaatgtttttcttaatatgggacctggtaaaaatgtgtctgcaaaaagctgatttggtgctattttcttctatattctataatatatgaaaggcctatgtaagtgttcacttttgtgataattaagattgaacaaagagtcttctatattctataatatatatgaaaggcctatacaagtgtacacttttgtgataattaagattgaacaaagagaaattttggggcagttaactggtttatcatcacatgtgacctaattaatctgaatcttgatagtgacccagaaacaaatggcagccaggtgaccagcaggcgctagcaaattctgttacaccattaagctaaagcaagaaacaactgttaatattctgcactgttttttaatctggtccaaaggcaacaaagtgaggcatgactgagtccctgatcggtgccaatgtacctgaagactaatcctctaactcttcctaggtgccaccaaagacttagaaccaatcaggttatggacsttcaataacaaatgtcaactgagttgcctcatgacaaagcatgaggttgtcaactgagttgcctcatgacaaaacatgcttc

SEQ ID NO: 819314 - DNA, 566 bp, Homo sapiens
tcctagccagggcaatcaggtaagagaaagaaataaaaggcatccaggccaggcacagtggctcacacttgtaatcccagcattttgggaagccagggcaggcaaatcacttggggcccaggagtttagacaagcctggctgtactggtcaaactccatctctaataaaaatacaaaaagttagctggatgtggtggcatgtgcctgtagtcccagctacttgggaggttgagacaggcgaatcgcttgaagctggaggctgaggttgcggtgagccaagatcacaccactgcactccagtttgggcaacagagcgagactctgtctcaaaaaatcaataaataccacccaaattggaaaaaggggaagtcaaattgtttctctttgtagacaacatgatcttatatattaaaaaatctaaagattccatcagaaaactattggaactgttcaacaaaccaacayacaaaagtcagtagcatttctacacatcagtgatgaaccagctgagaaagaaatcaagaagacaatcccatttacgatagctccaaaaaattaaaaaaata

SEQ ID NO: 819315 - DNA, 605 bp, Homo sapiens
cttttaaaatgaaaaagaaaaaaaaaagaaagtctcctttctaaatttataagttgtgtaatttttcagtagacaattacataacacaatttacttactcaccaatgggaagttaggtcrcttctaatagtatgctattttaaacactgctgcagttggcatcttttacgtatcttcttatgcacatgtgctggagtttttttctagaaatactgtgaggcgggtacattttaagttgtactagatattaccaaaatgctctgtgcatcagctgtaccacttacagctctaccacagggttcttgtctttctgcctcctattcagcatgtagcattgtcaatgtagtaaatatttgtcatttgttttggctacccagtacgctgaccatgctttccatatttggagaatctctaattatgagtccccaccttccactacagacatgagtttcttccctaccctccctaggcttcaccaatcagattcacccaaatcagatcatgaatggaaagccagtgacttaacaggaagcaggtgctccttggaggccactcttggcagtagctgcatccatttttcggaggcctcagagacgagagattcc

SEQ ID NO: 819316 - DNA, 420 bp, Homo sapiens
ggtgacgacggtctgtcctccccttaagcaaaaactggctctaagggacaggtcttttcttcacgcaaaaggtgagcaatgcccccagcctttcattctagaaagtgatgaggcgatgrttttgtatccacaaaatgcattatcaaagctcaccactttagtgttcatttactaaagttagcagagatctagaatttgaaaaaaaacagtttagcaatgagaaataactccacttagcaaattcaattaatgaaactagttcatagttttaaataatttcttaatttatatgaaataaagacaacccatatagtagacttacaaatattctatttcgcattatattcaagactaaacatcttccaaaccatattcatgaaatggtttgatgatatgtgctttggcggttctcaagaaata

SEQ ID NO: 819317 - DNA, 406 bp, Homo sapiens
tcttccatcatttctctagaaatgtgctgttcaatacaatggccaccagcmagccatgtgtgtctatttaagttattttttggtcttttgctattttattcggaggattattgcatatatattcataatgagagtcatctattcttcttctttatgcttttaatcagatgttggttttgtattgtatttctttataaaacaatttgagaaattatctatatttttatgatttcaaatacctatctaaatttaaatgagttaaaatttttaaaaatgaacaatcctttccttggttatactagccatgtttcaagtgctcattagtcacatgtggccagtggcgaccatgttgggcagcacagacatctagcatttttgttttacctgaaagttctgtccatctgta

SEQ ID NO: 819318 - DNA, 640 bp, Homo sapiens
ccaagtgctgcaaagaaatgaaacttagccagctttccacccaccaggaatgcatattagcatgaaagttaacttgtcctcacttcagtgacaaccagggagcactatggtagctctgcagggctgtcaggccagaaacaaccttcagaatcatcatattattaggatgtggtgctttattccaaataaaggagtaaatgtcactgtgtctcatccttcagaaaagacaattagatggaaatactcaactcattctcagttaagcagaattatcaacaagccagaatgtcacaataagaaagcaggcagtagacaggatggagagttctcctaaatgctctgccctctgttagtccttagattccccatgactcaattcaagcttgagggtcttaggggtgcaacacagattgggagctgtacagagctcagaaccacaggcaagaaagaaggaagacttcagagctggagtctaaaagagaggattctgccattcaattccgcttatcaaatgtctggtattatgtcccccaagccagaccccagaccaggagcaccagagyggggacagagtgaagtgaccccagtccctgagcttcaggtggaggacaggcaagtatgtgactaattgtgagatgca

SEQ ID NO: 819319 - DNA, 588 bp, Homo sapiens
gcactatgtacttaaaattggtacattttatggcatggaaattatactcaataatgttgcttctttaaaatgcaggatggggcggttatattgaaaagtagcacgattctcaaggttagaggacctgactgcatcagcctagcaatttcttggactggctgcttcatccctctgagccccagcttcaccttgcattaaatagagatgaagatactaaggttgtgctgggtagcatgaattttggcttcacggaacagaaatcctatagcagactttccagaggcgctttcaacacctccacttgtacctggttggctaaaatcaaagagcttgacaatcctagctgcaaggaaggctgggatatatagttctttattccaggcagcaatgtgccctcctaaaaattggagtctgttacagggaagaggaaagagggtgctggaagaggcatccaacagccyctgccccaaagatctcttcttcccaattaatctgaggatccaaacactttcactcacctattctgcggagcacagtgcacatagttactaggctggttattgattagatatttattgattcgatctt

SEQ ID NO: 819320 - DNA, 668 bp, Homo sapiens
cctgggacacgtccgtgcgtctctacgatgtgccggccaactccatgcggctcaagtaccagcacaccggcgccgtcctggactgcgccttctacgtaggtgccctcccgccctgctcctgccctcttactgtgttaacgattctccacgtgaggagcgtttcttttccagtgttgggtagaggcgtctgtcggtggggttatttggacagttctttagcttttcaggagcatctgccttgaacctgtaccgttttgggttggagacatgcagacattggaaactccgtctccccttttctgttacacgcttgtggagtaactctaaactttctgaaaatacgatcattatatttgcaacaatactgttttggctgccgtattgaaaggaaccgtttaggggaaatgtatgtttaccctcagctagcgtgttggctaggataaagcagccctcctttaatttccagacacaggagtttagtgaccacttgcttttttatgctgttttttggtttgtttaccatgaatagttgagcccagtgcatatcccgagcataaactgaacacttgcttgtagaaataagaaygttgaaaccctttcaaaagttctagtttttaaacggttcaaaactattttataggatccaacgcatgcctggagtggaggac

SEQ ID NO: 819321 - DNA, 469 bp, Homo sapiens
ctttttgtacatctgtacttcctgttgagaagtccgctgtgagcctaactattgttcctttagaagctmtctttctttccctctgtgtattagttaggttttgcccgagaaacagaatcaataaaataatgtgtgtgtgtgtgtatgtatacatacatacatttatatatatagttatacatacacatacacacatatatatgtataaagatatttattgtaaagaattagctcatgcaacacagaggcttggcaagtctaaaatttgatagaggagactggacaatcagggaagagttgcagttcaaatccaaatgcagtctggtggtaaacaaggaatagccaatgttgcaaatgaagtctgaaggcaatctgctgacagaattctctcttgcttggggaaggtcagccctttgttctgttcaggtcttcagcagattggatgaaccccacccatattatggagagc

SEQ ID NO: 819322 - DNA, 604 bp, Homo sapiens
cacacgtaacaatattaatcttaaatgtaaataggctaaatactccaattaaaaagacacagactggcaaaattggataaagagtcaagacccatcagcatgctgtattcaggagaccaatctcatgtgcagagacacacataggctcaaaagaaagggatggaggaagatctaccaagcaaatagaaaacaaaaaaaggcaagggttgcaatcctagtctctaataaaacagactttaaaccaacaaagatcgaaagagaaaaagaaggtcattacataatggtaaagggatcaattcaataagaagagctaactatcctaaatatatatgcccccaatacaggagcacccagattcataaagcaagtccttagaaaccaacaaagatacttagacccccacacaataataatgggagactttaacactccactgtcaacattagacagatccatgagacagaaagttaacaagtatatcraggaattgaacccagctcttcaccaagcagacctaatagacatctacagaactctccaccccaaatcaacagaatatacattcttctcagcaccacatcacacttattccaaaactgaccct

SEQ ID NO: 819323 - DNA, 625 bp, Homo sapiens
ttgtacctatattcatgaggaatattggtttttagttttcttatgtctttggtttcagaatatgctgacttcgtagtatacattataaattttttttccactttctggaagagtttgygtagaattagtactatttcttccttatatatttggtacagtttatcagataagccatctacacccggacttttctttgttggagggtaattcacttcaaatccaatttccttaatagatatagggctatttagattatttgtttcttcttgagtgtgcttttattgtttgtgtctttgaaggaatatgtccattttgtctaaattgtcaaatgtattaacataaaattgttcataatatttccttatcttagaatccttaatgatgttacctctttcattcctcatattagtttatgtcttccctgttttgtccccagtctggttcatcaattttatttatttgtgtgggagatctaatttagtgtgggagagtaggaaagaccttctggaggaagtgacatttgtactaagaccaaaagggtgaataggagttaactaggtagtgggagttagtagtgggtgagtgttccagatgaaggggataacacatgcaaaggttctggtgt

SEQ ID NO: 819324 - DNA, 619 bp, Homo sapiens
atgttctcatctccccttccacccaactcacctgtcatcttcctgtgcttcctcattgcaaaaccagcattcctctcacggtcagctatgcacaaaatatccttctgttctcctggtcacatcaaagcaccttcacgctatgcagacaggtcattgagggaacggagaaaattaacaaacgcacctaggttatttctattaaaattagcccctcagccggtaggctctgtcagtttccattgaacacaaactctgacaagtctgttgaaaacttttaacctttccaggttgtgtcaacagcttgcaaacacaacaggaggatggtgcctctgagttctgcctttccttttggaatagaggaggtatcagaatttgttaccaccagctttcatgtttatcttcactgctctgctcactccccgctgccacttaaggagcatacaaacaccttactggataaagacaaacatctgtcaattgtctataaggtcctgatgagatttagcttttgcctacttctcccctcatgtyttagcccactctcccccactctctactcagctccactgaaggctaccttatggaattcttcaaaaaagcaggtagagttcctcctgcc

SEQ ID NO: 819325 - DNA, 500 bp, Homo sapiens
tagaatagtatatccagtgaaaatatctttcaaacaaggagaaataaagactttcctagacaatcaaaagctgagggatttcatcaacaccagacctctcctgcaaaaaatgctgaagggagtacttcagtcataaagaaagggatatcagtgagcaataggtaatcacctaaaagtataaaagtcattggtaatagtaagtacacagaaaaaaacacaggatattacaacactgtgagtgtagtatgtatattactcttatccctagcagaatgactaaaggatgaacgagtaacaacaaaacaacaaaaagaactacaacaacttttcgagacatagacagtacaataacgtataaatagaaacaaaaaagttaargagcagggggacaaagttaagatgtagagtatttgtcagttttctttttgcttatttgcttgtttatttgtttaagcaaacagttttaagttgttattagcttaaaataatgggttataaga

SEQ ID NO: 819326 - DNA, 500 bp, Homo sapiens
tagaatagtatatccagtgaaaatatctttcaaacaaggagaaataaagactttcctagacaatcaaaagctgagggatttcatcaacaccagacctctcctgcaaaaaatgctgaagggagtacttcagtcataaagaaagggatatcagtgagcaataggtaatcacctaaaagtataaaagtcattggtaatagtaagtacacagaaaaaaacacaggatattacaacactgtgagtgtagtatgtatattactcttatccctagcagaatgactaaaggatgaacgagtaacaacaaaacaacaaaaagaactacaacaacttttcgagacatagacagtacaataacgtataaatagaaacaaaaaagttaaagagcagggggacaaagttaagrtgtagagtatttgtcagttttctttttgcttatttgcttgtttatttgtttaagcaaacagttttaagttgttattagcttaaaataatgggttataaga

SEQ ID NO: 819327 - DNA, 541 bp, Homo sapiens
acctgaggagagatgaccaggaaaatccagagagaaggcatttgctgggctgaggggaataaactgcctgtggaaaggtggattggtccttggatctcttcacctgggggctgtcaagttgggacagagccaagataagagccctttttcaaatgtgttctttcatcttttaatggagttggtttctttggcaggctagcaaatcctgcagggcccctgtgcagccactctggagggtcagggagacactctgtggttggcacctgcgaaggagcaggggtgagaaatgaggagaaatgtctgtctgtgccgaacccccagtggagagcgtgtgggctcggaattagggtaaatgaaggcacgggcgcactgcagacccctgatgggagaggcagtgggcgatgcttccatggtgaaatggaatactgggagccaggtgccctggcgcctcatggcaacgcctccttactctaggycggcctccctggcattcctctttgagctgatgagggaccagaccagtcccaggttagcacctgga

SEQ ID NO: 819328 - DNA, 541 bp, Homo sapiens
acctgaggagagatgaccaggaaaatccagagagaaggcatttgctgggctgaggggaataaactgcctgtggaaaggtggattggtccttggatctcttcacctgggggctgtcaagttgggacagagccaagataagagccctttttcaaatgtgttctttcatcttttaatggagttggtttctttggcaggctagcaaatcctgcagggcccctgtgcagccactctggagggtcagggagacactctgtggttggcacctgcgaaggagcaggggtgagaaatgaggagaaatgtctgtctgtgccgaacccccagtggagagcgtgtgggctcggaattagggtaaatgaaggcacgggcgcactgcagacccctgatgggagaggcagtgggcgatgcttccatggtgaaatggaatactgggagccaggtgccctggcgcctcatggcaacgcctccttactctaggtcggcctcsctggcattcctctttgagctgatgagggaccagaccagtcccaggttagcacctgga

SEQ ID NO: 819329 - DNA, 569 bp, Homo sapiens
tttggatatatacccaataatgggatygctagtattgaaatggtgtttctgtcttaagtctttgaggaattgtcacattgtcttgtacaatggctgaattaattaacactcctaccgacagtgtataagtgttccttttctctacaacctctccagcatctgttatttttttgacttttaaatgatagctatccattctgactggtgtgagatggtatctcattgtgtgtttttattttattttatttttttgagacaaagtctcactctgttgctcaggctggagtgcggtggtgtgatctcggctcactgcaacctctgcctcccaggttcaagtaattctcctgcctcagcctcccgagtagctgggactacaggtgtcgcctccacgcctggctaatttttaaacttttttagtagagaaggggtttcaccatattggcctggctggtctcaaactcctgaccttgtgatccatctcccttggcctcctaaagtgctgggattgcaggcgtgagccaccacgcaagtggccttttttttttttttttttttttttgacagagcct

SEQ ID NO: 819330 - DNA, 618 bp, Homo sapiens
ctctggacacaccatctttaagaactgtaacactcactgcgagtgtccgtggcttcattcttgaagtcagtgagaccaagaacccaccaattctggacacattttggcgacccagatgggactatcgcctttcaccaagtggtgagactatcgtcaagtggtgagaccatcacctatcacaaagcgctgagactatcgcctatcgccaagtggtgagtaccattggacctctttcgcttgctattctgtcctatttttcctagaattcgggggctaaatactgggcacctgttggccagttaaaagctactagtgcggctgctggactaaagacacgagtgtcaggcattctgggaaagggctctctaacaacccctgactctttggagttgggagcgttggtttgcctggaaccagcttccgcatttcctgtacttctgggctgagccaagggtcagcagagaggaaagtcattcagctccgggggtcccgacaagttggttgaccttgcagccatgarcagaactctcaaagtcatgtcacccaagcgagactcacccatctattctatctaccctgacatttgcccgttggatcctaatgcctgccatacaaact

SEQ ID NO: 819331 - DNA, 587 bp, Homo sapiens
agcatacaaaacctaagaatacggactcctatgtgaaaaccttctgatgtaaaatgaagtaaaatgagataacaatctaaaaatgtttcagaagaaagggaaaaaaatataccataagaaagcacagtttttgccaggtgcggtggctcacgcctgtaatcttagcaggttgggaggccaaggcgggcggatcacttgagatcaggagttcaaaaccagcctggccaacatggtgaaacctcgtctctactaaaaacacaaaaaattagcagggcgtggttgggcacctgtaatcccagctacttgggaggctgaggtaggagaattgcttgaaccgggagtcagaggttgcagtgagccaagatcgtgccactgcactccagcctgggcaacagagagagactgtgggcaacagagagagactgtctcaaaaaaaaaaaaaaaaaaaaagaggcacagtttttgggtattttctttgacatatccaggtggatgyctacaggaatgtctgtatacttcactaatttagtttaaaaaaaaaaaaaagcattgtgcaacagtgaatattggctgggctatctgatgct

SEQ ID NO: 819332 - DNA, 606 bp, Homo sapiens
ctcaggggcccttccatttggttttctgcagctgtggattcccaaccaacagtcattgtgatcttccaagccagaatgtgctctgggctggagtggcagcccsttattctggcgttcaagagcgtgggcaccctttggctatttctagcatttgtctggttagcctttgggaaacgactataagataataataatgggtactaatttattgggcacatttaatactcaaagcactgttctaagcactttacacattaaatcatttaacgctgtaaacagccatgtgatggaggacatcattttacagataaggaaactgaggcatagaaccaagatttcataacaagtgattgctaacatatagatgcaagcccagtctgactccagagctttgctcttaactactttgttacactgtgctgtagactggtttctaacattgtgctaatcaaattaatgttctccccttaagtgaagccagatttaagaccatacttatgctaataattctgacatagatttaaatatttttagaaatcctcttttggattacctgggtcatttcacttaatttctctggacattatctgtaaaatgaggggacaa

SEQ ID NO: 819333 - DNA, 637 bp, Homo sapiens
ctggctaattttaatttttttttctttttttgagacggagtctggctttgttkcccaggctggagtgcagtggcacaatctcagctcactgcaacctccacctcccaggttcaagtgattcttctgtctcagcctcccgagtaactgggactacaggtgcgtgccaccacatccagctagtttttgtatttttagtggagatggagttttgccatgttggtctcaaactcctgacctcaagtgatctgcccacctcagcctcccaaagtgctaggattacaggcatgagtcactgcacctggcttaattttaatttttttaattttttgtagagatgagtctcactatgttgaccaggctggtcttgaactcctggcctcctaaagcactgggattacaagcatgagccaccatgcctgatccataaattgttctactgataccatttggttttgttagaatttgggggggctgtagaaaacaaggttacagtcttcattagtatttctttttagcaataacaacaaaataggcaattagaccagtgttcatttggtacagtctttaaatcggtcatccaattaacctttaaaaagtaggttatgctcttaaattgtattggttctttaatatgtgt

SEQ ID NO: 819334 - DNA, 512 bp, Homo sapiens
taattaaatactttaacataaaagaggaaaactcaaatttctttcccygacagcttctgctgcctagaaaaaagtgttggcaagaatgtcagaaaagaaccatcagcaaaaatgacagcctcacacagaggctgaaagcgagactcccaacgtgtagggatcaggcgtgaactttagagacagacagcctgggtttgaataccatctgctccactggcttgtctcctgaacttaacataacctctctgatgctcagctgccataccgtcagatgacaacaggaatccctgcctcacacagttaatgagaaaatgagattatgtatgagtgattatgcaggcaatcattccacacagtggctgtcacataaaaagaactaaattgaggtctgtaatcccaacactttgggaggccgaggcaggtggatcacctgaggtcaggagttcgagaccagcctggacaacatggtgaaacccccgtctctactaaataaaaaaaattcattgggcatg

SEQ ID NO: 819335 - DNA, 657 bp, Homo sapiens
ttttggcctgcttaagttgtaccacatttatctgtggttctgttaactttttcttcattctaatctgtttttctgatmatgaattagctattaattttatcaagcttatttgttcttacttctgtcaactcaaatccactgatgagcccttcaataattttttattattgtacttgtcaactttaaaattccttttgattcttctttatcatttatatttatgtgttgatattctctagttgataaaaacttgtcattatactttaattcgttagatatggtccctggtagtcctttgaaaaaatttataatagctgttttgaagtttttgttcactaaatctaagatctgagctctgtttaaggcagcttctggcacctgcttttctctttttctctctatagcttacatttttcaggtgttttgattcttatatttttcttttcaagagtgacaccactgttccatgagtgggcatgggagtggaggagagggttgatagcccctggtcttcccatcattctttcctagtatgaacttctgtcataccagttagctgtggcaggaaagatatgggccctagtattattttaacatgtctggatagagattctgccctatgtgtgtcagctgggtgagggaagggaagcctaatcc

SEQ ID NO: 819336 - DNA, 657 bp, Homo sapiens
ttttggcctgcttaagttgtaccacatttatctgtggttctgttaactttttcttcattctaatctgtttttctgatcatgaattagctattaattttatcaagcttatttgttcttacttctgtcaactcaaatccactgatgagcccttcaataattttttattattgtacttgtcaactttaaaattccttttgattcttctttatcatttatatttatgtgttgatattctctagttgataaaaacttgtcattatactttaattcgttagatatggtccctggtagtcctttgaaaaaatttataatagctgttttgaagtttttgttcactaaatctaagatctgagctctgtttaaggcagcttctggcacctgcttttctctttttctctctatagcttacatttttcaggtgttttgattcttatatttttcttttcaagagtgacaccactgttccatgagtgggcatgggagtggaggagagggttgatagcccctggtcttcccatcattctttcctagtatgaacttctgtcrtaccagttagctgtggcaggaaagatatgggccctagtattattttaacatgtctggatagagattctgccctatgtgtgtcagctgggtgagggaagggaagcctaatcc

SEQ ID NO: 819337 - DNA, 280 bp, Homo sapiens
tttggcaatacctctgtctgctcacatttataccagcaaagtgtacacctcgttaacagtcctgttattccgcatctgtgcccttgttgctcaggatgtcagacaatgctgctaatgagcctgaragtgtatgtgtaattcctttagaagatgaatacaaatgttagcttggccttcatcccctcaaaggtgtactgtttgtcacaaggcagagaaaaaaatatgagattcagaatagattagtaaaactctacctcattgtcataaaaaaaaaccctga

SEQ ID NO: 819338 - DNA, 562 bp, Homo sapiens
taattctttcccaagaccgatttccagaatgatatttcataagttttcttctcagattcttatagttttagatcacacatttaaatttttaatccatcttgagttaatatttgtatatggtaaaaggaagcttcaatcctctgcatatggctagccagctatcctaacagcatttattgaacagggactcttttccccattgcttcttattgctaactttgtcaaagatcaggtgattgtaggcgtgttgctttatttctgggttcttttctctgttccattggtctatgtgtctgtttttgtaccaataccatactattatgattactatagacttatagtatagttttatgtcagatagtgtgatgtcttcatctttattatttttgtctagtattgtgctggtgatttggactcttttttggttctatataaattttagagtaattttttttctaattctgtgaaaaatgacaaagtattttcatagtaatagcggtgagtctgttcccctgcgcagtattktcattttaacaacactgattctccctatccatgggcg

SEQ ID NO: 819339 - DNA, 636 bp, Homo sapiens
ttatctgaccaactaatgaaagaagttacttggtwactattctgtaatcttatttaattttctatgtaagccctaatcagatgctgaccccatgagaatgtaagcctcatgggagaatgaattttgtgtctcttggttctacatcagtgcctagggcagtacatgatactaatgtatgtcaaatgtgagttatgtgacaaacttttgagagatgaaaaaatctaatgggatgtaataaaaatagctatataaattgtggtcctatcacataggagaaagaggaacaatattttagaatagaatttggcagtaaattaattagttgaattcaatgaacagatcagaaaatttggttggtaggttctgatttaaatcaggtgaatatgtaggattatagttcttagtaaatcatagaaatttgtttttgtgactataggggttcatggtctcaattagtatattaagcaagaattgacaccagcattctgatcaaatatctctatggatgatgtaaaaatactgaaaagagaatcctgatttttttggaataatacaattggtagtagataagcactgaatatgaattttagaatagtcagaaataaatattcaaaatttcgaagccaatcaaactca

SEQ ID NO: 819340 - DNA, 612 bp, Homo sapiens
cagagctgctttaatcatgtaaatcttgctctctgccttctttgtgcagtgtttgttgctytaccaacatgggatgcctttttctccttccttcttgcttgacaaattcctgcacatcacttcatatgtcaaatttctgaaaagatctccctgccctgtctcctctgagttgtctaattgtcactccaatctgctgccctcataccctgaacttactgtgataatgtcacttttcacgtttatttgagcatatcctgatgcagtgcataacacataatagccactcaataaaaccagttgaattaattcattcttccatcctccttcatcttctccatttttttcatgccttctctctctttttcttctcttttattcatttgttatattttaatcaagcatattatttaaaatgtataacctcgggtgttttccattaactagcttattatcactacattctctaattttgtgtcacaacattaaaaaatcttcagtgttgtgattttaactgttctatttgttcagtgacatgtgtacaactatttatcttaaaaaatagaactataaaatgctttacattttgtttgtttttagtggtacaagccaact

SEQ ID NO: 819341 - DNA, 646 bp, Homo sapiens
acaattcatctcctgtttatttatttctgactctgaaactgactaaaagggtgtcactaagccacttagtcagtgatttaacctgaagaygggaatagtatttaatgaatggaaaccttcagtggctctgcctgcagagggaggaccatcaacatggaatcctaggacaagaaggaaagaagatgggggtgggagtggaagtgtggatataactataagaatgtctcatatatttatatatatatatgtacatttatatatatatacacacacgcacatatacagtcatgctctgcaaaacaatgcctcagtcaatgatggactacatatatgagtggtcccatagattataatggagctcgtctgtataggtgaaccattttttatcttttatattgtattttaatgtactttttctatatctaaaaatgtttagttacacaaatacttacaattgcctacagtattcagtagaggaacatgctgtacaggtttgtagcttacaataagctatactatatactatacacctaggctgtaccatggtgcataccatggggcatacatatataaatcatggtgtataccatgtaggtataacccaggtgtgtagtagactatatcctctaagtgtatgtaagtatac

SEQ ID NO: 819342 - DNA, 618 bp, Homo sapiens
ctaaaactcagcgaaatgtgattcaggctggagatgtgggctccaccctgtgcggctctcttcccactgattgcgggtttgagtctctctttaaagaggagaagagactgtttaaagcttactcccatcttactagaatattctatagggcaggccctctcttcagagagtggaggtgtggccaatccacagaattgatttgaatgtttaactctaggctcattttcttgcactgagcggtagagatcagttcagaaagcagggaggaaaaagttgctggaattcacatctcattttcagcaaattcaccacaatgaatttcgtcttataaaaccatttcttaataaatgattctatttaggagaggatttcccaactaaattctttttgattgtatgaactcctcttaatatgcttaagactttaaaaatgttattttatatccacattgtaaaatccccacattatataaaatcaagtatacttgagcaaatgctgacctgtgtctacatagatgtataaatgattgtattgtggagtgagggttttaacagattttggttgtrccagtcctagtggaataaagttgatccttaaatatttattaatgaattatct

SEQ ID NO: 819343 - DNA, 694 bp, Homo sapiens
gtgttagccaccttgcccgggcctatttttacttagttgagattatattatatacattgagccacctctcccagccctatttttatttaattgatattatgttatatacgttgtyctacaatttccttttaaacacattttatgtagactttcatcagtgtcaatacctatggcagtccatagcaagaatgtaccataatttatttaaccatttccctattatataagattgtttctagtttttccctagtaaataatcctgcaaatataggcacagttaaaaattttaaacttaataccagtatcttccatatacattgcactattgtgaactcctaccaatagtgtataccagcactcttattccctaaatccatgctaaaagtgaattttagcaatatttaaaatttttgccaatctaagggcataaaatattgtttttaactttaatttcctggactattagtctggataagcatcttttcatatatttgttggtcatttgaatttcttctgtgacttgcttcttcataacccttgttcattttccatttatctccctccttcccttccttatttcctttcttccttccattttaaaggtgaaggagttccttgaaaatgtggaatttttttaagtctctttcacctttttttgagaataaactataagcatttttttcaagtaggagga

SEQ ID NO: 819344 - DNA, 572 bp, Homo sapiens
aataacattagacttagcagccctgactcaaaacttctgcaaagaytgatcttgttttgcttgtgatggggaggatcaaaagttaaataagattaaccaggtaacccaaatcttttagaaattactacttcttggaatataagaaaataaacgtagaaagaaactaaactagaagaaaggatgaacaaccatttggtctagcccctgtcttctggcccatgaagtttaatgtaaattatagacaggggatggtggatcagagaatgactccataatgataaattaatttttcctgaattgattctcttcgtggtcaagaaattatttttcatatccaactaaatttttttttaatttatttattttactttttagagacaaggtcttgcttttctgcccaggttggccttgaactcctgggctcaagggatcctcccacctcagccttccaagtagctgggactgcaagcatgtgccactgtgctttgcttaaaaatgtttatttttatttaaataaatttccttttgttctgttcttagtagtcaccctgatgaattgatcagaaatatcc

SEQ ID NO: 819345 - DNA, 638 bp, Homo sapiens
catcgaatggactcaaatggaaatatcatcaaatggaaccaaatggaatcatcgaatgrcatcgaatagaaacatcaatgaatggtatctaagggaataatcaaatggacttgaatggaatcttctaatggacacgaatggaatcatcatcgaatggaatcgaatggaatcatcaaatggactcaaatggaatcatcatcgaatggaattgaatggaatcatcgaatggacttgaatggaatcatcttcaaatggaatctaatggaatcagagaatggactcgaatggaatcatcaacgaatggaattgaatggaatcatcgaaaggcatcgaatggaatcatcatggaatggaatggaatggaatcattgaatggacccgaatttagtcatgatcaattggaatcgaatggaatcttcgaatggactcaatttaaatcatcatggaatgcaagtgaatggaatcatcatcgaatggaatcgaatggaatcatcatcaaatggaatacaatggaatcgtcatcaaatggaatcaaatggattcatcatccaatgtaatttaatggaatcatcatcgaatggaattgaatggaatcatccaatgtaatagaattgaatctccatcgaatcgaatcaaat

SEQ ID NO: 819346 - DNA, 638 bp, Homo sapiens
catcgaatggactcaaatggaaatatcatcaaatggaaccaaatggaatcatcgaatgacatcgaatagaaacatcaatgaatggtatctaagggaataatcaaatggactygaatggaatcttctaatggacacgaatggaatcatcatcgaatggaatcgaatggaatcatcaaatggactcaaatggaatcatcatcgaatggaattgaatggaatcatcgaatggacttgaatggaatcatcttcaaatggaatctaatggaatcagagaatggactcgaatggaatcatcaacgaatggaattgaatggaatcatcgaaaggcatcgaatggaatcatcatggaatggaatggaatggaatcattgaatggacccgaatttagtcatgatcaattggaatcgaatggaatcttcgaatggactcaatttaaatcatcatggaatgcaagtgaatggaatcatcatcgaatggaatcgaatggaatcatcatcaaatggaatacaatggaatcgtcatcaaatggaatcaaatggattcatcatccaatgtaatttaatggaatcatcatcgaatggaattgaatggaatcatccaatgtaatagaattgaatctccatcgaatcgaatcaaat

SEQ ID NO: 819347 - DNA, 614 bp, Homo sapiens
catcatcgaatggaatcgagtggaatcatcattgaatagaatcgaatggaatcatcgaatggaagcaaatggaatcatcatcgaatgtaatcgaatggaatcatcaaatggaattgaaaggaatcagcatcaaatgaaatcaaatggaatcatcatagaatagaatcaaatggaatcatagaatggaatcatcatcaaatggagtcccatggaatcatcaaatggactcgaatggaatcatcatagaatggaattgaatggaatcatcgaatggaatcgaatggaatcatcatcaaatggaaccgaatggtatggtcgaatgcactctaatggaatcatcaatgagtggtatcgaatggtaacattgaatggaatcgaatagaataatcttcaattggcatcgaaaggaatcactgaatggatacgaatggaataatcatagaaaggaatcgaatggaatcatcccatggaatcgaatggaatcatcactgaatggmctagaatggaatcatcgaatggactagaatggaatcatcattgtatggaatcaaatggaatcatcgaatggaatcgaatggaatcatcattgaatgtaatcaaatggaatcatcatc

SEQ ID NO: 819348 - DNA, 618 bp, Homo sapiens
tcgctgctccaggatccagtccaggatcccacactgcattttgttatcacgtctcattagtattttcaaatctgtgacaattcttcaacctttccttgtcttttatgaccttgaaacctttcatgtgcactaatcagttattttgtagactgtccctcagttcgggtgtgtcttgttttcttttttttgtttttttttttttgtttgtttgttttaaagaagtttgttgttgttgtttttaatttttaaaaataatttcaacttttatgttagattcagaaggtccctgtacaggtgtgctgtattagtcagggttctcttagaaggacagaactaataggatatatatatataaaggggagttaatattaagtattaactcacatgattagaaggtcccacaataggccatctgcaagctgaggagcaaggagagccaatctgagtggcaaactgaagaacttggagtccgatgttcgagggcaggaagcatccagcacaggacaaagatgtagactgggaggctaggcctgtcttgtcgcttcatgtttttttgtttttttttttttatactttacrttttagggtacatgtgcacaatgtgcacctttgttacat

SEQ ID NO: 819349 - DNA, 614 bp, Homo sapiens
tgcataaaatttgtatgcttaaaattacaaaatgataattttactgatcaaaaaagtgataaataattgaagagatttaccaggtacattgattggaaaactcaacatagtaaagayatcaatgctcctgaaatttatctactggtttaatgtagttcttatcaaaatcccagcctgtgttttgttgttgttgttgtttgggtagacttacacaaacttattctaaaaattatatgggaagaccaaggacctaaaaaagttaagacaactttttaaaagaataaaatggaagcaattcctctttttgatgttaagttacagtaagttgctgtaaggataaatacatataacaatggagcagaatatagaacccaaaaatagacccacacaaatatgcccaaaccttttaacaaatggtactgaaacattaagaaaagctcccacctgaatttcataccttataaaaaaattaattaaaaatatatcatgaacttaaatgcaaaacattaaacttatttaaaaattaattggagtaaatcttcaggagtcaatactaagtgggcagttattatacttgataccaaaattatgatccattaaaaatcaataaatta

SEQ ID NO: 819350 - DNA, 550 bp, Homo sapiens
gtcccacctatttatctttgtttttgctgcatttacttttgggttcttggtcatgaagtctttgcctaagtattgtctagagggtttttccgatgttatcttctagaatttttgtagtttcaggtcttagatttaagtccttaatccatcttcagttgatttttgtataaggtaagagatgaggaggctgggcatggtggctcatgcctgtaatcccagcactttgggaggccaaggcaggcagatcacgaggtcaggagttcgagaccagcctggccaatatggtaaaaccctgtctctactaaaaatacaaaaaattagtcgggcctggtggcacgtgcctgtagtcccagctacttgggaggctgaggcagaagaatcgcttgaacccaggaggcggaggttgcagtgagccragatagtgccactgcactctagcctgggtgacagagtgagactccatctcaaaaaaaaaaaaaaaaaaaaaaacagagatgaggatccagtttcattctcctacatgtagttcaccaattatctcagcaccatt

SEQ ID NO: 819351 - DNA, 621 bp, Homo sapiens
taaaatgactccttctgtgcctacaagtcagcctctttccccagtcaccactgtcatcacacaaatgggctmataaagtagccatggtggcaggaatagaggttatgcacaggctcagaaatatggacttccactcaccaaagccaacctggctacagccactgcagagcacccaatctgccaggagcagagatcaacactgaggccccaatatggcaccattccatattgggaatgatcagccagacacctgacagcaggttgactacaatggattgcttccatcatgaaaggggcagagttttgtccttactggaatacacatttactctggatacagacttgccttccctgcacacaatgcttctgccagaactatcatccctggacttacaggatactgtatccactgccatggaactgatttcatagcaaatgaagtgaggcaatggtcccatgctcatggaattcactgggcttaccatattccccatcatcctgaaacagctggcttggtagaatgatggaatggccttttgaagactcagttacagtgctagctaagttgcaatactttgcagggctgggtcaagtttcttcccaaggctatatatgctctca

SEQ ID NO: 819352 - DNA, 501 bp, Homo sapiens
  misc_feature 1, 2, 3, 4, 5, 6, 7, 8, 9, 10, 11, 12, 13, 14, 15: n = A,T,C or G
nnnnnnnnnnnnnnntattcctatacagcaaaggcagctcactctgatcggggtgctactaggaagggtccctcaacccttcctrgggaggagcagggctgcgtcctggccacccttcttcaaactgacagctaagtgggtgatgtgagtacgtgtatccttgctatagagagcagttccctttctcctgctcataaggttttattgtcagaaacagggagggtttcaatggattatttatctattactatttagtgactcccagaaacaagattcactatatgcaaagagcacagaaggaatacataggcaacaagaggtccacccatcaaccatctgagagtggacaagtcagggacttccctggaccccaattttctcattcagtcaatgataatatctgccctgcttagttcacaaggttgttaaggaaattaaatgagataatgtatgcaaatgagctcataaagagatgcataacagaacactttgagagggact

SEQ ID NO: 819353 - DNA, 631 bp, Homo sapiens
  misc_feature 451, 452: n = A,T,C or G
tcattcattaaacctcagggagttttcctggagtatattatttaaggggaaagaggtaagwaaacataataatagttaattgatttcttattcaataaacagaaaatgattctaggaaataaaattaaggttcactgttcatcaggtagactgccatacttcaaattactcaaatgccaaatataacttctgatgtctccctgattaattatagattttgattctaagatactatacgtacttggatattcagctagggtttttcgtttttgttttagaatttgtttctaatcaaatcatttgaaaatttaagtaggaaaataataatggttcagaaatgtacttaaaaaattaaaactcacttatgtaaccttcatactattgtttttaatctccaggcaagtaacactaaatagactttgctgtggttgctcaactgttagactctgcnnatatgatcatatggaaatctctagaacggcagaagtttttcaaggtgcgttcactgattagaacctatccataaattatttacactgtggcaattcattaatttgaataatgtgcttgcttttttccccttaagatctgaaatttctatttgaaaataaagtggttttttcaaatacaa

SEQ ID NO: 819354 - DNA, 474 bp, Homo sapiens
ccaaagaacgcatgcaaaggaaggaaattcaagtgtttccttcctgcctgctgggtggccacccacaccctctctcttctcttgggccacttgtccctaacttcttttcttcatgaagatccttggcagctccatggaggtgaaaagggctatgaatgctcttcttcctcataactctctaggcttcctggtgaacatggagaagaaaccattttcttcattcatcagtggctcagggatctgtgaaccttcccacctgccaccctcatgcctggagtgatatgtgcctggtcattagggagcactcttttcccagctgccaccctcatttctggagtgatatgtgcctggtcattagggagcactctyttcccagctgccaccctcatttctggagtgatatgtgcctggtcattagggagcactctcttcccacctgccgccttcacgcctggagtgatgttgcctggtcat

SEQ ID NO: 819355 - DNA, 474 bp, Homo sapiens
ccaaagaacgcatgcaaaggaaggaaattcaagtgtttccttcctgcctgctgggtggccacccacaccctctctcttctcttgggccacttgtccctaacttcttttcttcatgaagatccttggcagctccatggaggtgaaaagggctatgaatgctcttcttcctcataactctctaggcttcctggtgaacatggagaagaaaccattttcttcattcatcagtggctcagggatctgtgaaccttcccacctgccaccctcatgcctggagtgatatgtgcctggtcattagggagcactcttttcccagctgccaccctcatttctggagtgatatgtgcctggtcattagggagcactcttttcccasctgccaccctcatttctggagtgatatgtgcctggtcattagggagcactctcttcccacctgccgccttcacgcctggagtgatgttgcctggtcat

SEQ ID NO: 819356 - DNA, 474 bp, Homo sapiens
ccaaagaacgcatgcaaaggaaggaaattcaagtgtttccttcctgcctgctgggtggccacccacaccctctctcttctcttgggccacttgtccctaacttcttttcttcatgaagatccttggcagctccatggaggtgaaaagggctatgaatgctcttcttcctcataactctctaggcttcctggtgaacatggagaagaaaccattttcttcattcatcagtggctcagggatctgtgaaccttcccacctgccaccctcatgcctggagtgatatgtgcctggtcattagggagcactcttttcccagctgccaccctcatttctggagtgatatgtgcctggtcattagggagcactcttttcccagctgccrccctcatttctggagtgatatgtgcctggtcattagggagcactctcttcccacctgccgccttcacgcctggagtgatgttgcctggtcat

SEQ ID NO: 819357 - DNA, 474 bp, Homo sapiens
ccaaagaacgcatgcaaaggaaggaaattcaagtgtttccttcctgcctgctgggtggccacccacaccctctctcttctcttgggccacttgtccctaacttcttttcttcatgaagatccttggcagctccatggaggtgaaaagggctatgaatgctcttcttcctcataactctctaggcttcctggtgaacatggagaagaaaccattttcttcattcatcagtggctcagggatctgtgaaccttcccacctgccaccctcatgcctggagtgatatgtgcctggtcattagggagcactcttttcccagctgccaccctcatttctggagtgatatgtgcctggtcattagggagcactcttttcccagctgccaccctcatttctggagtgatatgtgcctggtcattagggagcactctyttcccacctgccgccttcacgcctggagtgatgttgcctggtcat

SEQ ID NO: 819358 - DNA, 613 bp, Homo sapiens
aaatgtaggctgggaggctagccccatctgtctttcacgtttttctgmctgctttttctttgctggcagctgattagattgtgcctaccagattaaggatggacctacctttcccagcccactgactcaaatgttaatctcttttggcaacaccctcacagacacacccaggatcaatacattgtatccttcaatccaaccaagttgacactcagtattaaccatcacagtatatacgcagaaaagcaaagaatattatagcactgcaactgtggtatgtaaactgtggtatgtggtactctgatcttaagtagaaagactaaaaaaaaatgaagcaatcaaaaataactgcagcaacttttcaagacctaggtagtacaataaggtataaatagaaacaacaacattttaaaagttggggacaaagttacagcatagagtttttgttaggtttctttttgcttgtttgtctatgcaagcagtgttgttaacagcttaaaagaataagttttaagatggtatttgcaagcctcatggcaacctaaaaattaaaaatcatacaacagacacacaaaattaaaagcaagaaatgaagtcataccactaaagaaaa

SEQ ID NO: 819359 - DNA, 623 bp, Homo sapiens
tagaaaactctaaagactccactaaaaggcttcaagagctaataaactatttcagtaaagtttcagcatacaaaatcartgtacaaaaatcagtagcacttcagtacagaaataatgtttaagctgagagccaagtcaagaatacaatcccatttataagggccacaaaaataagacatatagaaatatatttataaaggaggtgaaagatctctacaaggataatgacaaaacactgttgaaataaatcaaaaataacacaaacaaataaaaaaatccgagctcatggattagaaaaaccaatgtcattaaaatgaccatatgcctaaagcaatctactgattcaatgatatttctataaaaataccaatgtcatttttcacagaattagaaaaaaactattctaaaattcgtatggatccaaaaaaaacgcctgaatcactaaatctaaccaaaaagaacaaagccagaggcatcacttcaaactacactgcagggctacagtaaacaaaacagcttggtactagtacaaaaacagacacgtagacaaatggaacagaatagaaaagtcagaaataaagccgcacacctatagccatctgatcttcaacatagtcaataaa

SEQ ID NO: 819360 - DNA, 541 bp, Homo sapiens
ttttgagttctgagcacaggctgcctggaaccacaatagctgctgctaatggaacactgtgggtgtgagatctgcctttccaagtgagtggcagcaaggtggggcttactgccacctgctaaccccactccccttgcagatccttttgtgcagcagaggcagctgtgctcctccatggaacatcacaccagtagccagataattgccctccaattccgattacgcccattgctttcacccccaggtggggagccagagcatagattgcctggcccagcccccgcctggctttgcccctacaccctccctggtagcttaacacaacggacagggacttttgggaactccatcgccctgcccactgccagagtacttaccttgggtaacgtaaggcaagcacaaatctcaccactaccaccgcagctggctctcatttgcaagtttcacctcttggcgggaggccagcggacacagtccattacggcatctgcagcacartaactgggcccaagaaggagaaaacttttgtgcaaccgcagct

SEQ ID NO: 819361 - DNA, 623 bp, Homo sapiens
cgaagtgggaggatcacttgagtgcaggagttggagactagcctggataacatggcaaaaccccgtctcttactaaaatacacaaattagctgggcgtggtggtgagtgcctgtccccagctactcaggaggccaagacacaagaatcgtttcagcctggaaggcggagatggtagtgagctaagctcgtaccacagcactccaacctgggtgacagcatgagactctgtctcaaaaaaaagaaaaaattatatatatttttttttctggaaaaataaatacatttttgaataaatgaaaaatgtgagttttaaatcagaactgaggtggaaaactagctccaatacttactaggcttttcagtttgggacaaattattattgctttttctgagccttagtttctccatatataaaaataagatttatagtatctattcaacagaattgctataaatgtgttttcaatattgttaataagacagtatgtggagaaagtgaaacccacatacactactggttggaatgtaaaatggtatagctgctttggaatcagtctatcagttcctccaaaggttaaacagagttactagatgacccagyaattccatctctaggtattta

SEQ ID NO: 819362 - DNA, 628 bp, Homo sapiens
tcacataaatatggtcaactgatttttgacataaagcaaaggcaatctaaaggagaaaagataatcctttgaacaaatgatgctgaaaaaactggacatttatgtgcaaaaggaggagtctagacatatatcttatgctcttcacaaaaattaactcaaaattgatcatagacctaaatgtaaaacacaaaactaaaaaatttctagagataacataggagaaaacttagatgatcttaggtatagcaataactttttagccagaacactaaaggcacaatccattaaagaaataattgatagacaaggctttattaaaattaaaagctactgctctgtgaaagacactgttaagataatgaaaaaacatgccacagactgggaaaaaaatatttgcaaaagacatatctgataaaggaatgttagccaaaatatacaaataactcttaaaacacaataagaaaacaacaatccaattaaaaaatggtaaaagacctgaacagacaccaccaaagaagatacacagatgcaagtaaacatatgaaaagatgtccaatatcatatattattagagatatcactcttkaattaaaagaatttaaaaaaatgacatatcactacatgccta

SEQ ID NO: 819363 - DNA, 484 bp, Homo sapiens
tcatttttatccttgcttctcaatgccagccagtcatgaagctccatcagctattctttaatgtttcttatgctcatctctcttaccatacttataatcaccttagcacagggctttttcacacctcatacctaaactcttacaacagaccctaaactactttctctattttagtatctcctccaccaaatcaatcttaactgctactcccttcatcaagccactctcctgatcaaaaaacatcagtggctctcccctgatgacaaaataaagtccaaactcctgaccctggcacttgaggccctccatccagatacaaccaatctttatacatttatcttcaccagtcaaacttcacttattgttgcctcctagcctttgctctgcctgtctctccctattttcctcactttcctttcttagtgttaggaaaccaactgagactattccaggtaactaygatctacccctcttctaaacacct

SEQ ID NO: 819364 - DNA, 569 bp, Homo sapiens
ttgtcttgggatgctttaagtttcttggaaacagtttgatcctttagggtattgtttttaagtttccaagcaggataaggcaggatttatctagtctaatgctagttttaccccacaactgaggcttctaaaagcccttctgaattttctgtgtgatgcaccaaatcatgactatttccacgttggctagtgaagataggactattcccaggcctttatgagcagctgggatgggtctctctaatcctttcagacaattctttttctggcttcatgagttttctcacatgcatctggccgtcgtactcagtagagcactcaagggacccctctgcagatctctggattcctttctctgaagcttgtcattcttcagtactgtgccatgtaatttctagccacctaagtctttttgaacttttagttcaatctcttgactctggaaaataggctttacctgagttcttctrccttgtactgtagcctggaaactctctccaggcagtaagctgggaaaatggtagggctcactcatttgtttactctctctcaagggatactgctctttg

SEQ ID NO: 819365 - DNA, 569 bp, Homo sapiens
aaattatgctgcagtcccacaatggagtatatgtagctataaaaaagattgaagaaactatctgtaatttggtatgaagtgatttccaatgtaatttaatataaatttagaagaatgtttatagartgccatcttttgtatagaaggaagaagaaatgagataacatacacatatctgttcaattgtgcagaaagaaacagaggaagggtaaactataaactattgagactggttatctagagatgatgggtgcaaatggagtagaaaagatggggttggtgtgagtagggtagaatggatgggatggggattagtagttgagtgactacttttcatatatttgtgtatttcagaaccatactactatttctcatactaaatatacaaacaaacaaacatgaatgaagaacccaaatgattacacacagagacaaagggatttaactgtatttcagatgatataaccatactgagcatgtataggggtagtgggtgggactacctaaataacattggaccagtattttgactatgtattttaagtccaaagaataaaagtactaaaaat

SEQ ID NO: 819366 - DNA, 404 bp, Homo sapiens
atttgagcctgggagtgtaaggctgcagtgagccataatgtgccactctactcaagcttgtgtgacagattgagaccctgtctcaaaaaactaaacaaaactgtatatttcargcctgttaatattaacattgttatgcaaaagacttctagaaattttacatcttgcaaaattaaaatgaaatgcccattaaataacatttgaccattttatgctctctctagcccttgacaaacacccttccactttctgtttttatgagtgtgactattttatatatcttagtgaaatcataacatttatcgtttcgttactagtttatttcagttgacataatctcaaagtgtatctttaaatgtgacaagttttttgtgtttttttttaaggttgaataatactccgtt

SEQ ID NO: 819367 - DNA, 445 bp, Homo sapiens
caaatgtgaggaatgtggcaaagcttttaatcaatcttcaaatcttacgacacataagataattcatactaaagagaaaccttccaagagtgaagaatgtgacaaagcatttatctggtcctcarcccttactgaacataagagaattcataccagagagaaaacctacaaatgtgaagaatgtggcaaagcatttagccagccttcacaccttactacacataagaggatgcacactggagagaaaccctacaaatgtgaagaatgtggcaaagcttttagccaatcctcaacccttactacacataagataattcatactggagagaaaccctacaaatgtgaagaatgtggcaaagcttttaggaaatcttcaactcttactgaacataagataattcatactggagagaaaccctacaaatgtgaagaatgtggcaaagca

SEQ ID NO: 819368 - DNA, 500 bp, Homo sapiens
ttctatttaccaaagagaaattaaaacttatgtctatacaaaaacttgcacatgagtgttcatagtttcatttgtaattgcaaatatgtcattattatcatttctattttaccatagaggaaacttgaattcatatggattaagtaaagtgctcagaattcaaaacaacccaaatgtcccccaacagggtaatatattcatacaatacaaacgagccacaaagggatatactgctgatgcacagaatgacatggataaatctcaaaatgattatgttgtgtcaaagaacccagataaaaaaagagtacatgctgtgtgtgattccatttatataaaactctagaaaatgcaagctaatctacagtaacagaaggtagatcagcagtttctgggacagggctgaagacagtaggagagtttgggagaaaakgtatgaggaggaagtacaaaaggggataaggtaatatttgggtgtgattgacatgatcatcatcttgatt

SEQ ID NO: 819369 - DNA, 647 bp, Homo sapiens
aggtgatggcttattttgaagaactgaagaaaccaagcagtcttaaaaaataccagatacagttggtgtggggtcaaggacgcacctgtattgagatttttgaggctctatagaacaactttttggcaatggtattaggtaaacgccttctttcaaaggaacaaatgctgtccaaatgatatcagtttgtggtttgactttcaacattataaatgctagtttttaaaaaaagtcatacagaaaatttaaattttacacggtcaaacagatacgttcattccttttatgatttccatctgttgtaacatgtttaaaagatgtctcctatttaaaaattatgtaatagctcatcatacttttcttttaataacttgtaggtttattctagaaattcaaatatttgatttatctgaaatgtgttacagtgtatggcgtgaggttggtatctaccttaatttaatttttttataaacaattacaactttccctatccattgaatagttccgatttgatttgaatggacacttttgttgtacaataaatcacttatgtacttcctggaatgtgtattctctttcattgatcttaccacataatcttacaccagtaccacatgacacatggktttaatcatgataactataca

SEQ ID NO: 819370 - DNA, 615 bp, Homo sapiens
tatgtatgtaatcaattcatgatactgactccatccaccaaaatcacataaatgttgtaccactamtggccaggtgagttttggcaggttactttaagacttacaaactcagtggggtttttcattttgttttgtttttgtctaaccttggccagcataatttgttctaattttcctatagctagaagtagaaaacacaaaactgtaatataagtatcattcccatgagcattaccctattgatatccaacctctcccaagagttcctagaaagtgtctaggaaagacacatgggaacattgaggtaggtgtttcaagtagaaaaaaaaaaaattcaatgggtagagaaagaccctcactgaatggggataaaaaaattccactccatgttttgggttgaaatgtaatgaaagatgacaataataagcctttttttccttattaaacctgaatcttctcacatttccttgatggcttctgagtggttactaagtgtgcagctcagtgattgccaaaagaaaaagttattttaagaatgaaaagttgccaacattttctgaagggaaaaacactgaatagcaaagagctaatgccatcatgttcatcctgaatatc

SEQ ID NO: 819371 - DNA, 549 bp, Homo sapiens
taggtgcataaaattgcttatgtttgtactcctttaagaaaatacagtaaacgtatatatagaaggaaagttttgtgattttttttccagaggattattttaagaaagattcatcctaaatttccttgaaataccctactcatttaggtcactggggacagattttttttatttttaaaaattaaattgttaccaaaactttcacgactacacctgttgcataaggtgaagcagtttatataaaatggatacaatgtgatatgatattatcagaatttagctgtgacatatttaagtataacttacaggtattggtcatggagcccaaaccttagcacacaagaaaaatatcctatgttgtactaacatgaacagtataatttttttaaaaggatgtaggtatctctgcctatagataaatttataaataaaagaatgaaattaatcaattaaagcatcctttcttgataaayacctgtgctatgtacaattcacccgattaacttatgtagaaaaatattgatcctccttatacaactgtgtttgctt

SEQ ID NO: 819372 - DNA, 631 bp, Homo sapiens
tcatgctggttgtagatgtcactgtaattatgtaatttaattccataactgatgaaatatgaatgagaaaaaagggggagttattttccatgaatgctatgttgaatgctttgcaaagatttatagaggagaataactcctaggtcttttggattagatacagagggaacaactataaaaattatagaaatctaaaggttttggactcagattacacaacaactttaaaaaaataagatctagccatgataggcaatacattatgggtgaggtttacacaagaaaaccaaaggagaatgcaatcaactccattcaaagaaaatatcttggccttacatcaaagattggtaagtgtaaatttgtacactttaatttaaaataaaatgcaaatccttgcttgaatcaactaccagtcctaatctctttagttaagaggcttttataatatattagtctctttatgaggatttagagtccttctttatgtcattaaaatgccagtactgggcattacatttaactgagtatgagtaaaatctarttatcaaattaaaaaatagtctaacaaagcctaatgtgaacaatctttctaatattagtcaaataagagaatcaaataaataagaagtca

SEQ ID NO: 819373 - DNA, 535 bp, Homo sapiens
accgtttattataaaatcaaactttcagtaagcctctgtcttcccacatgataacaaactkatgtggtgaagctgttgctgttgctgaaactaccactcctccttgtgttgtatagaaacaagctagactgggtgcagtgaattaacgagatttcaccctgtggcctacaaacgctcttctagaagattactgaagggagataggttggtgaatgtaaactcactgactctgtgtctggctaaattattaacaggtagttattagttatctttgtgaaaaacacaaatatacgtttttacttggattgaaattgtatgttttttactaggaatttcattaaaacagtgatgtatgacttccttgactcctggggaaagtgttcttttaggaaagaggctgtgtgcaaaaactaacaagtcagacttgatgtgacttttagggagttttagagctcagttgaagtataagaattgacagaatactcagaacacaagtaaaggcaaattgccttttggtgaggttttgaagtatatt

SEQ ID NO: 819374 - DNA, 637 bp, Homo sapiens
gtctctttttcattgtgcactattatattttatgttatctggtttccaaggaacacatacagatgcaagtattatcaaatttaaacatagctgaaggtcattgaagattttagcatttacctgcaatgcgacttgtccatagtaaccttagtttcagactgtctgtaatacatagtggtagaaaggtttatgtcgtatgggggaaaagccaaaaacatggtttccagattctggcttttagaaggaggtggaaaatttgaagctaagtaccaaagccaagcgcttaggaaagagcattagcaaagtcagcagtgtggccatttaaagtaaatgaaatttacttgaagtttgacttaacctttgcaatttggtcatccgttagaatataaagaagccgtcactaattgcaatttaaatatcttaatttcttggaactttgaaacatacatattcatacttttgctataggaacaagcaaagcagttgcgaaagagaaattgggaagccttaaaaaacatacttgacaacatggctaatgtaacatrctctaccacttggtctgaagcccagcagtatctgatggataatccaacttttgcagaagatgaggagttacaaagtaagaataatggctaag

SEQ ID NO: 819375 - DNA, 479 bp, Homo sapiens
aagtcctttagtttttcctcatctgagggttaaaggccagttatttcttggaatgtccctcaatctgagattctctaatgtttccttcagattagattcaagtgatgtgtcttcagcaggaatatcacaggagtgacgctgggatctcagtgcatcgcagtacatggtttttacttgttctgtcactgctgacgctcactttgatcacttggctcaggcggtggctattcagcttcttcactgtgaagtgactccttttctccttaggcctaattagtattttgtcaggaggaattttgaaaatataccccgtttctcatcagactttcaatgtatgtatttacactgatattttygatatgtttatcttattcaataggtcatattccattacaatcattatttatttgctactcaaattgggcaaagggagcccttacaagctggtgtctgtgtccttttcatcaggctgcctcact

SEQ ID NO: 819376 - DNA, 584 bp, Homo sapiens
tgaggtcacattctgagatacaggaagtaagaatgtggggaggaacaaaattcaacacacaacaaatacatatgtgataaaaccattgaaaagggcaagtagataataaacrtacaattcagagtccagctccaaggggctggcaggagagtgggtatgagatggaggacagagactaaggtaagttctagcccttgggaaggtgatgggtttacaagtgttcatgacagtcatgctttacaacttcagtgtgtcatgaattttggtttatgtatgctgggtctatattttaaaatataacaaaaaagaaagcagaagaaagtgagagagtgatttgcacactttttgaaaacaagagaattgaagtccctcaatcataaacagaactcccctccagctcagacgctacaaaggtggcagcgagtctttataaaaactaacaaataattaaggtcaatggtaaatagagttccatctgtgaaacagttccctttttctaattatttataactatcatggttagcactatagtaaaacacatatccttgacttgatttaaaggatctgggaaatatgtcatcctt

SEQ ID NO: 819377 - DNA, 514 bp, Homo sapiens
ttttatctctatttcaatgttacaatcttcaaagctattaaaaacccacatttgagaacacctggtaaagctctatagcttgattgtaaagcatcttttgagaggaaacaaagtaagacaacaattgtctgtgaatgacaaaatttccagggtagttaaaaacatgactgacaaagaagtttagttgtctcagtggtttacaataactttagtaacttttatgattgatagcatatacttagacattaaaattttagaaatcccatacaagtttgaggcatatattagtattcatcaaaatataacttaaataagattggacatcattttggcaatctcatgtgactaaacatgtcaaataatcctgtttaccttttctctgaatgtttccagggccctcagaaccattcagaaagccaggcaacaggaaagacaattttaaatcttgaagtttgattttgggatgcctgttaaatgtcagagwtttaaaacactcgatgttatgaaatagaat

SEQ ID NO: 819378 - DNA, 641 bp, Homo sapiens
cctattcaatgcagttctatagtctatggcagggcactcaggagacagaagccggagggtgacttatggcaatgaaatacacrttgacttagtaatgcccattgactttgcatgggacaggctgtagagggctacagtagatgatgatatgatactctttcatatatgtgtacacgcagagacacacacaattttttgttattgttccaaactaaattatatgttatgcagtaaatatagagaaaagattcctggttcagaccttaccagcatgaattactttgcaatcattcctctgtgactgatgattcatttttatcatcttccaaaaaacagcaaccatgcccataccctattgagacaaggctaagggtatataagagtatctgccataccattccccagcctgggcctaatccaaggatgcaagccactcccaatgtggcatttcataaaaattgcatgtgacacatggaagcccctcattagcaggtggtcccattgaccagaatcccagcacagagggtagaaaaaaactgcaaatgatgcccctgcttcttgggtatggttttccagaagaagcaaaagctgtcattagccagttgattcctttgtgggatcctctgaaggcttggtgtcca

SEQ ID NO: 819379 - DNA, 631 bp, Homo sapiens
caggtgtctttttaatataatgacttcttttyttttgggtagatacctagtagtgggattgctggattgaatggtagttctacttttatttccttaaggaatctccatatcattttccatagtggttgtattaatttacattcctaccagcagtgtaaaagtgttcccttttcaccacatcaatcccaacagctatggtttttttgacatcttaattatggccattcttgcaggaataaggtggtatctcattgcggttttaatttgcctttccctgatgattagtgatgttgaacgttttttcatgtttgttggatgttcatatcttcttttgaaaaatgtctatttgtgtcgtttgcccactttttgatgggattattattattattttttctagcttatttgagttccttgtagatttcggatactagtcttttgccaagacatgattttgttagtcacaaagttcctttgccttatttcctccagtcaaggatcatcttaatgatgaactcactaatgcccaagctcaaaagtgacagagaggattctggggaggtacacagagaggcttctgattgtgatcaaaagaggtggcccacatgttgaaaatagcagaaagtttactcat

SEQ ID NO: 819380 - DNA, 514 bp, Homo sapiens
attgtgaatgaatgaatgaatgaatgaatgaatgaatgggtgagtgtgctgggtgttgaatcaggtcctagccttgatgtcctaggaaagggattcttgatgatgagttacaggattctcttttaccagggagaagggatcttggacactaggaatctttacttatccttgaatgctagttaattaggtcattagagggatgttctttatttcatagggtgcatttcaatgcacaaagaggatcaaagttgaagactttggattgtgtgctattaaaatatatgtgataatttttttcccttgaatttaagtttagaaataaatgtgtctccaaagatggatttaaatgttttggatttataggtattaaaccaatgtactttcccttttttgttgttcagagtgcttaaaacttaaatcagagcccagctgttgtgctaaayctgtctcagtgcctaattccattgtcattcttactttacattgcgtttttatcttgggatcataggatggg

SEQ ID NO: 819381 - DNA, 596 bp, Homo sapiens
taaaaaaaaaaaaaatccctaaataaatatactttttttattctctaatttagcgtcatctatttctttctcttttatgtgacctgatccataaacttaataatagagcaaccaatgtctttcccrttcttactgaaagattatcttgggccttgacttttgctccaacattttctggtctgcacctcagatctcctgtagtgctgacagttaaaattacctgacctagtaaacaacattacataggcagaattgaaaaataaaacttgaagagtaagttgacccttgtttgtaatcatactcaaatatcctcactgacctgtactacaggtacatcatcaaatgctttaataaaatcctcttcatcaacagcaccagctccttcttttgcagctgtaaaaaagaattttaaaaatgtaaacaatatgaaacaacgtctataacacatacactgaagaagtctaaacatacacaatcaaaattacattttggaagattcagaacatttttttaaaaggcttcatataactttgaagtgtcatgaaattgacaaacattactgacttcatatcaagatgaaatatagtaattctaca

SEQ ID NO: 819382 - DNA, 577 bp, Homo sapiens
caggcaccaagacattcatgatggtttaaggaaataaacaaagatctaagtttcccatatggactttcaaaattttccctgatatgcttccaagctgacctacctgttcctctctcccagcagcccccagcscgccaacaggactcacagctcttcctcctgcccaagattcctagagtctccctagactcctccaaagcccaagtcccaatccttctaagagacagttccagctagccccctccaaaaggtctccagcctcctaatttctctaaaccccaatctgaatagtacttttttctatctcctttatatgcatactaagtaactctccaaaaagaccacaaactactcaaagcagagcagattcttacacaacctttctcatgcactcacttgcccagagacagtaaaaaaaaagtagggggtggataggaaatcatggggcagtgaacgtctatcttacaaagattctctatttaattctcacaacaatattttgaggcaaatatcataactataaatatgcctactttgcagataaggaaactaagcccaaaaagatgaacaaataatt

SEQ ID NO: 819383 - DNA, 591 bp, Homo sapiens
tcatttgcatcttgataataatgagaatttctcagctatagataccaagaagaagaacatctgacaatgccataataaagttagttttatttaraaactgggtagatttgcttcacactagtacttggatgtgtcttgacactgacatccttctctttatcttccttttctgtaaagcagcccattcttaacaagtaacccacaatatactgtttagaggagttatagaagatcagttgggatggttctgtcaccaaactttattagagctaaaaatgtacaatatcagtcacattctgttgtgttggagtctaaggatgtatccaataagtatcacccctctcatgcaacagagttcttaaagctaatagagaaataaaggaatggcagaggaagtcaaagtaacaccttgtttactagaagatcagataagagccccttatttagagtcagttatttgaacctacctagtcaccattgaatttaggttgaattactcacctgggcccagccagaataaagttggtagagaaaagtcagccacaggaggtagagatagtctgtgtttctccttaaaggaaaaaaagtttc

SEQ ID NO: 819384 - DNA, 641 bp, Homo sapiens
aagtaagactatggctatatatattatctgatgtataatttatacatgtatgaataatcaatttcatcccaaataaagaaattccttttttaaatttgcttgagattggggaatgaggaggagtacatgaatgggagttagagtagaaattaatttagtaataaacattaatagcaaaagctttattgaacacaagcttgttcatgttattcttgctctatgacaaaaaattaataagggcttgaatcactgccatttattgaacacatatgccacatgactctatagacccactccctcgtatgatgtgagcttgagatcttagtgaaagtgtaaaaatgtttcacatacactaggatatttttttctcatgttacagctaacaaagatcataaagagtggttaagtcccaaaaagtaaaccagatcccaaaactccaggagagattcattctacattgttgcttttcttatcacaaaactatcttcaatttcaatcttcatatgaccccataatcaccagcaataaaactggcttatcagaatattattcttttctgacttagtgtttacakaactaatttttataaatacctcccaaaatatctctccttatattgtacttgactttatattatttat

SEQ ID NO: 819385 - DNA, 499 bp, Homo sapiens
gatcatgataaataatgtgcatcctctgcatccattttttttcttatggtttccattctctaatatgcataactcacttgttttcttgaattarttttctggcctatttcttgaaagttataaattgtgttttgtaaataaatggcttcgatttcatgattccactcgatataattaaattggaaaggcttcactttgatgacactaatttgctggtcctgctttgaccattgataagaatcagttcaagatatacccccacattgctaaaggaagcagtaatttgccacatttatcattttctgtctcctgtggagcatactcaccagggtttctaaattaatatgatggaattgaaggtaactgtaattacaatattctatctcatcctccatcattcttcatccacaatgttccattgaactatatgagaaaaggaaagactactttcttgtgttattatttgccatcaaactgattcattatgtttctcttttgt

SEQ ID NO: 819386 - DNA, 499 bp, Homo sapiens
gatcatgataaataatgtgcatcctctgcatccattttttttcttatggtttccattctctaatatgcataactcacttgttttcttgaattagttttctggccwatttcttgaaagttataaattgtgttttgtaaataaatggcttcgatttcatgattccactcgatataattaaattggaaaggcttcactttgatgacactaatttgctggtcctgctttgaccattgataagaatcagttcaagatatacccccacattgctaaaggaagcagtaatttgccacatttatcattttctgtctcctgtggagcatactcaccagggtttctaaattaatatgatggaattgaaggtaactgtaattacaatattctatctcatcctccatcattcttcatccacaatgttccattgaactatatgagaaaaggaaagactactttcttgtgttattatttgccatcaaactgattcattatgtttctcttttgt

SEQ ID NO: 819387 - DNA, 567 bp, Homo sapiens
ttacaggtgtgagccaccgcgcctggccgctgagtttttatttctattactttgctaaactttcttttctcagttctttcttattaacctgtataaataaattctatgcaatgataattgaggatggggrcataaactcaagtattaagtagcagaaaaacaaggggcaaagggaaagaatagcaggcatggtcaggatcatcgggtgttcctttgagacagcaaacatatgataaggggtaaaactaatcccttaagtgaggatatttccagacaacctaaaaaaatagctggaatattataaaaattggcaagaggccaggtacagtggctcatgcctgttatcccagtggctcaggagggtgaggtaggaggatagattgaggccaggaattggaagccacactgagctatgattgtcccactgtactccagcctggacaacaaagggagaccctatctctaaaacaaaacaaaacaaaatgaaaatacaaaaaaaaaaaaagggggggggggcaggaaaaaaactttttctattttattgttcctttattcccagttgtcttg

SEQ ID NO: 819388 - DNA, 583 bp, Homo sapiens
ttgtgttcctggaacctggttccatgccttggcacatagtgcatgctcaatgtatatttctcaagtgagtgawttagtgaatgagttctatttctcagtttgaaagagcttgctagttgatgggaaatgcctgtaaaacactgctggatgtgttaaatgcttccagaagttcacagaacatgcactcagaggaagatattactcccccggctcgttcatacacattcctcatcccttgctttgtttttagaaactttttgtagtatcattcacagacaatggtgttgttttagaatttaaagtaatatttattaagcagtcctacacctgaatccatgcttatttcatggattaaccaacctttctctgtgcagagatgtctgtactctctagtagcctggttgtgaagatgtccttcgagtaaccttaagaaagaaatgtggaaatgccatctttataacatgactttgtattatctgtgagtatgaacagaaacatattttggtaagtttttccccaaataaaaatagatgtcttattttttctttttttaaattagtaattcactaataatcaaagaaaa

SEQ ID NO: 819389 - DNA, 622 bp, Homo sapiens
ttccattgtgtgtacacgtttgttttatccagtcatgtgttgatggacatttaggttgtttgcacatcttagctgttgtgagtaatattgcaatgaacacaggagtactaatacctctttgagtcctgatttcaaatcttttggttaaattccagaagagagattgttgaatcatatggtggttctatttttattttttattttatttttcagatggatctcactctgtcgctcaggctggagtacagtggcgcgatctcagctcattgcaacctccacctcccaggttcaaacggttcttccccctcagccttccaagtagctgggattgcaggcatgtgccaccatgcccagctaatttttgtacttttagtaaagacggggttccaccgtgttggccaggctggtcccctgacctcaggtgatccacccacctcggcctcccaaagtgctgggattatagacatgagccatcacaccaggccctatttttaatttttgaggaaactccacactgtgttccacaatggctrtaccattttgcgttctgaacagcaacagtatacgaggtttctggttgctccacagcctcaccgatggaaactccacactgtgttccaca

SEQ ID NO: 819390 - DNA, 708 bp, Homo sapiens
tcattatgaatgcatgtattcctcaacaaaatgtaatattgctaggaatagttttataaaattcttcctgtgcacttmatgtttctctaagcttctaacatatgcccaggagcaaattgttcctcaccaggtagaggcatcttcaaatttactagacactggcaatttgttatacaaagtaattacgtcaatctatattcccaccagcagtatataaaagttttgttttctctacatcctctgcagcacttaagtgatgagacttaaatttctgttgctttttgtgggcagttttggagttttagtgtagtttaatatggatttatctgacctttagtgagattgatcatattttcaagtttatttaccattggaaattttccctccataaattgcccttctgaatccttgaaaattttttctgttgtttattattttgtactttttgtaggaattcttgacatatgttagattttaacccttcagccattttgcgtgacacagacatcttccatgtggtggtgttttagtaaatttgttgtgatgtcctttcgtgtacaatctgaactatagatacaatcacatttatcatttttgtcctttgtgttgaacctctgttgtgttagtacttccttaataaatctttccctactctgtggtcacaaaatatttatttttttgaataacagttttaaaaatgtactttcc

SEQ ID NO: 819391 - DNA, 610 bp, Homo sapiens
tgctaggaatagttttataaaattcttcctgtgcacttaatgtttctctaagcttctaacatatgcccaggagcaaattgttcctcaccaggtagaggcatcttcaaatttactagacactggcaatttgttatacaaagtaattacgtcaatctatattcccaccagcagtatataaaagttttgttttctctacatcctctgcagcacttaagtgatgagacttaaatttctgttgctttttgtgggcagttttggagttttagtgtagtttaatatggatttatctgacctttagtgagattgatcatattttcaagtttatttaccattggaaattttccctccataaattgcccttctgaatccttgaaaattttttctgttgtttattattttgtactttttgtaggaattcttgacatatgttagattttaacccttcagccattttgcgtgacacagacatcttccatgtggtggtgttttagtaaatttgttgtgawgtcctttcgtgtacaatctgaactatagatacaatcacatttatcatttttgtcctttgtgttgaacctctgttgtgttagtacttccttaataaatctttccc

SEQ ID NO: 819392 - DNA, 531 bp, Homo sapiens
agaagaggctccagacagccttgtgatcctgaagaaggacgtgataagtcatattgagtcatattctgcaggatgccaggaaggarcttgtctggttttcttcaaggtatataaaggaacataaaactatcttgatatgtgggactacctcacatatcaattagtttgcactgggccacccataacagaaaacccaattagaacgttcagtaagagcatttgttattgctcaaaacaagaagtgcagaggagggcagttccaggatcagtcaacccaacagctccatgatgtctgggctctgtctccatctcctaggaattctcatagtttttcctttgggttgttatgtggcagcctgacctacaagcattatgtccttctaaaattgctttcaaaggaagtattctccccaccactgtcatttaatctggaaggaaaaccttttccagaacctctccaccagaattccccttatcttggccaaactgtgtcacaattgctggtaagagcaaatgagattaccccttccc

SEQ ID NO: 819393 - DNA, 563 bp, Homo sapiens
tggaaagcaaactttccaagagagcacccgggacctgttagcttttgaaacaggcctgggtgtgattgactggtagagatgcctgtgtgatttttggygcattgcaggagtgtggattgggacaggcaccccagcaggaaggaaggctgacaccaaaggggtctcacagggcccagctccccttgcttcccgataattggccaccaggccatggcgactctggggaagcctagatgggaacacccaccttctccagcagtagaaggaatatttcagcagagccatctgggagatgttcttataggaaaactgcagtcattcatttcatagttttgcttatataaatagagtacatttgggaggcagttttgaattcctgttgctactctgcttggtgcggagttgcagtggccccaagtgtctttcagagctgttgcttttaggatccccctcaagctgtgggttagggccagggcagggagggggtgctgcctggcactgtgccctgaagagggctgcttgcttcctttggtcgggagcacggcagagccaacattctggtg

SEQ ID NO: 819394 - DNA, 564 bp, Homo sapiens
cagcttccttccccaggggagtagagtccttagcttcctctcaccaaccaagtctccatccagctccgtcctctggggaggacatgcccttcactcaaaacaccaagtaggagcttctcagccccctccccccggcttctcctgagagacaccccatgattctctgctgctggctgacacaagagaagacaaagagggcacaggtgagatgctgattggtgagacctccctcagggaagacgaggaggaggtaggagggccaagaaggaccagagagtctccaccttggcttagcctgggaggcgctgccatctaaggtgatgttttctcagagatcacagccagatctccatgtggtcggggtgggcgtgaggtgagcccctcctcagaccccatctccttgaggagctcaggctcttggaattcagtatacacacagatcgggaaacttcatttcrtagacggggatggagtggttctgcggctgaccgtaggctgcagtgatggttcctgatgggcttggtgggggcctagggggcaggaacacatggggagaaaggcatg

SEQ ID NO: 819395 - DNA, 588 bp, Homo sapiens
aatgagggcagtgttggagcacaaagggtttataaaaatctagtgccatgaagagtgtggactggaggggagggaagggaaggtgtgaggtggcggcggggtcgggggagttctgtttagattggcatggccagaactgagacagagattgagagatgagacaggaggtctagggagggagaggggactggggacctcccaacttcagtctgagaagtttgaaatctggttgtacatgaattataaactgaggccgggcacagtggctcatgcctgtaatcccaacactttgggaggccgaggcaggtggatcacttgaggtcaggagttcaagaccagcctggccaacatggtgaaacaccgtctctactaaaaatacaaaaaaattagctaggcgtggtggtggcatgcgcctgtaatcccagctactcaagaatcacttgaacctgggaggcgaaggttgcagtgagccaagatcgcaccactgcactccagcctaagcaacaagagcgaaactccrtctcaaaaaaaaaaaaaaaaaaatataaactgagacctactgtgaaataagaggcatctggtagagaa

SEQ ID NO: 819396 - DNA, 583 bp, Homo sapiens
cctgggatcccacccttgttcacactcccttcacttcctcaggcctgtcactccayctcttcccaccggatgtgccctgcttagtttctgtggtaggctgaatgatgcccccatcccacggttgcctatgtcctaatccctggaacctgtgaatgccaccttatatgacaaaagggactttgcagatgtgatcaagttaagaatctcgagctgggggagattatcctggataatccaggtgggcctgatataatctcaagggtcattataagagggacgcaggaggatcagagtcggacagaaggggacgtgatgatggaagcagagggacagagacaaagagatctgaagatgccctgctgctggctttgaagatagagaagggggcacaagccaaaggatggaggtggcttctggaagctggaaagcctgaggaaatgaatgctccccagaacccccagaaggaatgcagccatgcagaactattgcagacttctgagctccagaactcagataataagcgtgtgctgttttaagccactaaattgtggtaacttgttacagcagccacaggaagccaaga

SEQ ID NO: 819397 - DNA, 646 bp, Homo sapiens
atccaagtgacagttcagtggtgatgctaattttcatgcaatatgttcacagaggaattcctatgctcatgcagtgtaagaatttattctgagttcccttagcatatgagtacttattccgatattttctcttatgctatatttttaaaggcaagagggagaattacataattacctacaatatgcaatgctaaatgtcttctctatacactactcctgtcaaataatatgcaacaatttggccaaatggacatggaagatattaattgagaaaaaattaaactttgtagtatatccaggtttaaagacagccaaacaaactgttgccataggatacacgcaatttaccaggatttgtatttgcaccaaatctagtcggtctcaaataactcagtatggtcttcaaaatgaaacagcaaatttactgtttgtattatgtgtattggatatactttggtagaaccatacttaaagtcatttcaaatgtcttttttatgccaaaacaaatcctgttgactcatttccaatttcyaattatatgaataattatttctgaatcccacagttcttctaaatagcatctattttaataactgcaattgatacttccatcagttaatatactgtcttgcttcaacaaataact

SEQ ID NO: 819398 - DNA, 543 bp, Homo sapiens
tagtttcaggaaaaacgttctcagtcctacatgaaatagttttctacacaaatacaaaattgtattaccatgaaacacacatgcaacatttgtggtcagaatggtgaaactgcatcatcaagaaattagtaaattacattaaatttacacttttttttttgagacagggtctcgctttgtcacacagactggactgcaggggcacaatcatggctcactgcagcctcaacctctgtctcatgcgatcctccctcctctcagctgccctagtagttgggactagagatatgtaccaccacacccagcaaattttttgtacaaagagggtttctccaagctgctcaggctgaactcctgggctcaagtgatctgcctgcctcagcttcccaaagtgctgggattacaggcgtgagccactgtgcccagctgtacattttcatcaaagtgattgtcttcataaggggctggcatttgaattrtgtttcaattacccagagcattcctttaacacaaaaggcctctatctccagcaatgtctgttaa

SEQ ID NO: 819399 - DNA, 595 bp, Homo sapiens
aaaaaaaagaggataaaatgtaagcagtattttttttttttttttgagacagggttttggtctgtcacccaggctggagtgcagtggcacgatctcagctcacctcaacctccgcctaccgggctcaagtgatcctcccgtctcagtctcccaagtagctaggattacaggtgcacactaccatgcctggctaatttctgtattcagtattctttcttggtggttgtacataggcaagcacagtgacaaataaccctcctttcttgtagagccgtggttctaagtgtggtccctggactagcagcatcagcatcaacgtcacctggaaacttggcagaaatgccaactctcaggccccacctgactttccaaatcagaaactctgggggtggggtccagcaacccgaatttcaacaagacccccaggtgattctgatgcacattcaagttaaggaaccagtgttctagagaggccagataagtacatgaagccyggactggggtttctcaatatcagcactattgacatttggggctcaataatcctttggtgtggggcataacaggatactgagatgcatccctaccctctacc

SEQ ID NO: 819400 - DNA, 626 bp, Homo sapiens
aaaaattaatctgaagactacaaacataaaaaggttactgtctataaaacacacaactttgccattcagatgtcctaaagtctttcatatactttatatgyagttttaccaatgttagagcaagagaaaaagacaaccttctctttaaatccagaaaagagcgagaaaaatagttttgtgggcatactcaaagaaacagaggtggtaattacggcagcccactctaagagtgacatttctctgtttcagcccactaaaaaaatgtgcaaagaaacaagtaggccattgtggctgtattttcttttttcttttttttttttgagacggagtctcacactgttgctcaggctggagtgcggtggcatattcttgcaatctccacctcccgggttcaagtgattctcctgcctcaacctcctgagtagctgagattacaggtgcacaccaccacgcccagctaatttttgtatctttagtagagacagggtttcaccatgttggctaggctggtctcgaactcctgacctcaagtgatccacccgccttggcatcccaaaatgctgagattacaggtgtgagccaccgcgcccagcctgtggctgtattttctaaagcttgttgcacca

SEQ ID NO: 819401 - DNA, 554 bp, Homo sapiens
tgtcactgggcaagacaactgtctttagcagaggcaatacttgaagagggctgacagccaaaggccattagctggagcttcctggctgctggaggaataaatgtttaattcctgaaggagacctaagcatcctccaccacacttcactatggccatcttgattggagcccctctcttctcaagagcagtgcaacagctcctcactggtctgcctgcttcaatcctcttatcacacaagctagggtaatcctttgaaaatatgttagatggtgtcccacctctgctcaaagccatcatgtcagtactttcctgcctcaacctgagtaacatccaaagtcatcacagttgtctgtaccaccctgcagcctctgctccctcagctctcaggcctcagccactacccttcccctctttacaacggcactctagagactctgaactcctcgccgttctttgaaaatcttggccaagttctgttaaaagataaatktatgcatattaaaatgtcatgagtttatttgagctttaaatgattcaggaatcgggcagcacca

SEQ ID NO: 819402 - DNA, 651 bp, Homo sapiens
atctggttatgtgcatatgccttttttggcaaagcacctgtttgaatcttttgcctagttttactggttgtttgtcttcttattgagttctaagaattcttcatatgaattcttgacacaagtgctttgtcagatatctgtgttgcaaaatattttcccagttggtatcttgccttttcattttcctaattgtatcttttgaagagtaaaagtctgattgatcagtttttgcttgtctagttagtgcttgacatgacttgtttaaggaaactttgcctgccaacaaggctgcagatattttctctgcagttttcttctagatgttttatagttttagcttttgtgttcagatatatcgtctgttttgagttcctttttatgaatgatgtgaggtggaattgaggtccatatagatatccatttgctttctctatcatatttgttactgttttctgttattgcccttgtttttcattcttggttttgctttccactctttttctgctgtttgtggttttaatcaggcattttatatgattctatgttatcttctttcttagcatakcattatactttttttttttcttttcttagtggttgccctggagtttgcaatatacatttacagctaatccaattccattttcaaat

SEQ ID NO: 819403 - DNA, 616 bp, Homo sapiens
attgggtgacttgcctcaggcgaccgcaatgtaggggcagcctaaggtacagtcatttgggaaatgtttgttgattgaattaatgagaaagtggctcctgaagacaggaagtgaactggtaaggaggccagcgtggaaggccccaggtgagcagagccttccacttggatggcttcctgtttacttattctaggggaaaaaataaaaatacaaatggaacatttgacagcaaagcaaggctgggtgataattctattcccagatcaaatcacagtgcagggaatgcgttatcatcaacgcgattaccttggggggaacagagacagggagctttattaaatgagacaatcttgctaaaaggaagccttacattagactttgggccttaaataatattagtgtcaagagctgacaaacattcctcacaccgcatctgggagcgcactgcctcccagcgagcggcctttgttggggtgggggggcacctgtgctggagtgtccctggcagtggtgggtggagcagccctcctggctcagtggccacacattcctgggctgtggctctctggycactaaataaagagttcagaccctgcttttctctcaggccagcagg

SEQ ID NO: 819404 - DNA, 437 bp, Homo sapiens
tgagtgagaatgtgatttttgactttctgtgcttggcttatttcacttaacataacgacctccatttccatcagtgttgctgcaaatgacaggaactcattytttgtgatggttgaatagtactccattgtgtatatggatcacatttttaaaaaatctgtttgtccattaatgggtacttaggttgattccatgtcttggctattgggaatagtgctgcagtaaacatgaatgtgcagatatctctttgatatattgacttcctttcttctatatacccagcccagtagtgggattgttggattatatgatatttctatttttagtgttttgaggcatctccatattgttttccacagtggctgtactaatttgcattcccacaaacaatgtacaaaggttcctgaaagggtgagtttaaacaacataactgcaga

SEQ ID NO: 819405 - DNA, 560 bp, Homo sapiens
atcatgaaaaggaatttgggaaatatagaagaatgtaagaagaatatgaatcatatcatatacaaaaaaaacacctcattttatcctcacaacagctctgcggtttacgcactattattatttccattttacagctgaagaaatggaggcttagaagctaaatgacttgcccaagtttccacaagagaaagaagtagcgctggaacaaaatccaggtctaaaagcaaatttcactctttcagtcagcacaccatagaaagaattggatttccaaagccaatgtaatggatgtgtgttaataagatagtctggagaaagagcccaggaagctggagaccattacaattagagatctatggaataacttgggtataaggtaatatgaagttaatcaggggaataaaaatggaggaaaagagcaaccaaagaagcaytgacaaaacgctgaaactgattgcacacaggaaataagaaggttgttcaaagatgaatccaaagcttcaggcttggtgattgtggtgcaaaaatggaaacttggtagtgtggataggaggttagtt

SEQ ID NO: 819406 - DNA, 603 bp, Homo sapiens
tgcacaagtaccaggaaggggtacttggaccctgtgtgaatgttcagttttctatcaatctttcactcaattattttagtatccattagtgattgcccattgattgcctgtcaattatttcatagagttgaaaaatgatcctactagctgacatttttctccaaaaagagctttattttattaacaagaaccatatgattattcttatatatagtttatacaataaagtgagttgaagagtcaattctttcctcaacaatcaacttgcaaagtgaagacttcctgcaacatttgtttctgtaattgacaagtgctttttaatgttgttttaaactatgtattatattctaaatatgtaaaacattaagttatgtatatatatatatatatactcaaaaaatttggctttcatcttaaccctttcacccttattgccagtgcatttatagtagtaatttttgctttcagttcastcttccaatatttctttctgcaaatacaagaaatacatacatatttacatttttctcttttttattttacaaaacatagcttgctgtatacagtgatctgcaccttgcctttttcacttaatggatcctg

SEQ ID NO: 819407 - DNA, 442 bp, Homo sapiens
ggatcaggggagatggaggagggaagggagatcagggaagggggttcaaagtgaagttgactcaaatagtccaaaaggataaataaaaatggccaagctactcatagaatgttgtagggtctctacatgtcatctcacttaaacagactgtttatccatgcctgaaattcccacaaagggatacactcttatctcctttaaacaccttgaaacagagattcttaaactttctagactcatggcatctttaatgtctcatagcactcttgggtcaaaacaaatacctaaacatttgtttattcactagttaaggaaaaacagattgataagtatttaggtctaacaaatgagtagccacctgaaaaataatccatataaataagtaaatgctttcatttcrttttcaaataaccacaatcagtcactaaggagatgtaagttg

SEQ ID NO: 819408 - DNA, 549 bp, Homo sapiens
aatcagaaatgaaaaaggagacattacaaatgataccacataaatacaaaagatcatcagagacttatgaaaaactatatactgacaaactggaaaacacagaggaaatggataaattcctagaaacatatgacctgtcaagattgaatcaagaagaaatagaaaacctaaacagactaaaaatgagtagtgagattgaatcagtaattttaaaaatttcccaaaaaagaaaagccctgtaccagatggatttatagtcgaattacaccaagtgtacaaagaactaataccaatccttatgaaactattacaaaaaatcaaaaggatggaatattttctagttcatttgacaaggctagcatcacctgataccaaaaccagacaaggacacaacaaaaaaaacaagatccttgaagaacatagayacaaaattcctgaaaaagcatttaataaaattcaacatgtcttcatgataaaaactctcaaaaaactaagcatagaaggaatatacctcaaataataaaggccatatatgacaaatctacaact

SEQ ID NO: 819409 - DNA, 584 bp, Homo sapiens
ttgggagggtaaggagggggaattgcttgggcctgggatgttgaggctgcagtgagccatgatcatgttgctgcactccagccttggagatagagcaagaccctgtctcaataataataataatagcaactctgwctggtataagatattttatcattgtggttttaatttgcatttctctaataattaatgatgttaagcaattttttcatgtttgttggccatgtgtatatcctcttttgaaacttgcctgttcatgtcctttgcccatttttaaatgggtttgtttgctttttacttgtttgagatccttgtagattctggatattaatcctttcttggatacacagcttgcaaatcttttctcccattctgtagattgtcttttacctgttgattacttcttttgtggtacagaaactttttagtttaattgtctcatttgtatatttcattgttgttgttgcatttgcttttgatgtgttagtcataagttatttgcctatgacaatgcctagaagattttccctaggttttcttctaggatttttatagttttaggtattacatttaagtctctaatc

SEQ ID NO: 819410 - DNA, 545 bp, Homo sapiens
tggcctgaactaagagaagactgaagtaatcatttttgacttttttgcttacaacattgccgatcaaccagcatagcacatgtttacctatgtagccaacctgcacatcctgcacatgtattaaagtaaaatamaataaaataacaaaaaacttaaagtaaaataaaataaaatttaaaaacccacaaaaaatgttgctaatcctttgttttgattttcagaattaagaaaactaatgtgagctatttacagcttgtagcaattgaagaaagtacactactgtgaacaaaatttggagcatatttctttctctctacctgatttctccagggtttggaaactatttgtgagtattcttaatttacaggaatatagttattcgcatcagtgcaataagcatgtgttacaactggataccattagagaaactggttattttaccaagactttgactggaatggtgtgctttccttaaggaaccaaacttgacttatagatccaataaaagcccattgggaaaactggcctcataccttgtctcctca

SEQ ID NO: 819411 - DNA, 615 bp, Homo sapiens
tcacattcttcaagataacataataatgatgcttgtttcatgaaagaagggattaaaagaagactgaagatcacttagtacagtgcctgacatgtaacaaatgctcawtaaatgttattattattattataaaatcaatcatatgtgcaacttgatgaagccctgggggatgaaaaaggggggctcattggcagacaatttaagcagcttggaaacgtatgttggcatacctgtgagcacatatgataatattgcataatgaatcctctaagttccattctattgtcaaaaaaatttgtttcagaaatggagctacaacttattccagagttagacttttgtggccatggtgaacacgatccttttaaatagagagaagggcctgggtaagtttaaactgaattaggttctcagttctcccaggctttgactttgtcatctgtcacttccctctcaaagggctggcaaagcccagggcagttcaggattctctcatctgaagttctgtccgtcgattctgaggggagtctggggctgctgacagtagatggcctgcctctcacatctcactattctttgatctcacagttacaattgtgttgcttttggttttta

SEQ ID NO: 819412 - DNA, 615 bp, Homo sapiens
tcacattcttcaagataacataataatgatgcttgtttcatgaaagaagggattaaaagaagactgaagatcacttagtacagtgcctgacatgtaacaaatgctcattaaatgttattattattattataaaatcaatcatatgtgcaacttgatgaagccctgggggatgaaaaaggggggctcattggcagacaatttaagcagcttggaaacgtatgttggcatacctgtgagcacatatgataatattgcataatgaatcctctaagttccattctattgtcaaaaaaatttgtttcagaaatggagctacaacttattccagagttagacttttgtggccatggtgaacacgatccttttaaatagagagaagggcctgggtaagtttaaactgaattaggttctcagttctcccaggctttgactttgtcatctgtcacttccctctcaaagggctggcaaagcccagggcagttcaggattctctcatctgaagttctgtccgtcgattctgaggggagtctggggctgctgacagtagatgrcctgcctctcacatctcactattctttgatctcacagttacaattgtgttgcttttggttttta

SEQ ID NO: 819413 - DNA, 563 bp, Homo sapiens
cctgaggcacagtctcaagaggtcctgagaacatatacccaaggtggtttgggttacagcttggtttgatacatcattcaatgcatgtgagatatacattggtttggaacgsaaaggtgagacaatgcaaagcgggaagggggtggggctgaaggtcagaggtggattcaaagattttctgattggcaattggttggaagagttaggttaccatctgaagacgtggaatcaatagaaaagagtgtctgggttaaaataaggggttgtggagaccaagggtcttaagaagtccttaggtggccacccttagagataatagatggcaaatgtttcctattcacacctttaaaaggggctagaatctcgattaatctcttcaggatttcagggcctggaagggaaaagatctaattatgttaatagagattctttacagatgcaaactatcccccacaaaagacggctttgcagagccatttcaaaatatggcaaagaaatatattttgaggtttttcagtctagttaaaaaaaaagtgaggtaaaatattttgatttccttttta

SEQ ID NO: 819414 - DNA, 588 bp, Homo sapiens
aaatattaaatagaaaatttcagaaaaaaacaatttgtaagttttaaattgtacaccattctgagtagtgtgatgaaatctctcaccatcccacccaggacgtgaatcatccctttatccagtatatagcagtatatagactacctacctgctactggcctcggctggtcacttcactgttaccagattgaaaaaacatagcatgtataagttcggtattacctacactttcaagcttccactgagggtcttgggacatgttccctgaggatgaaggggactgctgtaatgtctcatttgatacagcttggggtatagttgatgcccagttagtgtttaagtgatggatagtatgctatctcagaaggtggcttaaaaaattcttaatgctctctaacatctgctctggcaaatcagctttccagagccctactttttttttttttcatttttaaaaaggacttttttttttttttttttttggaaacagagtctctggggcccaggctggagtgcagkggcatgatcttggctcactgcaacctctacctcctgggttcaagtgattatcgtgcctcagcctcccaa

SEQ ID NO: 819415 - DNA, 618 bp, Homo sapiens
atcaatcttagcagggattaggagacaagaagaaagctggtttctccaacartcttcctcagattccctagaatcccccctttttgcacagcttctctggagctatgaagttcaaagcattgaatccaaactcgaagtccccattcaacccactcagccttgactgggctgattggatcattgccattttgatgtacaacctttgctctcattctcatgttcaattttctatagttcccaagctaggaagcatttctgtctggatagagttgattgcagggatgaaatcagggattccattttcctggtacacataggttgaagggacctctgatgcttgagacctctagattcctagcattttgatggcagaaactgtggttttcttatctctgaacttccagtgcactgcaaagttctgggcatatattggtgcttaataaaccctgttaaatgaataaacaaatgattttttctttattacacccccatttcagtagcatggaattatgaggatgattttgccaaattatgagtaggtcctattagattaggtttttctacaggaaattattctttcaaactacagtgtctaggaagtaccttgcacaaaataga

SEQ ID NO: 819416 - DNA, 628 bp, Homo sapiens
gggtcaccagatggatgctctaataaaggtctttgcaatccctccagctcctgtggcctcagctacaaacagaaaagcagmccgtttcataaactgcatgagaggagagaggagagatttaaaacttatgattattgttggttgttaggaatcagaatatatttccccaaagaaacaatatttggtggcaacaggaatttagcagacttttgagggctttccagggaatctatgcataatttatatcatttctacagtaaaaagtgctcttaacacttggattatcacttttttatgagctgaaaattgctttttagataaaaacaggtttttaaaaaagtattaaaatttctcatgtgctatattttatactcctacataatcccatagcatcagatttgttatttccctatttgatccttcaggaacaaatcttttgagtatataataaatgtattttctttttagtacagtgatggaatcttcccaaaccaaaccattaaaagcataaattcttcttctacctttcaatagtcatctgaactataaaatgcttttgttttgttgaagaaacattcctgataagggatccccaatgccaataaaaatttatattccaaaacagtcc

SEQ ID NO: 819417 - DNA, 506 bp, Homo sapiens
aaatgtcataatcataaatctctcaatgatggattagcctttttgagtggggagaaagtactacccagctcactcattgagctggcaaagctagcttctactggcatttcctagagataccagctcagttaggatggccaaatttagcaaatattggcaaatatttaagcacaatgtttgggacatagttatactaaaacctatttgttttttatctgaaattcacatactagtgggtatcctgtcattttatctaaaaacctatcccaaatttgtttacaaagtctttattacagacacattactatttttgaacttatccttcatttcactctttcttatagtgttatcttgatgttatatatattaaaatccattggcttattgtacatgatactaytttctattaaggatttgccacattaaaaatatttaatgagatacaactccatcatattaagacacaataaaatgttaccatttttgtaaactgtgttaaaatgatc

SEQ ID NO: 819418 - DNA, 563 bp, Homo sapiens
catctcatatgtgattattagaaagccaatactcagttacaaagtgacaatagaattaggtaagaattactagaawccagctgcaaagatggtggtaagcattgaaaatgaaaaaaaaaagtaatcataggtagctatatatgaagggaaaccttggaaaagaatataattattgggagaagacacggagacaatatgtgttttcaagagaactggtacaatgctgaaataggtttaaattttgtaactgccacttaagaattgtataatcttgggcaaattctttaacactctgtgttgttttacttagttataccatttggacagctgtcaagattaaataagcaatgtatatgaactatgcacaatagataataaagatgataataataacaggttgagtaatagaggtggagtgattaacagcagcaaacaagtcagcatctaagacagagaacaatatcatttgcagagatagtgtatagagaaaaatataacactgtagaagcaagcaacttcagaagcaataggcccactctgtcaatgttttagaccagaaattg

SEQ ID NO: 819419 - DNA, 563 bp, Homo sapiens
catctcatatgtgattattagaaagccaatactcagttacaaagtgacaatagaattaggtaagaattactagaatccagctgcaaagatggtggtaagcattgaaaatgaaaaaaaaaagtaatcataggtagctatatatgaagggaaaccttggaaaagaatataattattgggagaagacacggagacaatatgtgttttcaagagaactggtacaatgctgaaataggtttaaattttgtaactgccacttaagaattgtataatcttgggcaaattctttaacactctgtgttgttttacttagttataccatttggacagctgtcaagattaaataagcaatgtatatgaactatgcacaatagataataaagatgataataataacaggttgagtaatagaggtggagtgattaacagcagcaaacaagtcagcatctaagacagagaacaatatcatttgcagagatagtgtatagagaaaaatataacactgtagaagcaagcaacktcagaagcaataggcccactctgtcaatgttttagaccagaaattg

SEQ ID NO: 819420 - DNA, 644 bp, Homo sapiens
ctcagtggataaaagtattaatatgcaggttagccttaaataagctcattgccctcagccacatttatgagacaacagargttaaatgatatagaggacacaaatcagtggtcactattttaaaatcttgatctcataaaacacaactattacacacaatttatccatagctgggtgctaatggagttaagtaaataacagataatccaacaccccaaatgatggattttgaagtcaatacctcagatcattttaatgttccaatatctatattacagaactgaatctataaaataaaacttttttttttccataaaatgtctctgagtttaatgcttacatttcccaggttctagagttttcaagttcagtacttcagccctcttttggctgaactgcaaccttcccagctgccctgaccttaatcgatgtggtgttcttcagctcagaacctcttgtcttagaaacacagctgctgcactcccctcatcttatttttacttctctttggaccatgtgatgaaccctttgaagtgggccatccacaaggaaggatataaccttcaagtaggagctctttttctgttactttcaatggggagctatgctaatatcaaaagagaaaagaggcttttatggctgag

SEQ ID NO: 819421 - DNA, 611 bp, Homo sapiens
aagacacattagggcaaaatagactttgagtcctggtcaagagggaaggctatcataagyagatcccaaaatttgaggcatttctgtttcaaatgaagtcattgtaatttaatgcgggggaaaatgctgagtggttcatcacaggcaaaacagggagttcctaaaaagttagggaagtgctttccatataaaatcctcccagtgataagcaggagtgagagtaaggatgtactgcaggcacttggaaaattacttcaaaataagaacttgcagtttttcctaatcatttgcatagtgcagctgcacaaggcagaattcaaaagatgtcccacaaaattcctgctccctgctgatttaatctaacgtgaatcgaggaactactgtgaagggtctttgctggctttgaagcaggaggaagatgccaccccaaaaagaatgtgggcagcctctaaaacctgagaacaaccaaccctgggctgattgctggcagggacaccggacctgagtcctataatctcatggaattcaattctgccaacaacatgaatgagcctggaagcgaattcatccccagaagctctggaaaagaacacaccccgtccatcactttg

SEQ ID NO: 819422 - DNA, 600 bp, Homo sapiens
ctagatttttaatataatactgattactttaaattggtccctaaagtgtgttttataataaatatttcctcctaggtttgcyagtgaagcacacacagtagtatacatcctccataaagttttctttactcagaaccaacagtggtagaataatttctcagatttaaaagaggtctaggtgtaaattctgcaacttgtaccacctaatttttttttcctgaaaggcaagtatttatgggaacaggctatagaagggacaacatcattgtataatttggcctattcttagtttctctaggcaggccccatttattctctccctagatttttccttgttcagaacttgttcactccaaagttgcctaatcaggaattgactccctgtttctattctctcttcatcgagcctctttttcttactctcatctttcctatccttttaatccattggctccttatgttggtcactgcatttaggcaaccgttcgggttactttgtcaattttctcatttctgtgggctcctccaacaccaccaatcacgaaaggccctagcgaggcatgagaggtcctcctatcccctgctggtcaggacccacat

SEQ ID NO: 819423 - DNA, 600 bp, Homo sapiens
ctagatttttaatataatactgattactttaaattggtccctaaagtgtgttttataataaatatttcctcctaggtttgctagtgaagcacacacagtagtatacatcctccataaagttttctttaytcagaaccaacagtggtagaataatttctcagatttaaaagaggtctaggtgtaaattctgcaacttgtaccacctaatttttttttcctgaaaggcaagtatttatgggaacaggctatagaagggacaacatcattgtataatttggcctattcttagtttctctaggcaggccccatttattctctccctagatttttccttgttcagaacttgttcactccaaagttgcctaatcaggaattgactccctgtttctattctctcttcatcgagcctctttttcttactctcatctttcctatccttttaatccattggctccttatgttggtcactgcatttaggcaaccgttcgggttactttgtcaattttctcatttctgtgggctcctccaacaccaccaatcacgaaaggccctagcgaggcatgagaggtcctcctatcccctgctggtcaggacccacat

SEQ ID NO: 819424 - DNA, 555 bp, Homo sapiens
atcagtaaggtggtaatttcagcaaattcatatgggtagataatcctatctatacatattttgctagatctttattaagattcatcccatctagactaagcttctaggaaaagcaaaacaaaatyttaacagatacaatgttttaggacaagaacacagccaagatgaaggccctccatgccctttttgactgttcaatatctgaaaagaaaaaaatttgaaatatctagaaaggttattggattttttttttttttgagacggtgtcttgctgtgtcacccaggctggagagctgtggcacgatctttgctcagtgcaacctctgcctcctgggttcaagcgattctcctgccacagcctcccaagtagctgggattacaggtgcatgccaccatgtctggctaattttcgtatttttagtagagatggggttttgccattttggccaggctggtcttgaactcctgacctcaggtgatctacccacctcagcctcccaaagtgctgggattacaggagtgagccaccatgcccagcttggaaaaaaagttttt

SEQ ID NO: 819425 - DNA, 615 bp, Homo sapiens
ctattgccatttacagatgaggaatctgcaactcagatattaaataatttgttcaaaatcacacaaatggcagaagtaaaatttaaacccaaggtctttcaacttacaccacagtatttcaaggataaataggctcaatgaataaagaacaagtgagaaaagtatacgctccttatggtctgaaactgttaaataagtgacaagaaagaccataaacagctgaacccgaagaacttggtagtctaaatgtcttcccaggctgcaaacaaactttctttcagcatagcacattttaaagccctataagggaatctctgcctgttctccacacacccccctcccacacacaaaaattggtataagttatttttcaatttttttagattctgtattatatgtcccatctgggctgataaagtatccttttctcccaacaatattatcatacatttgtggcaacatttggggtataaaatacctccccacctgccacttcacttattttaatcaagcactctacaggacatcaacatttcatcctgtaactrttctgacaaactgcgcctcagaagtgacacaccgactcagagctaaaacactgctcctgtatacctc

SEQ ID NO: 819426 - DNA, 602 bp, Homo sapiens
atctaaaggatatagttagctacatgaatgcacaaacacttttctatttagttttgcttttggaaatatattgatattctacataataaaaaaattaaatctacaaggctgggggaaatgaaaactgaaataaattgtataactagatttaaaaagaaaagaaaaaatgaatacaaataattttaaacacagtgcattatataccatctttctaagggtaaacacaaaacaaactacacacagattttgagttctttttagtgagcttgtatgtcataatgatatgggtagaacaattctgaacccatatgataagtaccataggactaaagaaatgaataaatgtgttgatattattgggttcttactgtgcaaagaaatgtgcagaatgtaggaaaacaataaaccctgtggggttggattggaactggaaatgtatgtgtgtatgtatgagtgtgtgtgtatacacatacatatatatrtatacatattttatatatatggatttatacacacacacacacacacacacacacacacacacacacacacacatatatatgatccagaagcaatgatattccagtagcaatgagcatacc

SEQ ID NO: 819427 - DNA, 565 bp, Homo sapiens
gtgggtgggaattaagtcatgttatttttttaatacaaaattttaytctactgtggtacacaaaagagaagtgctgctataaaaatatgggaaatattttgggaggtcgaggtgggcagatcgcttgagatcaggagttcgagaccagccttgccaatatggtgaaaccccatctctactaaagagataaaaattggccgggcgtggtggcacatgcctgtagtcctagctacttgggaggctgaggcaggaaaatcacttgaacctgggaggtgaagattgcagtgagccgagattgcatcactgcactccagcctgggtgacagagctagactccatctcaaaaaagagaatatatatatacatatatttacagtagagtaaaaaaatatatatatataaaatatatatatatgtggaaactaatagggtgaggagactaaatgaatgtctgcctgactctctaagccaccttttgcccctctactctgttccttctagcttttactcccattaccttactcctcatgtgcacccttcttctcccttttgttacacattccac

SEQ ID NO: 819428 - DNA, 556 bp, Homo sapiens
ggtgaaaccccatctctactactactactactactactactactactactactactactactactactactactactactactactactactaatacaaaaattagccaggcatggtggcgygtgcctgtaatcccagctacttgggaggctgaggcaggagaatcgcttgaacctgggaggcagaggctgcagtcagctgagatcgcaccactgcactctggcctgggtgacagagtgagactctgtctcaaaaaaaaaagtagagggtacccccacaagaaagtttacctgcatactcctcttttgtaattctgtctacctaaaatatcttcctaattacaagcccatattgatcattttctgtaaggcctttcctattatatcacttgaaagtgactcctgtcttattttgcttttctcaaaccatgcatagaagtaagtcattatttaaacaacctgtaaatatgactttgctgttttatatctgaaacaacttacctatctgaattctcagggcagagaccacattttttccattgatactctatatagtt

SEQ ID NO: 819429 - DNA, 562 bp, Homo sapiens
tttcaaaaatttcatttatgtgtaacaataatgataaagtggcactatgtaccaggcacctgctgtagattaatttctttcaaaatcccatgaaatagtttctgtcctcattttacaggcaactgggccacagagtttgggtgctttggaggtcacacaactaggaaaagcaaagctaggattagaagtcaggccatctggcactggagtctgttttcttaactgctagaagagaaaataactcacattttctctagggtgcactgttggcctaaacaagggaaaaaagaaaaattaaaacctaaaagttaagaaaaattagtcatacggttagagaggtcagagcttatttctgttatacactggaatccagtttgaacataaaacctttcacatcaggtattatttttcttacaattccacttatgttcagcaagtatatcccaatgctyttctgtgctgtcaagacaagcaagatcctattgtgtgtgctatcattggtagattcctcgtctaggcactcttggccagtgttgagtccgaatgctgttattatgtgaaa

SEQ ID NO: 819430 - DNA, 561 bp, Homo sapiens
ctttttccatcccttctacttattgttttattcaaatacattaattatggcaacaccaaagctgtaagttgcttttaaaatctaggttttattttcctagatgtcatattggtataccraatctattcaactgtacctgaaaatgttttgattgattattttaaaacataccctaataacttgtttcagaggctctaggttctctctggaatttttctttttttgagacagagtctcgctgtgtcgcccaggctggagtgcggttgcgcaatctcggctcactgcaagctccacctcccgggttcacgccattctcctgcctcagcctcccaagtagctgggactacaggcgcctgccaccacacccggctaattttttgtattttttttttagtagagatggggtttcaccgtgttggccaggatggtctccatctcctgacctcgtgatccacccgcctcggcctcccaaagtgctgtgattacaggcgtgagccaccatgcctggctggaattttttttcatatatgctttatttctcccaccaacctgtcttttttc

SEQ ID NO: 819431 - DNA, 630 bp, Homo sapiens
atgtacacattggaggagcattatcttgaggcctggttgatattgagatgtaggatgtatgtagcagtgaacataactttawgtgcatgtaattccattggaagaaccttaagtaggtgggctgacaatgatctataatgctttgtgtttgattaaaatgccagcatgtataccaaactaaaatgaagcgctcttactttcagtagagagagactattttacacatacctaaagcatatttcttatgaagaaaatcataataagcaatttaaaatttgcgaataagatcattagttatgtttgaaaattccctttccatcaagctaagtccaacttatttttcaaaacttcagtacatcagcatctccagagagcctctgtttgttttttttatttatttattttttttttttgagacagaatctggctctgtcccccaggctggagtgcagtggcaccatctcggctcactgcaagctctgcctcccgggttcacgccattctcctgcctcagcctcctgagtagctgggactacaggcacccgccaccacgccctgctaattttttttgtatttttaatagagacagggtttcaccatgttggccaggatggtctcgaactcctgacc

SEQ ID NO: 819432 - DNA, 572 bp, Homo sapiens
gttcccagaccacatatctagaaacactctgggccaggaaggatcccactgccttgaagaaaaggacccagtcttggcagcattcctcatttgttaactgaaaagtccctgggtcctgaataaccagcaktgatgcccaggtactatgtaggtaaggaccttggtgagcctctgagacttgctgacttcaggagaaactcagtaccttaccagctgtggtggcaaaggggcaaaactccttctgcttgagaaaagcagaaggaaaagtaaaaagggctttgtcttgtaccttaggcaccagcacagccacaggggagaaaagcaccaagcaggctcttgggtttcccagttttaggacttgactcttggatgacatgtttggaccttcccagagggaaggcaatgccctgaagggtaagtcccaggccaggcagcatttaccagaagttgacctaagaaaccttgggccttaagggaacatttgctagtttggcagtactcctcatggcttgggatggcagtgggtatgggtgaggctcctatggatttggaaagaagagggaggaatgaga

SEQ ID NO: 819433 - DNA, 622 bp, Homo sapiens
ccaggaaagcatgacctcaccaaatgaaataaataaggaaccagagaccaaacttggagaaacagagagatgcgatctttcagaccaagaattcaaaatagctgygttgaggaaactcaaagaaattcaagataacacatataagcaattcagaattctatcagataaatttagcaaagagattgaaataattaaaaagaatcaagcactaattctggagttgaaaaatacaattagcatactgaagaacacatcagagtcctttaacagcagaattggtcaagcagaagaaagaactagtgagcctgaagacaagctatttgaaaatacagtcagtggagatgaaagaaaaaagaataaaaaaacaatgaaccagacctatgggatctagaaaatagcctcaaaagaacaaatctaagagttactggccttaaagaagaggtagaaaaagagataggagtagaaagtttattcaaagggataacagataacttcccaaacctaaagaaatgtatcagtatccaagtacaagaaggttatagaataccaagcagatttaacccaaagaagactaccttaaggcacttaataataaaactctctaaggccaaggataaagaaa

SEQ ID NO: 819434 - DNA, 384 bp, Homo sapiens
tacttaatgtcatctataggttcttgcaaagtgtgactttaaytgatacgatgaataatgaaaccaattttacccaaggctaattcatataaataagagttaagttaccaggacatatttttcgtcacagacacatcacaaaacttctaactaaatgtcaaaacacttctaatattgaacattgaaataaatgagagcagtacacacatttaaggaagattaataaaaacaagtaagataattatttacttacttactccagtttagggtcatgggtgaccagatcctctcctagaggctcagagcacaagatgggaaccagccctggacaagatgcatatcatcgcagggtgcacttacaaacccacactcactgacatgcca

SEQ ID NO: 819435 - DNA, 568 bp, Homo sapiens
ttcctctaggagtgatttcttaaactggggacaggcttcataggaaatggcacagtaatgyctgtgacatctgcaatttgactgggtcaatttttagttccgcttaaattaaggcttttcatttagataggccagaactgaagagatgctcttactgatgaaataaaataaataagaataaagaggttaacagataaacaagttaaacaaatgtaacaagtttttgttttcttcctcctgtctggcaccatggacagcaacaccctacaattcccatgaagtaggcagacttacttgccagtgaggaaagaggagatttattggatgtgatggaaatgaaataaatagaaagactatagataaatgcagaacagtttgaaaagcaagggccgttacattcttttgacacctacaggtttccactatctgctccctcccacagaagtcaattttattggcaatcatagccgtttatacttatattttaaaaactttaaatcaagattgtgtaatcaaaacacatatttccaataagaataatattaccaaggagagtggcagtcttaac

SEQ ID NO: 819436 - DNA, 535 bp, Homo sapiens
gagaatgcaaggcaatcacaaccaatttcataggtacataagagacaaggtacataagatctggctcttttgaagaaattaacaagctaattctcaaaatcacctgaaaaggaaraagatgcagaatagtcaaaacaatttttgggaaaaaggagaataaagaaaggatgctacatcccactccaaagctcttcagagacaagaagcccaaccttcagaatacaaaactgaaaatgtgatgagttatttctgccctgctaaaaaggtagtttcattcaaaacctttgaccctaatacctagaaaagactaagcatagtaaaactaaacaaccacaaacaactaacttcctatgagccttatttcatgtccacagggaaatcaaatcccacatatggtcttggtgtaaagcacaggggctgtaaggtattagaaaaatcggtgtagaaaaaagctggactgttttcagaaaaatgaccaaccatgttactaagacaaaacctctctctatggactgcattctcacaagataattac

SEQ ID NO: 819437 - DNA, 548 bp, Homo sapiens
atgtatgaagcaataagtatgctgattctttattggatgaaatcctttcattcccttacatttcctcccctaaatccttgccacttaaagtgggtcctcacaccagcatcagcctcacyagggagcttgctagaaatgcagtatctcaggccctattgcacagtacaatccacaatttaacaagattcccatgcaattcatctgtgcactaaagtttggaaagcctgttctaaattacaaactcaatgtcaagccctacaggtaaatggaggaaccaacgtcattattctgggcatttgatgttgatgcagacaaagatcagataatcaaattgaagctgtaatgatcacacgatacaccacaaatgctggttattaaaatacatgcatgatctctgtttcgcatttccctcattcttttttaaaattatttttatagattttgggtatataagtgtcattttgttacatggatatactgcgtagtggtgatgtctgggcttccagtgtaaccatcacctggatagtgtgtattgtacccattaggta

SEQ ID NO: 819438 - DNA, 428 bp, Homo sapiens
gatagcagaactttataactaatgttccagtttccaatcaaaatgtatgcaacataattgcccccatcaaaatctttcttttttcttatgtctactgatgtttrtaaattgccctcaatggtgatttctgacattataattattgcaatgagcatccttgaatatatgttcctaaatatacatgtaagagaacacggaccaagaagtggactttttggatgataggagtgacatccgaaaggtttaatagcctccatgacagaggtactgtcaatcaaagtagttgccgccagggggcgatagagaatgtactgcttcagtattagccttagaagtgtgtggtaccttcactagaaattaccaagtctttgaaaggaagctgtaacaatgtactcttttccacatgttggaactttaggggtttaaat

SEQ ID NO: 819439 - DNA, 377 bp, Homo sapiens
ggagcatgtaatatttatgaggatatgtagtgaggtcattaagagcacagactcygaagccagactagtttcaagcccaggatctacacctatggcatagtttttcaaaccaaaccaagccaactgaaaacacaaaacaataacaacaaaaacatacaaaacagcaaatcgtatcaagcccctagacttaatttccagtttacagggagtacaaagtgaagagggacatattaaatcaatcagcaaaatccaaaattctgaaaactccagagaacaaaatttgctttttgcaacaaagaggaaaaacagagaaagaaggaattaaaaggaacttaagagacacatcaatcatacagactatgtggatctgtttggat

SEQ ID NO: 819440 - DNA, 554 bp, Homo sapiens
tattcacagtgaaatcaaatataaagatgtcacctcactcaaattaatgtgtggattccatttaattccaataaaaagtcaacagggtttttcctaaaayttggcaaatatttttctaaaattttttggagaaaaaaggacaacatactcctaaaaggtacccaaatgaatatttgctgttgtagagtaaaagacctaccataagtctatggtcattaaaaccatgtggtgctactacagtggtagacaaataggctgatggaacaagatacagaatctggaaacagagccatgttgatattgaagcttgactcacaaggaagtggaattttaaagaagagggtaaatgatggaatgagtggtactagaatagctgattttcaaaaaatcaaaaagatgaaattggattctgcttataccataaacaaaatcaattcaaggtgtattacatacaaacaagtaaacaagactttaactatttttaaagaatatataaagaaggatacctttatgagttctagatgaaaaatattttttaaatgagacaaaaatgt

SEQ ID NO: 819441 - DNA, 628 bp, Homo sapiens
aaaaaggatgagttcacgtcatttgcagggacatggatgaagctggaaaccatcattctcagcaaactaacacaggaacagaaaaccgaacacygcatgttctcactcaaaagtgggagttgaataatgagagcacatggacacgggaagggaacatcacacacctggaccttctggggagttgggggctactgaagggatagcattaggagaaatacctaatgtagatgatgggttaatgggtacagcaaaccaccatggcacgtgtatacctatgtaacaaacctgcaacctgcacgttctgcacatgtatcctagaacttaaagtataattaaaaaaaaaataaacaaataacattagcaaaaaaatacagcaacaaaatgaaaagcaaaaaaggagatgatagcttcacgcatgttatatcccctgcagattttccaatgggacaagatgtggaggtgaaagacaaggagattggtgatcctgaccctgtgtaggtataaactaatgtgtgtgtttgtgtcttagtttttatcaaaacagttttaaagttttaaaaaattaaaaatttaaaaatagaaaaatacgtatagaataagaatacaaagaaagaaaatcctttttgta

SEQ ID NO: 819442 - DNA, 552 bp, Homo sapiens
gggctctgttttggttccatataaattttaaagtagttttttctaattctgtgaacaatatcaatggtagtttgatgggaatagcattgaatctataaattactttggcaatatggccattttcatgatattgattcttccgatccacgaggatggaatattttaccatttgttagtgtcctctcttatttccttgaacagtggtttgtagttcttcttgaagaggtccttcatttcccttgtaagttgtattcctaggtattttattctctttttagtaattgtgaatgaagattcaatcatgatttggctctctgcttgtctattattggtgtataggaatgcttgtgatttttgcaatttgattttgtatcctgagacttttgctgaagttgcttatcagctcaaggagatttgggctgagacaatggtgttttctaaatatagaatcatgtcatctgcaatcagagacaatatgacttcccctcttcctatttgaataygctttatttcttcctcttgcttgattgccctggccagaacttccagtac

SEQ ID NO: 819443 - DNA, 617 bp, Homo sapiens
gtggggattatcgtacataatccacaagattgagataaaaggatggaggtactcctccaggacacattccagagaatttccagggtgctccttggcctgcaggtctcctacacrcggtctgcattagcgatccagggcctggaagccataaagaatagtaacatatacaggaaatggttgtaaagagataagcaagaatgcttaacaaaagaaaaatcaaatgcccttgttcattataatcatttggggaaggaaaagggagaagaaaaatggaaactggctcctataaatgagacgcttaccatatggggactgaatatgcattttcatgctttagttgacatgattagggatgtttgtgtactcctggacccctcgttagataattatcgtttacaagtttgtatgaggagtatgtgtgtgtggccttttctgtctggattgtaggcttttgaaaaggaggtacaatgacttttgtttggtaggcaccggattaagagtatgcacttaagatcaaatccttgcttcaccacatacaaggagtatatttagggcaaggtaagtaacctctcagaccatcagtttcctcttctgtaaaattagataataatactgtg

SEQ ID NO: 819444 - DNA, 617 bp, Homo sapiens
gtggggattatcgtacataatccacaagattgagataaaaggatggaggtactcctccaggacacattccagagaatttccagggtgctccttggcctgcaggtctcctacacayggtctgcattagcgatccagggcctggaagccataaagaatagtaacatatacaggaaatggttgtaaagagataagcaagaatgcttaacaaaagaaaaatcaaatgcccttgttcattataatcatttggggaaggaaaagggagaagaaaaatggaaactggctcctataaatgagacgcttaccatatggggactgaatatgcattttcatgctttagttgacatgattagggatgtttgtgtactcctggacccctcgttagataattatcgtttacaagtttgtatgaggagtatgtgtgtgtggccttttctgtctggattgtaggcttttgaaaaggaggtacaatgacttttgtttggtaggcaccggattaagagtatgcacttaagatcaaatccttgcttcaccacatacaaggagtatatttagggcaaggtaagtaacctctcagaccatcagtttcctcttctgtaaaattagataataatactgtg

SEQ ID NO: 819445 - DNA, 561 bp, Homo sapiens
ttgctgttgaaatgtctatttatcccttcaattttgtccatttttgcttcatgtattttggaactgtgttgttagatgcatatgtctttacatttgctatagcttcctgatggattaacacttttcattataaaacagccactttttctctactaatactttttttcttaaagtctgttttgtctgataattagtgtaatcattccagctctcttacagtggctgtttgcatgatatgccattttccaacctcttacttttaaattatgtgtatctttgagtctagtgtgtgtctcctgtagctagcatatagttgaatttttaaaaatactatttgacaatctctgtgttggatgaaattgtttaatctatttgaattgaatatcattattaatatggttggatttacctctacctttttgctttttgkttctatatatctcatgtctttttagtttttcaggtcttcctttattgctttcttttgaaagaaagcaatatgtctttcttttgaaagcaaaaagtctttcaaaagtctttcttttgaaagcaaaaagtctt

SEQ ID NO: 819446 - DNA, 619 bp, Homo sapiens
aaatcactaagctaaagggaaaagtcaagctgggaactgcttagggccagcctacctcccattctattsaaagtcacccctctgctcactgagataaatgtatatctaattgcctgctttggagaagctaatcagaaactcaaaagaacgcaaccattcatctcttacccacctatgaccttaaagtcccctccccacctcaagtcttcctgcctttgcttcgagttgtcctgcctttccataccgaaccaatgttcttgcatatgttgcttgatgtctcctgtctccttagaatgtgtaaagccaaactgtgctctgaccaccttgggcacatgtcatcaggacctcctgagcctgtgttatgggcatttgtcctcaatcttggcaaaataaactttctaaattaattgattcctgtctcagatctttggggttcacacagttatatctcaacaaaattgtaaagaaatcatcctggatggaggctagaattacaaaatggtaaaaagaaacattacccagggattagcaaccacagaaagcctcattcatgcctagggtttgaggaacttaaggaaaaatggtgtgtttgcaaagcctgtgtttacttggccactaa

SEQ ID NO: 819447 - DNA, 649 bp, Homo sapiens
agaataatgtgcaagattgggcaggaagggggtgaaggagggagtagagggagccttgcctgagaggctgatattcaaatacctcccaacaagttcccagcttttcctatggggaagrcagaacagagataagctaagtcctttgcaagccagggaactgtcctggcttaagccatggaagggcacagttggggttcatccttcctcttgttcaatagctaatgtaaccactgattatgtttagagtcagaatacagttaaatccaattacatttcaaactgtagttccatattactcttttactaccatgcttgatgctcaggtagtatttcttttagagtttttcctgagcatttgctaaatttcttatggatattatcaattctactggattttcagagtaaacttttctgaaaactaaaaaaaatatatagagagagtttgactttagagattcttatattttctttaagatggaaataaatgtatctcaatttttccagaaaatagtggaaaataaatccatttgaataaagcccacattggcctatctaaggtggaggagctcatagaaggacaaagatcacttgccagttaccaccgacactttcaaagtttctcagatcctccgcacataactgaaatggt

SEQ ID NO: 819448 - DNA, 599 bp, Homo sapiens
tgatacacttatttataaagcagcaatgtatcctagcgtataaagtactacattgtaaatgaactacggatacagataacatatagtcaaatctcacaatgatataattttgagtgaaagaggctagagacaacactattagactctaacgatataaattttaaaaaatatatagcaaattgatgtgttgcaggcccaggcaatttttaaccttcatgaggaagaaagaatgaagtgatctagaaggagtatagggaggacttctgtctattcttatttttggacctggatggtatttctggtaattttttcttgataagttttagctgtatacttaaggtttaggcatctttttcttttatatttttaaatatgtgtgtatgaatatatgtagactatgtgaagagattttgaaatatattctctaaaaatatcttactttgtgacacccaagcaattcaaaaacagcartacaactattatattagcctcaaacattcaataaaattcaacagcatatattgtataggctccatatactgaggatgatataactttagaaatatatagcaaaaaaaaatgtttaaaatgcattacat

SEQ ID NO: 819449 - DNA, 608 bp, Homo sapiens
catagcaaaattatgtcagcaagatggcagggtaagaggtgttggaataaactcttccacaaaggaagtttagcaagcaactatctgcaaactagaacattcttttgaataacctaacatctggaaatgagcccgagacatccacatgatacacagaactgaatgaaatgtacattagaaggttaagatgaacagtcttattacaactgtgcaaccctacctttcacctccaagttagcatggctccagaccgagagattttttctatgctcacagttttttcatgggtaaaagagaaccgcaggccgtgattctggttccctagcattctgagatgcttcttaggaaggttgctgtgatgtaacttcccagggaacactaggggacatggaatggcttgatcatctggggtacaggtaggaacaaaaaaagtgatcagcgtgtgaatcttggtgttcctggtagattggcactcgatcagagataatttcatattacacctgcaaagctgagctggtctcctttagaagcacaataagaagcacaatctaacttcagcycctagactactaatctccctacacagacataaaacctgccccaaagtc

SEQ ID NO: 819450 - DNA, 632 bp, Homo sapiens
agtttacaaatatttcctccaattacgtaggttacctcttcactctgttgattgtttccttcgcagtacaaaatatttttacttatacaatctcacttgtctgtttttgttttgttgcctctgctttgggggccttatctgaaaaattcttgcccagactaatgtcatgaagtatttcccctatgttttcttctaatagtttcataattccaggttttacctttaactttttaatctagttgagttgatttttattttgtatgtaactatccagatttccaaccgtttattgaaaaggctgtctttccttcattgtgtgtttttggcaactttgtcaaaaatcagttttaactgcctaaatttatttctgtgttctcatttctgtgccatttgtccatgtgtctatttttatggtagtacaattttattttggttattatagcttgtcgtttattctgaagtcaggtagtgtgatgtctccagctttgttattttgctcaaggttgctttggctatttgagctattgttgctctatacgaaatttgtgayagtttttctgtttctatgaagtatgtcatttgtattttgatagggattacactgaatatgtaggacactttggttaggatgg

SEQ ID NO: 819451 - DNA, 587 bp, Homo sapiens
gaataatctgggtttatacttgacattgttgtttttggtgtgtttgttctatgctgcccatattggcctactcacttgtgtcatatatttataccatccattattctttctagttgctcccacctatagagttcttggcaacattttagtattagttaaagattgtatcacctgactctttgtcattctcttcactcaagttcagtaatagattctgcaaagttaattaggcatccagacagacatccaacatgtaaacttcttaattccataatgttctcaacatctgggaccttcactttgactctgtttcagccactgatttgcatacttatctaaactcactgcaattctgaacttttgaaatcaactctcccactttttccatcctaacctatccttgtagctttcacatgtgactgccccctacacctgtcttgcattctcaccaagaactctaggcctgttayttctgtaatatccctttatttatttcattttattttatttttttgagacagagtccatctctgtcgcccaggctggagtgcagtggcgcgatctcggctcactgaaagctccgcctc

SEQ ID NO: 819452 - DNA, 665 bp, Homo sapiens
gggaagcccatcagaataacagtggatctctctgcaaaaccctacaagccagaaaggagtggggggccaatgttcaacattcttaaagaaaagaattctcaaaccagaatttcatatccagccaaactaagcttcataagtgaaggagaaataaaatcctttacagacaagcaaatgctgagggattttgtcaccaccaggcctgccttacaagagctcctgaaggaagcactaaatatggaaaggaaaaaccggtaccagcaactgcaaaaacacaccaaaatacaaagaccaatgacactatgaagaaactgcattaactaatgggcaaaataaccaacaaaataatagcatcatgatgacaaaatcaaattcacacataacagcattaaccttaaatgtaaattggctaaatgccccaattaaaagacacggactgacaaattggttagagtcaagacccatcagtgtaaagggatcaatgcaacaagaagagctaactattctaaatatgtatgcacccaatacaggagcacccagattcataaagcgmgttcttagagacctacaaagagacttagacatccacatgttaatagtgggggactataacacctcactttcaatattagacagatcaacgagacagaaaattaacaaggata

SEQ ID NO: 819453 - DNA, 607 bp, Homo sapiens
atttacatgatcacaaggtcccacaataggctgtctgcaagctgaggagcaaggagagccagtcagagtcccaaaactgaagaacttggagtccgatgttccatggcaagaagcatccagcacgggagaaagatgtaggctcgaggttaggccagctcgccttttcatgtttttcggcctgctttatatgtgctggtagctgactacattacgcccaccagattaagggtggatctgccttccccagcccactgactcaaatgttaatctcttttggcaacacccgcacagacgcacctaggatgaatactttgtattcttcaatctaatcaagttgacactcagtattaaccatcacattaggtgtggccaaattgatttccaaagtacttctagcagttattttcactagcactactaaaaaattccatacatttcatttctttaagaagaaataactgacatgaagcagatatggcaaaacatgttaaattgggtgattgattgcgtgtattttgttattttatgtaccttctttgtatgtttgwaatagttcataattacaaaaaatcaaaaacaataaaagggataaagaatacaaagaata

SEQ ID NO: 819454 - DNA, 634 bp, Homo sapiens
atgtctttagtccacttttaaatgggattatttgttttttgttgagttgagttccttctatattttggatattagtcccttattaggtgaatagtttgcaaatattttctcccattcaacaggttgtctctttattctgttgatgaacaattttttgtggtatagaagctttttagtttaatatagtcccatttgtctatttataaaaatagttatctgtacttttgaggtcttagccacaaaatctttgcctagactgaggtcttgaagtatttcctctatgttttttttctactagttttatagttctgtgtattatgtttaagtctttaatccatcttgagttgatttttgtagatggtgagagataggggtccagtttccttcttttgcatacagatatccaattttttctagcaccatttattgaagagggtgtcctttcctgaatatatattctcggcactgttgtcaaaaaccagttggttgtaaatacatggactaatttcrgactctctattctgtttcactggtccatgtgtcaatttttataccaataccaagttgttttggttactagagctttgtgatatattttgaagtcagatagtgtgataacttcagttttcctctt

SEQ ID NO: 819455 - DNA, 561 bp, Homo sapiens
gcaaactcatttttagcaggttgtgaagactcatgtctcatgaagaaaacaaataggaggagatagggagaaagaaaacggagcaaaagatggaaaataaaaaacaaaaaggtagcacaatcctggaaaactgatagaagccatattattctgaagtccataaatcagtaggcaggtatgaaaatgtttcatgtatatgaatacgttgctgttattttcctcaaaagtttaagtcatcttgtatccatttgcaaaaatttaaggaaagcataacttaatttttagtgttttgaaatcaggcaaaatgtcaatagaagaaaaaagtcatgattttggagacttgcagccagaaaaattttaggattcagtccaatttgtagaaaataataaaaactgaaaaacactggacaaggcaagaatctaataacrggtatagtatagtttatttggaaacataattttatctcttcaattccccgattttattaaagaaaaaatgatagtaagaccaattaatttgtaaaataaattgtagtcttatatacttagcttgattatttg

SEQ ID NO: 819456 - DNA, 363 bp, Homo sapiens
ataacaaggaaattagcctcccaattcttaaatgtaagacatcaggggaagtgcctcagcaggagatgatakgtatcatatatatcaaaagggatagatagataggtagatggctcaatgatagctagctacaggtctctgtttctttactgaaaaatgtaattccaactcaacatatttcttggaaaaacaaaaattctcaaacttcagacatctcaagttatataatgtgaaacactcttctttgcttgatggctattgaagaaatatttgtaccagatatttcacgatgagtaaatgacaaaatggcagtttaagggctagccactctttatacagaaatttacacaaacaaatgaatcc

SEQ ID NO: 819457 - DNA, 525 bp, Homo sapiens
cctcagcacattgattattctcaaggatagacttgccacaaaacaagtcttaaaacatttaaataaattgaaataatatcaagcatcctctctgaccacaatggaataaaactaacagtcaaaaacaagaggaattttggaaactatacaactacagggaaattaaacaatatgctcttgaatgaccactgtgtcaatggagaaattaagaagaaaatggaaaattttttgaaaccaataataatcaaaacacaacataacaaaacctatggacatagcaaaaacagttctaagaggaaagtttatagctctaagtgcctacatcaaaaaacagaaagaacttcaataaacaacctaatgatacatcttaaaaaccataaataaataatatataaatatttataataatataaataataataatactgactgtaaatggaataaattttccaatcaagacacacagactggataaacagattwaaaaaatcaaaactcaaactcaaaattaacagaaaaaataat

SEQ ID NO: 819458 - DNA, 635 bp, Homo sapiens
gatgtcctttctcttcctgccctccacagagcaaacaagcaaaaggaatcmgaaagaagtctgaacatactttagattcatgttgatctctctaaagtcatatagtaaaaaaaaaaaagcatgaaacaatcagagaggtccaactggttggcacactctcccccaggcagattatcacagacagacttcaggggcaccctgcaaggtcactagagcatgtctcttatcctcctacccccaacttaataactcttcctcttgcacacatccctttattcccttcccccaatacctccaactttttctgttttatagcttcaaggttttctcctcccctctgtttcctgaactggagtccccatttggtcttgacttttaagtctccagccctactattccctttcttgcttggcttcactgctgggcaggggcagaggaggagaggaggggaggaaagcccccaggtggaccccaggtggtagcaagcttatctttctttctgagtgatacagatacctaaaaagcaaaagttatctcacccagtcaaggctggcagagattttagggccttctgctcacacattctctcatttccaacttgaatttcatccatagccccattcaatcaccccttc

SEQ ID NO: 819459 - DNA, 474 bp, Homo sapiens
actcaggataaggatccatctagatcattttgttctttcttgcttattgcagggggcttcgatattgaaagggcaatttggccttaacttggaaatgctggagattgattgcatacaatctgtcctgctagtgagagaagcaaggactgcatctaagtgcaacatgaagacttttggtcccaagctttcctccaacttcagtgggaggcagcccaaaaccaccgtcggttcaagaatacaagtgacctgcaattcttggaaagactcccccaattcttctcccaatatgtggtcagcttttccagcaggattaggttcggtaggaattattgaatataatataatataatgtaaaatatcggaattatttttcttaggtgcttagtaaggagrgtattagattttaatcatatatgtgttatttctttaaatcttgccttaatttatattatttaataagtgaagatttgctag

SEQ ID NO: 819460 - DNA, 597 bp, Homo sapiens
caacagcttttaacaaatacaccatggcttctgakgcactgctccttcctgtgcgtaggatggaggcctctctcccatatccatatgtctccgatctggtgtgttctatctcccagtatttgtgcaaaggcagccactgtctatggtttgaccatcttcctcgtcagattccctctttgttctcttttgtaattccatcttactttctgcccagcctcacacaatactgattcaatcacagaaaataggtagattttgccactgaaccagactaatgccatgaaagtgtggggagactttgttattcattcattcatctatcattcattcaaccaataagcattgataactattatgtcaggccccaggcatgtggaatacaaagagaaataagacatgttctgaccttcaggaagctcacaatcccctataattgtgtcaggaatttttctctgatcaaccttgcactaaaaatgctcacttttctgcaaacaaggtgccatcttagccctcagagaatggagcatggtactaactcaactttgaggggtttttttaaagtaaaaccatctaagcaagaatacttccatttccaaa

SEQ ID NO: 819461 - DNA, 597 bp, Homo sapiens
caacagcttttaacaaatacaccatggcttctgaggcactgctccttcctgtgcrtaggatggaggcctctctcccatatccatatgtctccgatctggtgtgttctatctcccagtatttgtgcaaaggcagccactgtctatggtttgaccatcttcctcgtcagattccctctttgttctcttttgtaattccatcttactttctgcccagcctcacacaatactgattcaatcacagaaaataggtagattttgccactgaaccagactaatgccatgaaagtgtggggagactttgttattcattcattcatctatcattcattcaaccaataagcattgataactattatgtcaggccccaggcatgtggaatacaaagagaaataagacatgttctgaccttcaggaagctcacaatcccctataattgtgtcaggaatttttctctgatcaaccttgcactaaaaatgctcacttttctgcaaacaaggtgccatcttagccctcagagaatggagcatggtactaactcaactttgaggggtttttttaaagtaaaaccatctaagcaagaatacttccatttccaaa

SEQ ID NO: 819462 - DNA, 571 bp, Homo sapiens
cagttttttatccgagtctaactccctacaactaggccggttgagtaaccaaaatatgctactactttagataaaaactaacattttcctttccaaaaggatagtttataaatcttgaaataataatgtgaaagcagctaccatttaatgagtgttcactatgggcaaggaagggattttatatttttacttgttaatcatcactcccaattctgtaaggagagttttattatccttattttttagatgtggaaaatgagtctcagagagtttagataacatgcccaagttcactcagctggaaaataggatgggctcccatcccaagtttccagtctgcaaacttcttgctctgccttttcatgagattgcataaagctctagattcaacaacagagagtgagttgcagccctaagtttattatttactgatgcaacaacrgatgaatcatttaatctctctcagccccattgtagtcttctgtttaaaaaaaaaaaaggtgatgagaagtataaggagaaaatcagtgaaacctgaaatgtagacattctataggacaagtgagatggt

SEQ ID NO: 819463 - DNA, 657 bp, Homo sapiens
gctcaaattgttattaaaaaagggaagtgctaaataataccagcccttagcacatacatacctcccgaaagttaccatactcctaatttgtggtattgtggattagttaatggattagttttgttgtgggaaatatatgtagatatgtgtgaaatcatggacatagagtatgtctaaatttatttcccaacattgttttaaaattcacctgcaatattaaaagaggtttatagcccatttaatcttgttgtgtcatatttcatttggtatatattccacagtgcatttatgctaatgaacatctgggtggtttcagattcaggactattataaatagtgctgctatgaacattttagtacatgtcttttagaaaacataggtttttttggggggtacagtggaatttctgggccatagattatgcttatgttaaatgctagtagaagctgccaaataagcagggcttcagaatttaacttattctatattcttgtcaatacttattactttctattactataattttagccattccagcctgtaygttcatgttattttggattccaactttcatttttctgatggctgataaagctgagcaacttttaatatatttattaaatatttgaatatactcttttaaaaattatctgctc

SEQ ID NO: 819464 - DNA, 556 bp, Homo sapiens
gtttgcatcagtaggttcctttggtttttgtttgcttgttttgtttttttgagtacttttttgaattcatgaaacaaaatgtgtttatacatttatgtctttattgcaattatggttgtttccagatctgggctcctgtgatgtaagctactattattgtactggtattcctggatacatttttctgtggacaaatgtttttattctcttgggtaaatgccaaggagtgaaatgaattagtctttttattttgttgttgttgtttttgttgttgttgtttgtttgtttgttttgagacagagtctcgttctgttgcccaggctggggtgtgcttatagtaggtgaatgtctaacattttaagaaattgccaaacagatttctaaaggattgtaccattgtgtagtcctaccagtgatgtatgagaattctagttgttytacatcttcactaacacttagtatattctttttagttttagtcattgtaataaaagggaaaaaaaagaaaggcaaaataatcaagaaaaagaagtaaaattgtgtctattttcagtag

SEQ ID NO: 819465 - DNA, 610 bp, Homo sapiens
aaccgggctccctggagaaacggctgattctagggctgggaagaaaatatgcaagatgagtctggagcagctttagtgccagaaagtaaggaagggctcaaaaacataacaaaaaattatggcaaagggaaacaggagccaatagagagagctcccaggcgccaaaactggaacaatttaagcaacaatataaataacatagtattggattataatgaaaagtacaaaataaatatccatgagtgcacacggatagaataaatgactgaataaaccagtagcagaagaattccaaataacttattacatactgccccctcaaggaagtgaagcataactccccatcccttaagtggaggctgtgcatagcggctattctgtgaggctattctcattattagactggggttattattagactggtttgggggaggaaaaccacagaggtacagtgtcattctcaaaaagttatatcaagaraatatgctatcaatatcaatatcacttaatgtcaaccctgatggcctagttaattatttgatcagtcttctgttgaaattattgttgttgttaattattattgttgttaattatttgatcagtcttctgt

SEQ ID NO: 819466 - DNA, 517 bp, Homo sapiens
atgaggtcattgccgacaggccttaacacaatgtgaccctgtgacccatgttttcactacaggaggagctgagggtacagacgcacacagagggaagaccacgtgctaagacacagggaagagatggccttttacagccaaggagagacctcattagaaactaacccagccgggcacggtggctcatgcatgtaaccccagcatttgggaggccgaggtggacggaacatttgaggtcaggagttcgagaccagcttgatctacatagtgaaaccctatctctactaaaatacaaaaattagccgggcatagtggcgggcgcctgtaatcccagcgactcaggaggctgaggcaggagaatcgcttgaacccaggaggtggaggttgcagtgagctgagattgcgccactgcactccagcctgggtagacagagcgagactccctctcaaaacaaacaaacaaacaaacaaacaaamaccaaaaaccaaaaaaactaacccaactgacaccttgata

SEQ ID NO: 819467 - DNA, 606 bp, Homo sapiens
gtgctcttatatgatgttcttccatttttaactaatgttaatggtgcatagattccattttaatgcctttttcttgttcatgtagtttacctattatattctgttttttaaatagttttgtagagtagtctaggtcagcattctgcaagctgttctcagaatactaaaaaaagggcaaataagcttgggaaattgtactaaatactctccttgaggattcaaagtacatattaacataagaaaagatctgagaagttttaaaataacagggaaaacttttgaagtttattcaatgattaaaagaacttaaaaataaagaacttatttgtgtagaggaaggctttttcttggcacagttattaaaattctctggaatagattttaatttttttcttaacaccaatttaagaagtgctagtctatttcatcattatcattatcactttaaataaagagcttaggaaattacttactcaattcatcgttgttctttcatctcatttaktattttttaaatatattttaattattttttatctatttaaggaatcttctctttacaataaaaaattgtttggttcctttatttttatatttaagcaggaa

SEQ ID NO: 819468 - DNA, 612 bp, Homo sapiens
catactgttctgtaacttgttacttggattaacactgtatcttagacatctttctatgtagagcgtatagatcttccctgttcttttaaatggctgtataattgtctatggaaggacttaatttatttaacccataccttgttgatggcttatttgtgttttgcttttattttttcctctttgtttttgctgctacaagcaatgcttccttccatcttagcggatctgtctttgtacccttgaatgagaaagttgctggatcaaaggatgtattcattttgaattaggtgttgctaatttttcctccaatgatacactgatgtatcccccctgcccacagtgtgtggtcatgcctgttctctcaccctcttaccagtactggacattaataagcttttaaagatttgctactcaggctaaaagtgtctctttgttttagggtgcatttcctcatttaatgaagtgaagattcttccttgtttagtgaccatttgcctttatttttctgtgaactgcttstgaatggcatttgtcgttcttctgttgtctttttagtcttttttctaaagcacactttgtagccctttgttgtaaaatgttggaaatattttt

SEQ ID NO: 819469 - DNA, 667 bp, Homo sapiens
ggcctcaagaatatgattttttttttaatttcttacactgttttcttttcacatttagttgacatgagcctttcytggtttcaatgacaggtggtgatggtttcctttatgatacacacatcataaaacagtcgccttcagcttttgttttttaatagcttgcttacataagttttacagagctatgaaagaatcaaatagcaatcaaaatattcttcataatcaccgttaatttctagttgattcccagtgttaactttttcaatctgagttcaaatttggtgtgcctgcattttagttcaggatcagatatttcccagtgttcgattgtttcaaatccagaaaaacagaagaagagtctggcattttacattccagatttcaaaagaacaatctatttccaaagaaaaaatatcttaaaaatattttttataaacaaaggtagttttctcatttctgtttttccacttgccacattcttcaggtttttgtattgactcctcttcgggggagagtaagtctttttgtgacatatttgcaagtgtatattttaatttacatggtgcattaggccattcttgaattactataaagaaataccggagactgagtaatttataaagaaaagaagtttaattggctcacggttctgcaggctgtacaagca

SEQ ID NO: 819470 - DNA, 636 bp, Homo sapiens
aacaagccagaaagtagcatccgggcacattttgggagacagctggccaggcaggactaccacccagggcctgcttctcccataacctctggagggaaacagagtcttggtgggcacaggcatgctggagcccagtgcagagctggaatcgggccctcagccgcctccccaggggaggcctctcaccttgtcccagatctgctcactggtccccagagtgctccctaccagagggttgacccctgcgctgcacaccaggaagtcgacgcccccacagtgctccagggcctgcggagaggagattggatgagtgtggagatggcctgaggaggactatccctcccagggcagcccaggtcataaggccttcaggcaaagcttgcagagctcctaaaggaaaatgacctaggtgtcccaagggcaggctcctggggccaggcactgagagaggaaggtctgctccaggagtccctctgggacctccctcaccccttcagactcctcctccacagtgattctcccmgggcctgggggtggggtgagggtcctctcacgaacaggtcactttcctgagggaccttctgggtagcgaggttagcttgggcagcctgggtgcagtcatggtctcaggacata

SEQ ID NO: 819471 - DNA, 634 bp, Homo sapiens
cttagcctataatataagttgcaaatactttcccctagtttgttatttgtattttaactttatttacaaataaagtcctcttggtggatccttcccaatataattatgtactgtccccttttgttcccattaattcttttttgtcttaaagtttatgtaatctgatattaatagttaccccagctttcttttggttaacaatttccctgtatatcttttttcattcttttatttacaatctttgcaatcaattttttttactccatgtcttgtaaccagcatataattgagttttgtattcctttatttaatccaatctgatagtcatttaacagatgaatcatcttactctttagtatggttgctaataaatttggatttatttctttggtgtttttattgtgctttctgttaccatctacattagcttaccagggctgctataacaaattaccacaaacttggggggcttcaaacaacataaatttattcttttgaagttttggaaggcrgaagtctgaaattaagctgctggcaggtctgtgctctctccagaggctctgggggagatcccattcctcccatcatgcagtttctggtggctgtcggcattcctgcactcatagctgcatca

SEQ ID NO: 819472 - DNA, 333 bp, Homo sapiens
atcctggatccaccacttcctgtgtaagctctgggaagttatttaatgtgtgggtctgcagactggctcaatcaacatccattggaccttcctccccatgtgccttgctgtatgccaaagttggcaaaatgacaacgacctattcctttgcacctccaggttctagatgtgtttaagattctaccaagcagacgtgtttgcatatgctttgagargctaaggaaatgaggtggaggccatacggtggtagattctgccgttctctggcaagcacaggcaaggagaccagtcaccagttttgcaggtgtgctgaaaagcagattgcaggtgcag

SEQ ID NO: 819473 - DNA, 514 bp, Homo sapiens
ggtccccagaaggtggttgagtgggtgttcctggggttgacagttcctgcaatagagtcctgattctcaactttcctgactgtggaagcagcaatcttgagggtccagccatgcagtgtcctgttgagaatcaytcctggaagctgagcctccatcctgctcctctaggcccttctaattctggaaactcccaatcccctctattaatcttttcttaaatagctggtgaggtttgtgttttcgggcatctgaactgatatggattcacttaacctgcatggacctcagtttcctcatggtttaagggatggtgatatcaactgcctcaaagggttgtcacaaggatctgattagattacccatactgagcacttagaacagtgcctggaataaggaaagtgtttcaaatcttattattcttagatttgtaaatccagaaacctgctggtgtcagagcacctgcaattgacaaactctggggactggggacatctagtatattctgatttgggaa

SEQ ID NO: 819474 - DNA, 496 bp, Homo sapiens
ggaaccatcacctgagattgacgggcagcaattgaaaataataaaattatgtaagatgagcttgtaatcaccagcatttcacaggaagcaaaacgcatttcgttctggctgaggaacagaaagtttcttcctcattttaaatctgtatcagaggtaaagccttctattaaaacacaattctctgtacacttacagcctctggcaggctgccaaggagactatcatggaaccaccgctgcagagaagtaggcagtcaaaggcatcgaggattgctcctgagaaaggatgcaaagtctccagaattcttgggagggctctgcccacagctaccccccacctcttctggccaggcctccctcctcaaatgcaaacacatatgcacacacacgcacacacgctctttttytgggagaggcatggcaaaaataaacactgagaaaattcttccctgtcttttgcgcctgcacacacacacacacacacacacacacacaca

SEQ ID NO: 819475 - DNA, 627 bp, Homo sapiens
gcttggtcaatttcctgtctcttctcctccctacctcctatgccttcccccgggcccttgctcacccttggagataatgcaaaagccccggggccagtctctgcctccaatgttcaccatttaatccttcctccgtggtgtccacatacggccaagagtgaggttagaggtcagtccctgcggactgccgcagtattggggagaggaggggatccagccccagagcctgaagcttctcattctggctctgccactacctgcctgcttagcactttctgggcctcggcttccccatctgcaaaatgagcaggtcagaccaagtgacctctcaggccctttccggccaggcgttctgggatgggaacagatttcctttctcccttccccctggaggggggtggttcaggcctaagtgactcaggacaggccctatctctcagcacagcacaggggtcctgccctgggggcgcctgcttcgctcctcaggtttcacctcccayccttttagagcacaggggagtgtggggcctgggccctggggagctgagggtctgacccgccctgcttaggaaaaggacagaaaatgtctggaggacccccccttcactgcggacatgcgtgagcagg

SEQ ID NO: 819476 - DNA, 585 bp, Homo sapiens
cctaaaaaagcagcattggcacagccgcagggatggatttgaggagccctggaatactcccccaaaaatgccgcagttagaatacacagcgtatccaccagtaacaccatagtgtgaataaagtcatccgcctgtgcctgagctgggcttctgggggccacgatagaagaaggaacaggacacagaggggacagagcacatgaccacaatctccccaatgcctgaatgttgctggagcttgggctggggggttggagtggggctgggagaggggaggggccggcttggggacgtgaaaggtggccagcagtgtgctcagtgatctacgatgggaactcaggacactcctaggagattgccctaattatgcccattttacagataaggacagtaaggcttagagatgttaaagattctacccaaggtcaaaaaggccgtgagggaccagctggaactcatgttctgagtctctcctcctcrctcaccctggcccccatcagcatcacaagcaagagcatctgggatccaggagttgccaagccccctcctcacttctttgcatgctcatgctcctctttctccttg

SEQ ID NO: 819477 - DNA, 606 bp, Homo sapiens
cagggtggcctagggatatgaacccaacgggagggggttcaagggtgrtgtgtcccccaaggtgagtccttggaggagagattccctggtggtcatgctttgcactgtgagctttgtggagcttacctagaggggcacatgtgggggcctcaactgggctccatagggaaggaatttgatggggagggagtcccctctgaagtgagagctgagctggcagcatctccctcgagggagggcaggttgacagatgcctgtccctagagccagcccctcctgccaccacctcatatccagcccaggggacatgggggcccaggtatggggcacagaggagctagggaagggggctgaggcctggctcagctcccctttcggagcagcctgagggtgtgagctgagggggaggacccattcgccagaagtgctgggccttcctgctggggtgcgtctggccaccctgggctcgctcttggtttccccatctctggtttctttcgggctccttcctcattatgggctctccccgggcctccctctgcctcttgcttgtctctgtggcttcttcgtggttcctccactttcctactgtgcccaggagggcca

SEQ ID NO: 819478 - DNA, 561 bp, Homo sapiens
cagcagctgagttcctgctgggtccggctgggtctggaaggttcaggggggcagagccattgcacctctgttgcattatgtaatttactaagaaccatcacacccgccgctttccatttgtttctctctgtgccctgtgaggtaggtgggaccaaaccatggccccatctggcagatgagaacagaggctggagaaactctgggattcccttcctcttgggcctcagacttggccccaagttggcctttcccaggtgctgccacccccatccctgagtccagggagtgggaaggaggtggtaagaagagcttggaagggactgttaaggtgcagatgtcttcattgtcttcaaatgaaaatcagtgtgggggctgcctttgttggggaacacctggcatatgtttgggggtgggagtggggcccctgggtggctccaggaggctggcacaccaaagggaaggtgaacccacagagccaggcccttcaccttgggatttccatactccgggatccacyagtgaccccgccagggaggcatggtgcaggggacctgggtaccg

SEQ ID NO: 819479 - DNA, 598 bp, Homo sapiens
gggcctagggcagcgggagggcggaatgcagccgggcaggtttgctccttcgtgttccaggggaatgctcacccgacggcccccgctcctggtctcagaagctcctccgctggagacagggtagacggctgagcccctccctcgcgtgcgctgtttggaggcttgtgcgctggggatgtgctgcatctgtagatccagtgtcccaaatggtgattccgtcacttccgtatccattcattcattggctgttccccaggcccgcactgaactacagagaagattaaaatgcattcctcagtggactcgggactgctagactagagaggatggaggcggcagagctgaaaagctccccattgggttcaacgctcacgacttgggcgatgggatcaaccataccccaaacctctgcattacgtaatacacccgggtaacaaacctgcacgtgtccccaattctaaaagaaaatttgaaaaagagaaaataacatcataaaatgtggttcctacccmtgatgcgtgcacagcctgggggaggcagagcagccacggccacagcggtgtgtctgggtggtgcgtttgaggttccggggacagaa

SEQ ID NO: 819480 - DNA, 563 bp, Homo sapiens
attaatatatgtaccatgctttctacttttccccacggttttccttttttatcaattgaccagctcttcttcatttaatttctgattaagtgcttacctttaaattttaactccaacatctgtccattattttaytttcccttatagcctgtgtaagtgtagtgccccttgtcattatgctcggcaaagcacaaaccttagcccacttggacttccttcctctccttctcctccccacctgcaatgttaataccacttgagcttttagttccagttccatttagacttagcagcaaattctaattcctttactcaccactgcttcttgaatctgtagctttctcttggatttattttcattgtgttgaagtacctcctcctacaggtaggatggaaggtgactcattttctcatctgtggatgtctgaaattgtctttacatattttaccttcacacttgaatgatggctttagccgattcaaacatgtgtcccttagatctctaaaaatatttcccctgggtctctgaagatcttccaacatgcagtgttgtagctaaatct

SEQ ID NO: 819481 - DNA, 495 bp, Homo sapiens
ggaaaccctgtaaaacccaaaccatgatgaaattcatgatgtctgcctaggaggaggcatattccataaccaacacagaattccactatgaaagggctcccaacccttttagatatattcaccttggctctaacaagctccaatccaaaattaaacctgtagctcatctctttgagggctctacaaactctgtgatgattactggttgtaatttccgttgctatgatgagaatgcccttcggctttccttaaaattgcacccactaggataggaggagagcaggcccttgtgaccctggttgggtacaactctaccatcattaggcatttcagaaaaaggatggcctagatatcaaaaatagatatccatttgtaagcatgtgcaratcttctctatttgtaagcacctacagattgttttcaacatttcaaaatatttcagagaggttttatttctgaaggaaaaatgggttataatttgatgcagtagcttgg

SEQ ID NO: 819482 - DNA, 586 bp, Homo sapiens
ctagggctgccgtaacgaaaccacagactgggtggcaaaaactatagactgggtagcttaagcaacttaatggtcttttctcacaattccagaggctagaagtccaagatcaagggggtggcaggtacagttttttcttacttctctctacttggcttgaggatggcctccttctctctgtgtctgatggtcatccccttgtctatgttgtctgtgtctgaatctcctcttattataagggttctagtcatattagattagggtccattctaattaccccattttaacttaagtacttctttaaaggccatgcctccaaatataaccatattctacggcactggggaattatatcttcaacatataaatgttgggggcacacaattcaaaccactgcaggccatgtagaattaaactaggaaacaataacagagagataataaaatatctaaacatgtgcaaattaaacaagacacagaggaagttacaaggtaaataagaaaaatgaataaaaatgaaaataaaacatytcataacattgtgggatatagttaaaaatacttagaggaatattgataacattaaa

SEQ ID NO: 819483 - DNA, 478 bp, Homo sapiens
ttgtaccgacagtaactcacyacatcggcaatggaaacgagaagacaaggaagtagtgtcttcaaaccattaagagacaataactgtcagcaaaatatctttcaagaataagagcaaaattttaagacctaatataagcaagcctaataatgtttactatccacatatacacgctaaacaaattcaaaaatatggtcttcagaaagaaagaaaataacccaagaaggaaggtcttagaaggaagaagaaatagtgatcaaaaacaataatgtaggagccaggagcggtggcccatgcctgtaatcctagcactttgggaggctgaggcagtcagatcatctgaggtcaggagttcgagaccagcctggccaacatgttgaaaccccgtctctactaaaaatacaaaaattttctaggagtggtgacacacgtctgtagtcccagacactcaggaggctgaggcaggagaattgcttaa

SEQ ID NO: 819484 - DNA, 567 bp, Homo sapiens
ggattgcttgagtctaggagctcaagactgcagtgagccaccatcacactactgaactccagtctaggttacaggaagaccctaagaaaattgaaatgatggcacgatgtaagtgactcacacttgtaatcccaacactttcagaggccaggataggagtatcacttgagggcaggagttcaagactagcttggacaacataacaggaccaaagtcttgctctgccgcctcagctggagcagtggcatgatctcagctcactgcaacctctgcctcttgggttcaagcaattctgcctcagcctctcaagtagctgggattacaggctcatgccaccatggcaggctacttttttttttgtattgtagtagagatggggtttctccatattggacaggctggtctcaaactcctgacctcgtgatccgcccgcctcrgcctctcaaagtgctgggattacagacatgagccaccgtgcgcagccaaccccatctctttaaataaataaataaataaataaagctgagtgtggtggcactcctgtagtcccagctacttaggaggctg

SEQ ID NO: 819485 - DNA, 622 bp, Homo sapiens
ggtcagatccaatcatatgagcccttctgtttgtttttgagacaggctcttgctctgttgtccaggctggagagcagtggcmcgaccacggctcactacagcctcgacctcccaggctcaagcaatcctcccaccttagcctcccaaatagctgggactacaggtgtgcaccaccatgtctggctatttttaaactttttgtagagaagagggtatcgctatgttgtcagggctggtctcaaacacctagattcaagtgatcctcttgcctcagcctcccaaagtgctgggattacaggcatgagccaccatgctctgcccatatgagccctttaaatctgggtctagaggataaaaagagaagtctgaagtaagcaagatgtatacttcctactagcctggaaaaaagcaaacagcactgttgtgaagtgcctatgagggggccatgtggcaaggatctataggcagcctttaggaaatgagtggttccagtggacagctagcaagaaaatgaggatctcagtcctataaccataggatctgaattctacccacgaccttaatgagatagaagaggaacctgggctccagatgagagcacaggcagtaatacctttatttc

SEQ ID NO: 819486 - DNA, 342 bp, Homo sapiens
accttgtctccatcctccttgggaggaaagcactacgatgattcccctgaagtagaaaaagctgagtgactttcccaagggtcatgtggctagggagtggtgagccaagagtcaccccgggccrtcttatcttggagcctttgttctggacttacctgttctgttgccttaggaaacatgcctgcctctgtgcttccctgcccctacccatgccaatctccctttaccccttccttcttgcgctccaagcatccagatatggatcaattcttttctgctttttgaatgaatatggttctgtcttgcttctgggcctttgcacatgctgctccttcctctagg

SEQ ID NO: 819487 - DNA, 705 bp, Homo sapiens
gcagggggttacatgaggaaagaagtggtatggaggggacagggtggatcctaagaggccctaaaaatagatggctctggaggaagtggcagggggccaggttctgagcttcaggttggttcttttaaattggtrtggttctaacttgttgacacgattcattgccacaagctaagttatctctgcccttcgaaattttgatgagcccttccgaagtcctcgttctttcgtcacattgccggggctcccacaccaagggagttctctggccagagcaacaccaccttctggagatgctgcaggttgtgggcaggggaaggtcctagtcctgggtggggttcccctctcctacagtagattctgccttccttgttagaggacgaccacagcggcacctacaactgtccttcaccaagcacgcactctgccaggcgctgtgagaggaatcagacatagggttgtttctcatcattagcaaacaagattgcagaatacgtagtaattcccatattttctagacaatggggcttaaagctgaggaagctgcctgtcctactcataccccgggagtggcagtgcacctattgagaccaggcctgttggactgtggaaccggtgttcctgatacgccagagacggttccaaaacagcgggtagggacaagtgagtggctaggagaggctgggcctccatctcgtgcactga

SEQ ID NO: 819488 - DNA, 575 bp, Homo sapiens
tttgggacaggaattcataccacctttgtgagtraaaaccttcaagccaaacattattttaaagtggtcccaggttggtaattcccttagacacttgtaaaaagcaaatcacctgtagcagcatgctctctagacccaagactaagacagttcctccagaattccaaggaatttgaattcgcagtttaagacatcacttcactgcaaaaataataaaatggcaaaaattggcaaaataataaaatgaagattcagataatgaattagaagactcaaaacataaaataaggttgttcagtatgtttctagaaataaaagaaggtattgaaagtatgagtaggaagtaagagactaccaacaataattcagtaggccagttaaacaataaaagagagagataaagatacaattagtgaattgaaagatggacacaaagaaattacccaaaatgcaacactgacagaaaaaaggttacaggaaatgcaaatgagactaagggatgtggaggatagaataaaccaaaagtctagcacatgcctactcagatttccagaaataaaaaatagagaaaatgg

SEQ ID NO: 819489 - DNA, 528 bp, Homo sapiens
gtgtctaatttttatgttaatttttgtcctgggatttcctcaacacaaggacagctaaaattcagacttcaaacttatgacttcatggcttttatttcttgagggagacttatttttttccaccctgacctggggttgagaataacttccttgttgccctcctgagtcaatagatggcttttctttttcaaatttctcttcccctaaaattgctttctgcaggagccccagtttcaacacttaatccatatccagtaacgatattatttctttgtcactgcacagcctgtgccataaccaggtccagtaatgtccagtaggtggctcctgggatgtggttatcagcattttctacaattctagcgcatgtacattttctttttttttttttttcttgtgaaattagccattgtgatggttaaagttacgtgccaatttggctagactayggtatccagatatttggtcaaatactagtctagatgttgctgcgaaggtattttttagataagatgaacatttcaatca

SEQ ID NO: 819490 - DNA, 463 bp, Homo sapiens
gaaagtggtcctgatgcatgcatattaaacatgcatcttacatatgacacatgttcaccttggggtggagacttaatatttaaatattgcaatcaggccctatacatcaaaaggtctattcaggacatgaaggcactcaagtatgcaatctctgtaaacccgctagaaccagtcatggtcggtgggctccttaccaggagaaaattaccgaaatcactcttgtccaatcaaagctgtagttatggctggtggagttcagttagtcagcatctggtggagctgcaagtgttttagtattgtttatttagaggccagtgcttatttagctgctaragaaaaggaaaacttgtggcagttagaacatagtttattcttttaagtgtagggctgcatgacttaacccttgtttggcatggccttaggtcctgtttgtaatttggtatcttgttgccacaaagagtgt

SEQ ID NO: 819491 - DNA, 614 bp, Homo sapiens
gtggctggtgatgcgatcgaggaggcaagcagggctgcatcrtaggaccctagggtatggtgagcagttcattctcggaccacttccagtcagacagtggaaagagaagctgggaaaccagttagaaggtgactggtaggccagggatgaggtgatagggcttgggcaagaatggtagcagtggggagagagaaaggtggatggacttgtgctgaaaagtgcaaactcagcactcagggacaactcagtattctcatctcttttgcagacctctctctgggactcactgagcatgggcagcttccctgtagccacctgtttcatccaccacatggcattctctgagattaagtgagggagaaagcacagcatgattaagagagataaaaggattataacaagaaagttataatcccagattatcaggtcttagaatcaggtattttagggaatcttgtatattccccaagtagtaaaaacaacagctttgatttataaggtgaggctcctttccaggaggtccagagcagaagatactgttgctaggcttggatctatttttacaattggttttaggtattgaccaatatcctgccaacaaaggtggttctagg

SEQ ID NO: 819492 - DNA, 617 bp, Homo sapiens
tttcacatctagaaaatgccatttcctttttttccccacatttatcagtgctttagccaatgtagtatgtataccagatatttagataacactttgactgctaaagaaccattcacattgtatggtgtttgtctacaacactatatacatcatatctagataatggtagaaaataagagtagtagaattttacttgtatccaactcccgaaccaaagagcccagtattatctctgtaatcttcacaatgatctgctaagaattggcaagagcaggaactaccatccctgttaccactgggaagccaatccccagaaaggtaaagtggggttacactttgagctcaccgaggtagcaagaggattaaaatgcacgttcctttgcaccacaccagaccttcgttttcaagtggattaagttttgtgaatggaatcttggaccaatcatttctaaaatacagtactccctgtctgcttcatctcaacaaatgactttctrgcctagagccaggtggtggttagaataacctggaagtcatagagtagaccctgtaattttgactcaccttcagtgtacgctgtgttatatctgtcagttctcattagtatagtggtgagt

SEQ ID NO: 819493 - DNA, 619 bp, Homo sapiens
tgtattatttacttatttattgagacagtgtcttgctgtcacccatgcccatgccatagtgagtggtgcgatcatggcccmctgcacccttaaactcccaggcacaagcgatcccccaacctcagcctctcgagtagctgggactacaggtgcacacaacgacacccagttaattttttatattttgtagagacagaatcttgttgcccaggctgacctcgaactcctgggctcaagtaatcctcccacctcaacctcccaaagtgctgagattatgggcataaaccactgcacccggctgggatataaactttatacacggtccccaagtatctgaagcacacttatatttgtgtgctaagctccttactggtattgttttgcttaatccttcaacagctctataaagcatgtgctattcttatcctctccccacagacaggaaactgtgattcagagaagctgactgacaaggcacaaagacaaatgtggcaaagtccaaacgcaaacttaacacattctgattgcagatttctgtgatagtaatcactctagaccagaggtcttcagactttttctacaaaagggtcagttaataaacatttaagatgtgtggact

SEQ ID NO: 819494 - DNA, 484 bp, Homo sapiens
tgcccttggctttcagaggccagtccaaggaaaaaagctcatgaaaaggggagaggtctaacttttaccatgtatctatcatgtgccaggcccttagctcacaaatccrttgggttatcccacttcacagctgtctaatctgaggctcagagaggccaagtcacttacctaaagtcacacagcagaggttggacttgaactaggtctttccgattccagaacccgaaagcttgtcattgctctaagtgtccaaatgctccagtaactgctctaatgggggccccattgaggaagcacacagcaggggaaataacagccttcccatttccagagcacatagcaaggggcaggggataacaaaagtcttgtaaaatgcagcatggcgctctgtaatcccactccttccccctccatgcctctaagccccaagaaaatgcggttccatatactgggtttctgtttagcaaggttcacctgtgtctcc

SEQ ID NO: 819495 - DNA, 518 bp, Homo sapiens
aaagaagagtaagtgcaaaggtcttgaaaactttgatgaatgtatgttttacaaatgaataaatgaataatatacattggttagcaatattttaatgactatttacattgcaatctacactacaactttcttgatattcccctttaaggtgcttttctccatttaccaactgagaacacaaaattctttgcgcattttcctcctttaagaaattgtgttatgtatctgtcatttgtacacataaattcataaccaggcaagcactccttggcggtcctattaaattgtgtacatgtgagttatgaatgactttgtttactaggtctaataattacacatatcttcagggctaagaaattctcacggagtctctgccaacttcacaaaattatygtcttatatgaatcccccaaggagggagaagggattattttatcatccctgcactttttctctagcatatagtaagcaattgctgctagagctgcaaatactagagaagaagaaaattgataaaa

SEQ ID NO: 819496 - DNA, 572 bp, Homo sapiens
aaaagaccaagcaggaaagggctgcttgaaaaataagatatgaaaactggaaaaggctagccaagagctcattcttgttgcagattttattagccttgtgaggttcttggataaagcaagccagtggcctcaggtggagctctccttggaggagagtgagtggagagctctgcttctgatgagtggtctctgtacaagcagcgagagcacactatggacagggacaccatcaaggctgtgctggggacccagcaggaagctctgcaggagctaccactcaagtcccctgagttccccactgagaccatcaagtgggactgcagcatgttcccctttgaatgggaaggtccagattatacactatgggtctctaactaccagccccccaaaggcaggtacaatgacatcaccaagatgtacacacaggtagagctcaagagagagttgcagcagccaaccttggaacatgaggccccgagagtcagaatgaccagggttccagtcggctttccacagaatcaggcatactgwtaataaagacatgtttaatcaaaaaagaaaaaaaaataaaa

SEQ ID NO: 819497 - DNA, 600 bp, Homo sapiens
caaaggatttcaagttcagtgagtgtggagaatcacctataatacactaactatggaagtagaggaaagggtggtaagtggaataactatagcccagtgcatgtatagaaatgtttaaaggattctgtgggactgtaagatcgatgaaccaatgatcctgtgagatgtggcaactgaaaaagctaaaattatccttagttgtagataccaaatagaaaattaggaaatagtaggttgggcgcggtggctcatgcctgtaatatcccggcactttgggaggccgaggcgggtggatcgctagagctcaggaatttgagatgagtctgggcaacatagcaaagcccatctctacaaaaaagtacaaaaattagtcgggcgtggtggtgtgcccctatagtctcagctactcaggaggctgaggcaggaggatcgcttgagcccgggaggaagaggttgcagtgagtgccactgcactccaccctgggcaacaaagtgagaccctgtctcaaayaaacaacaacaacaataaaaaccaattaggagatagtaaaagcttactttcatttgtaagtaattactcttataaggcaattactcttg

SEQ ID NO: 819498 - DNA, 594 bp, Homo sapiens
gatttaaaaaaattatcttcgacttattctgcttaggacttattttaaatttcaattttgcttatgaagttgcaaattgactgcttatggacccaattctaccaataaatgggatgcttactttggyctacctgtgttttctctttaataatttgattttggttttctttagtggacataagcacactccatttcataccacttccaactgtgttacattcagtgtaccttactcttaccttacatgggtagtccctgtactgaatttgatggcctgtggacatgcttagtctagggctaattatccaagaaaagaagtttcaggattaataaaaatggtggcatatcaacatcttagggacctgatgactaatggtttaaaagcatgccagcttttcaccttctgacaccttggtttcccagcataaaaaatgaggctcatggagttgggcctttgtattggtggaatctgcatttgcagattcaaccaaccatggatcaaaaatatttttaaaaataaaacataacaatcaaaaatacaaaatttaaaaatagagtgtaacaactatttatatagcattgacactgtattag

SEQ ID NO: 819499 - DNA, 627 bp, Homo sapiens
atctccgagttgcttgctatgagggctctagactgacgccacaaatagctataaattaacgtaacaatgccatacactggataccataacccataccctgtagttcaacaaagtatagccaatcwctcatcaatgttacttccgtaaaccaaggagaattcttgaaaacaatttttataatcgcccctcctctgagtcatccttttttctttaaaagctgaagcctctcttttgttctccagaggacttcccagtgcttcccgggctgcagtcatcaacttatcccaaagcaattctctacctgtgttaatttgcctcagtttcttcctttaggtcaacaggacctactacttgcaattggcgtttgaagtgggcaggggcagtctggtgggactgagacttcaacctgtgggatctgtgctaactccagttagtgtcagaattgaattgatttataggacatccagctggtggagaatcggttggtgtggggggaaaaagaactacacatgtggccacagaagtgggctgactatgaatactagataggaaacaggagtttcacatggcaaagaggacattgcacatgggattaagaatcttaaagtgaggaagttctcctggatt

SEQ ID NO: 819500 - DNA, 513 bp, Homo sapiens
gggcatgccctgagatgcccgttcggggctctccatttgcaaagagaagaacccaggaaagtgcaaagaaagtcattgtcactgttacagtgaccaagacaacaccttggtaatgtctggatagaattctctgaaaaatggggacaatctgagttgtacaggcagcaactgagggacatttttaggaaccagaagtaagcatttgtgattgtaaattattcaggctagatatttacaatgagcaatttagcttcaggccaatattaacttccattcctattactatcagattaattgcattttgttgctttttctaaatacatgtcaaatcaggaaacctataattcagcagttagtcattaaagtagcagtggatctgcaactgtgttatctgaagcccttctaaaaaataaaataaaaatccagggcttctttttttggtctaataaacagagcattaataamaagcaactaggatattcttcctaggatgaaatatgtctaaattgaaaa

SEQ ID NO: 819501 - DNA, 570 bp, Homo sapiens
tgctgtcctttggctattttttttttcattcttttatcctatttgatgaccttgggtgtttgattgtggtataagatgggttcagttgatgggcttagtttctagaggattttagggggccaaggctcagctcaggactcctggactgtgtgccccaactctggggtactagtatcaggccctggcttttggataaaagccattttaactggagtgatatgatatctcattgtttgttctgatgatcagtgatgttgagcaccttttcatatacctgtctgccatttgtatgtctccttttgggaaatgtatattcaggtctttcgcccactttttaattggattattagattttctcttaaggagttgagttcctcatacattctggtaactaatccattgtgagatggttagtttgcagatagttttttcccaytctgtgggttgtcccctcactttgtttcctctgctgtgcagaggctttttaacttgatgtaatcccatttatctacttttgctttggttgcctgtgcctgtggggaattactcaagaaatttttgcctagtcca

SEQ ID NO: 819502 - DNA, 297 bp, Homo sapiens
gtagtgttgtgatgctgatcacagatcctgatccaaatcctggcccagagtgatctggggaaacttggatagtctaatccrttttgaaaatgaataagacttataaaacttactccaaatttgttggtctaacaaattaaccagttgtcaaatttctgaaacattttggtccttgtggccctctgcatggttcatatttagtttttaaagctgtaaattctgaacgcatttaaaatacagaaacagaagctgtataaaaatagactacagaaataacactaagtagccacaaaacac

SEQ ID NO: 819503 - DNA, 607 bp, Homo sapiens
atatatatattttttttttttttttttttttttttttctcttttgatacatacctaggaatggaatkgcggggccatgtgtggtaactgtatatttaactttctgaagaaccgccaaactgttttccaaactctaccattttacattcccaccagcaatatccaggtgttgccatttctccacttcctcaccaacacttgttttccatttttgtttttgttcttattatggatatcctagggagtgtgcagtggtatggcattgtggttttgattgacatctccctaatgattagtgatgcagaacatctttttattttattctttattttgatttttaggtcattcatacgtctttagagaaatgttcagatcatttgcccattttttaattgtgttactgtttttttgttgttgagttgtaagagttctttatatgttctggatattatacccttatcatgtaaatggtttgcaaatattttctcccattctcttgtcttttcacttttgtgattgtgtctgttgacacacagaagtttttcattttgaagttcactttatctatttttttctttggttgctaatgcttaagtgtcatatcaaat

SEQ ID NO: 819504 - DNA, 481 bp, Homo sapiens
ggatgaagccagttttgtatcaattaacaaacttatttcattatttctgatgccagtgtgtgtatctggcctttgtgttgtcctttgaatcagtttttaacttcattaactaatgagttaaataaaatcttttacacttgttcattttttatttgtatgacaggcatgatttctcccttgaaaaaataatcatttagtggcacgtgcctgtggtcgcagctactggagaggctgaggtgggatgatcacttgagcccggtaggtgaggctgcagtgagtggtgattgcgccactgcactccagcctgggagacaaagtgagaccctgtctcggggaaaaaaaaaaaaggatcatttaacaaaccagaaaaacaaacaaacaaaccagagacaatgaagactatgagraagagatttgtccaaggttagacgcctgttgtaacaaatacagcaccaatccctaaccctcaaatgtgagcttc

SEQ ID NO: 819505 - DNA, 598 bp, Homo sapiens
agcagcttttacagcagtctggacctgttgcagagccttctcctgctctggaccccactcaaaactggcagcyttttgggtcactcgataaatggaccggagtaacacaccaaaataaagaatatgttgcctccaaaatccaaatagacattgtacctttttcttggttgtaggaggggccacatgaagcaagttatccttcaccttggaaggaatatctcaacaggccccacaccactggatccctagaaattttactgaggtagaaggtttctgaattttagtcaaatttatttcccatcctctggcatgcaaatgactcaccaataagaccagtgtgtttgctacttcttgctcactggatccaatcagcataatgtcatcaacgtaatgggccaatgtgatatcttgtggaagtgaaaagcgatcaaggtctctccaaataagattatgacaccaagctacagagttgatataaccctgaggtaggacagtaaaggtgtactgctggccttgccagctgaaggcaaattgcttctggtgggccttatggacagaaatggaaaaaaaggcatttgccaaattaatggctacatac

SEQ ID NO: 819506 - DNA, 457 bp, Homo sapiens
ggtgggcacctgtaatcccagctactcgggaggctgaggcaggagaatcacttgaacccgggaggcggaggttgcagtgagccraaattgagccactgaactctatcctgggcaacaccgtaagagtctgtctttaaaaaaaaaaaaaaaaaagcgggggggtgggggtgggcgagcagcaaaagcccttaaatgtggctttctgtgagcagttgagagggagaggagtggggaaatgattttgagaagttctgtgagattttaattggatcccatttgatgttctttaagagattgaaaagttttagttttaaaaaattattcttggttttgaataggtatttttttgtgttttaataagcttgtttgccaaaactgggccttgagaggaacaggcttcatatgaggtatgccactctagcatgtaatttggcccccaaagtgcttgataaaataa

SEQ ID NO: 819507 - DNA, 628 bp, Homo sapiens
tgtctgattggaaaatttgggaagaatatactgggcatggttagctcaattcattccttttacctgttctctgmaggtgggtaataaacccataaatttctctgtaatcctctgaccttgtgccaagatgggaagaggtctgccctggtgcagtgctgcactgtgggtgggtgaatgtgctaattctggggtttggtattaggaaactcatttgcccacacatgtaaagtatattcattaatatatcagcttaataaaggtgataatttggcttcttctatcttatttctttgtctcctttctcagttgttcagaactctagcagggaagattttggttaatttaatttcctcaaagtcctcaaattcatatctcccttctctcttctctatattgttaatataaacatgagcagtattttatgaattattctgcactttattgttttcgcttaattatatatcctagaattctttctctatcatcacagacaaatttacttatttcttttaatagatacatggtatttcaatatgtagtagtaccccaaaaatgtatcatttattgagacagtgttgctattgatgaacattttggttttctgtcatttgataatacaaagtgctac

SEQ ID NO: 819508 - DNA, 606 bp, Homo sapiens
tgtcgacctcaagtgatccacctgcttcagcctcccaaagtgctgggattatgggcgtaagccaccgcacccaacctattcttttttttttttttttttgactgagaaatttctagataaggaattggtgatttagagaaaggtttttttttttctttcttttccattttacatatagagaggttaagactcagaaatgtaaagtaaattgttcaagatctcccaaatagctattaaggagcagaaatggtattcaatcctatactttctggacttaaaagcatatgttgtttccactaaattaaaatgcacccctgcccttgaatctccaattgcagacagctgggggttgctaccacaaatatctcccagtgctttgccctttaggaaccagattaaagaatctcctttgtaagcattctgcctatataaacttaggcagtgctacagaactgtagctccaaatggaggtgctggcctgggtaggcaaagagctgggcagggccaggaaacatgtatttagtaggacaggtttttggrcatcacagtttgtgcttttaggctactgcagcagcccaaatgtgagttacactaagttatggctgg

SEQ ID NO: 819509 - DNA, 559 bp, Homo sapiens
gatattcaaaggacttagaatrctcaaaacaatctttaaaaaagaaaaatttcaatattcatacctacctgattcagcactttctaggaaaccgcattgatcatgattccattatgcttgcattagacacatggattaatgaaataaaattcacgttccagagataaaaaccactgacattacccgtcaatttgatttttgacaagatgccaaaacaatcaagaaaaaaatagtttttcaataaatggtgctcagacaactgagtatccacaagagggtaccccttccttacactatccacaaaaaaattgataaatcatagacccaaatgtaagaagtgcagctcaaactctttgaagaaaatataggagtaaatctttgtaacctgatgttaagcaaagtcttcttagatatgacatcaaaagcacaagaaaagaattaactggaattcatcaaaattttaaactttgtatttcaaaaaacattagaacagaaaaagatctatagaatagggaaagtttgcaaattatataaaatataaataacttgcatctggaat

SEQ ID NO: 819510 - DNA, 526 bp, Homo sapiens
aaaaaaatagaatagctcaaacattttgcgagagaagaataaagcaggagaaacagttcacctgatttcaagacttattttatatctacaacggttaagactatttggtatcggcagattggcaaagacataaacccgtatgtcaatggatcagaacaaagaacccaaaaataaacctgaacaaatatctccaatttattttcaacagattcaaaagaaattgcatagaataaaccaacaaattatgatggatcaattggatgtccatagcaaatagtaagtttaacaccttatataaaaattacctcaatgtggattacaaatataaatgtaaaatgtaaagcaattagactcttaggaaaaaaataggggaaaggcttttgagtctagggctagacagagtttctatgcttgacaccaaaattacaaaccagaaaaagataagttaataaattggatttcatamaaattaaaaactttggctgcaaaagaccgcattaagagaataaaagtgtatgctgcagac

SEQ ID NO: 819511 - DNA, 384 bp, Homo sapiens
cgatacattactgagaatgctgatttccaatttcatccatgtccctacaaaggacatgaagtcatcatattttatggctgcatagtattccatggtgtacatgtgccacattttcttaatccagtctatcattgttggacatttgggttggttccaagtctttgctattgtgaagtttcaaaattaaagtagaaataaggcacacccttgattttgtttcaaaaaaaggatttttctgtaaaataattaagtccatttaaaaaattttgccaaaatgcctgtttagaggatataaaaataaagtgtactcagtctaactgccttaatcrtctaaagaaaatgtcctaaatatacttacaaaaattaattaacttaggcaagaga

SEQ ID NO: 819512 - DNA, 584 bp, Homo sapiens
ggcaatgagaacctaagtggacttaatataaaaatgatattctgagttggggccacaggccagtccacctcattctctaatttacaaagtattccagcagtagaaggagagtggctaacactgaataattgtagaccacactgggacacaatgaacttaaacgatcagcattgcattagtcaattccatacccgtgtttcaagccactcatttttttttctgaaaaaaaaaaaaaaatagcataaaggcaatgttaccttgaatgtcagtgtttctacagtttggtttctgtagtgcgtaatccacatacaagtcctgtcgtatataatgaccagggtcctggacatctccttggcctggtgtgttgctctgctccttttgagatgctggattccaagtgcacaaaataagtggcaatttcacatcttctcaagtgggtcttgctcaacctagaaggcctttttcttttccatgtctggctaattcctcctaaggattcaagtctcctcttggaagacatcttgcctgggaagcctttcctataaacckccctcatctcctttctcactcccacaacaagttga

SEQ ID NO: 819513 - DNA, 637 bp, Homo sapiens
attttcagtgttaaaaaacttttaaaaatagacattatggttacatgttcaccttgaggtgatacgagcgatacacattggtaaaagtgagaactaggaagagatcaagaacatakagaagggaacagaatttccactggacagctaagcttaggggtgatattccaggaaacctcatgcggaaccactttagttttttagttttaccacctgcccctggcaaaaatttccaagaggctttttggtactattagcattgtcttttaaaaaatatggtgagtgtggtaattgtcgtcatttccgaaagatgagtaatcgaacaataaaattgtacattcgtcgagcctcctctacttacacttttttaagtttatcacttaaatctttgaaacgttgtgacttcttagttgtgttcgtttattttcttctccttttataacacttgatacataactgcaaaagagtcttaaatcttaatttggagacttaattttggttttattaactatgagtgcactttctaaaacaagaggtcacaggagagtgtggaaaccattccttccttttccgtaaacctgtcgactttgaacaagcttagtcaagtgggaagtattacatgaaagcgttttctgttgac

SEQ ID NO: 819514 - DNA, 504 bp, Homo sapiens
accaagtaacttattagtgaccgaactgggctacaactctgccttctaaatttctaccctagtattcctgcatttattaatatactatgtgtaactggaatacttcattcgtatcacatgtatattgattttgccacatatataggcatatatgtatatattatatgcctatatatgtcaacttaaatgtgtgtgtgtgtgtgtgcacaagactctggaagtgtagtactgaatgtactaattattcagtttttttaataaaggttcactgtcctgtagttttaggtttatggtgattattggtaaaaccgtgtttaaaagttatttgagcactgaaaccaaggcactcttacgtgatttataacttgtttaccctygccttggctgacaaagctttattgcaacctaattgctttttgaaatcatatacacttatcttgagagatattttaatgattaagctacaaatacctggtttctactcttagaaaaagtatgcaaaat

SEQ ID NO: 819515 - DNA, 544 bp, Homo sapiens
cataaggaaaatgtgatacacacacacacacacacacacacataaatatctatatatctccccatacacacacacacccaatggaatacygatcagccataaaatggaatgaaatcatggcatttgcagcaacctggatggaaatggagacaattactctaagtgaagtacctcaggaatagaaaaccaaacatcgtatgttctcacttataagaagtgggagctaagctatgagcatgaaaaggcataagaatgatacaacaactttcatgactagggggaaagggtgggaggcagatgggaaacaaaagactacaccttgggtacaaagtacactgtctgggtgatgagtgcaccaaagtctcagaaatcactaaaggacctattcatgtaaccaaacaccatctgttccctaaaaatctaatgaaattaaaaaaaaaataaagaaaaattattacccttctcaaattatgcacacttccccatctctcttttccctaagaagagtatataaccatctgcacgccatcacatggtcgagcaa

SEQ ID NO: 819516 - DNA, 628 bp, Homo sapiens
gttcctaatacttcatacacagtgatctgtcgtctgtaattttattccaggacaccaacaagccctggctattgcagayaggttgtggtaccagaagcatttataaacctcaaatctgattacagggccctgaaacatggaagtgtttaataaagacgtgctgattaaactgagaatcaactatgtacttcagtgttcagagaaatattccaaagaaagaaaccaaaatattacagtgtgggaaacctaataaaaaccctgtcccatgagaaattccacatgtgcagataaaaaaaatttccttttctatcagcatcaccattttttcaagtgtcaaatgctacatatataataccaaattattgtgaaagtggaacttgaaaataataacatggaaataaacagaattttaaagaagaaaatatcttaaaatatattttagatactcataaatgtttataaatatgataccgtgaagaaaaatgcgttctcttttatggaaacagctctctcaacagcataccctttaagtagcacttggacaagaaggatccagggaccaccccccgcctcataacagatgtttggtcttgttcagtgttgttttttttgcaccgtctcagatgga

SEQ ID NO: 819517 - DNA, 620 bp, Homo sapiens
cactttgcctgacacataataaattactgactaattttttttgaatgtttatgcgagcgatgttgtgaaaaataaggtttctctctccatatttgtgactacataaagttaacaattgattaatatgattaattttcaacttgattcaagcaacagtgtctggcctgcataggcgctgaataattcacgttaaaatacagcttataattcacagaactatactgttttattatctttgcccaaatattaatgtaaaaagtcttcttccctaaatatttcaattaatcttctaagaaacccacatgacccttactctactctaatttccacagactgtgaaaatataccaaaagttgaagagcagctgaattccaactgtgagtatttattcgcccaaatgagtgattagatatttaaagtaagctgaggaaataaaattaagaatgcagtctgaaacacgaaagttatcttgtgaaattgaatatcaatgatataaaaactaatgagatttgcaagaacctccctgtcatttttaggcatacattaatgacayggaaatattaaagtagaaaaatggtagggcataattaggaaatatttttatttaaagagagccatga

SEQ ID NO: 819518 - DNA, 609 bp, Homo sapiens
ccagttggactatggtaagttaaaaaatggcctcctttgccatctattcagttatccactcttttttatgatgtgactttacaactttctcattaaaaattggtctgcacttccttaccttttaaatgtgcgttggccatgtggtttgactaagaggtttaattggaagtaaaattgtaccaggtgtgacactactttttctaagactttgcacacttctgctctctctcagcagcttttcactagcatgagatctagtcttttagaaaatgagaccacatagatccaacttctgtcccagcagaggttgttttcgaccagccagtcccaacgcaactagccagtagacagcagatataactggcattagctatgactggctctggttaccagaaccacctacacaccctttacactcctaactcaataaatcttattattttaagccacaaagtttgtggttagtttgttacatgccaacagataactgataacttttctataattaaaatkattaaatgtttactaagcccttgataagagaaagttgtttactaattctttttcccagtgttttaatcaatatacatatttttcattaagtattgg

SEQ ID NO: 819519 - DNA, 670 bp, Homo sapiens
cacttttgcggcagtcatgatttgtattcttcctggcagctctcctactttacaggccctaaataagtttggttctagcctacaactgcaggagagcaaaaatccatttcctgtatccatttccgtggctcacacccattcgatgttgttgtctttctgatacttgccaccaaagttattgatgatgttacaaaatggacagactgagaattagacgcttttcacaagatctgataattaagtaataataaggaaccaaatctgtaaaagcaaagcaaaaatattttacaatacaggccccaaagacaaaagaaatccttatcattttctgttataaaacagacctataatttgcaaataatgcaagtgaaggtgctttaatcttgtattatatctgtttatggcttttatcctaaattaattcatgctttttaaagtaatatgtaaatgtgaaattacacaagtgcaatctaattttaatgctaattaatcttctatccaacacattcttatttactagctagttaaatttgccacaaaytttggataacaacgggatcattaaatagtttattttggaaattttgatcttttcaagtatctctcttttctaccaatttctacaattgtgtcttgtagcacaagatacaatttttttcctgaagtagaa

SEQ ID NO: 819520 - DNA, 502 bp, Homo sapiens
aactgggtgacttaaaacaatataaatctgttctcatactcttgaggctaaagtccaaatcgaggtgtygactgggcatgctctttcccaaagctctagggaagaacacttccttgcctcttgcttctggtggctgctggcaattgtcattccttggcttgtaaatacatcattccaatctctgcttcttcttcacatggacttctcccatgactccatgcatctgtgtcagaagaagtgaccagtgattggatttagagcctatgccaatccagtgtgtcctcattttaacttgataattccatgtgcaaagactctattgtcaaataaggtcatataaatagctatcatatagatatgaatttgggggcaacactactgtaataaacatttttaacataaaggctgtaaaaaataggccacagagtagaatcagcttacattctatagtttgcaagtataaatactgtaacttcaaaccaaacttacagtaaacaaaaat

SEQ ID NO: 819521 - DNA, 502 bp, Homo sapiens
aactgggtgacttaaaacaatataaatctgttctcatactcttgaggctaaagtccaaatcgaggtgtcgactgggcatgctctttcccaaagctctagggaagaacacttccttgcctcttgcttctggtggctgctggcaattgtcattccttggcttgtaaatacatcattccaatctctgcttcttcttcacatggacttctcccatgactccatgcatctgtgtcagaagaagtgaccagtgattggatttagagcctatgccaatccagtgtgtcctcattttaacttgataattccatgtgcaaagactctattgtcaaataaggtcatataaatagctatcatatagatatgaatttgggggcaacactactgtaataaacatttttaacataaaggctgtraaaaataggccacagagtagaatcagcttacattctatagtttgcaagtataaatactgtaacttcaaaccaaacttacagtaaacaaaaat

SEQ ID NO: 819522 - DNA, 502 bp, Homo sapiens
aactgggtgacttaaaacaatataaatctgttctcatactcttgaggctaaagtccaaatcgaggtgtcgactgggcatgctctttcccaaagctctagggaagaacacttccttgcctcttgcttctggtggctgctggcaattgtcattccttggcttgtaaatacatcattccaatctctgcttcttcttcacatggacttctcccatgactccatgcatctgtgtcagaagaagtgaccagtgattggatttagagcctatgccaatccagtgtgtcctcattttaacttgataattccatgtgcaaagactctattgtcaaataaggtcatataaatagctatcatatagatatgaatttgggggcaacactactgtaataaacatttttaacataaaggctgtaaaaaataggccacagagtagaatcagcttacattctatagtttgcaagtrtaaatactgtaacttcaaaccaaacttacagtaaacaaaaat

SEQ ID NO: 819523 - DNA, 504 bp, Homo sapiens
tctgcacaaattccttcgtaaattcacatgtgaggagcctgtctcacatgaactttggtaatatacctactttattgaagcctcagtcaaaaatgtggttggaaacctcattctaacatcctgctatatttatttgtttgattaccttctatttttaaaaagtggaccaggcatggtggttcatgcctgtaatcccagcaatttgggaagctaaggcaggtggatcatttgaggtcgggagtttgagaccagcctggccaacatggtgaaaccctgtctctcctaaaaatacaaaagtagctgggtgtggtggcatacactccagcctgggtgacagagtgagaccccatctcaaaagaaaaaaaaaataatatcttttttccatttatgatagagaayttattttttaaattaatatacttgattatatagtgaatcaatttaaagaataaatattaaataatgaaatacaggagatacatatataggactgaaaacatagag

SEQ ID NO: 819524 - DNA, 456 bp, Homo sapiens
aaaagaaattgctgtaaggaaatgcaagatgaagggttgttagatatgagttctaaatttcttttcaaagaatcaatacgtcagtatgttcaattctttrccttatacttttaaacttaacttcctcgtaaagcaaactttttcaattacctgctccaccctgactcattctgattacctgctctgtcataacaatttttcctgccaaaccactcaccctgtcactcgctttaaattagccaatcggaattagtttagcctgtgcggtctaccctagccaataggggaatgacacagcagcacgggccacgtgcgtcagggataagaaccccttcccctcccttgtccaagtgtgtgctcaccattgctccatctgtaagggcacacccttctatataagtacattgccctgctgagtattaaaaagataattttatatttgagtgctatttcttt

SEQ ID NO: 819525 - DNA, 658 bp, Homo sapiens
atcgtttctacgcaatttctttcagaaaatagaagatgagggaatactttccaacttactttatgaggccagcattatcctgataaaaaaagcagacaaaaatagtactagacaagaaaacttgagaccaatatagcccataaatagaaacacaaaaaccccagcaaaatgttagcaaattgaatccagcaatatattaaaaaaaaataggcactacaatcaaaggagtttatcctggtaattgcagtgttggttcaatatttgaaaatggttcgatataatccttcatgttaataccaaaaacagccttaagaaaatgaaaagaccttgaaaacgattcacatgtttttaaaagaaaagaaaatgaaagggcaaacaaaccacagacagaaagaaaacatgtgcaaaacaaaacatatatctgacaaaaaaattgcattcagaatatataaagaattctcaagactttacaaagagaaattggacgaaagatttgaacagatattttaccaaagaagatatattgatggcccacaagcacatgaaaagatgccctaaattcttagtcattagggaaattataactacaatttacccgctaggtgggctgaaattaaaaaggytgacaatactaagccttggtgaatgtggagcaact

SEQ ID NO: 819526 - DNA, 561 bp, Homo sapiens
tagtctaggctcttctcacatatatcagtcctcagagcctcacaagaccttccgaaggctttggctgtcttcagagatttgctagcatgtrgacaggcaaacctaaacatgcaccaaatagatgccccaccatctggggcattctccagggctgttggttcccaccaccatacaatggcaatctgtggaagaacaaagttatgtcattacaaaacaaattaagaatgtcatttagtgctatttgtgaaatacagaatatatgtttatttgtattaattatacatggcaagtcattaatcccagcaagctcttgaactagtttcctaactcacaaatgggtatatttttaagcagatttaatgaatttgtatggtgctgaagaaacttttattgatttcctagagctgccataacaaagtaccataaattaagtggcttagaacaatacagatttattgccttacaggtctaggggctggaattctggaatcaaagtgtcgtcagagccatgcttcctctggaacctgtaggggaaacccctccttgcctcttcctagcttc

SEQ ID NO: 819527 - DNA, 606 bp, Homo sapiens
attctaaatggtatataataacactatgtcacttactgttgtactttcttccactcagtcaaaagatcaattgctaaccaaaatattttatttgaagaataattttaaaaatcattgtctatgagctttgatatcattttatagaagatattgttaccttggatatttttctatttctctctctttctgtgtgtgtgtgtttagctttgtgcaaaagtaactgtagtttttgccaattatagtatatgaaatatatattttaatggaatttttaaaaaattagaagttatagaccaaagtattttaaaaaatttggcagttacagacctagttattatcacctgaaatatgtagagtctctactcactgagaaactttcattgcatttcttgtggtgagtagataagtgaattcagagaagagacttgggatttaatccctgttaggccactaactatacatgtgacattgagtgggtcttatttcaagcatcatctataaaatgagtatattgctatgcaatctggtatcccttctagatatggagaactgtakcaaaatatttaccaaatatacccatttcaatccctgagagtgctgtcttgt

SEQ ID NO: 819528 - DNA, 467 bp, Homo sapiens
tgaggcagcaacatgggttctaagcagagctggtgaaatgcaaggagaccttttgtggaaatgccagaagagaagcaggtgctccttgatgaacctgaacctcagacattggaagacctaggactacagccatmttttaaccagctgggcacttgagctaaaattgaggaaagacagacagagagagagaaaaggaaacataaatgatatcaaagaaaagtgggaagacagattggatcctggtgccattatttgagccctgagtcaaactgtacttgaaactggatatagagctcaagttttcatccagatgagtcaataatctcccatttttacttaaacgagcttgcattacatttactgttgtaaagaagaagcctagttgataagctagtgtggctatcctcacagaataagtggggaagggatgcctcactgatgtgacttgaagggaaacaggcccagga

SEQ ID NO: 819529 - DNA, 642 bp, Homo sapiens
caggcagtaggccttgttgagctgcggttggcactgcctagtttgagcttcccggccactttgtttacctactcaagcctcagcaatggcggatgcccctcccccagccrggctgtcatctcacagatcgatctcagactgctgtgctagcagtgagcaaggctccatgggcttggcagccaccgagccaggcatgggagagaatcaccttgtctgctggttgctaagaccttgggaaacacacagtatttgagcaggagtgtcccatttttccaggtagtctgtcacggcttcccttggctaggaaagggaaatcccccaaccccttttgcctcctgggtgaggtgacgccctgcccttctttggctcatccttcgtgggctgcacccactctccaaccagtcccagtgagatgaaccaggtacctcagttggaaatgcagaaatcacccatcttctgcatagatcatgctgggagctgcagaccggagctgttcctatttggccatcttggaactaacttactttctttctttcatcgttccttcttttcttttcttttttgttttttcaaggtctatctctgtcactcagtctggagtacagggtgcaatcatagctcactgcaacctcaaactcctga

SEQ ID NO: 819530 - DNA, 603 bp, Homo sapiens
cagccagtgggctgtgggttggacaagcttgttgtagatcaaggtgccagcagggttggcttcctctgaggcttctatcctggattctgtagatggctacccttgatttacagatggctcgcctcttgctgcctcttcacatggtcttccctctgtgcatgcaggactcttcttcttctaaggatgccagtcatattgggtttgccccccttcctatttaaaaaacagatttacggggtacaagtgcaattttgttacatggatatactgtggagtggtgaagtctgggcttttagtgtaaccatcacctgaatagtgtacattgtatccattaggtaacttctcattcctcacctctttcccactttcccacttttggagtctccagtgtttgttattccactctgtaggtccatgtggacccattgtttagctcctgcttataaatgacaacatgtagtatttgactctctgtttctaagttttttcacttaakatagtggcctccatttccatccattttgctgtaaaagacatgatttcattcttttttatggctgagtcgtattcatataaatatatatacacacaccacattttctt

SEQ ID NO: 819531 - DNA, 608 bp, Homo sapiens
ccaagatacactattgttttaatctcaaaaccaacagataggtaatgaacataaatatcccaagcaatgcaggggtattggaatggtattggcgttatgatggtgattgtttacaaagaagggcttttctgtggggaatggctaatcagcaggcccagcaaaggagaattagtgcttcctgtgctgaggcatcccagaattctggggattctgccagagtcctgctggttctcagacaaggtcattggacttcttaggggaacttaccaaaggcccctgtaactctaactgcagtgcagcctgagccaatttgttctctgccaatctctgcagcaaatttatgaatgatgagaggaaacagttgaggaaccagtaaactggctaaaacataatctttgttgccctagcaatacctctggggcttctgatggaggactgtgcatttcctggcacagtttacttctcatgccacagtcaactgcctgaataggactggggttaagacgcttsctccaaacattacagtaataaatggaggtttgtaaagagcaaggtcttcaaatcagagttagaatgaccaatgcatttatttgtttactgagcaccca

SEQ ID NO: 819532 - DNA, 532 bp, Homo sapiens
tttcttttggccattttttttcctttggtatgagaatatttacctaattcctggaacacaattgtatcttggaagtatgcaacttggtttttattttacagtctcacagggggaacgaactcatctccagaagagacattggacatgagacatagaacttttgagttaatgcagaagtgagttaagattttgggggctattggcaggagatgattctattttgcaatgtgagaagggcatgagatttggggatgcaggagtggaaagatatgatttgggtatttgctctctataagtcttatgttgaaatataatccccagtgttggagacagggcttggtaggaggtgttgggttgccgaggcagatccctcataaatggcttcctgctgtcctcatagtagtgattgaattctcaaaggatttggttgtttagaagcktgtgccactccggatcgagccaagatggccgaataggaacagctccggtctacagctcccactgtgagcgacgcagaagacgggtgatttct

SEQ ID NO: 819533 - DNA, 657 bp, Homo sapiens
ctcttccaggtcagaaactcgaagttagttttttttttttttttttatctcatttacgcctcaatatattttacaagctcaaatttattcaataaattcatgtttaattgatttcttaaatttggaaataaaaaactatgcaaagttttaaatacataaagagtctttaaggtattctgcaacctcagcccttccacttgatattttgaataaaaagcatgcagcagtggtctttttctttagagaccacactgttgacattgtacagcattttattcacaaactgcatggaataagatgatttgggcctataagtaaaagccaagattctacaattcgagcattattttgttttgttatttttcaacacttttatgaggcaggggaaaaacattgatgctggacacttttgtggggttcttcttgcagggagaatcagcttcatgcaatgaaaaggatatgacatggggctcagctatacctggaaagaaatctcagcccttccaacacttatttgcaatcctgggcaagtaatctcactgaatttctgttttcttatttagaaagtacgaataataagccctcatttaaccacagtattytgtaaaataaactagagtaggctgatgaagcacatgtagttacaagtgctggaaa

SEQ ID NO: 819534 - DNA, 349 bp, Homo sapiens
tatgtatattttcttatttcccattctttcattcaaaactgtcacacaacataygatatacatatatattgttttgcacgtataggtgtgtgagcacacatacagaaggatagactgatagatgagagagagagagagagagagagaggtatgtgtgtgtttatgtgagagtctatggacccctgtaccctaactctatctgctaagaaggactacggcagtgacatcccaacaccaaaaagcaaattggtaaacagatcttcaccataaatatcatttgccaacaaaagaaaccaggggtccttgaggtaatgactcattccatggccggtgcagggaaagtgcaggc

SEQ ID NO: 819535 - DNA, 596 bp, Homo sapiens
ttttaattagggacactcaactggtaatatatatgcamatattcccaaatctgaaaaaaatctgaaatctgaaatacttctggtggcaaacatttcagataagagatattcaacctgtatgagcatttcttgttaattggtcagtgctagaagtcatactcatccatgtatctttaaatgtcccatgtgttatattccagcaatgttgcagggatgaagtattgtaagaaacccaatttcttacgttattcatcattaataacaggattaaatccacatttcatggaatgattcagaagcagacatacatatcaaacttaggaaatgttagtatccgaaattagatgagtaccttaagccctggaagactgatctgttagccaagaggttcttccgggatctgaatccacttcatctgaattcaagcctcaaacttaactcaatgcacatcctttcacagatacatttttatggcttcttttctgtaccttcagattccacatctttacatttttctttatgataaaaatactaagaaaaaattttaattcaaaacactttgatatttttcaatacactttaagacatatgtgact

SEQ ID NO: 819536 - DNA, 596 bp, Homo sapiens
ttttaattagggacactcaactggtaatatatatgcaaatattcccaaatctgaaaaaaatctgaaatctgaaatacttctggtggcaaacatttcagataagagatattcaacctgtatgagcatttcttgttaattggtcagtgctagaagtcatactcatccatgtatctttaaatgtcccatgtgttatattccagcaatgttgcagggatgaagtattgtaagaaacccaatttcttacgttattcatcattaataacaggattaaatccacatttcatggaatgattcagaagcagacatacatatcaaacttaggaaatgttagtatccgaaattagatgagtaccttaagccctggaagactgatctgttagccaagaggttcttccgggatctgaatccacttcatctgaattcaagcctcaaacttaactcaatgcacatcctttcacagatacatttttatggcttcttttctgtaccttcagattccacatctttacatttttctttatgataaaaatactaagaaaaawttttaattcaaaacactttgatatttttcaatacactttaagacatatgtgact

SEQ ID NO: 819537 - DNA, 581 bp, Homo sapiens
ggtctcaggcaggtagaccagcagccagyggtgagggaggcagagccccagtgagctatgtgcgggattggtcaggatgatgttttaatgagaatgatagtgcacaggtaccagaataaaaagaaagggattatgtttcgtaaaggcaaatgtgattttcttcacaagtctctacatttgaaaataaatgtctattttctatcaccatgatagtcaactctacttgttttaattggcatttaaaagttttgtttcttttcaccttgcatccatttgggactcgacagtgtacatctgcaaattatggccttcaataagctaagggcttttcagtgttcattaacatggtatgtccaaactgttattaacccactgcatcgctttgtcgaaatccaaatcatttttagatataaaaagttgggaggatttgtactttagataacattataaagcagtatttcctgaaaggtattatttagttgtatccatagtacatttttccaagaagacaagagctaagaaatattttcttttttagactatcttcttatcttaactcagtcaaagtgtctctgtacata

SEQ ID NO: 819538 - DNA, 581 bp, Homo sapiens
ggtctcaggcaggtagaccagcagccagcggtgagggaggcagagccycagtgagctatgtgcgggattggtcaggatgatgttttaatgagaatgatagtgcacaggtaccagaataaaaagaaagggattatgtttcgtaaaggcaaatgtgattttcttcacaagtctctacatttgaaaataaatgtctattttctatcaccatgatagtcaactctacttgttttaattggcatttaaaagttttgtttcttttcaccttgcatccatttgggactcgacagtgtacatctgcaaattatggccttcaataagctaagggcttttcagtgttcattaacatggtatgtccaaactgttattaacccactgcatcgctttgtcgaaatccaaatcatttttagatataaaaagttgggaggatttgtactttagataacattataaagcagtatttcctgaaaggtattatttagttgtatccatagtacatttttccaagaagacaagagctaagaaatattttcttttttagactatcttcttatcttaactcagtcaaagtgtctctgtacata

SEQ ID NO: 819539 - DNA, 581 bp, Homo sapiens
ggtctcaggcaggtagaccagcagccagcggtgagggaggcagagccccagtgagctrtgtgcgggattggtcaggatgatgttttaatgagaatgatagtgcacaggtaccagaataaaaagaaagggattatgtttcgtaaaggcaaatgtgattttcttcacaagtctctacatttgaaaataaatgtctattttctatcaccatgatagtcaactctacttgttttaattggcatttaaaagttttgtttcttttcaccttgcatccatttgggactcgacagtgtacatctgcaaattatggccttcaataagctaagggcttttcagtgttcattaacatggtatgtccaaactgttattaacccactgcatcgctttgtcgaaatccaaatcatttttagatataaaaagttgggaggatttgtactttagataacattataaagcagtatttcctgaaaggtattatttagttgtatccatagtacatttttccaagaagacaagagctaagaaatattttcttttttagactatcttcttatcttaactcagtcaaagtgtctctgtacata

SEQ ID NO: 819540 - DNA, 634 bp, Homo sapiens
aatggagaggaagacgctgagccaaaactgaggaagtgctacatacattaaattacctagtgcttgtgaaccatctttaaacacataaattattttaaaataaaatamtttgcatgcagatgacagaacagacctcataaagcattatattataatttgttcaaattccagaccctgtcatattccattaatgaatacaggatgattcagggtgaacacgttgagatgaaatgtggtcctggaacatggaaaactcgaaagtggaagctcattgtgggatgcagcacagatatgctaaattattgtgaacgtaaccattcatggtgactcaaatgcgatggcttgtggacctcagagcagtaaacctgagcctttgctagacgattttttaattaccaagggcttttctttctcacacaaactaaatactcaaagaattatctgagtcctcccatgaaacagacagtgagatgacggaaacccggattttcggtgtcatttacagacccacaatctctaattttaaaatgaacccagcaaaaacgtttaattacctaactttcaaaagtctctaggaagtgataactcaattgcatgtgaagcacccagacagccacactctagacaaccacca

SEQ ID NO: 819541 - DNA, 452 bp, Homo sapiens
tctcctctccttgcaaaagcaaatattatacattatgttgatatatctagataaaagggaaacaagtgcaatggcatgtttcacttcaccaatgcagcctttggttattgattagccttaagatttttaaacatattgaaaacaatcatagacttatgctggttttggaactactttattctacagtttggaaccactgagcttcttgaaggcagggaccacaccttttctgccctttttattctaaaaatataacaaatccctaccacatgttatgtgttcagtgttaaacgaataaactagcaaaggaaataccactggacaagtcactaasttttcttaagtaaaataaaaagtaatgtgtcatacataaaacaaaggtcaaatacaaaccatgaaaccattacgctgaaatataaataggagatttaagaaaataatcatatagaagt

SEQ ID NO: 819542 - DNA, 487 bp, Homo sapiens
ataaagaaagaaaatattattgtacacctgtgcatgtgtttcatattttaatgtgttattacaaaagagtcacatgtttaaaaaattaaaagtttataaagaaaaaagtaataaggtgaagttaatttaataaactgaagttaatttttttctttattcaatagaataaagaaaaaaatactttttgtaagtttgctataccctcagtgtacaacggttgtaaagtccacaatagtgaacagtaatctcctagatctcacgttcaattataactcactcaccgactcctacagagctacttccaggttgcaaactccatttatgacaagtactctatacaggtgtagcatttttcatcttttataccataattttagtgaccttttctatttwtaaaaatgctctaatacacaaatacttgatattgtattatagttgtccatattatttagtgcagtaacatgctgtacagatttgaagcttaggg

SEQ ID NO: 819543 - DNA, 564 bp, Homo sapiens
tgttctgttgcataggccagaaggcagtggcacgataatagttcactgcagcctcaaactcctggactccagcaatcctctcctccagccttagctactcaagaagcaagttgctgggactacaggcacaccccaccatatccggctaaagtgtttgttgttgttgttttgtagacaaggagtttttctatatcgaccaggctggtctagaactcctggcctcaagtgatcctcctgctttgccctcacaaaacatcaggattacaggcttgaaccactgcacccaccctgcaaagtaaaatttttatttgtgtgtgtgtgtgtgtgtgtgtgtttgtattttacttaataccgacagattttgtactaaaaatatcatacattggaataaattttaattttctcccattaaacatatagtatttagctgtagaggaaacacgttcagttttccaggragcccagtgattacatgaagataagacaactgtttggaatgtttacttcatcctcataatgtctaatataaatactgaatctccagagcccaagtgtgtctttgca

SEQ ID NO: 819544 - DNA, 585 bp, Homo sapiens
aactctcctttcttctttacacagggtgttgggaagttcccagaygggaggggcagattagcttccttctctctgccctcctgcctctcctttcccctcaccatatccctggggccttgcacacccaatcactctttccaaacttccccttggggataaccaatataacataacaaaaactttctcaaatgccagtcatgagatttgccttaagcaatttctgccaaggaacctacagcatcttctctatatgggtaggggaaaatataaaaaacagagcacacacaaaattatctctcctctcttcttccctctccccttatctgtccttccttcccctctccttcctttcctgctgccccctcctctttccctcttcttgccttctctcctctttctctaatgccctcctcttgccttctcttcctctctctctctctctccttttctttttccctttttctctcttccctccactgcactctcatttcctcacccatactctcctttcttctccctctccctcctacaacagggaaggcaaagcaaattaatatgctaataaatcactaggctatgtttaga

SEQ ID NO: 819545 - DNA, 530 bp, Homo sapiens
agtgaaagcaatggatccatgaatgaacagtaaagcagtgattcccaacttttttggcaccaggggccrgtttcagttgtggaagacaatgtttccatggatggggtgggggtatgtgtgtgatggttttgggatgaaactgttccacctcagatcactaggcattagagtctcataaagtgcttgcaacctagattcctcccatgtacagttcaccatagggttcgtgcttctatgaaaatcacatgtcactgctgatcagacagtaatgctcgctcagccaccactcacctcctgctgtgtggcctggttcctaatcagcctcagactggagactggagggggggcctctgtgctaaacagataggtacatataaggagaaaaatgccagagaagatagacttagatggctcctgctagatccttggacggagatgttgtctccgtcttctttctgttcctttccctctgctgatcacaaacacagccttatttataacaaggtgggtgtaaaacaagcctgtgatat

SEQ ID NO: 819546 - DNA, 577 bp, Homo sapiens
tataagaaacaattaaatggaaatgctattaagagcaaaaataaaagcaacttcagcagcaaaatggtaactgatgattaatgccattggcaggcatcagttaactttacgtatctgaggaaaggatcagtaaacttggacataggtcaatggaaatcacctaaaatgatatactttaaacaaagagtataaatactataaaacagagtataaaaattaaaaacagcagcggctgtaatagttgtaagacaaagccaaatattgcaaaatacatacaaatggaattacagaacaagaggaaagaagaaaagaccagataaatatttgaagagataattgctaagaattctcaaaaatatttaaaaaataacaagccagatatacaagaatctcagaggactccaagcaggataaatggaaaaacaaataataaaaaatcagaaaaaawcccagatctataagcataattttcaaactgctctaaaccaaagataaacagaacatcttgaatgaaaccagaaaataaacaaaatgcatcagtatctcatgtactccataaatatatagacttacacaa

SEQ ID NO: 819547 - DNA, 600 bp, Homo sapiens
tttaactataggatataaacatatacttggtccctcgatyacaagtgactctttttcaacccattgtgaaattaatgagaacagatattaatatagtacttgtgacagcagctaggcaaactgtcatgtttataagaaaatcttgaaagcaattcatgcaaattgcaatgtagcttgtcatctttggatcttgtatgctctgggcagagtctattacactggtactgacaggttgcaaaaacaataacaaagaatggtgtaacaaaaaatattgggaagtataaaaaatttcagagaatgaagaagaaaaaatatagatgttgacaaataggacttgctaaaaatgatttcagtctttaaagaaactagggaaagggaaatagagatgagaagagatagcttctgaggagacaaagtaattaaaaacaaagagaaagcaatgtttatcacatagaagaaatgaccagaaatgattatgttgttggtgaaaagtgggagagggaataatctttcatctttgcaattaaaataaattacagggtttaattctaaacaggctacataaattaaatcgttgtctgtactctaagtaaataagtc

SEQ ID NO: 819548 - DNA, 599 bp, Homo sapiens
atcaagagctaaatccagcctccatgtagacaagaggctaggaagacacagacaagatattagatagccatccattgtcagagcaatagaaggagaacatgacaaattgagtagagatttcaataaagcccgttgtcagattaactaataccacacgggaaggacctacagaagggcagctgcatccctcaagaggtaggagctgatactgactgaagtggtaattatctaacagctcaaatggcacatcaaacatgggtgtttgaagaataaccgaatatagtttcctatgtaaaaaatgagtttctaccttactatagcgatttttttacagaaggatttcacctaaatgagcatagtctacaggtcaagcagagcaaaagtaatatttaatacagaagaggatgtttactgttgagatgaaaacaactgggaacaagatgaaaactatgtttctgttgagatgaaaacaactgggaacaagatgaaractggggactgagtcatcagatacttctggcatgaagtgtttctccccaaactttcctaacttttcatttatttcattttttaaaaaaagaaattatacattatttaaa

SEQ ID NO: 819549 - DNA, 491 bp, Homo sapiens
agctcatgaaggagaaaggatcttctaaaacatacataagatgcggkgacagatttaacttgcactaatactgaatatataaagtgaatatcacgcctctgagttgtctataactcttctggtcctatcatgatcttccatgtgctagctaatggtgaaaaaaaaataactttcatataacctttagttcaagctgatttaaatcttaataagattcagaaaatcaaatattttatttctttttaatagtaataacgtaacagcttgaatgtcagattttctgccttccatctccctttcatatctattccatagacatgtctggctgggcaagtgaaagtgggtggctttctcataagttagcaggtcagggactgattgcagtgtgtctgactctctctggctttcaagacagtgtcccatttcttgctggctagagcagcatttgtaactgctaaacaatctgtattttggggatcaactctatctcc

SEQ ID NO: 819550 - DNA, 622 bp, Homo sapiens
gggtggctcttatctcagtctatagattcaaagattaatgtcttctggaaacacctaccagacttacctcaaaataatgttttgccagctatgtaggcatcccttagcagtcaaattgacccttaaaattaaccttcgcagtacctgtaagtataccagagttaaattaaattttagttgattaataatgaaattatgaaatgtgaacacatattaaacacaggcaaataagcctgtgtgtaataagtgtgaacccccaaaatttgagagaggtgtcagttatgttagaaagttgattttaccaagattgaggatgcgcacccatgacccagcctcaagaagtcctgattacatgtgcccaaggtggttagggcacagcgtggtttcatatattttagggagacatgagacatcaatcaatatatgtaagaagtacgttggttctatccagaaaggcaaggacaaactccagggaaggagcttccaggtcacagacaggtgagagaaaaatggttgtactcttctgaatttctgattagcctttccaaaggaggcaatcrgaatatgcattcagccataagggggataattttaaatagaatgggaggaggtttgccctgag

SEQ ID NO: 819551 - DNA, 445 bp, Homo sapiens
ctcaaaaaaaaaaaaaaaaaaaatatcaggcgtggtgatgtgtgcctgtaatcccagctactcgggaggctgaggmaagagaatcacttgaacttgggaggtggaggttgcagcgagccgagatcgcactccagcctaggtgacagagcaggactcctgactcaaaaaaaagaaaaacatatagagtaaagagatctcagtctaggaacagacttaagaggtggcaaaagagagcagcatagaatcaactatactaaaactgaaattattgtttagcaggtgttttctatcacttcattgacccactaaagtgctgtctctaacagatctgctaatacgctgcttgatgatggctggttcatcctaatgcgctggtcagaatatgccccatctcaagatcagtcattctccaggagcatcagagacatctttgtggtgaattgtg

SEQ ID NO: 819552 - DNA, 445 bp, Homo sapiens
ctcaaaaaaaaaaaaaaaaaaaatatcaggcgtggtgatgtgtgcctgtaatcccagctactcgggaggctgaggaaagagaatcacttgaacttgggaggtggaggktgcagcgagccgagatcgcactccagcctaggtgacagagcaggactcctgactcaaaaaaaagaaaaacatatagagtaaagagatctcagtctaggaacagacttaagaggtggcaaaagagagcagcatagaatcaactatactaaaactgaaattattgtttagcaggtgttttctatcacttcattgacccactaaagtgctgtctctaacagatctgctaatacgctgcttgatgatggctggttcatcctaatgcgctggtcagaatatgccccatctcaagatcagtcattctccaggagcatcagagacatctttgtggtgaattgtg

SEQ ID NO: 819553 - DNA, 584 bp, Homo sapiens
cagcccttgagttctagatctttccactgaaacagtctacctgaatgagaaggaaccagaaatgttaattctggtaatatgacaaaacaaggttctataagacccccaaaaggtcgcactaactctccagctatggatccaaaccaagaagaaatctctgaattgccagataaagaattcagaaggttgattattaaactactcaaggaggtactagagaaaggtgaaaattaacttagagaaatttaaaaaacaatacaggatatggatgaaaaagtctctagataaatagatatcataaagaaaaagacaatcggctgggcgcagtggctcacacctgtaatcccagcactttgggaggccaaggcaaggggatcatctgaggtcaggagatagagaccagcctgaccaacatggagaaaccctgtctctactaaaaacacaaaattagccgagaccattctggccaacatgatgaaaccccgtctctgctaawatacaaaaaaaaaaaaaaaaaaattagccaggcgtggaggtacgcgcctgtaatcccagctacttggaggctgaggcaggggaatcac

SEQ ID NO: 819554 - DNA, 540 bp, Homo sapiens
cctctcaataatgttacactggcaattaaatttcaacatgagtttttgtagggacaaaccacatccaaaccrtagcacacctggaccccatcccagcaatgggttggctccacagggcccctgaagtttatccatagataccatttaataatgcttatctgaactcacctttgatggcataacaatttctgttcttagatcccacctctctctaagtggttaaaattgtaccttttctgtttatgcgtattttaccacaattttaaaaatattccacccctttctgatctttgagttcttctaaatcaattgttcccaaagttgtggtccccagaccagcagcatcaacattagcatcacctgggagctcattagaaatgcatattcttgagccctacttgagacctactgcatcagacactcttggggtgggaccagcaacctgtgttttaacaagctctacagatgattttgattcaccttgaagtctgagaaccacttgtaagtaataagtaagtagaatcacttctaagcttttaa

SEQ ID NO: 819555 - DNA, 552 bp, Homo sapiens
gaatcaaagattgagtcaacaatctgayacaatttttctctaaaattccattttggatgtgtatatatgcatgtgcagttccaattgctgccaagaggaatttaaactatgttaattttactatatgaaaagacctaatacttaaatatgctttattccttgtcgacactgttttatcaggtccattaacaggttttctcaagtagtgggcctctgtaatgttataaaattgtcctgctcagtagtgttcccaaactggttctgcaatcttttcaccttcctcatcttggctcactgttcagatattagctcctttctttctttgtggtcagtacagattatcttttatattctcctttaggtgggctacattttcttctttgttcggatattaggtccttttttcctttgtgttcagtacagattatcttttatattctcctctaagtgggctatatttacttcttgaataaaaatggtcaccactagatcttatttcctccatctgcattgaagtcagacactccaacattcctttccctcacgtgctat

SEQ ID NO: 819556 - DNA, 586 bp, Homo sapiens
agaagttaaaaaaaaaagcatacagtgaatccattttgattaaaacacagacatataaatttacacgtgtatgtctattacaatggccattacaatatgtatgcatgtgcacacatatacatatgcctacatatrcatatgggcactcacaaaatgtttaaatggttatatagagtaaatacatagcagggttatgaacaatgttaagagtatgggtgatttttttagataattgctttatttttgtacttatttattgtcctgatttttaaacaacgaccaagaattacttatataaagaaataagaatttaaaaaatggaaagataacctcctacagtatgcattccagaaaaattgtatgatacaggtttatcaaatgccaaaataagtgaaaattaaccactttcagattacatataaacttttaataaaaaagaggaaaagcaagcacaaaccaagactaaaagcacttataggcttcttataatttcaaataagagtttttatgttatttaaaatttaattatatgcattaaattaacaacaaagtacaccagcagaaggctaggcagaatacatttttc

SEQ ID NO: 819557 - DNA, 513 bp, Homo sapiens
agttttatgaacacttaatggttttagagttctatttgtagaaaataaagataaaatccagatttmtttcaggattattttcattttgggaagaaccaaaacattggattcttaatatctatagcataattaactttgcccaaatcttccattaaagaataattatgtatacaagagaacccacatgtaatatttttgttctaaatttgtttagagtgctggttctcaaactttagcatgttatcagaatcacttggaagaagacttcttcaacacattgctgagtcccattcccagaggttcagaaaattagatgttgacattttcaaagtgaacttaagagaagtaagtggtctgcatttataggaaccatgtttttggcatttgaggtgatgccttaattgatgaaaacattgtgcaaagtataggagtgtttataaattagggaaccatatcaattaaactcttatctttttgcattctaaaatcatctatcttgcattattagcactt

SEQ ID NO: 819558 - DNA, 528 bp, Homo sapiens
gtggtagaccaaataatgagcctcccaaaatgtccacgttcctaatttcctggaacatattgtgagtgtgttacactacaagacaaaagggactttgcagatgtaattaaagttacaaactttaaaatacattatcttagatgagctgagtgggtccaatctaattacctgagcccttaaaaacagaactttggctggaggcaggagagatttgccagaagtggaagttggaaagattcaaagtgtgagaggacctcactgttgctggaaaaggcaacgtgtaaagcatgaaaatgaagatgggccgcctctaggagctaagactccaccccagttgatagccagcaagaagacggggatctgggctctgcaactgtcaggaactgaacaacctgaaaaaccctgaaagcaattcagtgctggagtctccagaaaggaatgcagccctgctaacaccttgattttggccctgtgaaagccagggaagaaaaaycagtagcgccaactgggacttcagacctacagacg

SEQ ID NO: 819559 - DNA, 600 bp, Homo sapiens
agagagctgtgggttggatgctgctagctgagagactgggcaaattattggacctccatayacctcagttttctcctctgcaaaatggaaatattaatagcatccatctcacttgtattttgaggattaattgagataatgaatataaagtgcctggcacatagtaagcaatcaataagaacactttatcatcagcaccatcttcataattactacctagctcttggtattacggggtgtagaatataagctctgcaaagcaatcagccttctgcccaacattggtatgctattaatggtggatattaaaatgtttctgctgtgaatatcaactacagaagcgaattactctttttgaagctctccaagggcttgcctcattctgtaaggcctctggtttgccctctatagcttgccctcaccctgtgaaaggatgatttcctgcagcagacaccattggtggccacccccattgcgagtccccctcctcccttgtgaacagaacacaaattttgcttaggcagccacgtgcctagccccagggtaaaaagcctgattaatgcaagccatttatggcagtctcatttggctttaccttag

SEQ ID NO: 819560 - DNA, 600 bp, Homo sapiens
agagagctgtgggttggatgctgctagctgagagactgggcaaattattggacctccatatacctcagttttctcctctgcaaaatggaaatattaatagcatccatctcacttgtattttgaggattaattgagataatgaatataaagtgcctggcacatagtaagcaatcaataagaacactttatcatcagcaccatcttcataattactacctagctcttggtattacggggtgtagaatataagctctgcaaagcaatcagccttctgcccaacattggtatgctattaatggtggatattaaaatgtttctgctgtgaatatcaactacagaagcgaattactctttttgaagctctccaagggcttgcctcattctgtaaggcctctggtttgccctctatagcttgccctcaccctgtgaaaggatgatttcctgcagcagacaccattggtggccacccccattgcgagtccccctyctcccttgtgaacagaacacaaattttgcttaggcagccacgtgcctagccccagggtaaaaagcctgattaatgcaagccatttatggcagtctcatttggctttaccttag

SEQ ID NO: 819561 - DNA, 554 bp, Homo sapiens
tcatccacttgggagttgagatagctgggagggggaggtgggtagcaggaaggaggtcatgaaattgaccgtgcttagctgctgcccacgtttggattactcggagacagtctgcaatgggggaaatattaggcttttaatgacagccctgacaaacatgatccgtatgaccaaatgaatcttaaatgcaactgctatcatttgttaaaggaggatttgccaagtggcacggttctcctagagttttcctagtcccacactttgcctcaaacacgtacacagagcgaggggtttgaactttctgagtttcatgcaaagcacatatgttgtttgggttttgttttgtttgtttttatttttgcaaaatatgttatataagaaagaagaatatatcaatgaaatggtaaatacaaaccctccaaaaggatataacatatttctaatgaaaggaaacaaccaccttcgctttatccacacaaaaaaatttaaaaagatgaagaggggccattttcattcacagattgtggaatcstactgtttagtgctctccaaat

SEQ ID NO: 819562 - DNA, 624 bp, Homo sapiens
tatttataaattttattctttttttaatgggtctccaacattgtataaacttaaggcacaacaagacctgagtttgtccttgggttcaggggacaccttaattttcataatcaagtatgtaaacttaacctctggctcatccatgcagtccacgtagagttaaatatctgttgctttcaacttttatggtgttctccgtttttaccttcagttagctctccctaatattatcttaattctctaattattataatttgggaatatcctatgggtttatattaagtggaatatattggtatcccttagtatgctgtaccctaattccagttaaaaagaatgtccccctttctgcatagcatagtatttgagaaatatatttaaacagacttttaaaactgtttcaaaacagagatatgtggttcaaaacaaaacaacagtggaatatacaccaaagtcgggaatatctgaacatggaatattattccatttagagaagtttgagaatktaaactagtttcatttcagaaaagtattttcagaagtgacacaatccggtgaaataaagtatataatcagaagtgtataatctactgacaaggaaaggaattgtctatcgtttatcaa

SEQ ID NO: 819563 - DNA, 624 bp, Homo sapiens
tatttataaattttattctttttttaatgggtctccaacattgtataaacttaaggcacaacaagacctgagtttgtccttgggttcaggggacaccttaattttcataatcaagtatgtaaacttaacctctggctcatccatgcagtccacgtagagttaaatatctgttgctttcaacttttatggtgttctccgtttttaccttcagttagctctccctaatattatcttaattctctaattattataatttgggaatatcctatgggtttatattaagtggaatatattggtatcccttagtatgctgtaccctaattccagttaaaaagaatgtccccctttctgcatagcatagtatttgagaaatatatttaaacagacttttaaaactgtttcaaaacagagatatgtggttcaaaacaaaacaacagtggaatatacaccaaagtcgggaatatctgaacatggaatattattccatttagagaagtttgagaatttaaactagtttcatttcagaaaagtattttcagaagtgacacaatcyggtgaaataaagtatataatcagaagtgtataatctactgacaaggaaaggaattgtctatcgtttatcaa

SEQ ID NO: 819564 - DNA, 659 bp, Homo sapiens
atcagatgtaaacagcatgcttcccagcacaaacatacatcaccaaagacaaatagaaacaaaagtctctgacataagggaacagtcattattaaaatttaaattcactgttattttcacgtaagggttgcaaaatgcttctcccgcaacaccgcatatacagcaagtggccccaagtagtttgttcaataacatacaatggaattaaagaatgttgtgattttgaaagagaagaagaatccgggggtgactgaaattaaagatggtcattttgttgtataaactctgttttttaaatgtctttcttttaacttttaagtgcaggaatacaagtgcaggtttgttacataggtaaacttgtgtcatgggggtgtgttgtacaaattattttgacacccagatattaagcctagtacccattagttatttttcctggttctcttctttctcccaccctccaccctctgaaaggtcccagtgtgtgttgttaccacctatgtgtccatgcgttctcatcatttagctccaacttataagtgataacatgcagtatttcattttgcattcctgtgctagtttgctgaggataatggcctcyagcgtcatccatgttcctgcaaaagacaggatctcattgctttttatggctacatagtatt

SEQ ID NO: 819565 - DNA, 537 bp, Homo sapiens
ataattgggggttaggttgatgaattacccctgagtctcccaagaagaatcattgttgactagacttttatggtaaaattcaccttccagccaaagattaattaagtgccaactgaaagattttgttccaagtatgtatatgtaagtgctgagaatcagaagtgtggctggctgcgtggcctgtcctcaactcttcagcattccaggggtagaaatatctactgaaggacaaaatgtttatcaccagcagggacatgagaaaaaaatgtctcctagaaccttaagcagggaggagataaatctgtctatgataaaggtttctcagaggaggtgaaatttgaatcctgccttcaggatgaataggcttggctactggggaaccaggaggaaggcattttatatagaacagcagcaggaatcaggaggcagtagactgctsattttcaaatggctttttcagagcatgctcaaatactactattaggttagacggcactgaaaagagaagatggccctgtttggacattaatattattt

SEQ ID NO: 819566 - DNA, 625 bp, Homo sapiens
ttttcccttggatcctcagtgctggatttccatttccgtttctaggtgaagakaactgaattgtgtaagggccattcacagaacttaatcactgcttaaaatgttgtatcaaagttataaataactgagtagatcctgtatgaaattgggaacttccttttccataagataataaatgcctgcatcagggacatggtccttattctctttttgttccttttacttaaacttctcccttactggctgctattctatcctcccttctctaattacacatagacacatctatgcttccaccctctttctcctttcagaatgtgcttaaacacacttagtaaaaacagtccattttgggatatcattttctccttgcgcgggagtcttttaaggttttaggatgaagcattattgacaggtaacttgtgtcctttctaatcactgttgaatcatccctgcagtttctgtgtttattcttatgcctgatcacattcgataacaaagcttgtgcaaaatcaaaaacaaaaaggtcttgaactgcaatcaaataaaggggagctacctggttaacaaattttacaaaacatttattggaaaatatatctatcccatgagataggacacagtc

SEQ ID NO: 819567 - DNA, 603 bp, Homo sapiens
attagattcagatttttagtggagtagagggtagtatttgtatattataatccaaggaaatggggtgcattatggtacagaatgcaaaatgttcatggtgtttgagataaagcccaggacttcaaagtaatttcaaaatcatggtgtgccatttggggccacacaggctcagaccacagaaaatatttttttaacttatctgctgttatatacacttccatgagaaagcttgagtagcactattactttactccttattcacttcttgtcaggtaaagacattattataaagtccatgtcacctctactaggattgatattcagttctactgcagacgttcattctcatagttaattgcctctgtcataccaatgattaagtattttgaattattcaccagatattcttattttcatatttgtcttattttcctgtccttttatcaaaatctcttcatctcttttggaacaggggccgtgtctaacttttctggggctcctgagcaatgtctgcacctatatcttgcatgcagtaggccctcaatgaattaaatcgacccaaaccgaacatkgcagaaggccaattgtgaccattggttttaa

SEQ ID NO: 819568 - DNA, 572 bp, Homo sapiens
  misc_feature 1, 2, 3, 4, 5, 6, 7: n = A,T,C or G
nnnnnnncacctgtggatcctgagccctytatgtgctactgatgcataagagtgcagaggtcaaagaacaggagcttcattgttttacatcaacactctgtactttaaatgatatccttggtctggggccaagcccatgctgggctcctactgaagatgttatccaacactcctgaccttgccttacttaactttctcttccttcctgaattatttgactacctggatctgacccattttttaaatctaaactttagttccttctcatcattagttcctggaggacatggaacacatcctagaagcaatgggagacagtacctaggtaagaggaaattcactaaaatttggtgagaataataagaacagagccagaataggggtccccagtaccagaggtcagagatcaagatttacaaggaggtatttgttgatgcagtccagtctcagatccagttccttgaaataaaagattacctgatccaaggaggtatatgctgggtagagcttcagaagtagagatgggagagtagacctgtcagaatcggaggcaagacataccaagatttggc

SEQ ID NO: 819569 - DNA, 512 bp, Homo sapiens
catctaatgtttttggccttaaatcactgattcatcttcattatttcccatacctctccaccctccatacccacatcccaaaagaggtgctattaaaaagaaaaaaagtaatttgaagtggcaagccccatataaaccaagccaacatagaagcctgcattccaaaatacaaatcagtgattaaagaggtttgcattggaattcccaaaatcaatttctacataccccaggcttctcttaaaataatgatgcaagcccagggtcatcagcattacctagggactgtgctgaattccaagtagttcttctggttgcacctggcagagatctaggcccttataactaacttcatgcttcataactgagccaaattccaggcaatccaaacccccaatggttccttgatggcacatacagaagaaagaaaaatggtgctraaaatggtaggaatgaacatcagcagttggctgggagtagtttcacagaagccaaaacactctaagggtaaatct

SEQ ID NO: 819570 - DNA, 573 bp, Homo sapiens
agttgacttgaatttgactgagaaaattatcaracctgcttttacttgtacatgtagctcattttcaaaaatacttttgtgtatccactggtatgttgatggtcctatgcagcaataggtctgtacgcttgtccaaagaatgtctaacagccccacatcatgattagcaggagctgggtcactggggcagagctggtttgacaggtggaaaacttgtcctgagtagttctgtattagcttacctcctaaactggagcaaaggtcaaggccaatccaagattgagaagaggcgccgaacatgttacatggtaaacactcttttattagtggtcttttgagggaaagttgctgtgttgttctttgctgttatttctgctagaacagtgttcacaaaagtgaacaaaagttcaatgctcaagttaaagaaatctaagaatggagactatcagtagccatgttggggcaccatggtaaacaatggaactggataaaattttatgtagttgcctacacaattctttctatgaccatacctgctgttcctatcctctgaattaattttcatgtggaaaa

SEQ ID NO: 819571 - DNA, 535 bp, Homo sapiens
attaccaagtccttacattatcagtaatgattgagcctggaagtcagccaaggttaccaggtagtgatgttagggttaatttgggcttcatgtaatttgtccctcagaaactgcaatctagggattcaatagaaaaggttgggataccttaagggaaatagctaacacactctttccaggtagataccagctataacttgtcacatcttgtatttcaatcctacagtcttagacctaaaaggaaacttaaaaattgcctaagcctgggaactggatgggcttcaggagggttctttcatctcctaagattatttgcaacatgttatactgtgtgtgcatacggatgatattcttggcaaaatgaccttgtctttcatcagatactctactgggaccactgcrcaaaaatattatgatgcactatgcttgaacaatctccaggagaagttgtgtgtgcctgtgttttaatgaacgatgaagcatgttctgggattcagttgcatggtctggccatggtcccacaatgagttagcat

SEQ ID NO: 819572 - DNA, 484 bp, Homo sapiens
agtgttcttgaggttttactctcttaagtctagacatgatgaatctaggaacattaagaagagtccctggatagcaggaatgtacattaggaagaacataattataactgagtaattcttatgtttgaagaaaataagaaatttaaagttttaatttaatcttcacagtaaccatatgatgtaggtgggcaatatattattatctctattgtatagctggggaaattgaggcataaagtttaagtaatatgtccaaagtcactcagctattaagtggagaattggaatgtaaattcaggtctgctaaagtccagaatcttcaacctaagccaatacatttctaaaagtttctgtgagggggacaggctgaggaaaaggcaagaacattactgaagcattgctttagagcactttccaatagaaatayagtaaaaatcatgtatgtaatttaaatttttctggtaaccactttaaaatggactaa

SEQ ID NO: 819573 - DNA, 587 bp, Homo sapiens
tttgctttgattagctcatgggttttatattgttcttaaaaagaaaatagaggagtgatggtctaaaagttgtatcagggaagtaggggacaccagtcctaattatgaggtgtgagggatttaagagattaaaaagccacaatcagagttgtggtggctatgagaatgtgccttgcagaccccaactgctggcagattaattaaccaagggtctgagctactgggctctggcatcaaggccaggcttcctataggctgcccccagcgctgatggagtgcagcagaaatactaaggcaagacaacttaagagagacatgggcctaccatgatggctaattttggttcaaggacttgctgatggccttgttaaccccaccttggtctgtacaacagtcttgtatgcttccattccaaccctccccttctgtctcctccactctgtgtcagacttgcagcacagtatcatggctctcctagcctttgctggatccctcttcattttctctcatacaagctatttaggtctgttttctgttgctataataaaatayctgagactggataatttataaagaaaagaggttta

SEQ ID NO: 819574 - DNA, 597 bp, Homo sapiens
tagagcaaaatgcacaaggctatctcagaaagttgaaaatagagataattctgcatgtactgagtgtctattatgtgccaggttattctaggtgccttgtgtagaaccttagttcccctaactggtaaagacaacttggtgttcactttatggatcagaaaactgagtttcatgaatagtcaataacctgcctaagattaaaggaccaaaaaatggtcaagtctgagggtagggagaaggggagaatagggagagatttgttaaaggatacaatactgctgctagattggaagaataagctccagcgttgtataccgctgtagggtgactgtagttaacaataagtttcaaatagctaggaggacaatgagtgttcccaacacaaaggaacaataaatcagatgatggataggctaattacattgaaacatcattatgtaccccaggaataagtacaattattatttgtcaatttttttaaagttaaawaaagaaaactgaaaaaacatggtgaagtctggatttaagtccaggtttctaatattcaattctgtgctcacgccagccagaggaggttagattagtgtcttttagtgt

SEQ ID NO: 819575 - DNA, 604 bp, Homo sapiens
tggtcctcactcatttgagaaatccatgcaaaattcgaagtcactcaacttctatctctcagttcatgatggtccccacagccactctgtcttctttcatattcctaaatatgctgtatttccttctgtcacaaggcctttgcctgtgctttcttcttcccctagtatgttcttctaccccacccagtttgttatcttctattcatccttcagagagccacttaagcttcactttctcagcaaagacttttctaaccaagactagggaatactgttctgttaggcaagttctcaaagcaacttttgcctccatatttaaatgtgtacatgtgcgtaaaagagagagagagaaagggaggaggaggagagagagtagtgtatctcctccaccaggaagcatagctagttagctcaccattgtatctccagtgtctgccactgtgggtggcaaatagaggggacttaattggtgatgttaaataaggaagtcttggacacacaaagatagagattccatttccaatctttggctccatgcctggcataatcacagaaaacagaaaggcaaaaggtactckgtgggaaggggaaagagcctgaggct

SEQ ID NO: 819576 - DNA, 360 bp, Homo sapiens
gcaagcaggcttctagtatcatcagagtggggattctcaacctttttgggcaaagcatggtcattttcaattccagtgattttcacagacctctcccatggtggcagttgtacttgaaatcagtcactccacaaatgcgtaatccctgcccatttacagcaataatacaaccgcacagagtctgcagctgccaggttggaaagcttcttaccggagcccccgagggcaaggccaagtgagaggagatggaggacrctgtgcagaccccaagggacaaggcgagttatccccgaagcactaggaaccactggacggaagggttctaaccagggaggtgctgaagcaagatctgtcctttag

SEQ ID NO: 819577 - DNA, 570 bp, Homo sapiens
ttgcagcacacaattaagagaactgacttggctgccaagttgctgttcttcttcggagaatacacccaactttctcaagagaccattaagtaaagtggaaaaaccatcagacaggaagycagcaggaatcccagctttactacttactcatattgtaatcttgggcaagtcatttaaagcccactaaacttcagtgttcttatctgtaaaaggaagccaatgatatattccttacttgccttctacacttaatataacaatattagtaatggttgtggaacttgcctaagatcagtgggtaccatttacccactatatattgtgtaccagctactgtactgggcacagtgtactggttaatagcagattccagggcccaaattttctaggtttgaaaccgtatctaccgcttattagctgtctgaacttaggcaagttccatagcctctctgaacctcaatttcttcaattataacataaggatgagaaaacttaccatacagagtttttatgagaattaaataatatatacaaaacacactgtagcttgcatagagtaagccttcaata

SEQ ID NO: 819578 - DNA, 618 bp, Homo sapiens
atctgatgtctgttagggataaaatgatgaacataaatgacaggcccctgtgctcatagagtttgaagtttaggttaaaaacaacaacaacaacaacaatattaaataagcccaaaaacaaatgcaaaattaccatcatgatacgtgctatggtaacacacaacagggaagtttgactgataaggaaaaacaggaaagtttcccctgatgagtataattgagctgatatctgaaggaagaagagcagagcacaagggaagtgggggttaggtgtgttataggcagagggaacagtattgcaaatgctctgtggcgcgaaggagcctggcaaatgcaagggcctaaaaaaggaggtggatgtagagaggagtgtaagaggggcaaatagtgtgtgatgagtctggaaggtaaggaaagacaagtccatgtagagcctcataggtcttgtttagaagtttttgtttgtatcttaagactaaaggtaagccactgaagtgtttcagagagagatctgacatgattagcmtttttttggaaatggttctggctcttatttgactaacgcatgagaggagcataagagtaaaaatgaggaaattagcaagacagctagtgtag

SEQ ID NO: 819579 - DNA, 612 bp, Homo sapiens
agctcttgcctgtgctccagctccaactcagtgattctagagacacttcagatatttccaggttgcwatgcttttcttttgctacccacctaagagtaacaggacagagtaacataagatccttctagaataccagctgaactcagaattagtgctacttgaatacttaacagagctcaggttgatgattctgggatggagaaattgcgtctatgtactcctttgcccagacccaagaatatcaggggaagcctgactccttccagttcagtgatgcctgaagaggagagtcaactgatatcttcagttataacctgaggcctgctatccactttactactatcaggtaccaatctcaggaaaggtaattccctccttttcttttccatgtgtaattttaacagacaggacaagaactagcacccttctcagaaccatattcttgtccagtctccttatggattaaatctctttaaacaacccatgttggtgttatcttggcctgcctcaactctgtaactgttcagattttgtctttagactgtgggctctggcactgggatgaggagagagttttgccacgttttcctgcttgcacaagggattcccaaa

SEQ ID NO: 819580 - DNA, 617 bp, Homo sapiens
aagccctgagttttgtcatattcttggtaacaattaatgtctcaaatattactgaagtaaaataagaaaaagttatttcaggttcttttctaaaataatgttacacttgcatacttaatcagaaatttgatgggaataagtaacagtcattatcctagtatccatcaatcatttcctcaaagtttttaataaggaaactgtgtaaagaaatcagaactattttgtgacatcctaacacaaaatattcactaataacatgtaccattaatcttttgtcaaacaatgctctccacttaaaactagtgtctgtttctgccaaacacttgggccagtctcatactgatcttaaataatcaaactaattccaaagtaaaatggaaattttcaataaatgccggaagttggtaaccgtgatgatggagaactgcagatcaaatttagagcattgacatatgaagatctgtggaatcagaacagtttacaaccaaaatgagagattgctagcatgataaagacaggcacttcaaaagagattcctcggagtatcaaaggattcatagaggccyttgggccactcaatgtgaccttcccataatagagcatctcttcacaatagt

SEQ ID NO: 819581 - DNA, 572 bp, Homo sapiens
taatgacaaaggctttgaggtgacacaacttgtggataattaacatggttgcccccctagcccccagagagcagtcagtcctgcacacggattattaaaggccaggttccaaggcctaagtaaactaacytatgtagatcaattcccacacttgcttgttatctaccctgagagaattcagctgcctttagccaaatcctctttcgaagcctttgcaaaacctcctggccttccaagaaggtttgcatctttttcctataatttctcccactactccgaccaattttctatatctatctatgtaataaaccttcacatgtaccccaaaacttaaaacaaaaatttttaaaaatgaaggtgctgcctatgtctattcaccagacattgaatctgtctggcatcttgatctcgaactcttcagcctccaaaactgtaagaaataaatgttgtatataagctatccagtttatggtaggtgtttttattatagcagccagaacagactaagatagtaattttattcacatctacacagtctcttttgctatggaacataacaaaattaggggtat

SEQ ID NO: 819582 - DNA, 544 bp, Homo sapiens
taattttattcacatctacacagtctcttttgctatggaacataacaaaattaggggtatggtatctcatcatattaggacagaagactttgggggaccatttcagaattctgtctaccataatgccaaacwaaatattattttttatgctttaaaccatatgtttaaaatgcatgcgtgtgcacacacatggacacacacacacctataattgaaagacaccccacatttctgttaaaagttaatggaaatgaagataaaatttttctatctaaattttggggctctagattaagtaactttgctttaggaggtgagaaaatgaaaggaatttgaaacagaggtgcaggagaatgaactagagtggatcaagaatgcaagaatgcagaaggaagatcagtttaatattcttccaacatgagatggtgggaatatgaacagagcacaagccagcaggaatagaaagaaaagattcaaagagaagataatgacagaaattactgatagaggtgaggaatagggcagaatcaaagctaatttctag

SEQ ID NO: 819583 - DNA, 619 bp, Homo sapiens
ctcccaccataaggggaatttttactgagctagaacagctttggtgaaaatgataacttaaataattccttataacaaccacagatgtgtaaccctttggattatcctcctagtctttcctccttaatgctttcttatttatttattttcatgttggcttgttacttttattacctgaccacgctgtgtggcctgttgtataaagcagttgaaagactctaattttaaaatgaatggctaggagaatgggttctgtgttcccttacttttaagtaaggtctgattattcagactgactgcaccaccaacatccttgtgaatggagctcttttgtataacttttatgatacctcctgccagggaaggtcaggttttagtgtaatgcgataccctatgttaaaaggcccaaattaacaaattcctgaaagcaaagcaaggaatacattttaaaatggtttttttgggcacgaagaggcggtacataagtcagcaaaggataggcrtgtgtgttccaaacctcactgcaaatttaccaccaatgtcttcagaaatgctgggcagtgaaggcaaaacctactgcagatattttataggtatcgacgactctctgcacattcat

SEQ ID NO: 819584 - DNA, 601 bp, Homo sapiens
acgtgtatacgatgtactattctttgtctaagaaaaaggccacgtgttgataaatgtttacgttaataaaacaacaaatggaagaatgagccacaaaataagaataggaatcattatttaaaaggtgtgtaagagaacagtggctatacagctggtatttttgtcttcactttgaaactttgtgaacatttcctatgattatagaatgaactttgatttaaaactcaaatctcaaactacttaaaaaaaaatcaaataacaccaagactagaagtgctgacctgacagctgacccaccacactcggcaggtgtctaccttgaccaaactgtgctgcctacgaggaagaggaatgcactcagaaagagggaaaatacagaaatttcttcagcagagaactagaaactgcaaaaagggaaccaatagagattttaaaactgaaaaataaatacttgaaataaaaactcactccaaagcagctccagcgcrgcccgtcgatgatggggaggctgtgcctgtgtggaggggggtgcgtgggagccctctgtgtcttctgctcagattggctatgaaactaaaactattctaaaaataaagtccat

SEQ ID NO: 819585 - DNA, 601 bp, Homo sapiens
acgtgtatacgatgtactattctttgtctaagaaaaaggccacgtgttgataaatgtttacgttaataaaacaacaaatggaagaatgagccacaaaataagaataggaatcattatttaaaaggtgtgtaagagaacagtggctatacagctggtatttttgtcttcactttgaaactttgtgaacatttcctatgattatagaatgaactttgatttaaaactcaaatctcaaactacttaaaaaaaaatcaaataacaccaagactagaagtgctgacctgacagctgacccaccacactcggcaggtgtctaccttgaccaaactgtgctgcctacgaggaagaggaatgcactcagaaagagggaaaatacagaaatttcttcagcagagaactagaaactgcaaaaagggaaccaatagagattttaaaactgaaaaataaatacttgaaataaaaactcactccaaagcagctccagcgcagcccgtcgatgatggggaggctgtgcctgtgtggaggggggtgcrtgggagccctctgtgtcttctgctcagattggctatgaaactaaaactattctaaaaataaagtccat

SEQ ID NO: 819586 - DNA, 601 bp, Homo sapiens
attaacatggtgacagaagaaaacaagagaacacttcaagacaytgagactttctacaacacctccactgggaagatgcccctcaatgctgctgacctcatctgaggggctgtcctgctacctagccccagccagggttcaatcttgggaggttgaggagcagcaggagaggggaaggaagggagacaagaagtggacatcttgtctcttttttttctttgaataaatgtcattttttgaggcaaaagaaatatatatatatatatatatatatatatatatatatatatatatatatataaacaatgactaaacataattatcattgtctttttctaatgttctgtttctgggctagtaatagtgtatagatcagtaataaaagcaaacatcgttcataattactactcgtttattccatgagctttattttccctgccttcatttcagcaaaatcactgttaccattgagattttcatgtttcatattccattgatagtaatgagattttaaaatatatttgtatcaaagtttacaaaatttcaatatattttcaacaaatagtgaatttcaaaaaataaaaagtttatttttataata

SEQ ID NO: 819587 - DNA, 567 bp, Homo sapiens
ctttctcctgggaggtgtcgtgtgatattcccctagtagcatctctagtcccttctgggttccctccttgcaaccactttacagggtggaaagaaacatggagcactggaatatttttacgggggaagasagggtcttgctatgttgcccgggctgttctcaacttctgggctcaagtgatcctcttcctgcctcaccctcccatgtagctgggattacaggcttgagccaccatgcctagctcagatttatcttctaacaatttcttttaaaacgtcattttaaagattctttttatctagtttaaaaaaaaagtcccaggaagaaactgaaacaggaagactcctgctaagttcatctcataaacaggttgttttttatctgatgaaaatgctcaggttgtgaatatttctgacaacgaactggttcacacaacagaggatactgctgggaaatgtgaggaggaattagcctgtgtgtgtcattagtcacaatgggcctttcctatttaaaaaaaaaaacaacaacaacaaaaaaaacccaccccacattgaagaggttcagaaa

SEQ ID NO: 819588 - DNA, 638 bp, Homo sapiens
ttggtctgtatacaaaaggtacactcaaaagcaagttctttaccatctctggaaattagctagccttggaagggatagtccctccagtgtcagcaaggccccacatgtcaaagcatcagaaacacatgggtaatatgctatggtcgcacagtgcgcttagtggcacagacaggtaggacctgggactctcaacccagttctctcctcactgaagttcgctgcagtccctccagcccagcccagcctcatctgcatcctctaccatcttgcaagctcaaaacattatttcttaaggaacttgctcatttgactctgagaggcttctttctctagtttatcctttaattttctcctcttacagctacttattttctaacaacagaaaatccttttatgcacattatgcacataaagtcaccgtgtccaactgggactcacaccgtaggttactggactttacccactttccaggacttagctaattagcacacgaggccaactgcatraaacgggcaggtgtcagctctgtgttttctctggggctggacaaggtttcttgctgccacaaggggctgtctgtggaggctcagcctgcctgccccatcacagttcaagcgaagagttagcatcagggatgc

SEQ ID NO: 819589 - DNA, 625 bp, Homo sapiens
tgtaaaagaaaagtcttttattgcatctctaaacaaaacattgagttttctggactgaaaacagagggcatattgaaaatacagtagacatttttattcttcacagaataaaatataatttgaagacatcaactttcttctcttccctaaattgacaatttaaaataattgttcaaccaggcaaaagtcacaagttccccttgtcacacaatttttattttattgttttattaaataaaaatattttattatgttaatatttatttaaggaaggttgattctttctccaataagagttttttttgtttttttttttccttgagacggagtctcactctatcacctcggctggagtgtaatggcactatctcggctcactgcaacctccgcctcccaggttcaagcgattctcctgcctcagcctcccgagtggatgggactacaggtgcctgccaccacacccagctaatttttgtatttttagtagagatggcgtttcactatgttggccaggcttgtctcaaactcctgacctcaaatgatctgccygccttgaccacccaaagtgcaggaatcacaggcgtgagccaccacgcctggccccagtaagagttatatgaagact

SEQ ID NO: 819590 - DNA, 628 bp, Homo sapiens
tttggaagcatagggggtgtctgtgtgtgtaatgttagcagccattgatgctcagtgcttaaacattaagttaccaggtgatgggaaatagtgatatgctaattctatcaytccattttcacttagtaactgaaaaactccccctcatcaactctttgttacattgactacagtttgtatgaaaggtagaataaatggttgagtctttccctttattcagtagttttcaaaataatgagttggttccctagcatcccccaaaggtggccaatgatgttttcctacgttattgtgaatttgctttctggtataacaagatattccaggatcatttgtgcatttcctatcccagacccaggatcagtcatttctccaagaaacccgttgcttgtagtagcaaatggtatttaaatccaaaatctgggagctagcagtatttattactactgagttgttcactgttcttcaaggtctttttagtaagcagtgttaggaaatatatactttttacaataaactacattatgatttcatatttccaattcaaattcaggattgtaagatttttatataacctcattgatcttacatctgtatctatttttccaatatctctcagcaccaatat

SEQ ID NO: 819591 - DNA, 582 bp, Homo sapiens
gtttctaggaaaaatacgtaagagtgagattactgggaactaggataagagtgttaataacaacctgctcaactgactttcaaagtgactgttccrtgttgcattcccaccagcaagttatgaaaacttcagctgtgccacatcttcaccaccacgtggtattgccaggttctgtctttgttttgttttcatgaacgccattctaataagtatgtagggactccgatcatggattcaacttgcattttgctaatgaaatatgatgttgaacatttttaaaaattgtatttaattttctttaaactcacataaaataacaatacatattcctggggtatatagtgataatttgagccatatgaagtctagtgaccagatcaggacaatgcgcatatccatcatctcgaacatttaccatttctttgtggttggaaacattcaatattccaataaccctccttctagctatttgaatgtatatattacattgttgtcatctgtagccaccctacagtggtaacgacctctagaacttattcctgctctctagctacaattttgtagactttcacaaatatctcc

SEQ ID NO: 819592 - DNA, 551 bp, Homo sapiens
aggatctgcctcctctccaactccctgcaggccacaggggcagcccagaatggcaggtggaaagtgtctcccaccctgacccgccaagagccgcagctcccctccctgctgctgcggggtgggaggcccctggccgtccaggaaaggcaggaggaagtctgtgttcaaatcaccggtggagtgggagagactcaattcagagatggcagcaccatcaaatttccttctcaatgttttctacagaaatctccaaaaaagtgcccagtgggaggtgggtgggaaaggtagtggagaaagaccccacctagggtgacagcaccctctcccaggaaacaccctccaccttgagcaattagaaggcagcgaggaaagcggcggtcttctaactgtgccatgaggctccaagtaggaagtttctggaagatgcgctgaggggatgtggcactcagaagataacacgctttttaaaggtgccaggtgtatgtgtaaaactgcatgtgttatcgccgtgtattgaacacggatccsggctcctctctaaatgaacattt

SEQ ID NO: 819593 - DNA, 558 bp, Homo sapiens
cttgaaagaataattcctctgccaaggccagccccgaatacacacaaaatgcatttttatgacaagggcaggtacatttttcaaacgacggggagggggagactcaccataactatgttctatttggcactacccaccataggggcttctctgacttaaagcatagcagacattttctaaggaacttgcatttttaatgactatttctttgtttttgcttttaaataaattaaaacttttaaaataatcaatcctatacttacaatgaagcaactgatacaaagagaccctttgttggggaaatactcaactgaaggttcttgtctgagatttaccttttcccatttctattgagctacctatcaaatgggccagcctttgtcaactagaatcagaatttctggtccatccaccagaacttgtatttgcagatctgacctggggcttctctcgtatttcagtggcccctcaccctctgtaggatataatctaatcccagttcttcctcccaaatatctsagttttcaggaattctctactacctaagaccgctcccag

SEQ ID NO: 819594 - DNA, 644 bp, Homo sapiens
gtgtgaccgtgaagcatgagaaatgccaggagcagaagtgtcaggtgcacccacatggaacaggcacgtgctttcatccgggggttcaaggagttcatccaggggagagggaggtttacgttcagaacaggcagccctgggagagtggagcatgcagagtgggggtgctttgggagtaggtggggaggggcctctcagcagctggctaagattctttaaggtgcgctggaagaaactgcaagaagtgtgatgcccccatggttgaggtggaggggacagttagagtttgtctccagagtacacagcagtgagctctcactccctgtggtagccccttccagccatggccaggacttcggtctcagtaacgcccagggtgccgtggaactccctggggagggtctggttaggatggccaattggggagggcttccagagctcaaagccattgaaatcctggcccaggctgaaagagttttacctgtggacgaagtcacctgcgcactttcaacagtgccgtggactagtgggcccaggtgtcccccagggagagaagacatcagcagctgcctagagtctccatgccaccaccccctagatggkcagggaactgtgaaatcccatgtccatgagcacaggcaggg

SEQ ID NO: 819595 - DNA, 591 bp, Homo sapiens
acacaacatgcgcccaaaatatatgcatgctgcatgcatactacatgaaacatgcacactacgtgtatacatcatgcattcatgctacatgcatgctacatgtgcacatgctttcaacatacatgctacatgagcaccacattcacactacatccgtacaagtgtgcagcatgcacacaacatacatgctatatgcgtaaagcatgattgctgcatgcatacaacatgcaactacatgtgcataacataaataatgcatgcacacaacatgcgtacagagagcatgcatactacatgaacacaacatgcaaaacatgcgcacaacatgcctaatgcatgcatgccacatgcgcacaacatgcatgctacacatgtacaacatatgtgcaacattcatgctacatgcgcacaacatacattcaacatgcacacaacatgcgcacaacttgtatgcatgaatattgsatgcaggctacatgtatactacacacgatacatgtgtgttaccaggatacatcatgcatgcaactatatgaatgctgcatgcatatagcatccatagtacatgcatgcaaaatgtgtcaaacataa

SEQ ID NO: 819596 - DNA, 591 bp, Homo sapiens
acacaacatgcgcccaaaatatatgcatgctgcatgcatactacatgaaacatgcacactacgtgtatacatcatgcattcatgctacatgcatgctacatgtgcacatgctttcaacatacatgctacatgagcaccacattcacactacatccgtacaagtgtgcagcatgcacacaacatacatgctatatgcgtaaagcatgattgctgcatgcatacaacatgcaactacatgtgcataacataaataatgcatgcacacaacatgcgtacagagagcatgcatactacatgaacacaacatgcaaaacatgcgcacaacatgcctaatgcatgcatgccacatgcgcacaacatgcatgctacacatgtacaacatatgtgcaacattcatgctacatgcgcacaacatacattcaacatgcacacaacatgcgcacaacttgtatgcatgaatattgcatgcaggctacatgtatactacacacgatacatgtgtgttaccagsatacatcatgcatgcaactatatgaatgctgcatgcatatagcatccatagtacatgcatgcaaaatgtgtcaaacataa

SEQ ID NO: 819597 - DNA, 621 bp, Homo sapiens
catcgtttttgctaagaccctgtgccctttggtgttctgggactacaggcrcacttggtgaatgttagggcactgcagaagggaggtggttgattactgcaggcaaatgacctcctatagagaaggaaacagtttattgaaaagggtaaatgaatggcggtgttttgctataggtgtgacagaaatggcaggaaatgtgttttaaaaaataaaaaaaattaaagttgggcactgtggctcatgcctgtaactccagcactttgggaggctgaggtgggaggatcgcttaagtccaagagtttgtggctgtagtgagccatgatcacaccactgcactccagcctggatgacaaagcaggactctgcctctaaaaagaaaaaaaaaagttaagtacaaaacttattttcaaaaataaactttgtcagttagtgttaaaaggctttttaattatgaactgtgtttattggaatagtgtcattactgtgcctttaatgttctttggtgggttacttactcaagctggtttcccaggtctcattaaagtagctttttttcaaatatagaacttgccagaaaagtgttttctttgatggctagagaatttgaagaaagatttttga

SEQ ID NO: 819598 - DNA, 568 bp, Homo sapiens
ctgtgaaattttgcttcagaaaagcctgcactgcaaaaccaaacagtacagagatgtataaaagatctcctcaaccttaayagagaagcaaaaagcaaaacatcttctttgctcctgatggaaatgattaccaatttaagatttcccacagagaagcctctctccatgatgcatggaaaaatttccagaacataatctaataatagcaaaataaatagaaatactaaataaatatgccgacaaacccatggctgatatcactaatggaaatccagagtgctgacagtatgtgggtttttcctgtgacccagagcatgtaagaggtatacactcaatctcagtgatatcatatcgaggtgtggaatgtcactgtgcttttccatatggaaaaagtgaggtacagaaaagggatacggcttgtccatggttatctcgcacacaggagagtttattacggaggtaagcaccctagtgtttggctgaggcttctaatatattgcctgttctagcacgtaaactctttttactgtgaagccttattatgcttttcttacatctcactgaacct

SEQ ID NO: 819599 - DNA, 608 bp, Homo sapiens
tttcaactaaaaataacactgaattaaatgaagacatttgaggtttctgactccttcacgatgttttaacataaaaaattycttctaaaaaacttcagtggctcacgcctgtaatcccagcactttgggaggccgaggcgggcggatcacgaggtcaggagatcgagaccatcccggctaaaacggtgaaaccccgtctctactaaaaatacaaaaaattagccgggcgtagtggcaggcgcctgtagtcccagctacttgggaggctgaggcaggagaatggcgtgaacccgggaggcggagcttgcagtgagccgagatcccgccactgcactccagcctgggcgacagagcgagactccgtctcaaaaaaaaaaaaaaaaaaaaaaaaaaaaagagcttcaatatgatgtttcagttgatgtattacaaagacattgtaacacctaatttcaaatctaatttcatatatgagtttaaagtacaatttatacattagaataccttatgtaattgaatcctgcagcaatatctcaactcattttactcacaaaacacgagtgatttaaaagaaacattcctaacataggtatttggtttggaattaa

SEQ ID NO: 819600 - DNA, 629 bp, Homo sapiens
attttgttattataattacttttcattgaaatttaaacagaagcaaagatattttctctttgctactattttccagsatacacagatccactctttaaaggttatctgaaaatcactgggtaagatatttagatcaggccagagcagcattattaataactgccagaatgaacaaaacttaaatgttagatggttgaactttgggccatataactttttttggtcagcttatctctaggacaaaagaataaaatctccctgccaaaagtttattgatagaataaaggaaaagcaactgtcgttgatccttcatttatctgctcagaggctctcgcttgagtccaacacattctcctgagccacattattatcttattttcatgcctgaatggcagacttcagttgagagccatagggacaattcatgcctaggctagtcagaggcatgggcaaacacataggaggatcttattcctaaagaagccaagaaaagctatggcctttcccaagccaaaagtatcggtctagtgagaagctctgagcaagcctcagtaacaatcactgaagtgaatggaaaaacaaaagtggaaaattaagtaaatgtaaatacactttataaaatagtcctc

SEQ ID NO: 819601 - DNA, 491 bp, Homo sapiens
gagtgacagagtgagacccccatctcaaacaaaaacaaaagcaaaaaaacacacccttatgcagtttctaccagcattctcatgaaggcactttggttattaagaagtataaatgtacttggatgcasgtgggaccctttctcgggtcattcatataatcacaaaataataatagcatttgacatttattgaacattattccaccaggaattgtaccatatgcttttcgcacagcctagggtactgaggattgaagacggtcacttggctgaggtcacacgactttaaattaaaggattactaatccaatctcacactttaactcactggactaagttgagagctgctacatggacagctcttatactgaagggtccttttttgtttttttgagagggagtcttgctctgtcacccaggctggagtgcagtggctcgatcttggctcactgcaacctccacctcccaggttcaagcgattcttctgcctca

SEQ ID NO: 819602 - DNA, 610 bp, Homo sapiens
atttatacacacacatctgtcattttattctacaaattgatgttttctcattctataacataaggaactcagtatttaaagttcaaagcaatcaccactttaacaaactcttgagcttgtagttgaaagttcacacacattttacagaagagaaacacagctagagaaaagagcctaatcatatagtcagtaacttagattcatgatgactattctgtcttgaattaaataagctacccttatttgaatagtttgggggacatctaactagtatgtttttaatgtatattttcattaacatttcagattactcattcattcactaacatttttggtacatgtgccatgtacactattctagatatgtggggttttttagtggttaaaattgtcaggttagaagccagatattatttattaggaatttacttcagctctccattttgtaatttccttgtgtctgagaaattgtatctactttgtagggtttttgtgggtatcaaatacataaaaacatatgtaaagaataaaatgaagcctgagccatgttatggtatcaaatcctasatactattaattactgtattctcatttaatcctcacaataagc

SEQ ID NO: 819603 - DNA, 628 bp, Homo sapiens
attttatagcacagtataagtgctgaacttgtgttatacctttcaaataacagtaaccacctctaatttcttaaagggctctttaaaaaaatgcatggtatgtccatcatagagcaagaaatgcctctttttataatatattcaaaatggaggtggttatgtttccttttacactggtattgcaattcattttctgttagtaagcaagaatattgaccaactgtattacactctgttctcacactgctataaagaaatacccaagactgggtaatttatcaagggaagagatttaatggactcacagttccacatggctggggaggcctcaggaaacttacaaccatggtggaaagggaagacgcacatcttacatggtggcaggagagagataacaagcaagagcaaggaaaactgccttataaaaccaccagatgtcatgacaactctctcattatcacaagaacagcatgggagaaaccacccccatgatacaatcacygcccacttggtccctccctctacacatggggattatggggattacaatttgcagtgagatttggttggggacacagagccaaaccatatcaccaacataatataaaatcactttgaaaggacctca

SEQ ID NO: 819604 - DNA, 628 bp, Homo sapiens
attttatagcacagtataagtgctgaacttgtgttatacctttcaaataacagtaaccacctctaatttcttaaagggctctttaaaaaaatgcatggtatgtccatcatagagcaagaaatgcctctttttataatatattcaaaatggaggtggttatgtttccttttacactggtattgcaattcattttctgttagtaagcaagaatattgaccaactgtattacactctgttctcacactgctataaagaaatacccaagactgggtaatttatcaagggaagagatttaatggactcacagttccacatggctggggaggcctcaggaaacttacaaccatggtggaaagggaagacgcacatcttacatggtggcaggagagagataacaagcaagagcaaggaaaactgccttataaaaccaccagatgtcatgacaactctctcattatcacaagaacagcatgggagaaaccacccccatgatacaatcactgcccacttggtccctccctctacacatggggattatggggattacaatttgcartgagatttggttggggacacagagccaaaccatatcaccaacataatataaaatcactttgaaaggacctca

SEQ ID NO: 819605 - DNA, 619 bp, Homo sapiens
agaagcaatattatgttttgtttattagaaagaaatcctaatgctttagatgccaagcattgaggcagctggcaaatctgttttaaaagtgtagaagcctgtcatattctcagcaagagaaacattgtaaactatatgtaggtgagtcccaggcagatatagaattgaatctcatttttttttctttataggaacagacatggatttatctaaattccccttatggacaagcaaaagtcctaggaactacgactgagtttgggtgagactggctcaggttttccggcccgtgtagttgaagaaattaactgttacctatgataagcctgctcagacaatattcaatcaagatctgaaagaaatattcagttgagactacaaccattaccattactacaaaggttttggggttttattttatttttctctgataaatgtgtaagagaaaaatttgaaatagaagttcattagaataggttaacttaaggattataagattaaaataccattcatttgaacttaaattatacttttayacactttttgtattataaacaatttctgtatttatctattcatagtgtattaagagttaatagtgaattatatgtacatgggc

SEQ ID NO: 819606 - DNA, 534 bp, Homo sapiens
ttttcacataccactttagttgtgggaacaaaataaaaggattatttactggtttctgtgtgcttctatgtatttatccccagtattcagcttaaaagaaaaactataatgttaattcaaaatcagttttttacctgtccattatgatttgttcagggtattaggacatttatacataagtcttttaggatattgaaaccttcttaacccaaaggtgtgaatgcagggccagatgtggtggctcatgcctgtaatcccagcacttcgggaggccaaggcaggaagatcttcgagcccgggagttcaagaccagcctgggcaacacaaccagaccctgtttctacaaaaaataaaaaaataaaaaaatagctaggcatggtggcacatgcctgtaatcccagctactsaggagatggaggcaagaggattgcttgatcctgggaagttgaggctgcaagtgagctgtgatggagccactgcactgtagcctggacaacagagacagaccttgtcttgaaaaaaaagagttgtgaa

SEQ ID NO: 819607 - DNA, 654 bp, Homo sapiens
gctaacaggatttgggtacttgctggtttcacactgcaattttaaaaagggggagggggtcaattgcttttggaaargggggtctcccccaatattatccagttgcacagtaagttactattactcttatggtcactaggaacaaacacaggcatactttgcagaaatcagcaaaattaaccaggccctaagcaacttcttatttgttgggttcagcaatggatcatcaagagaggcaggaagaaaagtgaaactagagggtaccaccaagatgtttcctggctagagttatttcagaacactatcatttccaccagagagctttaaaacatttgcgtttctcctatgaatcaggctgtatggcaacaaaacagataaacagaaaaagtacattattagcataaaacagtattagcataaatagaaagggaatcaggatattcggaggggtgggagaaaacagcttgtataatatgtggcctactcatttcagtcgacttcactgtagctgataaactgtgaaatttccataataatatagagtacagaaagcaaacaacaattttatttgatagggaaattgcatcctgatactggatataaaattctacagcatgttcaatgatattttcaaagcattgaaaatatagacat

SEQ ID NO: 819608 - DNA, 415 bp, Homo sapiens
ggatatcccatttgccctggcatgattgttacttattgtgtgcctatttcaaaatatcttatgtactccataaatacatacacctactatgtacccacaaaaattaaaaaayttttaaaactctaaaaaaaaaccacacaagtattcagtcttagtacaacaaaagacttaagttaataatttttactttgattacatgttgaaattatatttttatatattgggctaaataaaatatattttaattactacaacgaaaggcttaaattaataatttttactttgattacatgttcaaatgatttttatatattgggctaaataaaaaaatatattttaattagcttctcctatctccttttcctttctttaatgtggctatgagaaaattgaatatctttggcttgaatttgta

SEQ ID NO: 819609 - DNA, 575 bp, Homo sapiens
gagggccaatggttaaggccttgatccttamccaatatacatcttaagtctcaatgcctaaaatttaaacaatctgaagattgctttcagagaatggcgagaactgccagacagataaggagttactggccttacaaaaatacgtattaatgtgatctctcattaagcatgtaaactatgtctttttcatgattatttccctagcacctagcaaattactaagcataataaaggtttattgaacacatatgtatatttattgaacagctacatgtagaggacatcgggctgtcttctgtggagccatcaacagtgagcatttatttactatgagccaggccctttgtaagagctgtgtgtgtgaacacatttaaacctcacaggaactctacattattacaactcacctcacagatagaaaaaaatgaggctcacagaggtcaagcaatttgccaaaggtcacacagaaagtaataggtagtagagctggaattttaaggagtaggtatgtacagatcctgccttcaagaaatttaagcttcaggataggaggtaagatacacatattttttaaa

SEQ ID NO: 819610 - DNA, 641 bp, Homo sapiens
aaaagctctataagatcaaaagtgctttagtaaagtgtcacagtagaggtgagggagatgagctgcctggggatgatctaaaagagctttttcagagaatgcagcattttctatgggcataggagagtgggatcacaccccacacatcatagtttttgccctgggggatggagacaaggtgactgggttgaatatgcaatagctctcacctctccctggccaggaaacaatgtgcacctgcagctggctggtcctgaaatgcttctcaagattggtagaggtgggtaaagaggtagcaagcaatccatgacccagtgaacagtgtcccaagagcaggcactggcttatacttgccacagaacctccctacccactctgagctttgattaaagtctctccacattccaaatataagaaaatagttccagaatcagcaccaaaaataagggccttggtcataatactctctcatttccacatgccaaatagtcattatctgagtcactgggctctgggtaatgacaacctctaatccctatggacaaggccacatatcatctctaaatcattcagawccctgagaacagtgagtcctcgacagaggctcacccactggaatcatgaggctggtcatcactgcc

SEQ ID NO: 819611 - DNA, 326 bp, Homo sapiens
ccacctccacctacaaccccgcctccctccaaccttgcttccctccacctccaaccccgtctccctccaaacctgcctccatcctcctccagtcctgccttcctcctcctctgatcagcctccctcctcctcaactccttaactcatgatggatcgtaagcctaaatggaaaacgtaaagtgtaaaacctttagaatcaaacacaaaaaaatattgtgtgaacttagattaggccaagagttatcagatatgactccraaagcaagacccacaaaagaaaaattactaagttggattttatcaaaattttaccttttatgattcaa

SEQ ID NO: 819612 - DNA, 590 bp, Homo sapiens
ggagccattggagagaactccatctagctgaaagacctgaaacttagaaccaaagcagccaatgactacacagcccgactccttcccaacccatagctagatcctggattacccatatgtgaaccaaggccagtgtgggaagggcactgtggaaagcgaacgtaccaggttcccagggaacagccagatgaggctacctgctccaggccaaagagagggagcaatgccacacctcctcccaaggggaagtagctcaggcctcatgtaagtgaagaaagacctagacatttgcctaaggaccaggtttctggatctcctcacactcaggaggagcacagccccacccttctcaatccaacttctgtagaaggaggtaggccccacaagccagaagaaattctgaagaaggagaaagagggggtgcgtggaccttctctcaagcctggtggatgcctgtaggtccttctatctaccaaattscacctttccccaagtcccagatggagcaatcatcctccctctgcctccccacctcccgtggacttcaacccttatattcatgttagaatctctctgcctcttcctctgac

SEQ ID NO: 819613 - DNA, 606 bp, Homo sapiens
gtttccatatggccagcatggctatgaccggagcccccatccccaagcagtgaaacaagccagggcagacaaaggacacagcaaggcataggcaggtytcatttcgtatgagcgcctcagggtcaaggttagggcttgcttcccatgcacactgcacttggaatctggaatatatttggtgctcagtaaacttggattttctatgtgaacgatttaaatgagtccctgctgcaagagcacagtgtttccatgcttgctgttcttttgaacaaccactgttcactttcacatctccctgggctgtcattgccttaggaggcctgcactggtccctgacatagagagaccctcactgttagggtcctggagcactggaaccctcctctcataggacacaacacactctagtgaaatggcataggacctctgtttccattgggacaggaactccatggcaggcttcccttgcgggatgatggatcactgtgggctaatggaatattatacaagggaagaagccactgattctgtttgagctgatcaggggaatgtttgtggagacacccttgaggggcttatcaagtcagaatgagttttccaaacaga

SEQ ID NO: 819614 - DNA, 632 bp, Homo sapiens
taaaaatgtaaaacaatggtcatcttcccactatttttttttattttagaaaatttagttattttcacaaaaaaaaatgttacgtgtgttaacatgtgttatgtgttgaatcatgtgctcccaaaagatgttgaagtactaagcaccagtacctatgaagatgatcttatttgaaagtaggttctttacaaatgattaagtgaagatgaagtcattagcatgggtcctgattcaatgtgattcctgtctttgtaaaaaggagaaatttggacacagacacagacatgggggaatgccatctacaagccaagaaacacctaagactgccagaagctgagagagagaactggaacagattctccctcatgggcctcaggaaggtcctccctcaggccctcttgccggcactttgaattcaaacctgtcgccttcagaactgggagacaataaatgtcttgtttaagccagacagtgtgtgatactttgttacagcaaccccagaaaacaaataaaacgygtaattcgtttattatttttaatcaatgtattaaaatatatttaatttatccactttaatttctaatatgacaaatactaacagatttaaggcacataaagaaaagctctttggg

SEQ ID NO: 819615 - DNA, 614 bp, Homo sapiens
tgccaggaggggaaatagtgaaacaataatctggtgtttttggtttctgattcaaaagatgtgctattgaataatgaaacataaaacatttgccaaaatcgactttcttaattattttctatttccttggcctttaaaccatttaaaggaacaatcacttgaaaaataattgtggcgtaaagaatgtgagatcacaaaactttcagagctcagaagttccagtcagagaagaaaactgaggtcttaatctggctttcctaatttcctgcaactccttaatacagagtctagctggtacccaagtctcctccccgccacagcaatgctctttctgctgcactacttcagaagagcacccacatgctcatctttatgaaggcacaccctccttgaggcctttggtgtgaaagcccaattgtttacaagcatcgtttgcaaaggatatccagaatatccaaagcagaaagccacacactgaccactgccacatgccccatgaagaaaaaggtgcgaataatgacattgatttagttamctgactttttagtcacttcttttcctgaaaaatttgttttgagctattgagttttctctgatgtgggatacaaggcaat

SEQ ID NO: 819616 - DNA, 616 bp, Homo sapiens
tgtttggttatttataattgctacttatttcttatattgagacacacctggtcctatccccttgagtggctctatcctcatctgttagtctgttagtccattttatgttgctatgaaggaatacttgagaytggataatttttttttttcttttaagacagagtctggctctgtcacccaggctggagttcagtggtgccatctaggttcactgcaacctccgcctcctgggttcaagcgattctcctgcgtcagcctcccacgtagctgggactacaggtacgtgccaccatgcctggcaattttttttttttgtattttcactagagatgaggcttcaccatgttggccagtccggtctcgaactcctgaccttaggtaatccacccacctcggcctcccaaagtgctagggttacaggcatgagccactgtgcccagccaagactggataatttataaagaaaagaggtttattggctcacggttctgcaggctccacaagcctggcaccagcatctacttggcttctggtgaggcctcggggagcttttactcatagagcaggcgtgttacatggcaagagagggaggaatggagagagaacaagatagagg

SEQ ID NO: 819617 - DNA, 561 bp, Homo sapiens
catttttattgtgcttcaactaaactgcagtgatccagcagccagattmagcttccttctgatcacattattttaaatttccatatacgtttatatgttataaatccttaggtctcaagttctccaggtattttgttgttatgatgaaagtatccctccataagtgggccggatttgaatgcacccaagcaccagttcttcttccaggttctggcatgatataatacgataattaacacttacataacacctgaagtatcataagagtacaggacattttagggcactattctaaaatgtattatctcatttgatccatagaacaaccctataagctagactctattatcatccccattttacaaaacgtaaaggtgagaaaacttgggtatgaaaagaaagtaagtgattttcccatggtctcatgctggtcaatgtagaaccaggatttgaacccaggcagtctggtttcagcatgcatgcttttaatctcttcagttcagtgcattcaatcaatatttattgaaataaattgcatggcactttcttaacccagaaagt

SEQ ID NO: 819618 - DNA, 565 bp, Homo sapiens
attagttctaacacttcttttaatgtggaatctttaaggtttyctacatataaaattgtgaacggacattaattttacttcttcctttctgatgtggatgcctttcatttcttttccttatctaattgccccagctaagacttccagtactataatattttgaatggaagtggtgagtgtgtgaatccttgtcttgtttttgatcgtgtggaaaaagctttcaaattttcactatttggtatgatgttagtgttactggaaagggatcccaatccagatcccaagagagggttcctggatcttgcacaagaaataatttgggatgagttcatagagtaaagtgaaagcaagttcattaggaaactaaaggaataaaagaatggctgctccataggcagagcagccccaagggctgctggttgcccatttttatggttatttcttgattatatgcttaataaggggtagatttgtcatgagttttctgggaaaagggtggtcaattcctggaactgaggggtcctcccccttttagaccatatagggtaacttcctgatgttgcca

SEQ ID NO: 819619 - DNA, 552 bp, Homo sapiens
ttacctttctcctttattttctttgtatttcagaatttgtcagcaaataattttttatttcagattttttttacgttctcaaagatgtgctgttttgataaaatagttgtttcctgatgtaaatcttccaaaacattccgcgaacatattctgcttgttatggttattttcctctatttctgttcctagttgtttatttatctttgaaaggaggcaattcattttcgaccaccaactggccccaaagtaatgtaggtcaaatggtgtccgggccctcctgtccgcacctgcctggatgtcatgtgtaccctccccttgccattgcctggagctctgagtgaccatgtctaagttgcctgctcatgaacgcaggtgctttagggaggcggaatgggtgccaggttctgagagaagatttgggggtctcctccctcctattcagagttctcgccwcgccccctgcactggagaggcacagcccagtctgccatgggcgttccccatagatttgcctattccctcaatttaggctcacaggctgtgggatgagta

SEQ ID NO: 819620 - DNA, 552 bp, Homo sapiens
ttacctttctcctttattttctttgtatttcagaatttgtcagcaaataattttttatttcagattttttttacgttctcaaagatgtgctgttttgataaaatagttgtttcctgatgtaaatcttccaaaacattccgcgaacatattctgcttgttatggttattttcctctatttctgttcctagttgtttatttatctttgaaaggaggcaattcattttcgaccaccaactggccccaaagtaatgtaggtcaaatggtgtccgggccctcctgtccgcacctgcctggatgtcatgtgtaccctccccttgccattgcctggagctctgagtgaccatgtctaagttgcctgctcatgaacgcaggtgctttagggaggcggaatgggtgccaggttctgagagaagatttgggggtctcctccctcctattcagagttctcgcctcgccccctgcactggagaggcacagcccagtctgccrtgggcgttccccatagatttgcctattccctcaatttaggctcacaggctgtgggatgagta

SEQ ID NO: 819621 - DNA, 622 bp, Homo sapiens
tactgtgaagctcaacaggagacccagaggcagcaggtgtgtgttcaaatggaaggtcagggataaagacccacgtgcacacacgtgtgcacacacactctagtatraaacgaaacaacatcactcacattcttcaatgcctgctaaggagctccgcttatttttgacagaagaaattattactggtggtaaatccgtatgggtctgcagcaatctcaattcttgtctcctcagaagaaagaatttgactaagcggcataaggcagaagaagagaccaagacaaattttacagaaggagtgaaagtttataaaaagctttagtctggacatggtggctcacgcttgtaatcccagcactttgggaggccaaggtaggtgggcgaattacttgaggtcaggagtcccagaccaacctggccaacatggtgaaactccgcctctactaaaaatacaacaattaagctgagcatggtggcgtgtgcctataattccagctactcaggaggctgaggtgggagaatcgcttgaacttgggaagcagaggttgcagtgagctgagatcatgccacttcactccagcctgggcgataaagggagactcaaaaaaaaaaaaaaaaaagg

SEQ ID NO: 819622 - DNA, 569 bp, Homo sapiens
atgtagaatattactaaggacaccaacacatactgtcatatcacagagaaaaagcaaaagggatagaaaaaatattcaaagaaataatatcagaaaatgtatcaaatttattgaaaaactataacctacacattgagaaagctcaacgaaggctaagtagcataaatttgaggagatctcacaacatcatagcaaaagtgctgaaagtagaacacaaagagaaaatttaaaacactgagagagagacaaccagtcgtttacaagggaacctcaagcaggaacaacagtctggcagacagtgggataacatatttaagagattcaaagaaaaaactgtcaaccaagaatcctatatccaacaaaattatctttcaaaaatgatggcaaaaaactttcctcaattaaaaacaaaaaaaggccagagagaatttgttactagcagacttgtcttagaagaaatactcaggcaaggttttcaagttgaaagcaagtgaccatagatggtaatttgaatctatatttaaaaaaaaacasatacacttgcaaaagtaattgtgtaattgtaaaaa

SEQ ID NO: 819623 - DNA, 628 bp, Homo sapiens
taattatttgtcacaagtgataaaagcaggctaattataaaagctacttaattaaaattagacttagcatttatgtatttaactgttcaaatctatttgrggcttgtgtctcctgtgatgagattcaaatgtaagtttcctacatagtcaatttactgattaaccaattagaagtttttaaaatccattatctatagcaaataagaggggtgattggaaatgctaattaatgtatgacttatcttaagaaataattattctatatttcaatgtatgtttctggcaatatcatgaagaacttctgaagagcaagtctaaagttacgccacttttaaacagtcttggggctgtgccgttgcccaagttctgttgcattgtcagacaataacaactacgctgtctgagaacattttgaacttgttcatttaacctttggagagctttctgtgctgcagacaccattgatagggttttcttttgtaagtctcagtttagttaatcttcaaaccacaaggaaggaggaatttttagtaataatgcaatataaatggcattacttatgttctctatttcaatacggtaggaactaggcgtgggtcaggccagcctcgtccttggatccctcaaa

SEQ ID NO: 819624 - DNA, 620 bp, Homo sapiens
aaaccacaaggaaggaggaatttttagtaataatgcaatataaatggcattacttatgttctctatttcaatacggtaggaactaggcgtgggtcaggccagcctcgtccttggatccctcaaatatcttgaactgctgctcaaatgtgttgggtttggcacaacctgcaagaccctgggccaggcactgtttcctctttgatttttaagcccctgtgtatttcaagggaaacttaatccatatgtttctgattcatttacacttaactcatcaaaatgttgtcttgaaggagctatttgatatccaacaaatctttggagcccttttctcgaggactttgaaaatctttattttgatccccatagaaaagaaaaagttactcttttagtgtgtgtgagcacatgtgtgtgtttcagtgagcaaattcagtcaccctaaggcatgagttcaatctaaaactaacaaataagatgtcagcccagatttttaacttgctytaatgtcctatgtactaattagagcctcgtggggggagggggtggaggattctcactctgatctaaactagtcccaagcccatgaaaatgttcaccatctgttagcaatataggacctagat

SEQ ID NO: 819625 - DNA, 596 bp, Homo sapiens
ctgacatatggaatttatagtttagtgaagttgaatatatatggacttaactacaacacaagacaatatagtaaaacttgtactccaaccatggtccaaaacaccttagaagcrcaaggaaattacaaattctgtggtatgaagaaaatgtcacaaactaccatctgacagaggccttaaagacttcaacctgttgtgatagagaagaggtccaggcagtaggaacagcctaaaggaaaggtagagacagaaaatgttagatatgtgtgagaaataggaaaacaactgataaattctcagtccctaagctattactgtttcaaatatctctaccacttatagttttaatgaacttatcctaaagagccactggaggtcagcattttattcagtgaattcctgaaaatatgcagatgattatttgcagagtgaattagttgttatcagagaaaatgttcacaattcattttaaggactataacctcataacataaaatggaaaaatgcaaaatcaaaccatctacatggctgtactacgtacatcagatactctagaattagaagagactttagggaaaatctaggtcaaccatgtg

SEQ ID NO: 819626 - DNA, 657 bp, Homo sapiens
aaaggaatttggaagaattttgaaaagaatatcatgacacctttttaatgaactggaagcctattttgaaagtctkaagaatagctggggcatctttctctcagactttacatggtggccgattgatccctggtacccgttcttcagtctcccacagtgatgtgcataaacacctttgccatggcctgctggtgggcagcgtgtactgccctgccctgggctttgggtctggcataggactttctttggacaacaatctgtgagaagaaaggacaagagcaaaattttcaatatgctcagctggcgggtcttgccctcttgtgcacccatcctttgctctgggatgaattttccctgggaagcctgtagccccagcaggatgagacatagagcagaccagaaaccaatccatagcttgcagccaagcccagctgagcctaccctgggtcagccaacccctggatgacccactggttgatacctgagctaggaggaaatgcttatagttgtatgctgttgaatgttggggtggctgttctcatagcactattgtggtatggctaactgatatgcataggatagtcgctatatatggaaactacgggatgcttgataaaatgggcaattaatcaacattaaacagtaaactcgtaggag

SEQ ID NO: 819627 - DNA, 657 bp, Homo sapiens
aaaggaatttggaagaattttgaaaagaatatcatgacacctttttaatgaactggaagcctattttgaaagtctgaagaatagctggggcatctttctctcagactttacatggtggccgattgatccctggtacccgttcttcagtctcccacagtgatgtgcataaacacctttgccatggcctgctggtgggcagcgtgtactgccctgccctgggctttgggtctggcataggactttctttggacaacaatctgtgagaagaaaggacaagagcaaaattttcaatatgctcagctggcgggtcttgccctcttgtgcacccatcctttgctctgggatgaattttccctgggaagcctgtagccccagcaggatgagacatagagcagaccagaaaccaatccatagcttgcagccaagcccagctgagcctaccctgggtcagccaacccctggatgacccactggttgatacctgagctaggaggaaatgcttatagttgtatgctgttgaatgttggggtggctgttctcatagcacyattgtggtatggctaactgatatgcataggatagtcgctatatatggaaactacgggatgcttgataaaatgggcaattaatcaacattaaacagtaaactcgtaggag

SEQ ID NO: 819628 - DNA, 583 bp, Homo sapiens
agtggagtgggctagtactgatgagtaggcaaccaagaggtcctgccacatccaaataaatggatgggacgactcaatatcattaggttgtcagctgtccttcaattttaatatattaatcaagtgyaattacaatcaaaatcaaaatactttttttatggaactggaaatgctcatattaaaattaatgtaacagaacaaaggttcaaaaacaattttggaggaaaagaagtggaggcagctgtccgactagagagcaaaacattttataaagccataataattagatggcatgactgtggcacagaagccacaaactaacagaagacgaaagagagtccagacacaagcccatacatatatggaaatctgagatatgagagatggcatgttttcacttttgagattgtggttccacaaacaacaacaaaattcatggcttctttgatgaaaatgaaagtctcacgcaccctcaaaataatgtgctctcctaaaagtgtcgagaattatagtattgcctatatatagctctggtaagcaaaacaaacgtattcatgaacaaattgctttgatttttcttttc

SEQ ID NO: 819629 - DNA, 585 bp, Homo sapiens
ctgaaagacagtacccctggggaggacaaagctggcagtggggawctggcttccctgggagctgtcctcaagggcacagtgctgattagggaggtggaggtgggtgttaaggacaacatgtgaaggagctgtccacacactgaggtgctgacacagagcaggatgttattaagtgcccctaggaactctccaggacagcaatgctgaccaatgaagagtggggttgggaaagccaagagaaaggtgcaacccccttccaacacctagggtgctgggtgtaggcgctggggaaggcactgggccttttccatgagttctgtgagcaagcatggggagctgaccccatattttagtgctgatgctcaaagcctgttttttaggcttttagggggcaggactgagctaacaaaatgatactgtataaaaggtgactcagggtcactgaagtgcatgcactgtggacccacttcagtccatcagtgccatctgccactgatgccagaaattccaccattagtgattcattcttttgtactgtgcgtggtcctttccttctgatttctgccagaactgggagcatattta

SEQ ID NO: 819630 - DNA, 568 bp, Homo sapiens
aagctctgactccgggcattcacctggagcccgcctgtgttgggcactgcacatgtgctggctccttcattccattttttttttttttttttgagacggtgtttcactcttgtcacccaggctggagtgtagtggcaccatcttggcccactgcaacctctgcctcccaggttcaagcagttctcctgcctcagcctcccgagtagcttggattacaggtgcataccaccatgcccggctaatttttgcatttttagtagagacggggtttcaccatattggccaggctggtatggaattcctgaccccaagtgatctgcccaccttggcctcccaatgtgccgggattacaggcttgagccaatgcgcctggcctggctctttcactccttaatggggcccatagcgggtatcctacagctggcaaacagtagggctggcagcaacaaggtccttgtcatctacackggcttctgccacttctcattccatgactgctgagccaccaggatggccatggtacattgctaagtgacaaaataaagctgtgggctacacataaaatgat

SEQ ID NO: 819631 - DNA, 499 bp, Homo sapiens
agactccaaagactgggagacacaggtgaaccttgctaaacagaaacccagtatatggaaacgcattttcttggggcttagaggcatggagggggaaggagtgggattacagagccccatgctgcattttacaagacttttgttatcccctgccccttgctatgtgctctggaaatgggaaggctgttatttcccctgctgtgtgcttcctcaatggggcccccattagagcagttactggagcatttggacacttagagcaatgacaagctttcgggttctggaatcggaaagacctagttcaagtccaacctctgctgtgtgactttaggtaagtgacttggcctctctgagcctcagattagacagctgtgaagtgggataacccaayggatttgtgagctaagggccctggcacatgatagatacatggtaaaagttagacctctccccttttcatgagcttttttccttggactggcctctgaaagccaagggc

SEQ ID NO: 819632 - DNA, 519 bp, Homo sapiens
atatctcccagcctctcacctcaggccacaatggtcttttaggtaatgcaatgtgcaatccttcttaccacagagcctgtgcttttgctattgccattgtctagaacccagcagaactgtattagtttgttttcacgatgctgtgaagaaatacccaagactaggtactttataaagaaaagaggtttaattgactcacacttctacatggctgggaggcctcagaaaacttacaatcataatggaaggggaagcaaacacatccttcttcacatgacagcaggagagagaagtactgagcaaagtgatcgaaagccacttataaaaccatcagatctcatgtgaactcactcactatcacaagaacagcatggagaaacctcccccataatctaatcacctcccaggaggtccctcctccaacgcatggggattacaatttaagaggaaatttgggtggggacacaaagccagamtacatcattctgcccctgacacctcccaaatctcatctttctc

SEQ ID NO: 819633 - DNA, 535 bp, Homo sapiens
gattgaccttagtctaaaatccaaagtgtagaacctaaaaacaatatatattaccatgactatggtcaaaaamagaaaaaaaaaaaacaaaaaaaactagacacgaaaagaattctagaaatattgcttagtataagagaaaaaaataggtaatagaattagacctggaaatgacaaagatgatagaatgggtggtcaagggcattaacaaatggtcttatcaatatactcatgttggagactatagagaaaaccatgaaaagcagagaaagagaaggttaaaaacacacacataataaactataattgaaacatataatatctgagattaaaaaatacaatagacatattaacagaatattagacattgtagacaaatacataaatttgaaaacacagaaattaaattattctaaatgaaacatatataaataaaagactaaaaaaattaagcacagcattaataagctctagaaaaacaccaagttgcttactatttacctgatttgagcctcaaaaggagagaaaccatttg

SEQ ID NO: 819634 - DNA, 604 bp, Homo sapiens
attcaaattttagtaaacatttagtwttggcaacatattatgtgctaaatactagtttttaaaatgagaattattatgttttcttaaaaacatcttttgaatatttttaggatgtaattttcatgaggggcaaaaatgggtggtatagcatggtaattgttatcctccacaggttcagcaaaatctataaagatcctaatctatcctagtacataactatggatcaagtatttgtaatttttttctaaaccaaaactgcatgttatttaacccatacttggaataacagattctattttgttaaactgtaagctaaagtattatttgtttcaatagtaaacaaaaggattattttatgttatagaaattttatctttttttagatgtcaaacatcacattgataaaattatactgaaatttggataacatattttgtttgctgtattatataaccacaaagatttaaaaacttgatcaaatctaagtttaagataatgtaatacggattaagtatgcactttagagatagtataggttttgaatattgctctcaccctttactagctgtgattttgagcaactactcacacataatctgtacat

SEQ ID NO: 819635 - DNA, 604 bp, Homo sapiens
tgcagctgttactaccatccatctctagaactttgtcatcaccccaaatgcaaactttgtacctgttgaacagtaattcccgttcctcttgctcctggcaaccactgttctgttttctgtctctacaagtttgactactctattaggtgccttatgtacgtagaatcatataatttttgtccttttctgtctgccttacttcattcagcatagtatcttcaaggctcattcatgttgtagcatgtatcagaatttctttcctttttaaggctacatgatattcccctgtatgtattgaaagtagtgacaaaaaccacaattacttttgcaccaacctaatacataccacagcttatttatccattcatcctttgatggacatttgggtggtttctacgttttggccactgtgaataatgctgctgtgaatatgagtgtgcagatatctgtccaggtcccttctttccatctccagaaatggaactgctggatcacataataattctatgtttaatttttttttaatcwctgtcatttaggtgtatttttttggcagagtaaaacatttaaatattttacatagacataaatatgagcatgataa

SEQ ID NO: 819636 - DNA, 539 bp, Homo sapiens
aagacagcaccaagccatgagggatccactcccaygatccaaacaccttctaccaggccccacctccagctttggggattacacttcagcatgaaatttggctggggacgaatatccaaacaatatcacctgttcttcagaccattcttacccaattttggagataaaaaaaattatatatttgtgtccattttgctaaggcttcatccttttttgttccaggaaaactattcatgtaccaccatcctcaccatcatcatcacagtctttgctgacactagatgtacttactagatgccaggcactaatttcaggttttcaggcattaactcattgaatcctcataacaacattgtgagataggcacaatcagtaaagcttttttatgggtgagaaaaattgaggcataggatgaattaacttgccatagggtcaccccattggtaaatcagagagccaggacttgaatgagatggtttcatttacgggtctcattcacaggttaagcgactcttcaatgatttattaagtgtcactta

SEQ ID NO: 819637 - DNA, 533 bp, Homo sapiens
ttattcaaataagtacataatctcacagctgaatactttccatgaatattctgacacatttatttaaatttttgaaatyttactttatgcatgttataatggaaaatagaggatgaatctctttataattttatctcatttatgttaaatacaaagatattctagatcagaactaacaagatgaaagtaatttattaaaagtatgaaatttcattaaagtagtatttaattttttttatgttggcatgattggtctattaccaacaaccttcaaggagctaactcttttataatctttattcctggtgcttgattttcctctttatatcaatccactatgtgttccacaattctaatctcagatttaaaaaataaacggtcaaagggagtggcaaaatatttgaattgctttcagaggtttgatggtaggacccagaagacatagagattgccagaattaacataacagaggattcaatgtgctcctgtgagaagcattgattggggtgggaatacaagtctgtttcaagctt

SEQ ID NO: 819638 - DNA, 494 bp, Homo sapiens; identical to SEQ ID NO: 814234

SEQ ID NO: 819639 - DNA, 635 bp, Homo sapiens
gaagccatgatgcacagtaacatgctgtgtatttctcccagtgctcctcactcaccctgcctcctggggattctagaaaacstacaagtttagaacctaaagcagctcctgggagaatgatagtaaatgcctgtcttaactcctaaaagttgaacatgagatcctgagccatataacatgataagttcttatccttcatctcttgcacattttaaaagaggccttctctgtgtccctcactcaatgatatggtttggctgtgtcccaacccaaatctgttcttgaattgtagtttcccataatctccacatgccatgggagggacccagtgggaggtaattgaatcatcagggcagtcccccatgcagttctcttgatagtgagttaggtttcatgagatctgatagttttataaggggtttttctcactttactcggcacttctccttcctgccaccatgtgaagaaggaggtgtttgcttccccttctgccatgatggtaagtttcctgaggcctccctagccatgcagaactgtgagtcaattaaacctctttcccttctaaattacccagtctcagatatgtccctatagcagcatgagtatgaaataatacagtaaattcataccacagt

SEQ ID NO: 819640 - DNA, 635 bp, Homo sapiens
gaagccatgatgcacagtaacatgctgtgtatttctcccagtgctcctcactcaccctgcctcctggggattctagaaaacctacaagtttagaacctamagcagctcctgggagaatgatagtaaatgcctgtcttaactcctaaaagttgaacatgagatcctgagccatataacatgataagttcttatccttcatctcttgcacattttaaaagaggccttctctgtgtccctcactcaatgatatggtttggctgtgtcccaacccaaatctgttcttgaattgtagtttcccataatctccacatgccatgggagggacccagtgggaggtaattgaatcatcagggcagtcccccatgcagttctcttgatagtgagttaggtttcatgagatctgatagttttataaggggtttttctcactttactcggcacttctccttcctgccaccatgtgaagaaggaggtgtttgcttccccttctgccatgatggtaagtttcctgaggcctccctagccatgcagaactgtgagtcaattaaacctctttcccttctaaattacccagtctcagatatgtccctatagcagcatgagtatgaaataatacagtaaattcataccacagt

SEQ ID NO: 819641 - DNA, 499 bp, Homo sapiens
aacttggagatgccagcaaccgcagagccccaagggatgttacagctttttattcatttaacatagcaccacatcagtgcatgtagatacatctcattttttttggtcattttgttctattccttggtatggatgttacatgaattattgatccattttcctattgatggtatttgcattgtctcccattttttgcacttataacagtgttacaatatacacatacagacacacacacacacacacacactcacacatgtccctttcccagtagacccagtacttttctaaaataaattctgtaagtggtacttctgggttgtagaatgtctttattttaaatttgaaaaattctgccaaacggtctttcaaaaatgtcatacgaatttacacatkacagaaattacacattaacagaatttgaaggggtttacctccttatccgcttaaaaacactatatgtcatcaaaattttataaattttgccaatttaataaaa

SEQ ID NO: 819642 - DNA, 499 bp, Homo sapiens
aacttggagatgccagcaaccgcagagccccaagggatgttacagctttttattcatttaacatagcaccacatcagtgcatgtagatacatctcattttttttggtcattttgttctattccttggtatggatgttacatgaattattgatccattttcctattgatggtatttgcattgtctcccattttttgcacttataacagtgttacaatatacacatacagacacacacacacacacacacactcacacatgtccctttcccagtagacccagtacttttctaaaataaattctgtaagtggtacttctgggttgtagaatgtctttattttaaatttgaaaaattctgccaaacggtctttcaaaaatgtcatacgaatttacacatgacagaaattacacattaacagaatttgaaggggtttacctccttatccgcttaaaaacaytatatgtcatcaaaattttataaattttgccaatttaataaaa

SEQ ID NO: 819643 - DNA, 588 bp, Homo sapiens
gggaaattaagtccagtaaagggaccttaaggcttagaattctaagccttcctcaccacaacctgtaaggcttttaggagacctgtgctgagaaaraaattcccacctataaataagatcaagtcaatgaaatacttatacaatactatatgttactgccggtgaatagacacaggtgaaaatagatctttgcattcaactagttatgtaatctagaattttgtacagctaaactgttttgatatttagttcagtttacacagaaataaatttagactaggggctagtttacagcaaatcttgggctgtggcagtcctgacctggcccagttcaaggaagtttccactgcaactcctggatcttcgtaatttgactgtaagtaaaattatcttgaaaatcaatctgtgagtacatgagttctttaaaacaatttttatggactggcatatactgtagagtggtcctcacggagacagctgagcaaaggcttaaagagggtaaaggagtcagctttagaaaagggaagagcatcctgggcagagcaaatagctagtttaaaggtgtaagcaagaggacttttatctctc

SEQ ID NO: 819644 - DNA, 588 bp, Homo sapiens
gggaaattaagtccagtaaagggaccttaaggcttagaattctaagccttcctcaccacaacctgtaaggcttttaggagacctgtgctgagaaagaaattcccacctataaataaratcaagtcaatgaaatacttatacaatactatatgttactgccggtgaatagacacaggtgaaaatagatctttgcattcaactagttatgtaatctagaattttgtacagctaaactgttttgatatttagttcagtttacacagaaataaatttagactaggggctagtttacagcaaatcttgggctgtggcagtcctgacctggcccagttcaaggaagtttccactgcaactcctggatcttcgtaatttgactgtaagtaaaattatcttgaaaatcaatctgtgagtacatgagttctttaaaacaatttttatggactggcatatactgtagagtggtcctcacggagacagctgagcaaaggcttaaagagggtaaaggagtcagctttagaaaagggaagagcatcctgggcagagcaaatagctagtttaaaggtgtaagcaagaggacttttatctctc

SEQ ID NO: 819645 - DNA, 598 bp, Homo sapiens
aatttcctcaacatcaaagtggggtgatcataactgccctccctacctccacaggcctgttgtgagactcaaggctgatgatgctgttgagaagcaggagcaccctgtatactgaaattttataaatcagtaaattgtgattaatataaatgtgccatcctcttacctcccacttccaatcaaacaatggaactcatttagaattcagaagagactgaatagcacctcattcagaaaagcaaagcattaggtggacaatcggcttgcagaaaactcagtgtgatcaaggaatcagaaaatcatcagcagatgccacaggctacactaataggagtatgtggttggctttgttctattcaatagagtttaaaaattattttttactatttctgacctatttgcaatatctgagaccctaccctggtgctgtttgtttgcggcatttcctctgcataatctgttcyccaactgctacctcctggtagctgtgtgacattgggcaagtgacttctctgtgtctgtttccacatctgcaaaatttggataataataatacttattcctcacagggctgttgtgaggatccagtgaggtgtta

SEQ ID NO: 819646 - DNA, 491 bp, Homo sapiens
agatatgacctcacgttccaggcatcggtgaccaagtttcactttctctgccacactgggagattcagggaccctgagcttcctctgtggaacctctgagagctgyacctggttgctggctggaggtgaggaaaggccatcaggctctctggcttcctggcacactcccaggagatcagttttctttttggtccaagtggagctaaaaaaaaatcccccttggttttgcatcagcaggatctgctttcagcaaacccttcaacaagaacgggcaggaagagtaaatatttattctacaaatgaataaatctggttccatcttcaaaagaaaaccttagtataaattatcataatttctccattctaagatgccactgatttgaagatattttcatattgaacaacagctttttgaaaaaaaagagaacaaaacgaataaattaagatgtcaattgtaaggtatgttctgagttttttttaaaaaaaatctt

SEQ ID NO: 819647 - DNA, 491 bp, Homo sapiens
agatatgacctcacgttccaggcatcggtgaccaagtttcactttctctgccacactgggagattcagggaccctgagcttcctctgtggaacctctgagagctgtacctggttgctggctggaggtgaggaaaggccatcaggctctctggcttcctggcacactcccaggagatcagttttctttttggtccaagtggagctaaaaaaaaatcccccttggttttgcatcagcaggatctgctttcagcaaacccttcaacaagaacgggcaggaagagtaaatatttattctacaaatgaataaatctggttccatcttcaaaagaaaaccttagtataaattatcataatttctccattctaagatgccactgatttgaagatattttcatattgaacaacagctttttgaaaaaaaagagaacaaaaygaataaattaagatgtcaattgtaaggtatgttctgagttttttttaaaaaaaatctt

SEQ ID NO: 819648 - DNA, 599 bp, Homo sapiens
gaagtatgaagccactgatgttgctcctcagaggccatagccttggcatgtgtacagtcactctggggtgacagcgtattagcagggatttctgactcttttcctaatctcctgttaagcagtcggcctctgttgctattacacccagctctactaattgtcaggtgtttgctctattgattttgacaatgcatcaattactccacagcctgatccaattaaattcagcccctttacaggatagttctggaggcccatctttgagatttgttctaaccctaggagggctctttttattttaaaaaatttctttttaaatatatatatatatttttttctttttttttatttttggcgacaggttctcactctgtcgcccaggctggagtgcagtggcaccatcagggctcactgcaacctctgcctcttgggttcaagcgattcttgtgcctcagcctcccgagtagctgggattacaggtgcccgccaccatgcctggctaattttygtatttttagtaaagacaggcttttgccatgttggctaggcttgtcttgaactcctggcctcaagtgatccacctgcctcagcctcccaaa

SEQ ID NO: 819649 - DNA, 450 bp, Homo sapiens
ttttgcataaagaacaggtggagagaaaatgaggccaagggctagccccggctctgccaaagacggtgcagcccagggaccctgagtgggatggagggcctgggtaaagccttaccccrgttctgggggcctcaagggagggcccaggttccgggggccatgggtgggaaggggaaggacccgggtaaggccttaccccggttccggcgcagccgtccccagtggtaataacactcctcgtcccggatgcagcggcctgaagaggacacgaggtactcggtgccacagcggcagcaggtcctgcaggaagctgtgggtggggacccaggtggaagctgaggctcacgctggggcccgcatgcccggccttgcccacatcccgcacctgcccacctaggccgtcgcaggccagcgactcacagtccttgggcctcttctcctcagctgtga

SEQ ID NO: 819650 - DNA, 533 bp, Homo sapiens
gggactacaggtacatgccatcacgcctggctaatttttgtatttttagtacagacggggtttcactgtgttagccaggatggtctccatctcctgaccttgtgatcygcccgcctcggcctctcaaagtgctgggattacaggcatgagccactgtgcccggcctattcatttatttatttagagacagagtctcgctctgttgtccatgttggccaagctggtcttgaactcctgacctcaggtgatccacctgcttcagcctccctcatagctgggattacaggcgtgagccaccgtgcccggccctatcgctatttaaaaggcagagaaaatcttagaggtttttttattgtcaccagcggtgtttcgttgatgcgtaattgcctttggaggcttgaaaaaagttgtgcttaaaggtaatccctcaattatctggaaacttccaccctccagagtgaggcaccccaagtcctggtctggattcgtggacagagtccctgcctgtgaggcctgatggccagtcctctcgc

SEQ ID NO: 819651 - DNA, 487 bp, Homo sapiens
ctgtacgccgtggagaggggcgctgtgtggggctcgctgcctgagccctgggtggaccgtggctgccccatgagttgtcggggacctccgctgccccttggacctcgcccgcggccctgggcaatgggtgtggtgacgtcctggggcccccatgagtcagctcgtcctcgtgcccgggcactggcctctccttcctgtgggcgcacagccccggttcctctgaaagcttcgtgggccgggacccgggatgagctggttaaaccctggccctgtgagcaggaggtgtggcttcggggggcggccccgccctgggctcagacttgatcctgcaccggagggagccattctggaaggccgctgccccgggccctgtccctccccctctcatccccagggtgctggccagagccgggctsacagcgtttcttaaaattaacgatcccggccgggcgtggtggctcacgcctgtaatcccagcactttggga

SEQ ID NO: 819652 - DNA, 603 bp, Homo sapiens
gtggtcgctcttggattcggtgcaggaatcactggggcttcttgggcgccgggaacctttcatggtgaaaatttccagggttctccaagtcagccactgccagtgtttgtctgtctcctgcaaagatttcttcttggctcccgaatcctttagttcctttgagagagtggtgtcagccccaaagctgctcccgaaggcttgggttgtgtagcgacggggctgtggccagcggcaggtggatgaggctctgacaactgagctcttgggggaatcttgtacactgtcagcagggggtggagccaggggatttgtcagcaggaactgatgtgattggctgttcctggtatgacaacgggaggggccctcatggaggattggggcgtaactcaatccatagatgaccgatcaacagaacctgcctaatcccatcaagagccaacctgtttcctgtcccctcccatcctctagstcttgcctaataatgatagacactttctgtcatacccaattcatccatcgctgaaatagtttttcatgtgtgccttttatattttcatgcaataaaaatatgttaattttcacggtggctatcctggggaatgc

SEQ ID NO: 819653 - DNA, 603 bp, Homo sapiens
gtggtcgctcttggattcggtgcaggaatcactggggcttcttgggcgccgggaacctttcatggtgaaaatttccagggttctccaagtcagccactgccagtgtttgtctgtctcctgcaaagatttcttcttggctcccgaatcctttagttcctttgagagagtggtgtcagccccaaagctgctcccgaaggcttgggttgtgtagcgacggggctgtggccagcggcaggtggatgaggctctgacaactgagctcttgggggaatcttgtacactgtcagcagggggtggagccaggggatttgtcagcaggaactgatgtgattggctgttcctggtatgacaacgggaggggccctcatggaggattggggcgtaactcaatccatagatgaccgatcaacagaacctgcctaatcccatcaagagccaacctgtttcctgtcccctcccatcctctaggtcttgcctaataatgatagacactttctgtcatacccaattcatccatcgctgaaatagtttttcatgtgtgccttttataytttcatgcaataaaaatatgttaattttcacggtggctatcctggggaatgc

SEQ ID NO: 819654 - DNA, 641 bp, Homo sapiens
ttttttgctttctccctccctcgatcctaacccccctccwtccccccctcactccctccctccctctttccatccttcctccctcccttccctctttccttccttcctgccttcttcccttccccttcccctcttccttctgtccttccttcctgtgtgtaaaagaaaaattggtgaatagaagaataattgaataactgcctgagtcacttatacatttctcatctcactctggggacacagaagaccgtgttgtactcatctcctcgattttaaaaacagtcattctaaaatcaaggattctagatgtatcacttctaggcgaaatcttgaaagaaaatgtgtaagagtttcatgtgctcttcatctctatgatcacaattgaagaaggcaggaggttgagatgctgcatcgccaagatcgtggtgattccattatcattacccttgtaacttgtgagcatccttactgccagcaatcattattagatatggaatctgatataggagttcatatttactgtatgaatatcttggtgtgggagtgttggctcatgcctgtaatcccagtgctttgggaggcagaggcaggaggctcgcttgaacccaggagttcgagacaagccggaagagcatggcgag

SEQ ID NO: 819655 - DNA, 628 bp, Homo sapiens
tatgcatgttagtgaattaataaatacagcagtaaagaatagagttgtggttgggaatggtgtctcacgcctgtaatcccagcacaatggcrtgccgaggcgggtcaatcacctgtagtcgggaggtggagatcaccctgaccaacatggagaaatcccgactctactaaaaatacaaatcagcctgtcatagaggcacatgcctttaatcccagctactcgggaggctgaggcaggagaatcacttgaacctaggaggcagaggttgcggtgagccgagatcgcgccattgcactccagcctgggcaacaaaagctaaattctatatcaaaaaattaaaaaaaaaaaaaaagaaggctgtttgttgaccatttgagtggccagtcttggtgcttcctggtgggcgaggagagccctgccccattcctacccattccagtagtcatggcataagagtgattctcactttctgctatagcctccttatccattggctgaaatgattgttttttaatgtgtcttataaatgcgtccatagcaaaaaaaattgaattgacttttgtagggactctttcggggattgttacccatcattccataatttgtttgtactcctagaaaagggaag

SEQ ID NO: 819656 - DNA, 525 bp, Homo sapiens
ctgtttgttgaccatttgagtggccagtcttggtgcttcctggtgggcgaggagagccctrccccattcctacccattccagtagtcatggcataagagtgattctcactttctgctatagcctccttatccattggctgaaatgattgttttttaatgtgtcttataaatgcgtccatagcaaaaaaaattgaattgacttttgtagggactctttcggggattgttacccatcattccataatttgtttgtactcctagaaaagggaagtatgccgagcacagtggatatttcgtctcaaataataaataaataaccaaatagaaaagaaagaaaaggaagtaaagggaaatatacaaatatacaaggtgttaggagagagttgctaatcgtgattcccccttaattgtccaaacagaccacctctggggatctattcgtaaaagactcgttagaagtgcagactcatgcatttgagaatcactcagggaaatctgaagatgacctgtggtgggggtgtaaat

SEQ ID NO: 819657 - DNA, 540 bp, Homo sapiens
cattgaaagaatgggtcacagttcctctctctagacactgtggaacgacattgaaggcccttccatcttttggcgattgtgaggacaggtgctagaagcctctgycctcagccttgtccacgtgagttctaattcctttagaacaactatctcagggtgggaaagatggttccaatgctaagtgcctattgcattgattatgaatcaatgaaactctttctccctgggggttgtcccagttggattccaagcagcactgtcagagtgttccagcttctccacatgctccgcagcccttgggatggtgagtgattgtcacggtggcttctgggagagcttcttggttgtggttgaaggtgtatttgacgtgcatttccccaggggagggacagtgaacgctttttgaagtggttctttacatcccctttgaggaaatgtctgctcaagtctctggctgggttttgaacagaatcatttgtttgtcccattggagttttgacaactctgtgtattctgagtatgagcagtccttgcacgtat

SEQ ID NO: 819658 - DNA, 510 bp, Homo sapiens
cttgggatggtgagtgattgtcacggtggcttctgggagagcttcttggttgtkgttgaaggtgtatttgacgtgcatttccccaggggagggacagtgaacgctttttgaagtggttctttacatcccctttgaggaaatgtctgctcaagtctctggctgggttttgaacagaatcatttgtttgtcccattggagttttgacaactctgtgtattctgagtatgagcagtccttgcacgtatatgagatttgcaaatattttgtgccccaatctcaaggttgctctttgatacaaatcaagagcatctgaggcagagcaaaggttcaggtgagaggacggagcatttctccacctctccagcatgcgcagcatctctctcctccgagatgccgagacatgtgtgcagggagacaccatgaaaaagcaggtgtgcttcattctgaatagagcgtctctgattcccgtctggtgcctgagggtgcatggcccatgagccttagaagaga

SEQ ID NO: 819659 - DNA, 589 bp, Homo sapiens
agcaatgttaatgttcccaatcactttgagtccattctttccttaactatgtcttaatgcatagttgtgttggatggcctagtttgtaatgttagaatatgcatgttagygaattaataaatacagcagtaaagaatagagttgtggttgggaatggtgtctcacgcctgtaatcccagcacaatggcatgccgaggcgggtcaatcacctgtagtcgggaggtggagatcaccctgaccaacatggagaaatcccgactctactaaaaatacaaatcagcctgtcatagaggcacatgcctttaatcccagctactcgggaggctgaggcaggagaatcacttgaacctaggaggcagaggttgcggtgagccgagatcgcgccattgcactccagcctgggcaacaaaagctaaattctatatcaaaaaattaaaaaaaaaaaaaaaagaaggctgtttgttgaccatttgagtggccagtcttggtgcttcctggtgggcgaggagagccctaccccattcctacccattccagtagtcatggcataagagtgattctcactttctgctatagcctccttatccat

SEQ ID NO: 819660 - DNA, 506 bp, Homo sapiens
cttgggatggtgagtgattgtcacggtggcttctgggagagcttcttggttgtkgttgaaggtgtatttgacgtgcatttccccaggggagggacagtgaacgctttttgaagtggttctttacatcccctttgaggaaatgtctgctcaagtctctggctgggttttgaacagaatcatttgtttgtcccattggagttttgacaactctgtgtattctgagtatgagcagtccttgcacgtatatgagatttgcaaatattttgtgccccaatctcaaggttgctctttgatacaaatcaagagcatctgaggcagagcaaaggttcaggtgagaggacggagcatttctccacctctccagcatgcgcagcatctctctcctccgagatgccgagacatgtgtgcagggagacaccatgaaaaagcaggtgtgcttcattctgaatagagcgtctctgattcccgtctggtgcctgagggtccatggcccatgagccttagaa

SEQ ID NO: 819661 - DNA, 550 bp, Homo sapiens
cctcacccatccatctacacatccttcctttcatccacccattcatctactcatccacccatccatcctttcattcatttattcatttagccactcatttatgtgctaacttgtttattcattcattctcttactcattaatttacttataattcacttgtcccctcacccacccactcaccatctttagaccttccttttgtgcccagttagtgacaagtgagaagacacttttctggtcttgggtttcctgtcctggggtaggaatgggtgtttgggaagaaacatactgaagaccagactgaaggaggaggtaacgtttagggtgtctgaatcccccttcttggtgtcccctggggggcttgcttaccacccagtttgaggggcagacatattggcttcttctgtgtcttggatcagggccttgagctgctggaacaggagcagctgtgtgagggcatcagtgtcctctmtctccctggctgccccctgcccctgagaaccaggtatacacactcccacccaggtggaaggggccattctgcaggga

SEQ ID NO: 819662 - DNA, 531 bp, Homo sapiens
aatgggtcacagttcctctctctagacactgtggaacgacattgaaggcccttccatcttttggcgattgtgaggacaggtgctagaagcctctgycctcagccttgtccacgtgagttctaattcctttagaacaactatctcagggtgggaaagatggttccaatgctaagtgcctattgcattgattatgaatcaatgaaactctttctccctgggggttgtcccagttggattccaagcagcactgtcagagtgttccagcttctccacatgctccgcagcccttgggatggtgagtgattgtcacggtggcttctgggagagcttcttggttgttgttgaaggtgtatttgacgtgcatttccccaggggagggacagtgaacgctttttgaagtggttctttacatcccctttgaggaaatgtctgctcaagtctctggctgggttttgaacagaatcatttgtttgtcccattggagttttgacaactctgtgtattctgagtatgagcagtccttgcacgtat

SEQ ID NO: 819663 - DNA, 595 bp, Homo sapiens
tcaggcagacctgtctcacccacgcccacctaggtggtgtgaccttacctggggcagctccaggggcagctgtgcagggtggtggggagctggctgtaccggagctggttctgcacctgtggagagagcagagtgtgcaggtgaaagcccttgtcatgcaggatgcccttgagggttcaaggtgccaccgtgagaaagaccaaatacagaagaagccaggtacaggacacccagccacggagctgcaggaggaagctcccgacactctggacagcacagctgctcgcctcatgacgtgacgggacactggcttggtagcaggggactcaggatgaaaaagagaagatgcctcacctggatgaggacccagctcctccactttctggcgttttggggcatttgatggcgtgccgctggagctgtaggacagagagacacagtcagatttcgggcagttccctaacgtccaattccctgaatccccacaaattcactccacttccctgcytttcattcaaggccacagactcgtcatccacttcctgtgagacctgctcccaatctgtcctaactcccagctgttcttgttctcacc

SEQ ID NO: 819664 - DNA, 599 bp, Homo sapiens
gtcctgagaggttggcagtcatcctttcctctgctcctgctgaatsgccctctactaaagctcagggtgttcctggggtctcataacagctctgtcttgtctctgcctcaggcctagtgatgtgctttgctccctgctgttggtggactgctcctcttgtgggtatatcacaggctccctgtaatgctattggttctgtattttaaataataatttctctcacttaactacacttttgagtgttacactcttccttcctgatctatgtccaaaacagaagtctcaataacatgcaaagatgcagtgtgttaagcaaaagtggaagataacgagaccatttcaggtagattcatatgctgcagtcctacaatggtgtatggttaacataggaaaatgaggccattggggtgacttagctcaggttgtgctaatgaaatgccatgggctgagcttctcaaacagcgacattattttttattttttaaacatttctccagcatgagatatctaaaatctagctgccaggcaatatgattcctggtaaagaccaagttcctggctgggatatagacaccttcttgctataccctcatatggaa

SEQ ID NO: 819665 - DNA, 437 bp, Homo sapiens
aagaaattcttttgggctgggtgtggtggctcacgcctgtaatcccagcactttgggaggccgaggctggcagaccacctgaggtcaggagatcgagaccaccctggccaacatggaggaaccccgtctctataaaaaatacaaaaattaaccaggcatggtgacctgtgcctgtaatcccagctactcaggagggtgaggcaggagaatagcttgaacctggaaggcagaggttgcagtaagcccagactgtgccacttgcactccagcctggccgacagagtgagactccatctcaaaaaaaaaagaaaaaaaaaaaaagaaattcttttgagcgctctcctattgatacaccacacagtcacrtatggtttactatcatatttatgatgacttttttttataccttctttgacaggagctatggtcctgataat

SEQ ID NO: 819666 - DNA, 421 bp, Homo sapiens
ttgtatcttttatttttgtatttttaatagagacaggatttcaccatcttggccaggctggtcttgaactcctgacctcgtgatccacccacctcaccctcccagactgctaggataacaagcatgagccactgctcccagcccagcttaaattagctttctaaggtttttaaataagtatcaaagatcctctggactgtctaactgaactcaagacataccacgctcaaaatttctaccacagatagcatgtcctacaaaaggtccgggcacatctggtctgacatgtgactaggtatatggccaggtattggtatgaatcttgagcctgaggacgacccccracccaattcagcaagaagtgctctactgatgtcaagtagaacaaagtcaacaaaaatgaagtttgggatttaaattt

SEQ ID NO: 819667 - DNA, 530 bp, Homo sapiens
gcctcagcctcccaaagtgctgggattatgggattacaggtgtgagtcaccatgcccrgccctttccttcccttctttgttgttgttttgttgttgttgttgttggtttgattgtttttctgagatagagtctcactttatcacccagaatggagtgcagtggcttgatctcagttcactgcaacctctgcctcctgggttcaagcaattcccccacctaagcctcccgagtagctgggattacaggcgcgtaccacctcgcacagctaatttttgtatttttagtaaagacgggtttcaccatgttgcccaggctggtctcgaattcctaagctcaaagtgatctgcccgccttggcctcccaaagtgctgggattacaagtgtgagccaccatgcccagccttttcatttcacagagccactagtactccactatacagacacaccataatttattgagctagctcctattgatggccacttgagttgcttcttatagtttgctattacaggtgggatagattcccag

SEQ ID NO: 819668 - DNA, 615 bp, Homo sapiens
tgccctaatgaagaaatgaatctaggttgtttagaagttatatttggtttagtccacagccatgttcattatcctaaggagcatgccagttcttccccttaaaaaaaacttttagggatcaatttatctgtaacagttactcttaaaattctgaaatttatcaggttgccaacttctcaaatatggatgaggatgacattgagttggaacctgaaagaaattcaaagaattgggaggaaattattccagaagatcaaagaagacgattagaagaagaagaaagacaaaaggaacttgaagaaatttatatgctcccaagaatgagaaattgtgcaaaacaggtgattttgcaattttaaagatatttctataaagtaagagtattcaacctgggctgattttgtttgtttctacgaggtatcagtccatagttttcttttcttgtaatggccttgatttgataatgtttgcctcatgaaatgagttgagaagtgtttcttcctcttttattcatcttttcaaagaacctgctcctggtttcattgatttktgtgtgtgtgtgtgtttttaatttcatgagtttccacaatttattatttcttcctttctgctttt

SEQ ID NO: 819669 - DNA, 645 bp, Homo sapiens
attctcttcctacttctaagacggacgtgcrtagaaggaatcgcataatagcaatgtaactgtcctagtaattaataaaaatttttaagtagtagtaaatcttcagttactaattacttcatttattttacacagagatctccctccccataaaagaagaaccttctcctatttccaaaatgagaccagtgacagccagcatcaccacaatgccagtgaatacagtggtgtcccggccaccaccccaagtccaaatggcaccacctgtatctttagaacctatgggcagtttatctgccagcttagagaaccaactagaagctttcttggatggaactttaccctcagccaatgaaattcctccactacaaagcagcagtgaagacagagagcccttctctctgatcgaggacctccagaatgatctgctgagtcactcaggtatgctggaccattcacactcacccatggagacttccgagacccagtttgctgcaggtactccctgtctgtctctcgacctgtcagactcaaacttggacaacatggagtggttggacattaccatgcccaactcctcttcaggactcactcctctcagcaccaccgcgccgagcatgttctctgctgactttctagacccac

SEQ ID NO: 819670 - DNA, 340 bp, Homo sapiens
gtgaacctgggaggcagagcttgcagtgagccgagatcgcgccactgcactctagcctgggcaaagagtgagactccrtctaaaaaaaaaaaaaaatttagaaaaaaataaccactattcttactggcataagatggtatgtaattctggttttgatttgcatttctctaacgatccctgatgttgagctttgtttgtttcttggccacataaatttattcttttgagaagtgtccatgttctttgcccactttttaatggggttgttttattcttgtaaatttgcttaagttccttttagactctggatattaacgtttgtcagatgaataggttgcaa

SEQ ID NO: 819671 - DNA, 647 bp, Homo sapiens
ttctggtattttacatatttttgttcttaccctcatttttctgattttctgtagttctctatgtttctrtgtcactcactgagtattattcaatttgttttcaatttttaaaattaatatatacattttttatggtttctctctgaaacttttatatttttgataaaaccatattgccttattttgtatacattgtaatctttgattgaaatttgtacatttaaaaaagctacctgtcacaatccttataatgtagctttgtcctggcatagtctggacaattgtcttgattagagatactgggagtctctcaaacatgttgctagaatgtgtcttgtctacaattttgtgtttattttttaattaaaagagtttgtgtttcttctttttttagtttttttttttgtttgttttttgtttttttgtcagacggggtcttgctctgtctcccagactggagtgcagtggcgcaatctcggctcactgcaccctccgccacctgggttcaagtgattctcctgcctcagcctcccaagtagctgggaatacaggtgtacgctatcacacctggctaacttttcttttgtttttttagtagagatggagtttcaccatgttggccaggctggtctcaaacttgtgacctc

SEQ ID NO: 819672 - DNA, 526 bp, Homo sapiens
agaatctataagaaatagccaggagcagtggctcacscctgtaatcctagcactttgggaggctgaggcaggtggatcacctcaggtcaggagttcgagaccaacctggccaacgtggtgaaaccccatctctactaaaaaaaaaatacaaaaattagccgggcatggtgacgcatgcctgtaatcccagctactcgggaggctgaggcaggagaatcatttgaaccccgggagatggaggttgcagtgagccaagatcgtgccacagcactccagcctaggcgacaagagtgaaactccgtttcaaaaaaaaaaaagaaaaagaaaaaaatttaataagaaaaagggcggcgaatgatatgaatatgcatttcccaaaggaagacgtgagagctgccaataaacatgcaaaaattgctcaacatccctaatcatcagagagatgtaaatcaaagtgacaatgtgataccatttcccagcagttagaatggctgttattaaaatgtcaaaaattggctgggtgcgg

SEQ ID NO: 819673 - DNA, 566 bp, Homo sapiens
tgctgagtgaatagctttctctctcggattctctcctcatttgttaaatgatactaataacaggacttacttctagttttacagtagctattatatgaaataacccaaatgaaaatgcttatccctagtgtttggtatgctggatgtatacaaggcaattttcttccttccttcccactttctctccttcccttcctttcccccctttccctccttccctcctctcttctgcctttataaaatgagctaactgaatatatcttgcttcttttaactttaggactcagggctgttttctttttcaataggtactcttctttgtttattgcttttattaaatcagttggttatcaaatcagtcaatcagtgagtattaaatgggcactaactttatgcttggttttgcagagacacttaagatgcctaggggattggaaggcttcctagttataacacctgcacatstttgtagtccaaagtgcacaagaagtccttaattaaacaggtggctttaggaatagatactaaataaagccaggtaactggctggttgttcatcctcaagg

SEQ ID NO: 819674 - DNA, 729 bp, Homo sapiens
gttctccctttccacggaagccaggctccatcccgccccgcacctgtacaagtgtctgctgctaattaagagagagacagatggaggaaggtatagtttaattttacagccccagtttcttcaaggcaattaggstcattagaaggaaagcaccttttcctttcttcttcttcttttgtaaatgaagaaaagtcaaataggagagggccagtgttgttgaaaggctcacacatctgtttcctggtcagtttgtcggccatctgcccatgaggtaccggggctgattaggttaatgcatttattaatggggcttacaagactgttcaatgaatctgttattcttttgcaagtagctttttaatatactaagacagggactacactgcacaaagccaagagtggctagataagcatttctttcccctcacctggctccaaaccagaggggaacagaaacattatgaaaacaggttttcatgaaaactgcacttccaggtaatggaaatgattcatccatctaacctctaaccacctccttgttgttgaaatagtcttgaaaatatctctttggaggatagtttcatgcaccaggcaccagttcagtgcctacactgtgcttctctaagagaccacctgagtcctagggtgggagaatggttagttaaatgaataggcatgaatgatataatcttgcctataggacattagatggcctgaggatcccttgcc

SEQ ID NO: 819675 - DNA, 625 bp, Homo sapiens
taaagaaatgggcatgactgtkttccaataaaactttacacaaacaggcaccaggtcagacctgccttgcagactactgtttaccaaccctgtagtaaacaatactcaaaggtactctagttgagaataaaattacaattagcgataatggtacagtacagctagaacattattatttctgacacagcgttaaagtaccacgtgtataaaacgcttcaacataaatatgggcagattatattaaaaggttgtattggcaatcaccatccaagtagtgacccctgacctgtgacttctcctgtcatctacaatcatttaaaaagttgttgaaccactggggtgagagtggtaagatgtgaaatcttctctttgtcaccctaatgatgaatgtctacctaatcagttggaacagtgatatcatacatttctttgagttgataatatggcaaaaaaaaaaatcatgaggctgtccatgaaaatcccatctatttaggagatacaggcaatataaatgagaaaaaaaaagctcataataataattactaaacctgaaattaaggtagaggaaggcacttgcccatgaagatgttttaagtctgaatgtccagaaacaagagtcagccaa

SEQ ID NO: 819676 - DNA, 596 bp, Homo sapiens
attaacatctgataactaataagaacagagaaggggtctttggcaaattctaaaaaatctgccaaggagctccctccacccgccagatgagagaaggagcaaatgacttaaaaatcctctgtagagctcaaccctaagaatccacttaaaatacagcacttccttttcactctgaatatgtccttagtgctatatctgcttaagaatctggatctgcttaagaatctggatctgcttaagaatcatgaacgaggatctggaattttctctaagctggcacctcacctctcacactgcaggagccatggagaaaacagctctccatctattacagggcaagttgctacccaacaccatatctcctccaaccctggcccctaaaaacagcccatggaaagcagtatatggtttagcaacacattcaggatcctgggaccactggctataccaactcatagcctsctcaccagccaagagcaaacagaatcacaaccagccccaattccaggttactcgacagctttcctacgctaatcttattcctgaatctgagtcaacaatagtgatctcagtggtttggcaatttacccacttcc

SEQ ID NO: 819677 - DNA, 572 bp, Homo sapiens
actagtaagtgccaaagcctgcacttgaacccaggtgtgcctgaatctaaagcaaagcccatgctttaatgacaatgttgtactgcccccctgtgcatgtagcatacatgtcctgggatccagaaagaccagcatcttaaggagaagaagaaaggaaggaaggagggagggagggaaggagagttggaaagaggagggagggaggaagcaagggtcaaccctctaagaaggttttggaagtagcttctaatcaattatttagaaaggatctgatcctctcagcactttgggatgccgaggcgggtggatcgcgaggtcaggagatcgagaccatcctggctaacacggtgaaaccccgtctctactaaaaatacaaaaaaattagccaggtgcggtggcaggcgcctgtagtcccagctacttgggaggctgaggcaggagaacggcacgaacccggggggcggagcttgcagtgagcggagmttgcgccactgcactccagcctgggcgacagagcaggactccgtatcaaaaaaaaaaaaaaaaaaaaaaaggatctgatcctaataaat

SEQ ID NO: 819678 - DNA, 607 bp, Homo sapiens
ttttttattttgttttgttttgtttgagacaggctctctgtcacccaggctggaatggagtggtgcaatcatagctcgctgcagcctcgaactcctgggttcaagcaatcctcccgcctcagcttcccgagtagctgggactacaggcatggaccaccacacttggctaatttttaaaatttttagtagagaccagttcttgctgtgttgcccagtctggtcttgaatttctgggctcaagtgatcctcccatctcagcctcacaaagtgctgggattacaggcatgagccactgtgcctggcatgcttctgattatttatctgtcattcagagacagaccaggacacagacaagatgtcctaaaataaatcaaagtatcaagcagggagggctatttgagctgtgattaattttattagtgatcagtcatcagttaatatttcgattaatcataacttcagggactcagataatgaaaacatagataaacaaggatgccttggcccacaattatgcttaataccaatgcctggtttcattacacaatatggytttgaatattctcaaataattccctgttgtctttaagagtcccaagtaaaagaa

SEQ ID NO: 819679 - DNA, 511 bp, Homo sapiens
caattatccagtaccaagggggtggaaggaaccagggcacaaataaaagcacaatatatagcaaaaaaaaattaatattaamataaatattcttttgcaaagaaaaattgaagttttatagaggaaatattaaaggaataaaaatcacacaacaatatttggctcagttggattatacagtatagctacaaagagaaaaatatagaaatgcaaataacagaatctctatatacataacatcttctcttcatataccattgtaagaatataattcataagcatgaaatacatatggatttaaatgatatatatagatataaaatctgtgagtgttgtaaatttcaaactcatctttcctttgggatattgaaaataatgaataatatttgttataaattaaagatttagctaagatttttgtaatgctcaagatatctaacatagtttatatgttaatattactattttttttttacatgctagttaacatcaacgtaattctgaataatac

SEQ ID NO: 819680 - DNA, 629 bp, Homo sapiens
accctacagatggtgcctgaccagctttctgctggtaaacctaaggagcatgatgaagctgactgtgacctgggagtgcttaaagatgttggaggctggaaccatctgtcagtgmcagagctgagtgttttcactgagtcaaatagccatagtagctgccaccaagcgagctaaattacccaacagaaaatacatatttgagcacatttttaatgattttcaattagtttgttgtcaagaacccattttctctcctacttactgtctgtttcttagtgggagaaacatggttcccccaaagaaaaaaacactgtgagtcaaaccaccatgtagttagacttcaatcgttatttcacctcctttgtttttcatccattgtgtgcaaacaaaactgtaatctaactgtatgactcttggcgtttctgccagggttggccttctatagacatactattagagatcaagaaggcatataaacagatgtatttccactcatataatgatgtgtatgttaatttattttagtgcatagtattagtatatattagtccattttcaccctgctaaaaagacattatctgagactgattaatttataaacaaaagagatttaattgactcacagttct

SEQ ID NO: 819681 - DNA, 553 bp, Homo sapiens
ataaatgatcagtaaatattgctttcctatttagaaatgggaaagaaataataaaaacaatacagaaacccaggactattgattcaatgtggtaaataaacactgccaaaatcacccggcattacctcaatttggttctaaatgaaggtaaaagaaggaattaaatgccctattcttatgctgaatcgacaattaccattttgctactatttacagcaagtggtcttttctcttttaagatgtcttcttaggatcttttctaactaaattattttacaaatagagctataaacaatactggaaataaaaacaataaactggcttttctattttgtttcattcatgtccaggtgatggtctgtgcagcgggtcagcctatatgtccactcacaaccaatcacaaatttctttgacttaaggtctccccttcaaggaaagtatttactgaattcaaagatgccatgatcagyttggagtatgtaattagcaactatataaaacaacacactactactttctatagcagataaaattaacaaaaatattctatata

SEQ ID NO: 819682 - DNA, 591 bp, Homo sapiens
cctcctacatttgcccatttctgccattaaaaacaaaactaaaaactttccctcaaaagctgaccatctgcttgtcactacgctttcttccaaattgaagaggtggtagcaggatgtttgcaagcccagtatttatctctggcgtaggcacaatcccagcatctactgattacatttcccatttactgttaggtttgcgatttgggatttgaacttcctctgcatttttttttgtttccttccttttatttcttagaatccaggtctaattgtccccttaagggttagactggtttcaatagatttattaagtgatgactttacagtgtgggtgttatgtccatctcaaaatctgtgcaggcaaccatcacatacatgcttgtcccctattgccagctaaaactgaggcagcattttcaagaatgccaagcctttactaagtgcaggcatttgtttgttatttcaagtctttgtrtgctgacaaattctgtacatgcatgcgtgtgtttagagcacagttgggtgacatgtgccaggtatctggtggcaactgtcctctgagcatggttgataaccaaataaaatccagga

SEQ ID NO: 819683 - DNA, 536 bp, Homo sapiens
tgtaatcccagcactttgggaggccgaagcaggcagatcatctgaggtcgcgagtttgagaycagcctgaccaacatggagaaaccctgtctctactaaaaatacaaaaattagctgggtctggtggcgcatgcctataatcccagctaattgggaggctgaggcaggagaatcacttgaacccgggaggcggaggttgcagtgagccaagatcgcgccattgcactccaacctgggcaacaagagcaaaactccgtctcaaaaaaaaaaaaaaaagactccataaatattattattaatgtttgaggcccctcattttttccacttattattgtgtctataattttattttttaagctctaccatctctcttaatctatatttctctttagcttgcaagctacagaaccactactctgaactatttgacatgtcctatccttaggctaaggagtttcactgacactctctggtcattacagcaaacactttgggtttccttcacttcacagcaccaagttgttctgagacaatca

SEQ ID NO: 819684 - DNA, 581 bp, Homo sapiens
tatgttatattggaaatcatgactgtgagactttattgtcctctaggatggatgtatattgsagaagggtggttagcacattcatcagacatctgcttatgctgtggtcaaggccagtcatttttaatttatatcagatttatatcagaccctccaaaaagtatttgaaatatattacagttataacgtacaagtacattacatgtatattacaagtatattacatgtaaaacaggacaatttaaaaattttaaattttaaagaattaaaaattttaaaaatttaaattaaaaaaattaaaaatttatagaaccatatcaacactgacagattctaaaattaagtagtaaatttaactccaagtttctccatgggcaaagtcaaaagataatgctaggttatgtcaatttttcttttcaacaaaactgctaatgtctattaggaagaaaaatgtgtttaaagttttacaggaacgtggagctcatgttcttctgatatgtagactttgataaagaagcatactgtaatgttttatgaactgaaattttaatcaaaagaggtcattttagaataacaagtat

SEQ ID NO: 819685 - DNA, 533 bp, Homo sapiens
ccttctgggttccaagaaggagcatttcaagcggtgaaaggaaggcttctaaaacagttcctaaggcccagtctggaatttacagtattacagaatctagttacagaactagattctgttcgtcaggattggtttaggctcagcccaaattcaaggaaaaaggaaagagaccccatctcttcttaggacagtgacaagatcacattgcaaaagactatgtgaggtgtgagatatttctgctgccatctttggaaacacaatttaccacaccctcaaaatggcttcccgtttcctttgaagtaaaagccaaagactctacagtggtctacaaaaccctgcatgacccattccctatccctgcctcaactaccctctttgcccactctgttccagcattactggcttccttgctggtgttcaaatccaggaggtatgctcctccttccccctctccccygcaggctctctgcacacactctttcccatactggaatgcttctcccttggatagcacttggcccattctgtcactg

SEQ ID NO: 819686 - DNA, 609 bp, Homo sapiens
tattaggctactaaaatctcaattttcattaaatatatgccctttgttgtatttaaaaaccaataatatttaaacccatattcctatgaaaatgtccattatctcagatgttakattcttgggatagtttgagaaaatatgattaaaaaccactcataaaattgtaggaagaaatgtgaaaaacttacaaatgtgtgaaacaattaattaattaatataaagtgtatttatggggcccttgatatactatccaagttccttcaaatacagaaaaagaaacataaaagttgacaacatttgaccaaacttaataaataggtgaaaaaattagaatcatcaaaaaaatgaagacaaaattagagagagaataagtgtaaattgattttgttcacaattggcaaaatagtaaagagaatagaaaatggaaatttaaaaagtgagcaaaagaaaatgaataaaagataaaatggaccatagacaaaattataaagtctataatttgggacagaggtggaggagatcctatggcattgctcagttacccctgggacaatagacattagaataataattagctctatttgttaaaacagacaaatgtcaacacct

SEQ ID NO: 819687 - DNA, 634 bp, Homo sapiens
taagtattttacttatgaacacacactaaataagtgagttgagggaggaatcattttgccaataaatctcacacttttttgatttcattattgtgcrtatcttacacgttggggaattattttaaacatctattagtaactattataatttctgaatatttggctatgatgagaaattaattctctaacttgtttcaactttaaatcatagggatctaaggaaagtgaaaagtgcttcagtgtagatgatttcttcaggagcaccactttgaatcaaacctgaatataccttttaagttcaaaacatattaatactaaattttactttgtacaataaatttaatggaaatttcacttgtttgcacatctaaggtattactacttttatcttcaaataatagcaatatgtttaaactattgaaaaataaaaatatctgagtgtaatggtctcagctgattctggagattagaagctgaataaactttgagcattaaaaaagataaaatgacttttaagaggggcattgaaattaaagaattttacatataaaaccaaaaaaatatagtattaacagtgtattatggattttgcaggaagtattttaaaatttcaaaacgtcaaggggactaaaca

SEQ ID NO: 819688 - DNA, 564 bp, Homo sapiens
ggtggcaaaatggccctcagatgagaaccactgctctagactaacatactgaacattttgtccaacattaatatacataaagtgatgtacctcagggttatgggttggtaaataaragaagacaaaacaacctagaccacctgggatcgctatgggtcaacttcctaaaagccaatgtttgggaaaggattatgggaaaatgtaagcagagagagctgaaatcttaaaaatacattcctagaatcagaacaatggccacctaaattaaggggagttggaataaagcaacacacatctgttaatgcatttaattgtcatagttccgctgtttttttttttttttttagatggagtcttgctctgttgccgaggctggagtgcagtggcgtgatctttgctcactgcgacctctgcctcccgggttcaagcaattctcctacctcagcctcctgagtagctgggattacaggcgcctaccaccacactgagctaatttttgtatttttagtagagacgggtttcaccatgttggtcaggctggtctggacctcctggcctcatgat

SEQ ID NO: 819689 - DNA, 586 bp, Homo sapiens
atagccaacaacattttttttattattcaagtgtacatgaaacattgaccaagatggatcttaccctggatgataaaataaactttagtaaatacagagtgtgtcctctgaccacagtgtaattaaattataaatagataacagaaagctaacaggaaaatctcaaatctcttgaatattaagtaagataattctaaataatttacagatcaaagaggacatctcaaagacaaaaagaatattttcaacatatcaaaatttgtgagaggcagttaaagcagtgtttaactgtacatttatagcattcaatgtttacactggataaaaaagaaaggcttcaagctaatgaacttctatcttaagggagaaaagtgaaacaaactcatatcaagcaggaagaatgaaataaaaaagaataagttaataaaattgaaaataaaaagatagagaaaaaagaaaacataagttgttkctttataataaattaataaatttgatacatctcaggcaaaactgacaaggaaagaataaagacccaaattaccaataaagaaatgagcctgtaatcccagcactttgggaggcc

SEQ ID NO: 819690 - DNA, 491 bp, Homo sapiens
atttaaagactgtttttttagaaactaggattacaacccctgctttttgatctctaccaattgcttgttagatttttcyccattcctatatttttagcctatgtgtgtcattacacatgagatgagtctcttgaagacagcataccaatagatcttgcttctttatccagcttgccactctgtgtcttttaattggagcatttagcccatttgcatttaaggttagcattggaatgtgtggatttgattctgtcatcatgatgttagctggttattttgcagacttgtttatgtggttgctttatagtgtcactggtctttgtacttccgtgtgtttttgtagtggctggtaaccgtctttcctttccatacttagagcttccttcaggagcacttgtaaggcaggtctggtggtagtgaattccctaagcatttgtctgtctgaaaaggatcctatttctccctcacttatgaagcttagtttggccaaa

SEQ ID NO: 819691 - DNA, 547 bp, Homo sapiens
tatgctgagctaaagcagctagtcctaaaatggtaaatattatgtgatttcatttatatgatattctcaaaaagtcaaaatacatcacttgaagggggttgattacaaaggggtaaatgagggaatattttgttgtgatgaaactgttttgtattttaattatgttaatggttatatgaaactattgtgtaaaaattcagacaaattaaaaattatatttttattgtatttattttgaacaatgtaattgttttagtattaaaattgtattgggaatagtaaagttaaaatgtgaaagaaactttgagttagaaggtattcattctagatcagtctctaataagtcatcttcatcaagagaattcatttttaattgctttagttcccaatctataacatggatgttataataactgacccaactttctctacagcaatggttctcaatgttttttgtctcagttttcatytattttcttaaaagttactaaaaatgccaaagaattgttgtttatgggttatgcctatcagtatttacaatattaga

SEQ ID NO: 819692 - DNA, 458 bp, Homo sapiens
cagattttagttgcaaagtatgagattatgtttccctgaaaataaacagtctacaaaagcattgaaatctttggtrtgcaattatgagacattcagttttgaggacttacttgaatacatttgacaagtgaagaaagagctgatctcatctccaatcattcatcttttactttcttaccatttaatattcattttatggaacaatttctaggactatgtactgatctaggtctgggaaagtttgttctgcttaattcaagttaaagtgaatactcttaatgagtttactattcgtatagatttgctcttttcagaataagtctttgctattgtgcctaggttgaggaatatcattactaataattcaatggttcttgtttctctagttgttgtaagaatgatgtgttcattacctaacttcacatccttcctataaaatcagtgagataaatttcttt

SEQ ID NO: 819693 - DNA, 625 bp, Homo sapiens
ttaccttgaaaactggttgtgtgcaatctagagtagttgtttataatgtacagcaaatttgtggttagatcccataaaagcctatttaaatacatgattaatacaagacagtgactctattgatccactgtgagaaaggactcaataattacaggtgtgaacacattgtgttgtgatcaatggtctgaatttctctgggactgaggggattttccaagaatacaaaggttttaatattaaaaccaggatcttcccagtcaacttaggaaaagttgatcaccctgatacattgcttctaatggctgcgctccggctctgaaattcagcttaagatacactaaacaatttctgccatctcacctaggcacatcattgcaatgcaaggcaggaaatacaccacagaaatatcttagggaatgcaccacggtagcaaagataggagattagattttattgtaagtgtaaagagaagccactggagagtatggagagtattargctatgtgtaacaggatctgactcatgttaatagaatccctctgcctgtaggaagaggatggattatattagggcaagagtggaaatgagaagaccatttaaaagaaattgtggaagttcagcaaaa

SEQ ID NO: 819694 - DNA, 611 bp, Homo sapiens
aattaaggtgctgatggattacttggagatcacgagtcacacaccagaggcaaatatygagaaggaaaagtcacacagaactataaaaatggccagagaaacagaaatgttaaggagatcttacttattttaaataacatattttggacaagggactaatctcaaagaggcacacaaagacaaagacacacacacacatacacacacacacacacagagcaaaagaaggaccatcacccaaatgcccatcactacattcactggttaggacaccctatctctgttaaaaaaagaatggaatagtgttgatacagaactactctaaagaacagtaagagcaaaaaatgtttgtataggatgttaacatctctataaaggtagacatgtcacatccatccatcacatgcttctgtcagattaaacatagcattggtgacaaaggttctctgggaagcaactgagtgacagcttaggacacactctcttgtaacgttgaatgctttacaaaacacgtatagacatgcttttcaatttaaaaattaggtttcgctttgcttcaagaagcccagagaggcacactggaaactggacagattttctgcagatggttg

SEQ ID NO: 819695 - DNA, 715 bp, Homo sapiens; identical to SEQ ID NO: 818166

SEQ ID NO: 819696 - DNA, 603 bp, Homo sapiens
agagtcactatatcatttggaagtctgagcttgagctgaggagtttgagaacagcctgggtaacatagggagactccgtctctacaaaaaataaacaaaattrgccaggagtggtggcacatgcctatgatcccagctactcagcaggctgaagtgtgaggattgcttgagtcctggaggtcgaggctgcagtgagcccagatctgccactgcactccagcctgggtgccagagtaagaccctgcctcaaaagaaaaagattattttgcagttctaagtagaacacttcacctccattacccccgggtttacccagattcacacgtaccatgggatggacattgggcttctttttgttcagaacccagcatcaaaaacagcagaaaaaagaatgccagtgatctgcagaaaatgcacaagactgaggaaatttacaggacaagacctgactgggaacttaagaattccagagtgagccgtggcatgctcccaaaatagaagagtggaacactgggagaagagaaaagattttttaaaatctatgaagaaactgtatgaagaggaaaagagaggtaaagttagaaaaacaggaaccatttcaga

SEQ ID NO: 819697 - DNA, 410 bp, Homo sapiens
caaagagtcatcatcaacaagtcattctagtccttccagaactaaaaagtgattataacaatgtggctggaatcgaggttaatatacaaatgtaattrcttttctttataccagcaatgaacaattggaatttgaaattaaaaacacaataacatttacatgagcataaaatgaaatatgtataaatctagcaaaatatgtacaggatctatatgcctacaactaaaaaataatagaaaacaacaaagaatatctaaataaatggagagatagtccatgttcatggattggaagactcgatgttgtcaagatatcagtttttccccatttgctctacagactcaatgcaatcacaataaaatctcagcaagctgtttttagttattgacacactaattctaaagtttata

SEQ ID NO: 819698 - DNA, 586 bp, Homo sapiens
ttcattcattccatctttacacatgaagggttagctgaacatggaattatagtttgaaaataatttctactaaaaatttctcattgctctgttgtcttctagtgctcactgttgctattttgtcggcaagaagatgattctatttttatttttatttttatttttttttttttgagaccaggtctccctctgtcacccaggctggagtgcagtggcacaatcatggctcactgcagcctcaaccttccaggctcaagcaatcctcccacctcagcctctcgagtagctgggactacaggtgtgcaccaccatcctggctgattttttaattaaaaacaatttttttttgagatggagttttgctcttattgtcaggctggagtgcaatggcacgatctcagctcactgcaacctctgcctccgaggttcaagtgattctcctgcttcagccacccaagtagctgggattacaggtgtgcaccaccacacctggctaatttttgtatttttagyagagacaggatttcaccatgttggccacgctggtcttgaactcctgatctcaggtgatctgcctgccatggcc

SEQ ID NO: 819699 - DNA, 556 bp, Homo sapiens
tgctgccagctgaggacagctggttcacctgcttggacctgaaagacgctttctttcctatcagattagcccctgagaggcagaagctgtttgcctttcagtgggaagatccagagtcaggtgtcactactcagtacacttggaccgggcttccccaagggttcaagaactctcccaccatctttggggaggcgttggctcgagacctccagaagtttcccaccagagacctaggctgcatgttgcttcagtaggttgatgaccttctgctgggacaccccacggcagtcaggtgtgccaagggaacagatgccctacactggcacctggagggctgtgggtagaaggtgtccaagaagaaagctcagatctgccgacagcaggtacgttacttgcgatttactatccaacaggggtcggaacggagcccgggatcagaaagaaagcaggtaatttgcaatctagcggagcctaagagtagaaggcaggtkagagaattcttaggagctgtggggttttgtagactgtggatcccaaactttgcagtattagccaa

SEQ ID NO: 819700 - DNA, 636 bp, Homo sapiens
ttcttgccttaatatgtattgtcttttctgagggtgaggagcactaggctgaagttggatttgaatggggaaggtgtttagtgtgtttcccagagcctgtgtggcccaaacctcaagatttacttgagacaacacttcaggcagtaaatgtgacagctcattcttaacttcccctgaggggtcaggaacaaaagtaacactttctatgctttatgatctgtgaagttgaccatgacttggtcttctgagtcaataaacctctccccagtaagaggtcaggcattcagacagtactaaaaaggcaggtgagaagcccagaggccctggaggacaacttagaagatatgataagcagtgttttggggcttgtccatcatgagaagacaggagcccattgtattgaatcaggacagagtcatctgctcccatacctaatatgaagttaatactcctatctgccacttcaagagtcacctgagtctcctccatctctcgatagctaatagtccaatgggagcagaggtaggaagtatcagrccctatcacttttgagtctgctgggctctgatgatggctcccttggaagcacagtgcatttccttcatcagtggctgaccttcttacagaaggcacatt

SEQ ID NO: 819701 - DNA, 619 bp, Homo sapiens
aggatacagagaaaagagaacacttatacattgtttgcgggaaagtaactttctacaatctctatggaaaacagtatggagatttcaaaatagactaaaaatagaacttccatttgattcagcattcccaytacttggtatatacccaaaggaaaataatttgttacataaagaaaatacccatgctcacatgtttatcacagcactattcacaatagccaatacatgaaatcaatttaaatttatcgatcaataatcgaataaagaaaatgtgctatacaagtataacatggaatgctactcagccatgaagaagaataaaatcgtgtcttttgcaacaacatgaataaaaccagaggccattattgtaagtgaaaaaactcagaaacagaaaatctaattctgtattttttcacttgcaagtgggaactcaattatgcatacacttggatatagagactggaaaaatagacactggagactcagaaagatggaaggttggagagggtttaggaatgagaaaataactaattgggacaataaacaacattcagatgattgtcacaccaaaagcccatacttcatccctatgcaacatgcttctgtaagggagctgcat

SEQ ID NO: 819702 - DNA, 566 bp, Homo sapiens
cggcgctggcccggtgagctcggcccctcccgcgtcccccgcgcccacccactgggccagcgagatccgcagccatctcaggcttcccctgtcaccccggccctgagaagcgggtgtgcgccccttagttctccgagcctgccgggagccacctcctcccctgcccctgggggggtgggccatgcccgcagaaccctgggcagaggcgaaggaaccgggaaatgtccctttctccacactgaccttggggtgtgctgggtcctctctactccctcccaccctgcccgcgctgttccctggggcccgcagtttcagcaaagttccctgccgcgccgggaagccgtcctgttgcccactctcacccttcctccttttctagcccattctctctccccacctccgacacgaccctctctcctcccggctgtccccggagcccctctctgcttccccagctcagccccctctctgacggcttctccctcccacccccaagcgaatctccgggttcccacggggtgctccsgatccctggggctaggtcaaccagacaaaattattttaaa

SEQ ID NO: 819703 - DNA, 566 bp, Homo sapiens
cggcgctggcccggtgagctcggcccctcccgcgtcccccgcgcccacccactgggccagcgagatccgcagccatctcaggcttcccctgtcaccccggccctgagaagcgggtgtgcgccccttagttctccgagcctgccgggagccacctcctcccctgcccctgggggggtgggccatgcccgcagaaccctgggcagaggcgaaggaaccgggaaatgtccctttctccacactgaccttggggtgtgctgggtcctctctactccctcccaccctgcccgcgctgttccctggggcccgcagtttcagcaaagttccctgccgcgccgggaagccgtcctgttgcccactctcacccttcctccttttctagcccattctctctccccacctccgacacgaccctctctcctcccggctgtccccggagcccctctctgcttccccagctcagccccctctctgacggcttctccctcccacccccaagcgaatctccgggttcccacggggtgctccggatcccyggggctaggtcaaccagacaaaattattttaaa

SEQ ID NO: 819704 - DNA, 656 bp, Homo sapiens
tgtgcaaagcgggaaatatttactttatagctgcatttattttctataattacaaaacatgtgagtcgagagaacgacaratgcattcagaggaattacaagagtgggtcataatttttttcagtaaaaagtatataggatgtcagtaaataggaaatattccattttagtatcaattatgggtagaagaaatcttttactaaagctcacctctaaacatctggtgctgttgggtgctgctttattctttcttcctcttttcttggcttactacaaagcccacaatcttttatccaaaacccttggaattagatgtgcttgggaattcattattcattagattttagaaaggttcatacacaatgtatcatgtaacatccccagtgggggctggggcagcaatctgtattaaacacaataattttgcagcaagtcacatgacacatgattatttctactaagagattactagattataaacagcctcacatcagtctgttgggttagactgtgctgccaaattatcaaataattttgtattttcagagtgttaggacttcagaattacagataggggatcgtagatctatagtattcctatttgaatggctaaatggatttttcctaaggtcctagcatgtattatgaccaggaaa

SEQ ID NO: 819705 - DNA, 597 bp, Homo sapiens
tagtgccattgtgatattacaaaatacatatgtggtcttcaattctccccctccatttcctgacctactactcctacaatccttaggatctccatggaggtcttcttgtatgctcatgattgacttgatggcygccagcccagaggtagcttcaggatgggtcaccagaaagaccaaagcagtagtagaggattgggacttgcagccccattcctgaccttcagggaagggagagggatcaaaagataagttgctcacccatcgccagttggtaaaccaatcatgcctatgtaatgaagcctccagtaaaaactccaaagcacagggtttggagaacttctagagagctgaacacaaggagatccctggagggaggtgcacccagggaggccatggaagctctgtgccccttcctacgtgccttgccctatatagcttcccaaccataacctttgtaataacctggcaaatgaagtaagtatgtccgagttctctgagcaactccagcaaattaatcgaacccaaggtgggatgaggggaacggtctcagaaactgagccctcaacctgtggcatctgaggctacctccaggtagac

SEQ ID NO: 819706 - DNA, 562 bp, Homo sapiens
tcatcccagagctccacgatgccgtcctttccacctgttacaaagccctgtgaaggcacacatgagaggtattatatacacatcaaaatgaccaattacccasttggccccaggaggattccccgcaggtaaggaagctttgtggatgctaccttcctaaatatatgagatggaaaactctggtgataacaatgttcgaataatattttttgggagcatttctcccatacttccctaagcaagattaagcacgttctcagcatgtgtccactgcactctcctcagaacaatggttggcagctggcccactgatcaaggatggctctgcttgtgcccagtctcccaaccagaatgtggttcctacagaatggaaccagcctcaaaacctagcagagtttctggtatctcacatactctgaccaaatggattgaagttaacatcacagtttaaaattattgttaaacatttaaaaataaaagtcatgtccagaagaaaacatcattatttattaagagtagcttaggtactttatataatgaaacgatcctatttcattcaata

SEQ ID NO: 819707 - DNA, 580 bp, Homo sapiens
tcattaggtatttatgtaaagatgtctaaaagtgacagagaacatcatgaacaaaaatattctaagaatatttctcatttattcattaactcagtgtttactgaatccctacatgtggtaagtgcagcgctcactgttgggatatgaagatgaaaagagggttcctgtattcaaggaactcagagtctggctggagagagcaatcaatatgcatctcagtccaagacatgcgtctaactgaggctcagcacaagttctgtgtcagccaagagaaagagtgactaagtgcctgaaggagcaagcaaagtcttcatgaatgctgaccaaaaacgataaaaatagtactgactgtaaatgtaaaatataagcatgttatatatgctctgcttatttataacagctattttggggtgagaaaaaagaattgttttgtaggaaaaggtagtatacrggacaagccattagatttgtcccttacacattcacatttccccacactccctgtcactgagaaacccagctttattcaagacagctacacacaggctggctctccagacatactgggtggcattacctt

SEQ ID NO: 819708 - DNA, 595 bp, Homo sapiens
attcttccctaatactgtccttatttctaagctcctacattcaattaaaatatatccttaatacttttctccayactacttccattgtttcccagcatgggtatatttcaattcccccttactggtgatggcagagtaatagagtcaaagtttacaaagacattaattctaaatatttttttctcattttcagtttggttatttctctcttcagttgtcttgttagcagactcactctatgggctctataggttccctctggcaagctgccaggttgtaagctgtcctaaaggagaggtccatgggacaaggaactgaagaatgctttcatccaacagccaggaagctactgaggtcctcagtccaagaacctgctagcaactacataaatctgaagcagatccttccccagctcagcctccagaggagaccctaccccgaccaatgctttgattgcagcctaaagcagagaacccacttaggccatgcttggattcctgaccaacaaaaactgagataataaacgtatgttaagtcaagtttgagcagtatgttacacagcaatagataactaacacatttggagttcttaatt

SEQ ID NO: 819709 - DNA, 587 bp, Homo sapiens
ggcacctagctaacacagactccccacctgcttacttccccccactctgtgtgctcacctcctgctccaaaagcgaagcagtgcccttaaagtacaaagcttgcacttcttcccttaagctagctttgaaataaagagttaccttctttacaccagacctcgcttttgttaactggacactgcaagtggcaagcaactgaaccaatgttttggttacagatatatatgtatgtacatatatgtatctatacatggaaatgattagaataactcctggaatatacctgcatgatataaatatgtaatttttttacatatgcgccttatgtaagtagaatcatattctaaatactgttttataatttgctttggtagtgtgatagtatatgtcacagagtttctgtattagtttacataaatgtacattgctcttttaaagtttttaatataatttgatattatggatgtgtaatgtatacttagtttttgcataatttaatttttttacttgtttttatttttacaaggttgcaggccatatatttaactgtgytatgtgctactgtataacaaaagcagccatagaa

SEQ ID NO: 819710 - DNA, 614 bp, Homo sapiens
ataatgaattagtattttaaattaaaaatagcaatatgaactaattatttagaaaaaatgcaaccattggttgtaaaaacagcaataggttttagagaccagaaatgtgggcaaaggcatattttttatattcttaagagccatttggtatttttagttaaaaactgcacatattacttcaatacaaagttttaaaatcaggttattctatagtaaacttcattgtagctaaatctgcatattatgtctgtcattgttttttcagttacagttctaggaattgaatttctgtgtgaaaggcatattcaatattaaacattttcacactattaccaaaatgcttttctgaagatttaaacatctttccatgagctttcttcacagctttcccattcagctactgttcataaagtttttgcagttatggctagatgataaactagaaatattttcattgtatatgaacaagtctaataaagataaagaactacttcatagaaaaataattcatgaatacatacatcagtttacaaaaaagatgagttcatgaakaccataaaatatagcttttttgtctatttgggttattgattttgcatttacttcaatcttaa

SEQ ID NO: 819711 - DNA, 544 bp, Homo sapiens
atagtttcaggaaaaacgttctcagtcctacatgaaatagttttctacacaaatacaaaattgtattaccatgaaacacacatgcaacatttgtggtcagaatggtgaaactgcatcatcaagaaattagtaaattacattaaatttacacttttttttttgagacagggtctcgctttgtcacacagactggactgcaggggcacaatcatggctcactgcagcctcaacctctgtctcatgcgatcctccctcctctcagctgccctagtagttgggactagagatatgtaccaccacacccagcaaattttttgtacaaagagggtttctccaagctgctcaggctgaactcctgggctcaagtgatctgcctgcctcagcttcccaaagtgctgggattacaggcgtgagccactgtgcccagctgtacattttcatcaaagtgattgtcttcataaggggctggcatttgaattrtgtttcaattacccagagcattcctttaacacaaaaggcctctatctccagcaatgtctgttaa

SEQ ID NO: 819712 - DNA, 577 bp, Homo sapiens
tgtaagcagtattttttttttttttttgagacagggttttggtctgtcacccaggctggagtgcagtggcacgatctcagctcacctcaacctccgcctaccgggctcaagtgatcctcccgtctcagtctcccaagtagctaggattacaggtgcacactaccatgcctggctaatttctgtattcagtattctttcttggtggttgtacataggcaagcacagtgacaaataaccctcctttcttgtagagccgtggttctaagtgtggtccctggactagcagcatcagcatcaacgtcacctggaaacttggcagaaatgccaactctcaggccccacctgactttccaaatcagaaactctgggggtggggtccagcaacccgaatttcaacaagacccccaggtgattctgatgcacattcaagttaaggaaccagtgttctagagaggccagataagtacatgaagccyggactggggtttctcaatatcagcactattgacatttggggctcaataatcctttggtgtggggcataacaggatactgagatgcatccctaccctctacc

SEQ ID NO: 819713 - DNA, 617 bp, Homo sapiens
ctcctggctgattttgtatttttagtagagatggggtttctctatgttggtcaggctggtctcgaacacccaacctcaggtgatctgccaacctcggcctcccaaagtgctggcattacaggcgtgagccactgtgcccagccgagaaactgttatgtcttaaaggaaaatgtagagattacttcctggaggagagagtgagcaaccctaagaaatgcttctgacaagtaaaatgaaaacttgactttgaccataggatgtcaccatgcagagttcattggtcatattaacatgagtagtttggttgagtgacggaaatgaaaactccactggagttgatctaaaagagcatgggaggggagaaattgaagacagtgggtatagacgattcttttgagaaagtttacttgaatagagagcaataaattaggtagtaagttgtaggaaagtgtgtcaagagtaggagttttagaatgtgagaaatagtatcaatgttcagcagytggaaatacttcagtagagactagaatcaatattgtagaggagattgaaggaagaattgctactgagaaaaagttcatgaatagaagagaggggatggaagtagtgcacaggtt

SEQ ID NO: 819714 - DNA, 621 bp, Homo sapiens
tcaccaccacattctcagctgatatctggtctgcatgtacagccgcagggacagacagacctgcacctaagacttgctataatacatgcgaataatcaatattttctggtgtgatgatctcgctctgggaaataatgctcatgcactaattgagctaatgagaatatattagctattggtttagtgaaagtgatggcagagtaatctaattcttactggctcctggataatcttcaatttaaaggtaatgatgttaagraatgttcaattgagtacgctcaagtgcacatggtatgtacttcttaggtgggacaaacggctctcataagttataatgattctttagagtggagattctccatctggggttcatggatagaactcaggaattctgtgtaattggattaaaaagagactacggctttattttcatgaatcactaatgaaatttagtattttctttcactatgaatataggcaactaattatagtagtattagcagtactgtgacttagtcattactagaaatcacagatttttttgtatcacattgtatttgtttcctatatcatgagatattgtttatgttcaacaatactgcaagaatatgatattagacc

SEQ ID NO: 819715 - DNA, 533 bp, Homo sapiens
ttgaggtaattaggaactggaaggcaactttctaaaggcatccaacaagagaatggaacattcataggagtgaatggctctcagggatgacagaagagttggctgaaagcaargctagggttcccaagggaattgctgctggtgtgtaaaaatagacacttgtagcttatatctaactgcctatagttgggttacaagttgtcggatgattttaacatccgcaccagactccagtgcattgacaagagttagaaacactgtggctaatgtctaggtcgcattctgaggaagcatttccccaacttgttctttccctcagcccttgctaatttagcacctgagctctctaagttatgcatttcttctgtatttggtttttaaatatgtgccaacactctggattctgaaaagtgcctgaaggagcattgaatattcttttgactactgtattattccttcctgacaatcctgataagattatattgaatgcagggcaaaacaaaagaagttatatttttcttgtacaatctgta

SEQ ID NO: 819716 - DNA, 451 bp, Homo sapiens
gatataacccttaaggtgaggttcaattacaacactgggcatcatgttccaattgtctttttattccagtgcctaccacgtagttgcagtaggtgttcaactcgtgttttataattcagattcttctgctttcttcctcctttcttattgaaatgaaggtggaccataaacctgccctaaataatgaaatataatcaaatgtggaaaaggattcagattccgtcaaaggaaaaaagggcctcatagttcattgtaatttaccacaatacccttctctgaactccataattatttatggcttcactagcttcactggtgctttggttatgctagggttgtaattatttagycttttgtgtacgtgccttggctctcttatcagatggtcaaccactggagggaggtctccaacagagtgtccaactcagttcccagcacattctgtgtggtg

SEQ ID NO: 819717 - DNA, 557 bp, Homo sapiens
gaggcggaggttgcagtgagccgagattgcaacactgcactctagcctgggtgacagagcaagactgcatctcaaaaaaaaargaaaaaaaaaaagaatatacaaagcctatttatgatttttaaaatttgaattcaaggaaagtattgttgcttctcttaaaagttttcgcttaagaacatgttttcatcttcattttccctcattcatcctgaggccttcagccctcccatagcaagagaatataaaagaggtgggacagaaagagtgaacagggcatcccaacaaagatgcgttttccattttcctctgtatcttgcagcctctgttactactgggagagagaggaagctaatcaaaagtggaatgaatttgtactgtttatagggcctcctctttcccacaccctttacatacctcaccttacttaattccatgacaatatagtgaagtctatatttttattccgatattacagacacgtatactaaagggctcagagagtaagtaacctgttcagagtcacagagctatagccgggattggagcccagggct

SEQ ID NO: 819718 - DNA, 557 bp, Homo sapiens
gaggcggaggttgcagtgagccgagattgcaacactgcactctagcctgggtgacagagcaagactgcatctcaaaaaaaaaaraaaaaaaaaaagaatatacaaagcctatttatgatttttaaaatttgaattcaaggaaagtattgttgcttctcttaaaagttttcgcttaagaacatgttttcatcttcattttccctcattcatcctgaggccttcagccctcccatagcaagagaatataaaagaggtgggacagaaagagtgaacagggcatcccaacaaagatgcgttttccattttcctctgtatcttgcagcctctgttactactgggagagagaggaagctaatcaaaagtggaatgaatttgtactgtttatagggcctcctctttcccacaccctttacatacctcaccttacttaattccatgacaatatagtgaagtctatatttttattccgatattacagacacgtatactaaagggctcagagagtaagtaacctgttcagagtcacagagctatagccgggattggagcccagggct

SEQ ID NO: 819719 - DNA, 569 bp, Homo sapiens
ttatgatttgttcctgttgggatgactgaacatttatttaaactgtagataggatcktcatgttacttaaggacttgactactctacttttagaattttttaaccaacttgaaaaggtacttagttatactgaaagtgtattttaaaaggtatctgttgtttcttttaggaacatccatttctttcatctctacttttattctttttttttaatcaattttcattttaagttccgagatacatgtgagggatgtgcaggtttgttacgtaggtaaacgtggggcatggtggtttgctgcacagatcaactcatcccctaggtattaagcccagcatcccttagctgttcttcctgatgctctccctcccccgcccccgccgtcagaccccagtgtgtgttgttcccctcccaggtgtccatgtgttctcatcgaggaacatcaacttctaaaatttttctgaatatttatagcccacaaaatgtaaaggacctgaatttccattcatgattttgtaataattatgtttttacataatttcaaaatgctacaattctagatatttaatat

SEQ ID NO: 819720 - DNA, 676 bp, Homo sapiens
ttgttctgtcaaggatcctattgttttcctaactcacttgactataacagtttcataacagtttcttgggtttgttctmagaattttctcccagagtttctgatttaagaattaggtccatgaatctgtatttttaacagactcacctgagagattctaatcatgaggcaaatatgagaaacattctaaaagggtatgttcaattgaacaaatttccatcattttactccccaacaatagggaaactgtaaagagtaaaagatttcaaacagggaaatttatggcccaacaggtaaacttaaaatagggagttaccacctgcttgctttgtctgatgggcatgcctgaatcacaaacctttgaaccaactcatcttccagtataattcacttccaaactatcaagtaaccttctcaaaaaatctctgttcattcattcatccattcattcatttgacatttattgaacatctgctatgtgccaggcactgttcttggcacaaagaatagagtggtgaacacatatccaggccctacccttagggggctgaattttagtcttttttcaaatcatagtcctcatgtattaccaatcaaaatatcatatgttcttttggataataccctgcaaagcataatgtgaaatcacaaaggtacaaaagtcacctctctcagac

SEQ ID NO: 819721 - DNA, 507 bp, Homo sapiens
tataggtgaagtgcatttcttgtgggcaacagatcattgagtcttgttttattatacattcaattattctgtcttttgattggagagtttagtccatttacattcagtgttattgttgataagtaaggacttattcctgccatttagtcatttgatttctggttgttttctgatctcctgtttgtttctttccttcctgtcttcctttttgtgaagctgattttctccagtggtatgtctaatttcttgctttttattttttgtgtatcagttgcaggcttcttgatatgaggttatcatgaggcttacaaataacatcttataatacattactttagactgatggcaatttaacactgattgcaaaaacaaactaacaaacaagctataagaaaactaatagaaactctaastttgttcccctgctttttaactttttgttgtttctgtgtgtatcttattataccgtctgtatcttgacagttaatattattttttcataggttc

SEQ ID NO: 819722 - DNA, 507 bp, Homo sapiens
tataggtgaagtgcatttcttgtgggcaacagatcattgagtcttgttttattatacattcaattattctgtcttttgattggagagtttagtccatttacattcagtgttattgttgataagtaaggacttattcctgccatttagtcatttgatttctggttgttttctgatctcctgtttgtttctttccttcctgtcttcctttttgtgaagctgattttctccagtggtatgtctaatttcttgctttttattttttgtgtatcagttgcaggcttcttgatatgaggttatcatgaggcttacaaataacatcttataatacattactttagactgatggcaatttaacactgattgcaaaaacaaactaacaaacaagctataagaaaactaatagaaactctaactttgttcccctgctttttaactttttgttgtttctgtgtgtatcttattawaccgtctgtatcttgacagttaatattattttttcataggttc

SEQ ID NO: 819723 - DNA, 617 bp, Homo sapiens
catttatagaacagtctacccaacaactatagaatatacattctttccatcaacagatagaacatttcccaagatagwccatgtattaggtaataaaacaagtcttaacaaattttttaataatttaaatcatatcaagtatcttctcagacaatagtggaataatgctagaaatcaataccaaaagaaacttcagaaactacacaaatacatggaagttaaacagaatgcttctgactgaccactgggacaatgaagaaattaagatggaaattaaaacttttgaaatgaatgaaaatgaaaacacaatacaaaataccaaaacctgtgacatacagcaaagacagtgctaagagggaagtttatagcatttaatacctacattaaaaaactagaaagatcacaaataaacaacctaacatcacacctcaagaaactacaaaaacaagaacaaaccataccccaaattagctgagcaaaagcaataacaaagatcagagcagaacaaaatgaatatggaccattaaagatgataaacaaaatgaaaagttgattctttgaaaaaagataaataaaattgataaatcactaactagccaaaaacatgacagaagatc

SEQ ID NO: 819724 - DNA, 592 bp, Homo sapiens
gcccaatggcaacttttatcacgacctgaaaattgtcacactgtggactggctttgtgaaaaattaagaagatagtgaatgaactgggctcctagtctttccctttttcaggacataggccttatctctggaggggaaccttgtccaatgttgccatcaagatctggtatgtccaatgctgctagtggattgaaatcttgaccagattattcattaccttgtttttttctttctacaacttttccttcttctttctttcctcatctctccccaccacactttcctctccgattctacaggtctgcaacaaccagaaacttagtcttcactaattatggctccaggattcttgtgattattttactttccatttaaataggatataattaataccattgaatattctgagcatgtggctactaatgggtttctttttgctcttgagagagaaacaaatattsaaaccagaagctgttggagagatttgatcttttgaaaaagatataaaatttgcttactcatatttataattgtgacaagacctctaggaatccatgcattatgtcttttatgtgaggaaagcagagaatgt

SEQ ID NO: 819725 - DNA, 518 bp, Homo sapiens
tacctgtggtgtgttttttgacttgagaagaatgtaataattgatgcaacgaaaaatgatgtttcttggagaaatgcttatgtcagttggctatttttgctgagaatcctactcattgctttgtactttgatatatatattgattctcaatttaaaagagtatcaggcttattagaataattttaaaccattcatgttaaattggtttgttccttggtcacaatgtgtcccttatttgaaagctacgatttccaatgcattctttctaaggaatggacatcaaattcagaaaaaaaaaaactctgttagtgcaactctaatggatgcataaaaattaacattaatgtagcttaaatatcaagggcacagcaattttcttcactaatggtggtgatgaaatctatgcaagttaagtatgaataagaaacagtagtacatttgtatacatttggtarattttggggagaatttgatgatatatctagccttttttgacagatattggctattttgacatt

SEQ ID NO: 819726 - DNA, 595 bp, Homo sapiens
atggaaagcttatgactcactccccacaaaatagtctaattattttatatctccagtaaactttttattggatatggttttacaaaatttacttagccatcttacttagccctgcaataactgacttttgactrgttccaaaacagaaattgtcttcataggaaaaggatttgctcttgttgtgaatatttcaaagagtgctctagatatgctcatgtaaattccagaacctcaggtctaaaaatattctggaaaaatacccgatcattggcataaatgtgtaatatcctaagatgactgatttgaaagagtgtacactcatttgggtgtataaattctggtttatttgtgcacaaaacatccctctacaggaaggtaattatgatcgtaagctttggagcttgactacctgggcttgaatctcaggtagtcaccatgctaccttgaaaaagttatttaagtcttttctgtctcagaaacttaatatgtaaaattataatgatggttgtaatagtacctatttcattggattgagatgcaagtgtattaatatacatttcctaataaatgatagttcttattaatattatttaaa

SEQ ID NO: 819727 - DNA, 589 bp, Homo sapiens
gacttctgctattaaagcttttgtcagagtggataaattaaactctctgagcttgagtatagattgtytttggctctggctgttgcaatttgaaacgttacccaagtttccagtaaaaaatcagggcctagaagagggagcctgtgggtttcttttttctgtcaagatttatcctctttggtacttgtggttgttcaggtaaacttaatagtgagataataactagatacatccgtttcacttggtattggagacacaagcaaggagatctatgtcatttggtctgtcaatccattaggaataatcaggtaaatttagaaagaaaaatctctaagccctgcctcaaaaccgtggcatcagaattttctggaatggagcaatgtttatgtgaaattaagttttaaaaacttcatgagtgattctgatgcacatcctggataagaatggatgatgctttactaagcttccctggtgatttaaatgtccctgccctccaaggagtcacatgaaactccaactagagttacagtcttaacaattccctcacagctcatcatctgaaagttgagaaaaagagtcaaggagggta

SEQ ID NO: 819728 - DNA, 592 bp, Homo sapiens
cttagtttctttctttttttttttttttttttgaggagtttcgctcttactgcccaggctggagtgcagtggtgcaatctcagctcactgcaaccttcacctcccaggttcaagcaattctcctgagtagctgggattacaggcacctgtcaccatgcccagctaattttttgtatttttagtagatacagggtttcactatgttgtccaggctggtctcaaactcctgacctcaggtgatccgcccaccttggcctcccaaagtactgggattacaggtgttagccactatgcctggccaatttttcttagtttctaatacaagcatttgaagatctaaatttttttttcttttttttttttttttttttttttttgagacagagtctcgtactgtcgcccaggctggagtgccgtagcgcaatctcggctcgctgcaacctccacctcccgggctcaarcaattctcctgcttcagcaggagagctttagctgattagagctttcgctgcatctcatgatagtttatatttttgctaaaattaaattataaatgatttctaatattcaacagttttggaaatcaacattt

SEQ ID NO: 819729 - DNA, 532 bp, Homo sapiens
agctttgaagacagatattggcttctcctctctagctatgaaagtcctaggtggtgtcttcttccaatagaaggctgtttgtctacactgaaaacctgttatttagcgtagtcaccttcatcagtgatcttagctagattttttgctaacttgcttcagcttctacatcagcacttgctacttcaccttgcatttttatgttatggagacggcttctttctttaaacctcattaatcaacctctagcagtttctcacttttctgccacagcttcctcacctccctcagccttcacagaattggacagcattagggccttgctctggattaggctttggcttaagggaatgttgtggctggtttgatcatttatccagaccactcaaactctctccctatcagcaataaggctgtttcgctttcttataattaatgtgttcattgaagtagcacttttaatttccttcaagaactatttctttgcatccacaacttggctagctttcagyctgtctcagctttaggtatgcct

SEQ ID NO: 819730 - DNA, 518 bp, Homo sapiens
ttattagataggtccatgttatattgaactaaacggtgtctcattgtaacttccaggcaaagtctaaatttctattccactgctagctcttcaaagtaagttaaaactcctgtttaaaaaattacaataacaggagccgggcacggtggctcaagcctgtaatcccagcactttgggaggccgaggcgggcggatcacgaggtcaggagaacgagagcatcctggctaacacggtgaaaccccgtctctactgaaaacacaaaaaaattagccgggcgtggtggcgggtgcctgtagtcccagctactggggaggctgaggcaggagaatggcatgaaccccggaggcggagcttgcagtgagccgagatcgcgccactgcactccagccctgggtgatagagcgagactctgcctcaaraaaaaaaaaaaaaaaaaaaaaaatttccaataacagatctgactaaagaaacattaaaaacttccatacaacaagagacagcacaaagatgtttcttt

SEQ ID NO: 819731 - DNA, 642 bp, Homo sapiens
tatattctatttttggcaaatgattctggtagggatttagaatggatatataaagtttccttttgaaatatatttagttttagaaaaacagtcagtagtggtgcagatggcacttgaatataacaaaagtcatgctggcgattctcctcgagttggggcttgggaaacctaaatccaagtctactcggcctcccaacagctctagtctcccttactgccccccttacctacaggcctccactgccttctctttgctccctggatgcctcattctctcctggcctccaccctcccgcccccagtcatatctatactgacctagtcttggagctccccacctttttttttctttttttctttttttctttctttcttttttttttgagatggagtctcactctgttgcccaggctggagtgcaatgttgtagacatggctcactgcagcctcgacctcctggagttcctttcctaaaaaattttatgcttgggtgttaatgggtgctacctgttcctagtcatgataggctcattttaataatgaccttggggagagggtttcttaayatgagagagatagtggtaagagcatatgagttcagtgctcagagagatcacagtctacctcctgctttgaccaaat

SEQ ID NO: 819732 - DNA, 619 bp, Homo sapiens
acctgccataatggcaagtctcttctgggcagcttaggcatcttgccgatgtagtccaactcttgaggtagatattagtagcctcattttgtagataaggaaactaaggcaaagtttgcacaactggaagacagcagacctggccaggggcactgacttcctggtttggaagtcccttctatcacgccctcttgtccctcttttcccccccaccttcctatgctgtaaagaaggaagtaccgccaggaatatggtcacatgatttataggctgagattggcatctggggagttgggttgtctaacaggagaccttagttcttgttgcgactctacacatccctctgggcctcaggtctgtcatctgtcaaatgggagggttgctctactcatctccaaggtccttccaggagtgacaacatgacatccaaggcctatggaaggtgcaaggacaaagcagcttgcttgacccattcctccttgggactatgaggcctgatttgtggctctgcaccccctatccttgccaaggatkatgccatctccagatgggtgagcctataccataggcaggtgcccttcacaccctggagtgccacgtactatgcctgagcccggga

SEQ ID NO: 819733 - DNA, 638 bp, Homo sapiens
ccctcccaactaaatgataagggaaggagcctccatccatatagaaggaagagaagtgccctgctgagttctgggcatttgagtttgtgggatgaccagggtgtggcctgatacctgagctagcagctggttgatctctccagaagtgagctgcctgttgtcagattagaggcatgagatcagggccagccctcacttttgcagggtcttactcaacccctgacaggaatggccttgtatgccagcacctgtagtcctgccctgtgcaaggggcctgcagtttagggaggcttgggagcaacaactcccacacagggctgggctccccacattggtttttttttttttttgttcattggctgtaagttccttttctgagatgaagccttcttcccttttttcaaagagagcttggtaagggaaagctaaagggattggtagccctgttcaacttgcaaccacatggaaccacatgtacatgttcctggaggcctctcccctctgtccctgtgtgtccctggtttctcttctgtctcccatctgggagtctcatggctggctgatctgatcctggrttcaacttttatagatgttgtttctccattggctaaaagaaaggtatgtcgcctggggtgctc

SEQ ID NO: 819734 - DNA, 627 bp, Homo sapiens
cagatgaggctgtcagacacggagaccatcagaccttgaagggaccctagagagcatctgtactggcctcctcatttcagatgtgtgttgctcaatttccaaacagttggggattttcttatcttttttttaaaaaaccatttattaagatataattcacatagcataccatttacccatctaaaatgtacaattcaatggttttgatgtattacattaatttttaaaaactgtggtagaatatgtatagcaaaattttccattttaactattttaagtgtacaattcagtagcattaattatattcccattgttgtacaacaattaccactatttccaaaaacttttcatcatcccaagcagaaactctttgaccattaaacaataataccccacgtccccttctctccaactcctggtaacatctattctactttctgtctctatgaaattttttattctaagaatctcatataagtggaatcatacaattatttgtccttttgtgtctgccttctttcacttaccgtattgtttcaaagttcatccatgttgtaacatgaatcagaacttcattcctttttatggctgagtaatatcccawtctatatatatgccagattttgt

SEQ ID NO: 819735 - DNA, 569 bp, Homo sapiens
tatgaaccatgaagcaggcactaataagacattgaatctgccagcatcttgatcttgaacttcccagcctccagaactgtgagaaataaatttctgttgtttataagctacacagaccayagtctttgttacaacagcctgaatagagtaagacattgctacagaaatcatatggcctacaaagcctaaattacttacaatctagctatttacagaaaaattttgccaatccttgctatagaacatttagggacttattaattcactattttgaataatgctgaaatgaaaaatctttgtactcatttctgtatacacatgtataagaatatctctaggacagaaaccaagaaatggaggtatttaaatttttaatacatattgccaaatcttccttcaaagatggtggttgtagggaacagcttctggtaatgaaagaggaatttgtgtcagattaaccctcctgctgataacatttacaaaaatctggacaaaaatgtaaaaagaacaactgtttgaggcactgtagatcaactaaaagtagggagaaattgatgggatatgactac

SEQ ID NO: 819736 - DNA, 674 bp, Homo sapiens
atagacaagaaacaaatttatcaaaatcctacatacgttccttataaaaactctcagcaaacaggaatagaaaaattgtgcttaacctgwtaaagagcatccaagaaaaacctttggttaacatcatacttaataatgaaagactaaatgcttttctctaagaataggcaacttcttacaacttctattcaacacattacagaagatcctagccagtgcagtaaggtaaaaataataatataggcagaatacataaagatttcaaatgaagatataaaactctatttgcagattatatgattatctttgtagaaaatccaagggaatctattttaataagccattagaactagtaagcatgttctcagtatgtaaaaatcaattccattttactacactaacaattaataattagacattgaaattttaaaaataccatttatggtggctttaaaaactaaaatgtttacggataaatttagctaaatatatgttattcttatacaattaaaactgtaaaatgttgttgagtagaattttaaaagatatagatacatgcaggtatagaacatattgctggattgtaaggtatcatttctcctgaaattgatatatacacaatacaaatcaaaatcccatcaggcttttatggtagttttataataaattgtgaa

SEQ ID NO: 819737 - DNA, 428 bp, Homo sapiens
ctgttgaaacagatacaaatagtaattttacctaatggccttagctacaatgcatgataagacttcactgatgggccaggcgcggtagctcatgtctataatcccagcactttgggaggccgaggtgggcggatcacgaggtcaggagattgagaccatcctggctaacatggtgaaaccccgtctctactaaaaaatacaaaaaattagccaggcatggtggcgggtgcctgtagtcccagctactcgggaggctgaggcaggagaatggcatgaacctgggaggcggaggttgcagtgagctgagattgtgccastgcactccagcctaggcgagagagcgagactcaaaaaaaaaaaaaatccttcactgaacttcactgatggattctgaacaaagaaaaataaattgagtctggagttaaaga

SEQ ID NO: 819738 - DNA, 640 bp, Homo sapiens
cacgttcaaatataggtcagaaaattattgaggctttatttactctctcttttcagggctgctggctgacatacacccccttctgctgaaaggtgttaaagaaatatgmccagagcatagtaggccctcattgcattctcattgacttgatgtcagagaaaaaaaaaattagcattttcaaaatttgctgttgaaaatttgagacccaaaaaagtgtatatagatcaagttgttgttttacagagcaatggtgaggggagggcagaatgctgtaagcatcaaaccacatgcggtcaattcatctataatgatggttaacaatttttacggacttccttctgcctccacaggcactgcttcatgtgatatgcacaaaactctgtgagttgttcactttcccttcccctcgttcattcatccatccaacaaatatttactgagcatctgctatgtgcccatgcgtgggaacagcacattgatggagacaaactgacccacggccacacggagcattatcttggctcaaagagctgcaggctgtgatcttaggcctcttccagctccctgttggtggttatatgatctgcaagctaagaatggtttttacattttttgatggttgaagaaagatcaaagaaga

SEQ ID NO: 819739 - DNA, 620 bp, Homo sapiens
cttagccattggcaactactaatytactctctgactctaaagctttgcctattctggacatttgctataaatgaaatcgtgcattatgtggccccttgcctccagcttactgcactcagcatgatgtttccgaggcttacccatgatgtgcatgcactgggacgttattcctgttcatggccattattctgtcctaccgacacaccacactgttgatcccttcatcaggtgatgaaccctttggttcccaccttttgggtcttgtgaatagtgttattatgagcattcatgcacacattttgggttgaatacctgccttcaattccaaattcttttaaataaaagtcctcatgaatgtttagaggcaaaaaggggatgtagtaagtacgtgggttcttgcccttccaacctttgcctttgagaaagacactcagagggaggttgtttctgaagaaatgctttgtgtagggccagggtcccctgccctgaatctactgattgccatgaagaactcttccagccccagtacagcatggatggtttgctccagttggctttgcatctttccacacacacagggaaaaacctatggtggctagaaaatgagattcatcccctgt

SEQ ID NO: 819740 - DNA, 530 bp, Homo sapiens
tttcatttccttggttaaatttattctcagggttttttattgttgttcttttttagctattgtaacctgaattgctttcttkatttcttttttagctagttcactgtgagtgtatagaaacactactcatttttatatattgactttgtatccagcgactttagtaaattcatttatcagttttgtgattttttttgtagtcttttggttcttattttatgtacagataaattggaatgggtaggtttttccatatataagatcatgtcatttgtaaagaaaaatttgactttctgtcttccagtttggatgccttttttttctttcatctggttgctctggctaggacccccagtactatactgaataactggtgaaaatgggcacccttgtcgtgtttcagttcttagaggaaaggctttctgcttttccccattcagtacaatttagctgtgggtttgtcacctattgcttttattatgtcaaggtattttccttctatgcctaatttgttgagagtttttaccatg

SEQ ID NO: 819741 - DNA, 574 bp, Homo sapiens
caaaatatctcatgtaacttataaatttgagtctcccctgcctggtattccatcacgcgtggtcctgccatcctgagatgtcagcagagctggggttggtgttggaaacacaggcgttcttcactttcygaatgagcagtggcttcctagagaaggctcatcctggaaagtcagggtggggctgcaggggagctctctggacttacactcgggggtcctcagccatctctgccttcaggtggcaccaacaggatcaaatgttaattttttctcatggctcaatgaccactttttcccaggctacttggctttcttgtggcttcccacgtttcttatctgcatctgcagtagacacaagtttatatctatactttagaagcagacaatggaaggaataaaaccacattcctcatttattaaagggaataaaattaaatgtcttactataaaaaaaaataaataaatttgcgtacctactatatatccacaaaaatcaaaaataaaaaatggtttaaaataaaacaaatttgaaattaaaagactacttttaaatgtgacatttattgtcagtttt

SEQ ID NO: 819742 - DNA, 468 bp, Homo sapiens
ttattttcctctataaactggttattctagttagcagctcctctaacgttttatcaaggttcttagcttctttgcattggatagaacatgctcttttagctcaacatagttttttattacccatcttctgaagcctgcttctgtcaattcgtccatctcatcctccatcaagttctgtgcccttgctggagagatgttgtgataatttggaggagaagaggcagtctggccttttgggttttcagcgtttcttcattgattctttctcatcttcgtgagtttgtctagtttccatctttgaggctgctgacccttggatgggatttttgtaggggctttttttgttgttgatgatkctattgttgttgctttctgtttgtttttctttcaatggtcaggtccctctgccgtagtgctgctgtggttttctggggattcacttcaggccctattcatctgcttcactcc

SEQ ID NO: 819743 - DNA, 586 bp, Homo sapiens
tgcactgcaatgtcctgtaggtctctccttagatctgcacctctgtttaatttttttttttctttttctttttttttttttttttttttttttgagacggagtcttgcccttgtcatctaggctggagtgcagyggtacgatctcggctcactgcaatatccacctcccgggttcaagcaattctcctgcctcagcctcctgagtagctgggattataggtgcctgccaccatgcccggctactttttgtacttttagtagagatggggttccgccatgttggccaggctggtctcaaactcctgacctcaggtgatccacccacctcggtttcccaaagtgctgggattacagatgtgagccaccatgtctggccacctctgtttaatttttatggtatttgacaacccattctttcacattatagttgatattcatatgacttttagttttatccaaaaggaagataacatattttcctttcctttctctttattgcttgaggataatttccaagaagagaaagactttaaactgtctgtctacttcaatattttaaaaccagagttttatatttatattttac

SEQ ID NO: 819744 - DNA, 587 bp, Homo sapiens
cacaaatatatattatttatagtgtattgattaacaatatctgtgcttataaaaatcaattaaacaagattacatactatagcagtttccaaacagtgccctaaaactataaactataattagtggtatacagttcatgtgacaaaatgtacaaacagcctgtagccctggtgaaagactctattgcctctaacagatcagttagttattgcttacagttaaaaaactgaataactgtgtctccttttgagagtaaacccaggtccaggtatgctggaaagcctctgctatctagaaggatccagccaatatcgtcctaattgaatttacatgagtagaggtagatgctctaagaccatgaatttacatgagtagaggtagatgttctgggttcacttatgtctattaaggaaaacatccttctcctaaatttataattacccaattgatatttctagctagatgaagattccttctgttgaaayacttaaatgtaaagaaaataccactcaggaacaagatgaaggaatttggtatcatttttcctgcatagattccttggaatttcacataagggttctgtccta

SEQ ID NO: 819745 - DNA, 612 bp, Homo sapiens
gacttgagcttgaaatagctttagatgtgcaatgaggatagcagttgcaattcaattcatttcttcatttgcactttgaattaatctctggttatggtatcatartcatggttacttctcacagcaaagtatggaagtgtctgtgtttgcctttagaatcttttattgtcattttggttaaatcaatatccaaggtcacatttaatcaagcgttgtagatttgcaggaactttttagatagtaccatcaggttttattatctcaatgacacctagtaaggaggatgaatatactggaaacattaattactggcttttttttccctttctctcatctttttattttgctttgctggaagttttcatgaggaataataggttagacttagacttttaaaagcctctcaagactaagaaaccaaggcagcaattggatcccagactgtacctggaacatgtaatgatgtaaagatgaacctctcttctcaaggttcttattatattttaaaattgttgggcctaccagttctttactcatctgtaaggctaagactcctataagccaggaactaggtcattcaagattgcgttgtaagtattggctccataaagt

SEQ ID NO: 819746 - DNA, 625 bp, Homo sapiens
tacataaaatatccagaataggtaaatccacatagatagaatacagattggtggctgacaagggtttggggaaatgaggagaagctgcattgaaatgaggagttttattttagaaggatggaaatgttttggaactggatagagatgatgattgcacggcactgtcagtgagttaaacgccactggattgctcactttaaaatggattttttgttatatgactcttatcttaataaatttttaaatcatatattttttgcatttcacatgtcacaattctgatcttttaaatgtaaaatacattttacattacttaactatttctagtcctcacttctcctccaaaaaaattacattacagttgacactagattttgttaaactacccaaaatttactttgcatatatccctcttgtgcacaagttagtcagaattagtttctgttgtttgcaatcacataactttaattgatatggtaccttagtatgtcagtcaggragcctgaggtctaattctaggtctgcatctaattagctggtaatctcgggagaaattatttaaattagcttggctttagctttctcatatgtaaactgaaaggattagactaaattattcctgagg

SEQ ID NO: 819747 - DNA, 554 bp, Homo sapiens
ctcaaggcttatacatcactgattccctcaatgcccttacttggaaagcagtaattcttttgagctaataaaatgcatgttatgaaccagaacaataccttaaagatataacaaaagtaattatgataataatgaaaaaagtgagaatttcaaaatctttgtgtagttcttgaaagtatagtgcagtataatgtgagaactgaaggctgtttaccaaaaattcatatatctctccttctaaatatttattatttttgaacagacccgcttgtgtggccaggtgactttagccagtggcatatgtgccaattctgttaagtattttaagaaatggttttaccttctttctctttctctcccttccaccgtctggatgtagatagcactacggacctagggaaaggcagaaacacaagatgggagacatatgaaatatcccaggaagaaaactcttttgcagaagcactgataccagactsttacgtaaatgaaaaaaaacttccatttagtttaagccattattacattttggagtctataatgctaaagcagct

SEQ ID NO: 819748 - DNA, 642 bp, Homo sapiens
gccattaacctggcaatggaaaagaaaaatattttcttctcccttgcagttgcgtacatcagcaacacagtagatccatggatcagtgaacaaattgggctatgaatattcctattataaatcagaaaaacagatctagaccaaagctgaccaaaggagaaggaaaaggagagactgcattttgatgtaagtgttactgatttgaaaaaccatggagatcgatcacctactacaaggtccaatggtattccagattctagaaaagacctagataaaaatataaagtctctgaaagtcctctcatcttctccaaagagtcctaaaatccaaaagaacctaggatttctgggtattttgaacctgaacaaaggcaaagcacaaaaagcatggtatagaagaaggcttctcaaagtgtggttcccagaccagcagtacctcttggaaactctcaggcctcatctcagacctactgatgaaatcagaaactctggaagagggaccagccatctaggtatcaacaatcgcttcaggtgaaactgatgcttgttagagactcattggcayagaacaaagatgggcctcaacaaagatggaatcaccagactccactgtaaatagctgtgaaacactgagcaagttatt

SEQ ID NO: 819749 - DNA, 674 bp, Homo sapiens
aatttccacaagtctttttactcaaagtgtggtggcccaacccagcaatctgggcatcacmtggcacttgttataaatgcagaccctcaggccccacctgctgaatctacattgtaccaagatccccagaaaattcttatgtacatgaaagtttgaaaaccatggatccagaagtgtgtgaaaacataactactgccagaatttttagcatattcccttattcatctcttttttatgaaactaaacgtagtggttttgctgatagagatggacgggggaaaagaaattttgttgtgaccaaagttgctgcattttttgcctaggggtggacctaaagtttcatgtcaatcattttgttttgtgagcaaaatcaaagtcatggggaaaaaggagagggtgcagaaagaagaaaattgtgaatacatagaattttatcactggaagacagaaaacaatctcaattatatatatagtatatgtactcaatacagtaatggttaaataaaccatgacacaactatgcaagagcatatataaagacattaaaaataacaaggtcatttttcatgtaccaagatgcagtgatctctaatgtaaacttagcttaaaatatgcaaggggaaaaatgcaagggcagcacagcatatataatgacttattattcatgtaaggaa

SEQ ID NO: 819750 - DNA, 611 bp, Homo sapiens
aaacagaaacaactagaagccttggakgcactgtttgtttggtaaattttgattcatggtctcattaatgcctcatcagcctcttgaccgttagtctgttcaggtagctctgtgtggggatcttcattctctggtagccaagataggattgtcctaatgatgactggttttagtgtctccataaccactggtccctgaatataaagcgctatgcatagctaaacaaattcttattgccttcagcctgtgtgcaatttagcagcaagatatttcatatctcacagcattcactagtcctactcaattaggaactgcttgcaaatcagaacagctgatgatcataatgactcaagtggacatgtttgccctgaaaaggaaaagaaaatattgaaaagacatttcaattgtcattgaataactcagaaagggaccagggtgttgtcaggggaaatatattgtcattggccttcctgactgcggaacttccctataggttatgacaatacagctgggacacaccagaagggccaatgtgagaaataagaacttgaaactggggccgcctgtctttctgggggtggtctcctgtcccatttttagttatacccata

SEQ ID NO: 819751 - DNA, 518 bp, Homo sapiens
aagatcagactgtaatatctaaaggccttgatgaattatgtgatacaaaactcaagtgctctaggagatasgtcctttaccttaatgggtaatgcctttgccaggtcataggctattttttctctagcattcatcactgccaaacatactgtaattaacattcatttattatgtgtactgtttctctgcttcaccagaatgtgagccacagggcaaagactttgctctgtgttgttcagtgctatttccccagtgcccaaacagtggctctaggaagtaagtgttgagtgaatgttgaatgaataataataatagtaagttgcagcctagagttaggataaatgattacttaaggtagcagcacttttttttgaaagcagaaagctcctgttgtaacaaaaatcactgtagctgtatgggttagtgaacattattaataattagagtgataatgaagatgataataataagagatttctcaaaagaagagatatgaatggccaagtatatgaaaaaaa

SEQ ID NO: 819752 - DNA, 496 bp, Homo sapiens
gtaagttttttttccataataagaacaaaagtttaaatattttaaaatartctggctatgtattataatgccatttctgtcacatggcaagcttccatatatgcagggctctccattatgttccattgttctttttatttatccctctgtcactaccatgcttgtaattattataactttatgataagctctgatattatatatagggcttattgttgcaaattcttccttctcttccaaaatatactggttattcttggccttttgtattttcatgccactctgtgattatctcattaaatttcatgaaattcctactgggcagagtacattgaatttatatacgaatgtgggtataactatattatttatttaatttaaaaccttttgaataaatacatatttgaaaaacaagaagtgctctattttactggtctgtgctatcattctggcggaggggatagatcatttatttttatacaaatagcacaataac

SEQ ID NO: 819753 - DNA, 622 bp, Homo sapiens
tttgctgttgctgagttgctttaaaaaatgtaataggcttaagttaacaaaataagatttcagatccacccttttttattccacaaagtagacaaaattcacracaaaatacggactgatggtcaaaccttccccatagctgttaataatgagaaggacattattataaaagatgaatgattttgctgacctgtttccctctctgttgggtaatataagtatctctcactcctgctgataaaaacagttaatctcttgtgaaagtctcagcatttttccatacaagcagctcttttacaaaaactgctcaaatgattagagaccttaggaataagaaactattaagtcaaaaattatgctccttaaataaatgtttcctatgtaggtttcattaaattttcaccaaagactaataacttaatttgagcttctctttatataattttggaacattgtactcttttatgagaaaacgctagtaagttgttttcatttttatttttaaatgaatggtgttagttattttagaaaataacatctttattcattaaaggcttagggcaccttatgaaataatagaaggagcactattttgggtctataatagatggatctctgaatg

SEQ ID NO: 819754 - DNA, 611 bp, Homo sapiens
tggccgcctgaggggacgccagactcagctcttttctagcgactgaaagtagaagtctgtctgtctatgaacatgcrggggaaggatccggaaccaggacccagaagcacctcctttgtagacagagggccacggctgcgtgcgatccaggcccaggcccacacactctgcccgtgtcacacgtgtgctttaacacaaaacagataacactaaagacgggttcagcacccacctttctttagccagctgatcagagatgctgcaaagagaacctttcggatcactcgtttacaagccttttctaagtatttggtggtttatgtttacttgaacggctccatgttgccggtgcccagcccctgtcccctctgtcaaccccctgtcgctttggtgttggtttcgttcccgtcttcagcaaaacgaccttggaacctcaatgggggctgctttgctttgggaggttcttgttggtgggaccagagctttgacaaacctcctgctccttggtggcacctctcctggaaggacatcacaactccaggtgctcagactgcctgtggcagcagaaccagtgcctttggcattttcctcccacaatggggaaggtgact

SEQ ID NO: 819755 - DNA, 611 bp, Homo sapiens
tggccgcctgaggggacgccagactcagctcttttctagcgactgaaagtagaagtctgtctgtctatgaacatgcgggggaaggatccggaaccaggacccagaagcacctcctttgtagacagagggccacggctgcgtgcgatccaggcccaggcccacacactctgcccgtgtcacacgtgtgctttaacacaaaacagataacactaaagacgggttcagcacccacctttctttagccagctgatcagagatgctgcaaagagaacctttcggatcactcgtttacaagccttttctaagtatttggtggtttatgtttacttgaacggctccatgttgccggtgcccagcccctgtcccctctgtcaaccccctgtcgctttggtgttggtttcgttcccgtcttcagcaaaacgaccttggaacctcaatgggggctgctttgctttgggaggttcttgttggtgggaccagagctttgacaaacctcctgctccttggtggcacctctcctggaaggacrtcacaactccaggtgctcagactgcctgtggcagcagaaccagtgcctttggcattttcctcccacaatggggaaggtgact

SEQ ID NO: 819756 - DNA, 624 bp, Homo sapiens
aaggaggtgcctgctggcctgagagaaaagcagggtctgaactctttatttagtgrccagagagccacagcccaggaatgtgtggccactgagccaggagggctgctccacccaccactgccagggacactccagcacaggtgcccccccaccccaacaaaggccgctcgctgggaggcagtgcgctcccagatgcggtgtgaggaatgtttgtcagctcttgacactaatattatttaaggcccaaagtctaatgtaaggcttccttttagcaagattgtctcatttaataaagctccctgtctctgttccccccaggtaatcgcgttgatgataacgcattccctgcactgtgatttgatctgggaatagaattatcacccagccttgctttgctgtcaaatgttccatttgtatttttattttttcccctagaataagtaaacaggaagccatccaagtggaaggctctgctcacctggggccttccacgctggcctccttaccagttcacttcctgtcttcaggagccactttctcattaattcaatcaacaaacatttcccaaatgactgtaccttaggctgcccctacattgcggtcgcctgaggcaagtcacccaat

SEQ ID NO: 819757 - DNA, 395 bp, Homo sapiens
ctggaagtaaaatatcggtaatttttttttttttttgacacagagtcttgctctgttgcccagactggagtgcagtggtgcaatctctgctcggtgcaacccccacctcctgggttcaagcrattctcctgcctcagcctctccagtagctgagattacaggtgcgcaccaccacgcccagctaattttgtattttttagtagagacagggtttcaccgtggtctcaaactcttgacctcgtgatccgcctgtctcagcctcccaaagtgctggggttacaggtgtaagccactgcgcccagccagtaattcttatcaaatgaaaaatgatcttcattcacaatgactgaccaaacttctgagtttccttcagttaatttcaaatcctgaggtca

SEQ ID NO: 819758 - DNA, 502 bp, Homo sapiens
atggtgctgatttgataattctcctttttaagttgtagtcatggttatgatttattacagcaaaaggattcwaagcaaagtgtgcaaagggaaatggggcagactctagaggaaactggtcacagctttcaggagctgtgtccctgtgcagtcacacaggctgcacttcattcctcctgcaacaaattgcgacaacacacccacaatttgtgaaatttcacaattgtgagacctcgcaattgtgagaaatgtcttctagataaagacctagtgcctagggttttttactgggggctggtgatatgacaattcttctgcaaagtaattcagaagtatctagagctccccctctgtgactcagtactatagaaaacaggcaaaagcacttaatgcagatacgctgatgttaataataataaattagaatctaaatggaaaataggacatgagagactagtaacatagaacatttctactaaaacaaaatgtgaaaaaagcagaa

SEQ ID NO: 819759 - DNA, 629 bp, Homo sapiens
agtccagtttccatcaaagcctggttcagcaaagggcatgtaggaatgggagtctaacatcctgagttgtatcagtgttatmattacagccctgggataggagattaaattcttggacaactttagcctccttgcagaattgatgtccttgtcacttcctccaactttcactggctttctcaggaagaagaaaatgaaagctacttctggatttttcataaaaactgtgcgttacatcacttattgttcctgcaaaagaaattccttttggaatacactgccagacaaatctgtgttcctgtggaattagtaggcattctccttcctaataatgagtttctcttttcactgccaggaagttggggacaaatgttgcactcagttacagcaactatgccaaccattagggttagttggagttcttgtctttaattctttcatccctctcatttttaccttattaattttattgtataaaataattataattcaaatagttattcaaatactgatgaaaaactgattgtgacatttttaacattcattccataaaaattaaatggtctttatgtacaatatgctgacactatagaattactctatactagttgttttcaagaaatgggtta

SEQ ID NO: 819760 - DNA, 641 bp, Homo sapiens
ctggggcggcctcggctactccccaggtgggacgtgccgcgccacctgcccgcgccaccggcacccagcggccgtggcggattctgcagcatcattcgggggccccgtcgcggagccaaagccgccggcagtctccgcattcccctttaaagggtccttcgcccggcctgtaccatggaatcctgtcttggggaccctttccctacctcccctcccttgggctcaggctcgaagagagagtgggcacactggtggctccagcggcgtcagtgccatcgcggggcaagttgattcctgggccggagctgggcactcatccatccacagtctccgggctggggtcggggtggggatgacgcgagcagagagggagagtgccccaattagtggtgttgggggtcctacgctcagtcttacgcgtgtctgtttgtcctcagcctcgaggtgcataccggacccccattcgcatctaacaaggaatctgcgccccagagagtcccgggagcgccgccggtcggtgcccggcgcgccgggccatgcakcgacggccgccgcggagctccgagcagcggtagcgcccccctgtaaagcggttcgctatgccggggccactgtgaaccctgccgcctgccggaacactc

SEQ ID NO: 819761 - DNA, 542 bp, Homo sapiens
gcagtgacatgatctcagctcactgcaacctccacctcccaggtttcaccaattctcctgtcttagcctcctgagtagctcagattacaggcacctgccaccacacctggctaatttttgtacttttagtggagacggggcttcaccacgttgtccaggctggtcttgaactcctgacctcaggtgatccactcgccttggcctcccaaagtgctgggattacaggcatgagccactgcgcccagtctccctgtccacttttaatttatttgttttttaaatatttattcatataagtacgaacttatggattttttttagtacattcttactttctggcactgccaggagctccaggcttgtctttattttccccgcccgagccccaccatcagccagtttactaaggarccctgattcattgtagttgaggatggtattagaagccaagatctgggtgctggctgtgctcattgctaatggatgtcactgcccctagtctctcacaggggatagcactacatttttgaagcacaggaagg

SEQ ID NO: 819762 - DNA, 561 bp, Homo sapiens
aaatattttggagcatgagtggttccaaccaactgctccttttttttttaattttttccctggcaaaastatcaaaatataaaacctgcacccccagagatatgtttatgttacagttaacaagagggaaggcaactatttctgaaagtgaatattttgcttcaagaatctgaaattaaatgtatgtatctcaagggaaatagagaaaacctatacagtgtggacatctgttctattttattgtacttttctgctaagcataccaatctcttctcaaagcaaaacacttattcctttgggggattcactttcctcatttccatgtaggtctcaggaggctatcatttgagtgccttgtctttagaaataggaatgcaacctaataattgctaatcattatacccttcccccttgtttctgctttcacagcgattgatcaagggatggtttcattatccactgactccctgaaagtctcccttttctcctggtttataaaactcaggtaacataaccctttatttcttttggtagccaagtttccctttataaaaccaggaa

SEQ ID NO: 819763 - DNA, 620 bp, Homo sapiens
tttaggtcacactggaagaaaaaaaggcccttgctttataagtctatcttgagaatcagtactttcatttttttcattcattcattaaaaattgatattatggacagcctatttgtaatagattctgttcctaaactttcggcaatagagggtcataaggagacaataggtatatatgaagtaaatagaaaagagatgttagattgcactatatgctatgaaagaaataatgtaatatgatagagagtaaagaagagaggtactcagagaaaaatgaagaaaaacatgggaaaaagataaaagtaatagaaacaacaacagggagaagaaagggagttatatggcaggttgaatcaccgaatagtaattcatcctgtgactaggtgaatggggcagagaaagttcttagagaatagacaaagaatgttttcatgaaagaggcaaataacccaaaaggggagtgcttcttacaatggactctcaagaagttcatgcttattcttcttaagttccaaatatttggaatctatttacagygaattgcagtaggttacgggtggctttctagaggattgagacataagcacagagccgagggtgagatttcactgatatattac

SEQ ID NO: 819764 - DNA, 594 bp, Homo sapiens
atggtgggattaaatgagtcaggaaacacaggatttggccatgagtcacttaagctgrgttttggagttaggtcccgtaaaccccaagagatcctctttgttccataggcacaccaactgccttactgctttagaatgctctgaaggtgatttaactgacccgtaccaaactgaccagccactctgaactgggtgccctgacccaggtgcgtgtctaaagatgcacgtaggacgagttagaaattaggaattgtgaataagaaatacataaattgggaaaatggacaaggtttcactcaagaggtggaactggaagggaaaactgtgactcccctgaaagaaaatagccatgagttaggcggaagtctgggagacaggaccaatctgcatattagaccctagaggcagagagagcaggggttatggcaaagtgtaaggctgtgtctggccattagaggacacacacacacacacacacacccctcccagtcccaatcctgagtatgtagctttgggaaagggaagaccatgacacatggcaaagagctacatcactgtgagccagtgatgggcagtgcaacaatgttgtgtagt

SEQ ID NO: 819765 - DNA, 594 bp, Homo sapiens
atggtgggattaaatgagtcaggaaacacaggatttggccatgagtcacttaagctgagttttggagttaggtcccgtaaaccccaagagatcctctttgttccataggcacaccaactgccttactgctttagaatgctctgaaggtgatttaactgacccgtaccaaactgaccagccactctgaactgggtgccctgacccaggtgcgtgtctaaagatgcacgtaggacgagttagaaattaggaattgtgaataagaaatacataaattgggaaaatggacaaggtttcactcaagaggtggaactggaagggaaaactgtgactcccctgaaagaaaatagccatgagttaggcggaagtctgggagacaggaccaatctgcatattagaccctagaggcagagagagcaggggttatggcaaagtgtaaggctgtgtctggccattagaggacacacacacacacacacacacccctcccagtcccaatcctgagtatrtagctttgggaaagggaagaccatgacacatggcaaagagctacatcactgtgagccagtgatgggcagtgcaacaatgttgtgtagt

SEQ ID NO: 819766 - DNA, 625 bp, Homo sapiens
agccagttctcccagcaccatttattaaacagggaatcctttctccattgcttgtttttgtcaggtttgtcaaagatcagatgattgtaggtgtgcaatcttgtttctggttctctattctgttccattggtctatgtgtgtgtccttgtaccagtaccatgctgtttgggttactgtagttttgtagtgtagtttgaagttgggtagcatgatgcctccagctttgttctttttgcttaggattgccttggctattcaggctcttttttggtttcatgtgagttttaaaatgtttttttttctgattctgtgaagaatgtcaatggtggtttaatgggaatagcattgaatctataaaatgctttgggcagtatggccattttcatgatattgattctcccatccatgagcatggactgtttttccatttgtttgtgtcatctctgatttctctgagcagtggtttgtagttctccttgaagaggtccttcacttccattgttagctgtatttttaggtattttattctttttgtggcaattgggaawgggagttcattcatgatttggctctcagcttgcctgtacagcaacagtttttatttcattttattactacttttaa

SEQ ID NO: 819767 - DNA, 565 bp, Homo sapiens
atgttggccaggctagtctcgaactcctgacctcaaatgatctgcccgcctcagcctcctaaagtcctgggattacaggcatgagccactgcgtcaggccggcttaggtattctttaacagctctaaataaagtttattttctcttagaggttttactaatctttgtatgatatatttgttgtagcttgttgctactgtaaatgatattttcaaattatattttctgtctactgctattttagaaatctaatcaatttggaaatattgattttatatctaataaatttactcctatcacctggcaggatttgcagaataattgcccagaactagaatattgatccagatttttacattacccagcccttttgtttcttctgaactgcagctggagattgctggttggttcgcaggaataagcagggttactctaaaatgtaccactcaaagatgggcaygacagtgtaaaaaaaacaattagggaagggtaggtatacgtaaaataggtgaagggtgggatccatcagaggaaagtgcaccaaatgggaagacaggtttttgatc

SEQ ID NO: 819768 - DNA, 539 bp, Homo sapiens
tacaattttgcctgtataagggtaaatttctctcctgaaatttacccctgcctctataaacccttgcttgtaagctgccagggagggtggctcatttttttttttttttttttttgagacggagtttcacttttgttgcccaggcttagattttccacattctctcaagttttataaatatctatttatgctttgtgattttgtgattttggctttttaaaattgaaatctgcatttgatctgaaatttgttttgatcaatgtcatttccactttttacatgaagaatgtgtattgcttgtttttagtaagacaaaccctaagttttctttttgaccagaggaataaaaggcacattttaataaaacagtaaaatccacagataatcccacagcttgggccaaatgatctctgctgagatctctgcagcaattarctttaggaggggtttggcctttagagtgggcagctctgaaacagcttcttttttcaggatggtgggctggtacgcggctgcttcagcagggataccttcacatc

SEQ ID NO: 819769 - DNA, 408 bp, Homo sapiens
cccctctggatggggatcccactgagactgtactctgggaccccgctggtatcttctagggacagtttgtggccaggggacaggaagtggtgccatggggagctagtgctgtggaacgyggtacaagggctggccctgtccaatggagtggggcctgtgtggggcctgagcagccatccattctggctgagatgggggagcttgaccaggtggtgactgagggacaggctggtctcttcaggaggcaaagggggcccgaggctaggggctggctggcagggatggacgaggcaggggaggggctggaaagagatgagggggcaaaggtcagggtgctcgagctcctccgcactagggccctttgccctgagtgttgccaatctggacaacactctaggagcctctcct

SEQ ID NO: 819770 - DNA, 541 bp, Homo sapiens
aaatttgccatggacagctgcccaaccttgacctgctcaatctcttccagaccttctgccagaaagtgggcctgctgtgcacgcttcagggtaagctgcagccccaggactggacattgttggacgaactgctgcagggcctgcaaacactgctgctcatgattttgtggcaggcttcccgtggcctcttcctgcactaccacgtggaggccctaaccctgcgtcgcatcagtagcttccgccagtacaagtatgacctggtggcagcgggcaaggctttggagggcatgttctgcaagctcaaccacctcctggaacacccgcaccagctgttcttcctctacctgctccccactctgtcccgcttcgtctccatcggcctctacatgcccgccaccagcttcttgctcctggtccttggtttcaaggctctgcaactgtggatgcagctgcatgaggccggagtgggccttgaggagctcaggggggtccctgaccctagtgtccccsctcccccagcacaggatggtaagcacacagg

SEQ ID NO: 819771 - DNA, 604 bp, Homo sapiens
ttgtcatagatggcttttataaccttgaggtatgtctcttgtataccagttttgctggattttatcaaatgctttttctgcattgattgagatgatcatatgatttttgtttttaatgctgttgatgtgatgtgtcacatttgttgacttgtgaatgttaaaccatccttgcatttctggtatgaaacccacttgatcctattgtattacctttttgatatgctgttggattcagctagtattttgttgagtatttttgcatctgtgttcatcagggatcttagtctgtagttttcttttattgttatgtcctttcccagttttggaattaggatgatactggcttcatagaatgatttatggaggagtccctctttttctatcttttggaatagtttcagtaagattggtatcaattcttctttgaatgtctaatagaattcacctgtcagtccatctggttctggacatttttttgttggcaawtttttttattattgtttcaatcttgctaattattggtctgttcagagtttctattttttcgtgatttaatatgggaggaatttatccatctcttccagattttctaatttgtgtgcat

SEQ ID NO: 819772 - DNA, 538 bp, Homo sapiens
tccactgagataagaattgatgaaaggggaagcttttaaaaaccaggactatcaattcccagtctatgacactcatctaaactgcagatgacggtggctcagttgtayaagatagactggcctctggatatattcttcagatagacctgacaagatttactgagagattagatgtgaagtgtcaggacagagagaaagatcagtcaagaataacactgaggtttttggcagagcaactggaagagttgctgttaaccaaagtaggaaagactacatgaggtgtagatttcaggaaggacatcagtagcccaattttggatctgacaagtgtgtgatacccaacagctaatcaaatagagatgtcaagtaggtgggatgatatagagatctggaattaaggaaagagatctaagttggagacatacatttggaaatcactagcatatacacagtagaaaaagtcatgaggggccaggcacggtggctcacgcctgtaatcccaacatgtcatgaggccaaggcgggcagatcacctgat

SEQ ID NO: 819773 - DNA, 659 bp, Homo sapiens
ggcttttctagaacacatgcccaagcagagacttaaatattgagactagccagattaaaaggggtagagggcaggaaagggtgacggcatrccatgcagcagcaagagcgggagcgaggcctgaaagagtgaaagtatttgcctacaatagaaggatgagtgagtagggcattgccagcagctcagtaatgccagagacagtgcacacagggaaaagggctaaagatggagagtggggcagaagtcagattatgaaagccttatgtgtaattttaagatgcttggacattaatgttcaaaagtggtcccgggtcctatctgcatttagatatagatcatttcaatgccaaaaccaatattcctagtgaacaattattcattaagacaaggtgacagatagctcatgtggacacagctgagatgatacaatgtagcaaatactaaacaattctcatgaacacttggaaagtcagttctataataaagtcatacaaattatactaaatcagtaaatatttggtttgggaagatgctttgtaaagttatagtgcatatgaatacaattaacagtcgtgaattcagagctgtgaaaataaatcaaagaaaccacattgtgtttgagtcagcaatctttagatttctatccagtctttccatcc

SEQ ID NO: 819774 - DNA, 471 bp, Homo sapiens
atgattctgtctctgtgaatttgcctattctagatatttcatatacgtgaagtcatacaatatttgttcttttgtgtctggcttattttttagtataatgcctttgaggtctgtccatgtttataccacgtgtcagaatttcattcctttttaaggctgaataatacaccactgtatgtatatacaacagttcccccctttttggggtttcttcttccatggtttaagttacctggggtcaactgcagtcggaaaatattaaacagaagattccagaaataaacaattcatgagttttaaatttctcactgctgtgagtagtgtgacaaaatttcccgcatctatgccactgcctgttagtcacttagtacccagcttggttatcatattggtgatctcagtattgcggcatttgtgtacaagcaatctttattttacttaaccgwtctatttatgattcgttattgttaa

SEQ ID NO: 819775 - DNA, 617 bp, Homo sapiens
tgtaggggaaaaaagagagtgactccatactggatccatgccagagctaccgcaccagcaaaataaactctaaactcttttcatttctgtgtctcactcacttgattaccaaagtctgagtgatgaattcccctacgcaagctcgctggagatgtcagacagcatctccatctgccggagaccctccatgcacccaagaccagctgtgtcagaacagccaggtggcagggctgcttgcactgcccctgccaccagctggaggggtttctcttgccctaggccctatacaaagcctttcgggtgggagcagcacaccatgggtagtaactgtggtctctcaagccacctctgatggtggtggcaaccagggcaaggtgcaggatgtggtcttttctgggatattctgatgttactcaaattactggatctccaggagcttcacagatgcagcagagccaccaataatcccaaattatgtggatatttcccactcctccatgtagtttccaggcaaatagctgaagggcctaatatgggaaatygggcagaaggattcactgtccgtgactggatattttggcagagtccttttctcaagcttggcttccctatcatca

SEQ ID NO: 819776 - DNA, 637 bp, Homo sapiens
ttctctaaatattcagtagatgtgaaagcccccaattcacaccaagggaaggaggagggacctttcccagctaggaggttgttcctgggaagtcagcagggagaaaatgctctaagaagtggggagaggcctgagtgccgggctggggactgtgagcctctcggtctctgtctcctgaccctgaagtctcctcccacaggagagaaccagacggtccagcccatggccactcctgccgcagctccggctcccagtccccagatcagattccctttggccacttacattctgcctccgtcaggaggtaagggccatgtgctatggagtgcagtgctgagaggggccatgctgcccaggggttgtccaacctgggaggggaaacaggccctcggggacatcctccttgccctgcacactgtggatggttgtcctaaggatctgggagtcatcctatcttaagttgcctctcttgactcttccctccctgggctaaagtcacccatgtggacgtttcacatcccctagctccccatgcracttcctaaccgtgtccctgcaggctcctgccgccctctgtcctcccctactccagcctgtctctctcttctgcacccagacccctgctattctcccctgg

SEQ ID NO: 819777 - DNA, 555 bp, Homo sapiens
attttattgctcagtaatattccatagatgaaccatagtttatttatctatattcaccagcaaagaacatttaagttgttcactgtttttggcaattatgaagaaagccactgcacacattcataaacaggcttttatgtcaacataagttttcatttctcttgggcagacacctattaagtggggtcactgggccacacagttaagcatatttctaattttataagaaattgcatccccaccagcaatgtataggagctctagctgttccacatccttgacagcccacaatttgaaatccagcatctgaaatctcatctgtatactttcttcagtgaaacatttgttcaagtctttttgtctattttattttgttgggctgtttgttttactatgattgaagtcttttgtcagatatgtattgtccaaatattttgtcccagtttgtggcttccctttttgttaactgtcttttgtgaagartttttaatttgtaagaagtgtattttatgactgttttccttaatggagtatgcttagtgctgtatctaagaa

SEQ ID NO: 819778 - DNA, 631 bp, Homo sapiens
agattacctactttgagttcattgttttttctatagtgagatatgggtcaaaggtatttttctttcttcctttttttttaattgcatgtagatgtccaattgttacagcgccatttgttgaaaatactatcccatcctttcaacatggaattttctttgtacttttgttgaagattaattgccatatatgtgaggactctttgctttgttccactgctttatgtgtctactctttcaccaattccaactgttttgattacggtggctttatagtaaatcttaaatcaactttgctgcccttttgcaaaattctactggctattcaagttccttcccctttccatataaaatttttaaaaaagctgttcatctctgcaaaaaagcctgctggattttttactgagaatgcactgtgtctataggaaaaaattaacatcttaacaatagtcttctggtccctgaacctggtatagctcttcatttaagtctcctttggtttcttttactgatgatttgtaggtctatgcatattgttagatttaagckaaatattacatatttttgatgctattataagtagatccttttaaaaattttattttcaactgttgattactagtatatagcaata

SEQ ID NO: 819779 - DNA, 533 bp, Homo sapiens
ccccagtgcgcttatgcactctccaggagagctgcatctacaaattcttctcctatacttttaaattcattttgtacttactattgcaattatattttaaatgttatactaatataaatctgaaaaaatatgagtgtgaatgaaactgtgtccatgtaaatcagtttaaatgttctggaacagctgttgaaatactaggggactggaaaataaaataggtaaaattttagatgaattctctcatcaaactgcttcccaagtatctttgcaattcttcttcctctttaaagaaatttaaaagggacacaatgtatgatgtatttaggtagggcaagaaaggcaaaatgaaactcctagaagcagaatgatacttaaagaatatatctgggttcccaaaaaaagatagatgaaraaaaaaaaaaaacacacgttcaggtacttagtgtacttagtgttcaaatccttatttaagttatgtatgtatttttgtcttttcctttaaatgtttctccacttgaacagaattgtgtaag

SEQ ID NO: 819780 - DNA, 625 bp, Homo sapiens
ggaccaataggggtggcaccagcaaaacctatgtgttggcattatgatcaagctaaaaggaagatggtagccttttctacagcatgaggagatcctggctgagaatgaagccaacttggccrgggagaaccaagagatagagtggacaaaatcctgatatcatcatgtagcacctagatacagctgtgactgacgcctctctctctctcttctcctgccccgcaccctcacccccttcccatatatttcaactgtttaaatcaatttccataacttgtaactgaaagagccctgacttatacttagggaagtctctctggtgaagtgatctttgagctgaaggggctgatttggggccaggagtgagggtaggggatggtgagggggaaggagagttctgggaaggaagtgagaaattggctacccctgcgtgtctgggtctaaggtcttcaccacatgactacacaagtgcaataaacttgctctgccccgttgcggtgttgaataaaccaaacaaaacgatctgccctctcgtgaatgtcagctttactgggagctgagctaatgtattattgatgaggcataaataatgggacaagcatgatttcctattcagtccagaagt

SEQ ID NO: 819781 - DNA, 474 bp, Homo sapiens
agaccatacaggaagcagaaggaacttggaacaaaacaactctaaggaacgccatcggagagataaaaggtcgtatctacaagacrcaaacaggatgctgtcaacagggagtgcccggagaacaagaaagggggcttaggaacggagcatatgataaccacaattaaacacgcaatagacgggttggaagataaagactaggaatctctcagcagaataaacaacagtggaatgaaaagtaggaaaaagaaattcgaacattagaggttattccaggatgtacaacattagactaaagggagtttcagaaaacagaggataaaaaacagaaggaaaaaacaattaaatagataatgtaagaacattttcaagaaatgaaagacatgaattttcagatgaaagggacaccgtatgccaggaaaaacgatgaaaaaaggcctgcatcacagcacatccctgtgacatttcagaaca

SEQ ID NO: 819782 - DNA, 474 bp, Homo sapiens
agaccatacaggaagcagaaggaacttggaacaaaacaactctaaggaacgccatcggagagataaaaggtcgtatctacaagacacaaacaggatgctgtcaacagggagtgcccrgagaacaagaaagggggcttaggaacggagcatatgataaccacaattaaacacgcaatagacgggttggaagataaagactaggaatctctcagcagaataaacaacagtggaatgaaaagtaggaaaaagaaattcgaacattagaggttattccaggatgtacaacattagactaaagggagtttcagaaaacagaggataaaaaacagaaggaaaaaacaattaaatagataatgtaagaacattttcaagaaatgaaagacatgaattttcagatgaaagggacaccgtatgccaggaaaaacgatgaaaaaaggcctgcatcacagcacatccctgtgacatttcagaaca

SEQ ID NO: 819783 - DNA, 641 bp, Homo sapiens
ctcagtatcatacttgagacccattgcccaagatgaatcctaatttataccagatgagctcaagccaagactaaatgtggaggccagtacatgaaaggaagcagactcccctctttttagkgcctgtgggccaataggtggaccacagactgggctggaaacaagacagcaagcttccccttattgtgccactgcaatcattgagcaccatctttttctcctagagaggtaagggtttgggaaggaagagacagaggtgaacaggctttgagattcttagcttccaagggtttttcagagccccacaaggtttgagtgggacacaacaaggaccaccccatacatatataccttgaccttgggtggttacttgagataaatgagccaaagactgcagagactttaaattgttctgaaatgtaaattttttcggctacactgctgaaattcacagagatttgcattttagaacttacctccaatcttggaataaaataatttttcatctttgttgaattttagacttcaggagcaagcagatgaggtagtttctttttgtctctctcctctctttttcttttttgtttgccttgcagttcctaagtgaatgtggtacttaggagcaatataaaaaggaggat

SEQ ID NO: 819784 - DNA, 657 bp, Homo sapiens
ctcttacaagtggtaacaagagacctgaggtagaagtacctaattgttacatcaatgtcaaaggctaaagttaggcttgaaacattttttttcctctaatcagctgttgggattttcacgtttatgaaattggtaaatcctttctgaaggtaatctctagttttgattttaccatgcctaaaagttagtaagttcatacactttattagtctttacatatacctctttatatttgcctgaacttgcccccttgttatacttcaagaaaccccagccttttctgggatttaatggtaatacatatgtaatctagtaccttgttactttcccaggcatttagtctgggaaccctaatcttgagtctgtctacagtggatatttttctccaggacaggaaccaaatgggccagttactggtctaccctgtagctcaccacagacatagcctaggggcctttggcccatcttcactagttggcaactggctttttaggcgaaatgcctccttttgcataaaggagagatgcctgtccccacctgcaccgcccrtctcctgctttaaggccagcaagatgtcccgagaggcctccttgtagatgagtgaaatccacacagggaaactcaagtaaaaatatggggtggggtctgggaagagct

SEQ ID NO: 819785 - DNA, 589 bp, Homo sapiens
agcggcctgggctgaccagtggagagcccctcctagggaacagctgggatcctggacaaggaccaggcctgccccagcaggaggccctgtcacagggagayaacaggcccctgcccctgcccatgaccaccgggggcggtcacccacggccactgacctctgtggccttcaaagcttcgtaaacaattaactccagagtttcaatctctccagtttgtatctttccagacaattagtgatttgctctgatggccctcctgttgggccttttaacgttctctgtgtaaataatcctaggcagctgtgctggtcacgtgtggccttcaaaggcaggccaggtgcaggctgtcgggagctgcctctcactgaagccctggccccgcggtcagtctccccatggcacgcggacagctgctgacggctcgctctccagatgaggaactgggcctgcactaggctgcagaatgctaaggggttatgagtggccatggctcccataagacatggacacagtccgtggctgagggatcatgcggtcaccacggtcacagttaataagtcactggttcctctacagaaccaaatggca

SEQ ID NO: 819786 - DNA, 571 bp, Homo sapiens
ggtacagaaagacatataccacatgacctcactcatatggggaatattaaaaagctgaggctggttcaaaggtagtaacttatcttaattgattgttcacagtcagttacagataaaactctttgttctactctttcccaccttctcactactacacttgactagtctaaaaaataataataaataaaaaataacaaagttgtaaggccgggcatgatggctcatgcctgtaatgccaacacttcgggaggcccacgtgggaggatcggctgaggccaggacttccagaccagcctgggcaacagcaagtcctcatctctacaaataatttttttaactagcagggcatggttctgtgtgtctgaagtcccatctacttgggaggctgaggcaagaggactgctcaagtccaggagattgaggctgaagtgagccatgatcatgccaccacactccatactgggcaagggagcgagaccctgtttcttttttttttttttttwaaaaaaagagagtagttaacaaactgctgggcagagagggaaaggtttggggagatgttggtcaaaaa

SEQ ID NO: 819787 - DNA, 597 bp, Homo sapiens
tagtcaggaggctgaggcaggagaatcgcttgaaaccagaaggtggaggttgcagtgagctgagatcgcgccactgcactccagcctgggcaacaagagcgaaactctgtctcaaaaaaraaaagaattccatattctttcctccttcttccctcctccttttctgtctttggaattttcccaagcagttaaggatctaggagtggatctcaaagccttacaggataacccgtctatatggctggcaatatcctcattcccacctttgctgtctccacggtcttagggaaggggttagagctgacagtcctatctcttcctcagctctaggattccctggcatcacatccttacctatggtcctgccttctacaaagtaacatcaaggttttgcttatgtcaaaattaggtctttctaatataaaaattagggatccatgttgtagagttcttgaatctctgaggtgagactttcacagtaaatttcgctcagatacacaaaatcctggggaagctttgaagctctcactcactgaccctcttttaggatggctgtgggcacagaggttcttttcatcctcaagtggcgctggatga

SEQ ID NO: 819788 - DNA, 601 bp, Homo sapiens
attatctgcacaattagaagatgagactaaggatctaagaagtggtgtcctcctcacaaggacagtctgcttgtaagcggccagccaggactcagattcagacccacgcttccaaatgcacgctccttccctgggtccctaccaggccagacaggctgaagcacacgtagaggctgggtcagggtcactcatttgtgaagctgtgaagtgaggcatcctgctgccaggaaacggagaggggcacctggccctggaacacactggctcctgcttgctccctttcccccatttggggtgggggaattgcccacgctgggctgagacagtgggtcaggaggatgaaaccccagccataggaggggctttatggtggcttccccacacttcaccccaccagttggggatagactcatggcatctggccagctccaaagaggccagcaatggcccagtcccacgtggcctgtcctccttctcccactcccycccatccccagaaggagtctctcaccaaggggagagcagatcccaggggagaacgacagtggggtcacctgtaaggtcatgaaccttgcactgttgtctgaatccacactatttg

SEQ ID NO: 819789 - DNA, 608 bp, Homo sapiens
tgtgtctttgttaatgaaaataatcgtgtatttgcaaagacatcctgtcgccttctgtggggtttccatgttagggacatgtgtgtgtcaggtcacggctccccgggtctgttctgcatttctgttgtcctttctctgactgctgtcctctctgggtcctttctcaggcattcaccgccgccatctccatctcaagcctgtctgcctctgtgtcaggaactcactggacattttgtcccctgttgtttttgttaatctactagttctgttaggaatgttgctttagcactcgatgtttctaaaggttctcttttaaagctgttctctcaattttagtctcattcacgtttctatccagccttcctctggagtgagggactcacagagtcacactcttctccaggcctttgtgtgccatgcgcccccctcctttgcgtattttccctggaatatgcgtgtctcatccctgcgcagttgctgtatctctctctcacccttaacttcccttgctcaaatatcattgggtgaattttccttgacagcctccctgccccrtttgacatgattgccttcctccggggctcagttccaggcctgcctattgtgtt

SEQ ID NO: 819790 - DNA, 578 bp, Homo sapiens
ctaggaactgatgagagtttctgacctcaaggtgaagagattctttagttaaaaagaacagagttcaaggtgatgttcctattgtcttaggacaaggcttttgcctatcttagtaaaaagatcattttytattatcaacagaagaagctatacttgaattagcaactgctctctatgagggcaaagataagcttgaaatcctatgaaaaggaagccacctattggaagcctcagacattctaaagctgaatagggtaggattctgattccttgcatcacttgttttcaaaaatctcaggagatatgaacagttatttcctaatactgcatgaacaacaaaaatacatagtttcataaactgtaaaaaaaatttgcagtggcagcaaaatactttatggaacttatctgaagataagacatatgaggaagaacaacatttttatggccttttatttccttctaaaagccacatccaataaaatggctggaactggaattactttactgctttagcaggcatccttacagatgtttacaaaacagtattagaatgatgatgcaaaaaaatcatgattacc

SEQ ID NO: 819791 - DNA, 633 bp, Homo sapiens
aatggaatatatatatatatattccattattatatatattagcactggctcctaagttttgcctagaagtgacacatggcacttccactcacacttcattagctaaagcaagtcacatggctacacctaacttcaggaaggcatattagtataattttaccatgtttctcgaaggggaaagaactgtaaatatttagttaacagttctaatgattaccacactgagaatataaacctttggtgagcatacagagcactgggaacactcacccccgattggtagaagtataaatggatacaatcactctggcattatctaacaaagtggcagatactatggtctacagtccagaggccttgagcctcagacttcttttgccagtgctgcagccctgctggtgcttttgtgcttccttctagaggcctgtttcttccttctagaggcctcacctatgacccaggaattgcactgttaagagaaatagatgtttcaagaaaatgtacaaaaatgtacaatagmatccattttcaagaatattcatgacaacatatttcataaaagctccaaactcaaaacaatctaattccatcagtcatagaatggataaattcatataatgaaatcctatgcag

SEQ ID NO: 819792 - DNA, 577 bp, Homo sapiens
tggtaatgtccaacttttcacaaaaatggtgaatgctatcttaaaaatgtattggaggccgggtgtgatggctcaygcctgtaatcccagcactttgggaggccaaggcgggtggatcacaaggtcaagagatcgataccatcctggccaacatggtgaaaccccgtctctactaaaaaatacaaaaattagctgggcatggtggcatgtgcctgtagtcccagctacttgggaggctgaggcaggagaatcacttgaacctgggaggcagaggttgcagtgagctgagattgtgccactgcactccagcctggcgacagagcgagactccatctcaaaaaaaaaaagtattggagataggttttatatttagatttatataaccggttatatgaatatatttaaacactggagaaattccttcactgtctcagaaccaagcaagatgcaccatattttgtgttgatttgcctcttaaaggaaagggctgaaggtaaagtagcaatgtgtactttatatttttgaccttaactctgccaatctaagtagaattccctgtatctgtaatggtttcttt

SEQ ID NO: 819793 - DNA, 603 bp, Homo sapiens
ttggcctctgacagagacagatggatgccagctcagcccctgctcaccctgttaggtgggacaatctctctgagcctctgyttcctcatctacaaagtgggggccactacacccacatcaaagtgtgttgtgagtgtgagcagcgaccctgcaaagctccagcccagtgccagacctcgggggacagtagtgtgcacgcacgctccatgcagcctgagttgatccgcacatgctcagcccagaaggcaggaattaccctgtggcacagcaacagacaagacactgaggccagagatggagagcgaggtgcccaagtggcacaggtagtgcatggcaaggcagggcctcatgcccacattggccagactccagaggagtgtcctgggctgtctgaaggcggaggcttcactactaacaatctctcccctgagagggttgctgcagaggtgtggcgggaagatccttggctgtgggggacacccaaattaggagcttcccaggagatgctaagtaggctggcagtaggagagccgcttccttctcctggggcctctggctccggcagggacaggattagggtctgcaaggggacgatttacatag

SEQ ID NO: 819794 - DNA, 591 bp, Homo sapiens
atctctggtgatttatgctaataagattaaacccagaagaagaaatcaattattgctaaatgttagttttggcaaaaattatttrgaaatgattagtaagtgagatatatactgttcctcatgtccacttctatctttgactcctttatcccagtcctagataaactcaattcttcagataaagcaagttacatgaaggcagcttcacaattacatattttcactggcttctctctgctcaagaatcacaagaaatgcatcctaatagtccttatggtaatataggtagtatagcacatcttaaagtaaaccttgtccttaattaaaatggcttactaaccaataaccccctcccacatggcagaggttttttcctgtatttatttcctcaacctacaaaatgccaaaagcaacatcaaaaattagtcgtaaatagtataacagtcttatttttttttagtggtacatttattcaaatagggccaagtttttttgagtaaaagtgaaccataactgtgatataattttatgttactacattactctgtaattttggtccaatccagtgttttcaaattgtgctctgcaggg

SEQ ID NO: 819795 - DNA, 584 bp, Homo sapiens
atttttttccgcattggttttgggacaagacagaggatgagcagagatgtattaataattgctgagagtcaaaacaaaaacaaaagctaaaacagaggtgagacagtaaagccttcccatcccaggcctcaaataaccaggggtgacaaggtgccagcagcccagcctgtgtgacctgtggtcttcccctggcttggatcatggaggagccccaggcagagccctgaagctgttcctggagagctggagtcctggagtggggcacttcagtgtgtgccacagtgtacttgggaaaatccccaaatggtgacccaccacttcagtccttccatgtctctccctcccccagggaccttggcagaaattggcagacaagttacttgtaaagagttgcctggcagttttcctgattgatatggtttggctgtgtccccacccaaatctcaacttgaattgtatctcccagaattcctgcatgctgtgggagggacccagggggaagtaactgaatcacgggggctggtctttcccatgctattctcgtgatagtgaataagtctcaygagatctgatgggtttatccg

SEQ ID NO: 819796 - DNA, 554 bp, Homo sapiens
attctgtagcaagcagagccttcagaatggtttcactgacttcagagctgaactgggattcctcttaaaaatacccactgaagagtttcaggacttggtggggaccctggttctggggtcctgctggtttgtatgggagacatggctggccaggaagcccacgtgaaatctccagattctcctctagttatcatctgtctataaaagcctccttctgttggacagcttggtgggcagagagtgagggcaggaagaagctgagatcattacacagaatcagggggtgagcagagagccccgtgtactccgacagcatcagggtcttgctgaaagtcctgctacattagccatgagctggccggccttgaaccctgggtgaagaactccacctctttacccatcatgtccacatgcaaaacatgaggcttgctgtgaaagaatgtctctatcttaatgaaattctccaaatttccaagtcttgccctttcygtgaaataggcatacaggcttctggtgcctctttattccctattcaccctttccctatgtccaca

SEQ ID NO: 819797 - DNA, 591 bp, Homo sapiens
ttctttgcttctttactaaagatcagttgactacatttgtgtggatatatttatatggatactgtattctgttccattgatctatttgtctattctttcaacagtaccttgtggtcttgattattgtagctttatagtaagtcttgaaatcttgtattatctgtcttccaactttgttcttctttagtattttgttgattattttgggttttctgcgttttcatatagacttcagaatgaatttgttgatacccatgaaacaatttgctggtatttttgttggaattacattggctttataaaccatattgggaagaattgaggtcttaaaaatattgagtgtttctatacatgaacatgaaatatctctccatttgtttagatatttgctttcctttgtcaaagtttggtagagtttctcatatagatcctgtatatattttgttatatttatacctgtatatttcagttttggrgagcagctaatgtaaatgatactgtgttttatatttccaattccaattgttaattgctggtttatagaaaaggaattgacttctgcatattaactttgtattctgcaaccttgct

SEQ ID NO: 819798 - DNA, 457 bp, Homo sapiens
ctcccatgccacataaaacatttattatgcttttctcctgttgatctttcttatgttagtttatttctcagacacagctggagcctgtgaggataaaggatggaagtaraagttttccttccttacagtttctggcaatgaggatgggaccctaagaggctggacaccccactcactccagcctatggatgagatgctgagaggcctgacaaaagcctgcaaaaggtggggggattctttccaaagccagctttcccaaatatctatggatagtgcctagctaagagaagaaggtaaaaattttttcttgtcccttcttttctaaatttgaattggcaggagaaaaacatttgtaaggttgttctctgaattgtgactcttgtgaatttggttctaggttctaacagaaatcgctctttttttttgttttttaatctctgtcttctgtgtgatttac

SEQ ID NO: 819799 - DNA, 457 bp, Homo sapiens
ctcccatgccacataaaacatttattatgcttttctcctgttgatctttcttatgttagtttatttctcagacacagctggagcctgtgaggataaaggatggaagtagaagttttccttccttacagtttctggcaatgaggatgggaccctaagaggctggacaccccactcactccagcctatggatgagatgctgagaggcctgacaaaagcctgcaaaaggtggggggattctttccaaagccagctttcccaaatatctatggatagtgcctagctaagagaagaaggtaaaaattttttcttgtcccttcttttctaaatttgaattggcaggaraaaaacatttgtaaggttgttctctgaattgtgactcttgtgaatttggttctaggttctaacagaaatcgctctttttttttgttttttaatctctgtcttctgtgtgatttac

SEQ ID NO: 819800 - DNA, 621 bp, Homo sapiens
tattacaaaaataaccatgtaagaacctttaaaaagtataattctatttacttgctgtcctttgctttcttctggtcatgtattttatttacttataggtaacgacacaaaatgtgttactatttttgctttaaacagtcacaagtttttaaaatatgaatagataggtaggtagatgatgatagatatgtaggtaggtagacagatggtaattttttaaaaggtcttttatacttatccagatatttagtcatttatccactctaataattttcagttctccttgtagattcaggctttcagcaagaattcaccttgaaaactttccttgtctcttatagtatgtatttgctaaaaataaacactctcaacctttctcatcttatttcaccctcatgttgaaagatatatttgttgaacatagaattctagattaagagttgctttccttcaatactttgcagatattgcatcgtcttaaggcagtcaatattttagttgaaaactcagacatcatacctaaggttgttgcctgtgtgaaatgtctttttcctctrgctgcttttaagatttaccctttatccttgtttttcaatagtttaatcacaaaatgcctcaacg

SEQ ID NO: 819801 - DNA, 577 bp, Homo sapiens
agctcacattctagtgggggagataacagtaagtaaaaatatatacaaggtaatttcacagtgtgagaagtactatgaagataaagtgaacaagaataactaagagggtgatatggtttgtctgtgtccccaaccaaatctcatcttgaattgtagtttccataatccccacatgttgtgagagggacccagtaggaggtaattaaatcatgggggcagttacccccatgctgctgttcttgtgataatgggtgagttctcatgagatctgatggttttataggaggcttttctcactttgctctgcacttctccttcctgccaccatgtaaagaaggatgtgtttgcttccccttccaccatgattgtaagtttcctgaggcctccacagccctgcagaactgtaagtcaattaaacctctttcctttataaattattgcgtatgtctttattagcagcatgagaacagactaatacagagggggagtccaccttaggaaagatagttagggaatggctttcacrgtgcgaaacatgtttgaactgaaacctttttcctgaaaggaaaaagaacca

SEQ ID NO: 819802 - DNA, 427 bp, Homo sapiens
aaacacaagccactgggttaggcacaacattgattttaggartagacgaattatctcttctgctactcttttttttttttttttttttttttttgagatggagtcttgctctgttgcccaggctggagtgcagtggcatgacctcggctcactgcaagctccgtctgcctcctgagttcacaccattctcctgtctcagcctcccgagtagctgagactacaggcgcctgccaccacgcctggataatttttttgtatttttaatagagacgggggtttcactgtgttagccaggatggtcttgatctcctgacctcatgatctgcccgcctcggcctcccaaagttttgggattacaggcgtgagccactgcacctggcctcttctgcgactcttaataattacaaattgatttcagctgggaaca

SEQ ID NO: 819803 - DNA, 562 bp, Homo sapiens
cttgcttttttctctgctgtgaaagtggtatgtgtgaaataaggcctgcttcttcagcctggatcccggaataagaagacttgcagcagctcatccacaccacagtgcatagcatgagaagaaataaatgtttgttaccgtatgtcactgagatgtaggggtcatttgttactgcagcaaagctgactaatatatccctgtcacctttctgaccagctttgcctgtagtctttccctgactctgctccagccatcatgaccttcttgctgttttcttaaatatgccaggcatgatccttccccagaacctttaaacatactgttccctccacctgaaaatactcttcctctcccagatatctgtgtttcttgctttctcctttttcagatctttgttccaatgtccagttccttttcttaccttatttttctccttagtagttcttaaaatactarttatattttcctcctttatttgtttatttgttctgtcttcccctagaatgtgagcttgcacaaggggttttgcctattttgttcactgctgtatccctaacaccta

SEQ ID NO: 819804 - DNA, 356 bp, Homo sapiens
agttatgtctgtatgggcatgtatacatcacacaagtgggatctacacatacatatgtatgtatagaagcttacatatatataatttagyacgctacttttgttcaacattaatttacattatgatctttcccttgtcattaaatgctccacaaaagtttgattgaattaattaatttatttttaatggcttttatactcttttattccttataatttttttgccaaataatatccgtatattctcctgtgatcttttttataatttcaacttttattttagattcatggggtacacgtacaagtttgttacatgggtatattgcacgatgcttaggtttggggtacatatggttc

SEQ ID NO: 819805 - DNA, 356 bp, Homo sapiens
agttatgtctgtatgggcatgtatacatcacacaagtgggatctacacatacatatgtatgtatagaagcttacatatatataatttagtacsctacttttgttcaacattaatttacattatgatctttcccttgtcattaaatgctccacaaaagtttgattgaattaattaatttatttttaatggcttttatactcttttattccttataatttttttgccaaataatatccgtatattctcctgtgatcttttttataatttcaacttttattttagattcatggggtacacgtacaagtttgttacatgggtatattgcacgatgcttaggtttggggtacatatggttc

SEQ ID NO: 819806 - DNA, 618 bp, Homo sapiens
tggttgatattttatgatagtatggagttaattattaacttatatttaaattaatcatattttctggttttcactaytgaatacaatcagaaatgctttgcagttctttacaagggatgcctctattttaaatttatatctgacaagatatgcaagtcaagaatataagaagtgtgaacaaaacatagaattaaatcatgattgacaacttttggttccagaaactaggtgaaatatgcttcatatacgaagacaggaaagaatagaatgagaactcttgcaagatgggggtcaaaaatagtttgcttaaatatgctacttccaagtgaaatagtgagtaggcatttggaggtatgattctgtaactaagaaggaggttgggactagagctataaatttgaaggtcatcatattgtgattgatatttaatttgaataatattgatatttagccttagaactataggcaaaaggagtacacaagatgaggaattcatgaagaagaagaggtttctgccaaggagactgatacaagtttaccaatgaggaagcagaaaaagcaggaaatatggtgttttaaagcaagtttttttggaagcagacactgactttttgtttg

SEQ ID NO: 819807 - DNA, 596 bp, Homo sapiens
taaacctaattctgaaacaccaaaccattggcatattgcactgttttgcaaagagaatacaaaatgatagacaattctactaattgccactgaaacgtacctttatgttacaggactacaatctcaacctaaacttgacaggtgtatgccatgaaagactgctattatgatcaaaaggttaataacatttcagcaacatcataaattctcaggattatgtagttcagcatatgggcctgcaaaagatgatgtcagtctcaaaaccactacagcgtggaaatgacttcattgagcaatacagatggattcattctagtattgtaaagtcaacatagttgaacactggctacatcacagtatacattactgtagtctggatcaagttgtgatgaagtaatttcccttaagtttagtacttagaaaacctatagggtgatctccttggacttgatttgagagcagccttccattcacctactgctaagtaaattgacttttatcagctgcacatggatatgtataatttggaagaatttcaaatgagatccwtatggtttgtagcattctatgctcaaattttggatgcatgaagtgag

SEQ ID NO: 819808 - DNA, 623 bp, Homo sapiens
ttctctacctgctaatctcatggtagttcaatggccccacccaacacctgagaaattcaaatacctatgcaggtgaccttaggtcaatcttgtattcttcctatagtactgyagttgatgctcttttcaaagcaccaactgctggctggaggtcaaccgtcacaaaaccagcacactaaacaaaacaaaaccaaggaccttcacagagtacacttctctttcttgctacctctaccatagtagttgctggtatccacggctgagagatataaaggtggattatatcacaggactatttggagatactccctagtgccagcccagagcccagtagcactgctgggtggctagacccagaaaagaaagaacaatcactggactctcaggaagtcccatccctagggaaaggaggagagcaccacatcaagggagcaccctgcaagatgaaagaatctgaaaaacagcacttgagccccagatcttccctctgacagcctactcaaataagaaggaacaagaaaaaactattctggtaaatgacaaaacaatgttctttaacatccccaaaagagcacactagtgtatcagtaatggatccaaaccaagaagaaatcttttaattt

SEQ ID NO: 819809 - DNA, 619 bp, Homo sapiens
tatgtttggggtgggatgctggagattaggatgggtattgagatatgtcatatacagaatactagtgtaagtggtagaaagttttttttgtaagaggtgtatgagttgatcgttgcggaaacagggatatgctgtttgaattcataaaaataggttaagaggaaggtcttggtaatgaaatatgtagtatagagtttggtgaatatatagtgtgtaatgttcctagaaaaaatgtagtagttagggcatttattacgataatattcatatattctgttataaagaagagggcaaatggacctgcagtatattcgatgttgaaacctgagactaactctgattctccttctgttaggtcagaaggggctcagttagtttctgctaatgtggagataaatcatattatggctaggggtcatgatggtaggagcagtcagagggactcttgtgttgtgatgagtgtatataaattgaatgagccgcttctcagtaggactgataacaggatgatggttagggtgacttcatatgaaattgttcgggcgacagcttgtaatgcaccrattagtgcatagtttgaattggatgcccatcctgatcatcaaatagagtagatggc

SEQ ID NO: 819810 - DNA, 613 bp, Homo sapiens; identical to SEQ ID NO: 818375

SEQ ID NO: 819811 - DNA, 587 bp, Homo sapiens
attttgccatcattcctgaatagcaatacatggtgtcattgaaaacacctcctggcaaagaaggtgtgatttccacgggacaatgcggatgactttttaattaagattcttgtcttcagcctgctgccttaccaggtgagttagaagaaaactgagggtgtgggagtgcttgggaaacaagagagcccttgctaattggagttagaaataggagaaaagtggccagcaaagcctctgcagagagaaaataaatattcgtgccatgtggaggtgggagttggagagggtggtagctgatatgaaataatctattattgcaccttcctcactaacaggactcttgtgatataacaggaggcatcaacctattctcatcaaagagaatgcaagttttatgaacggcattcatttatcagacctgtgtaggtaaaaacttctccttatcaggaggaagtatacttattagttaatactcgaagtcaaatacatasatttaagcttagacagcccatttatgttctatgagtctcatttccttcattttaaagtgggggtaataatttgcctaatagcattgccttgccaag

SEQ ID NO: 819812 - DNA, 343 bp, Homo sapiens
ccatagaagtgatgtaaatgacaacacatttcaggagctagcccacaacccatttaaaccatgatgttcagraggtcccttctgactggaactcagtgaaatagagcacctattaaaatcatattgaaaccttatgctagtgatatcatagatcttaagtatttggtgcaatggctccaacagggagtgagctggggaaggtgagagagtcagagacagggctcaggacttggggatgagagggtggggctaaatatctggagcaagactcttaatgcagtttggagtgaaaagcaggaaagagactccaagaggatgtgcagggaaagggatgtgaggcaaa

SEQ ID NO: 819813 - DNA, 552 bp, Homo sapiens
tagattgtttttaagcaacatttagcttaaaacacaaactcacgtacagctggacaaaaatattttctttttaaatatccttactctataagcttttttcattaaaaaattatttttacttttaatttttttttgttaaaaacaaagacacaaatatacacattagcctgggtctacacagggtcaggatcatcaatatcactgtcttccacctccacatcttatcctgctcgaaggtgttcaggggcaataacacgcacggagctgtcatctcctatgataacagtgccctcttctggagtacctcctcaaggaactgcctgaggctattttagagttaacttaaaaaaaataagtaggagtacactctaacaataaaaagtatgtaaatacataaacccagtaatagtctattatgattaagtgttatgtactatacataaatatatatgctatactattgtaagactggcagtgcagtaggattgtttacgtacagcgtcaccacaaacrtgagcaatgcattgtgctacaacgttctgatggctatga

SEQ ID NO: 819814 - DNA, 536 bp, Homo sapiens
accagaaggctttagtgcgagagtaccacatgctgaccatctgtgaggcgggagaaatattgtmtagggagaccaaatcaccctcctttttcttgaaaataatatattaacctccttatatacagatgttacattttctccattttacaaagcttagctttataggattctcaaatacattgaaggaaacaatttccttataaaattttacttatatctaaatttccagaaaataaattttatgtttgatgcttccttttcctaacagaccatggaaacatcaagggaggcgtgtatcactgatgtgtaccctctgtaccgtgttcaaagcagttgcacaaagagtaatgcgtttggaatgggaagcctgttggtagccagcgatgctgccacattcaagtgggcatccccgcccccaattacctggcctctcaactaagcacagggctttctctctcttttagaggtgactttctagaagattattggcaaattggaaaacaaaagtcctaattgtcacatcatttgttaggatg

SEQ ID NO: 819815 - DNA, 559 bp, Homo sapiens
aaaatcccggtgctgaaataaacatatgccctgatgtattagtggacacgttgttaatctactttgtatggctggttggttgtttgaaaatcacataaatacagccctaaattcagttatactgtacacagtattggcagagatacatggtttccaggatgttctaagggagctttggataggtgcagccttcagaggtcagcaggtatgaccttgcactctatgtgggctccccttcacagcacgtgttcatccaactgacaaaatatttccagtaacaaaagcacattctatttttggacaggtctaattattcttccatacattgaactaaaatctgccttcctgtaacagtcacacagtagtctgaattctgaattctggtaaagaatccccgtctcattgaaatagcccatgagatcccaggaaagggtcactttaggctcttttgcaaattaggcttccccacttctttcaggcgttcatgtaacaacattcccaggctctgcaccaytctgcctcttgatgctcttcaatttattaacatctggcttaaaat

SEQ ID NO: 819816 - DNA, 567 bp, Homo sapiens
gtatatatcatgtcttttttttttttttttttttttggagggggccttgctctattgcccaagctggagtgcagkggcacagtcatagctcactgcagcctccacctcctgggcttaagcaatcctcttacctccatctcccaaatagctgggaccacaggtgtgtgccaccatgcctggctaatttttattttttgtagagacagggtctcagaagttatccaggctggtctcagattcctgagttcaagcgatgcacccaccttggcctcccaaagtgctgggattacaggcataaaccaccacatccagcccatgtctgtattaagttgattatatacaaagcagtttaatgggtcaattaagagcccaaccttcgcatcagcctgtctgggtacaaagagcttgttagctataattctggacaagtaaccaatctttcattttccccatacataaactggggaaaaaaattctacccgtctcatttggttattaataaacattaattaacagataagcattaataagaattattaattataaataagtattaataagaattaa

SEQ ID NO: 819817 - DNA, 567 bp, Homo sapiens
gtatatatcatgtcttttttttttttttttttttttggagggggccttgctctattgcccaagctggagtgcaggggcacagtcatagctcactgcagcctccacctcctgggcttaagcaatcctcttacctccatctcccaaatagctgggaccacaggtgtgtgccaccatgcctggctaatttttattttttgtagagacagggtctcagaagttatccaggctggtctcagattcctgagttcaagcgatgcacccaccttggcctcccaaagtgctgggattacaggcataaaccaccacatccagcccatgtctgtattaagttgattatatacaaagcagtttaatgggtcaattaagagcccaaccttcgcatcagcctgtctgggtacaaagagcttgttagctataattctggacaagtaaccaatctttcattttccccatacataaactggggaaaaaaattctacccgtctcatttggttattaataarcattaattaacagataagcattaataagaattattaattataaataagtattaataagaattaa

SEQ ID NO: 819818 - DNA, 621 bp, Homo sapiens
aacccctggtagggtcccatggtagtcctgtctctttttggcagccagttaggttctgctgaggtctagctcccgacacacacrtggcatttgtacagtcactcattgctcctgcaaacaaggctgtactgttcccactgctgctggtttctctggtcactgccaacctttataccatcactatggatggctgctggtgctcacgctatcactcagtactgccatgctctccccagcagggataagacattcgcagttttcccagagggaagcctccagtttccatggtgctcctgctgtttcagctctatcttttttttttttttttaattgagactgagtctcgctctgtcgcccaggctggagtgcagtggtgcaatctcagctcactgcaacctctgccacccaggttcaagcaattctcatgtcttagtgtctcaagcagctgggactacaggcatgtgccaccacccccagctaattttttttgtatttttagtacagatggggtttcaccatgttggccaggctgttcttgaactcctgacctcaggtgatacgcctgcctcggcctcccaaagtgctgggattacaggtgtgagccactatgcccagcccatc

SEQ ID NO: 819819 - DNA, 601 bp, Homo sapiens
cagttttccaaaagtatatcaattcttggtaaagaccaagtgaccacttcttgctaaaattctaaatcttacaaagtaaaaatcttccctcaatttatacaacaattgcattcctggagaatgcattatatacaaaaatcatgtaaaaatacattgtgttttttatgtatagcagaattatctgcttaattataaacaggcttttttagccatataaatgtccagcaggacatttaagggttacgcaggaggtgggtgggacaagtcctcatcccatggggctgtctcacatggtgcaggacctctcgcctatcatctgagcccccagcctctctgtgccagtaaccctaacctggcattatgctaaccaaaaatgtccctgcatttccaaaacaccccggttaaaaaccactgagataaataatcagcttgttttcagcacgaattattagaaatgagacctctacattttattaamtataacaaatcgcatgcagcaccaggaaaatgttcaagataaattcaaaagttttattgcaccaaatgccacagaaaaatggatcaaaataatacataaacaagttaaaaaaaattcccacac

SEQ ID NO: 819820 - DNA, 509 bp, Homo sapiens
ggcaaagtagacgtccaaccaactrcacaaacctgtcccgtgtcattcgtgggatcttggcacagtcggatcacctgcagggaccagaccctatcggggatagagatgtttgccatccccacgggaggctggcttgcttgccagcgtgttgtgggtggatgtcagtgggtgacagcgacggacgaaggtgtccgatcccgtggctggcgtccaccctagcccggggcaaggggctgacaccaaggaaaggagagaagcatgttgcgtgctgggagctggaagaaggagtccagggtgtccagggggtgcacagggctggctggccaggtctgggagtgaggctgtgcagtcaaacggaggttgtgcagatgcctggggcgttagggcacctcgcgggctgcctatgccataggtgggagggatcccagctggtggcggagctggcgtgagtctgaagaggctgaaggaggccagggctgggggatatgagtcgtctgagagaggggcat

SEQ ID NO: 819821 - DNA, 637 bp, Homo sapiens
aggaacatgtggagatggtacctatccccagcgccaagattcgctgtgggactttttttcccctcccctccttagcacagatgagcccagttctacaaccctctattcaacccgtactgatcttattgtttggctgattccccaggtcaatggcagaagtcagtcgacttcttgccaaaacccctctgtaggggcaaagtagacgtccaaccaactgcacaaacctgtcccgtgtcattcgtgggatcttggcacagtcggatcacctgcagggaccagaccctatcggggatagagatgtttgccatccccacgggaggctggcttgcttgccagcgtgttgtgggtggatgtcagtgggtgacagcgacggacgaaggtgtccgatcccgtggctggcgtccaccctagcccggggcaaggggctgacaccaaggaaaggagagaagcatgttgcgtgctgggagctggaagaaggagtccagggtgtccagggggtgcacagggctggctggccaggtctgggagtgaggctgtgcagtcaaacggaggttgtgcagatgcctggggcgttagggcacctcgcgggctgcctatgccataggtsggagggatcccagctggtggcggagctggc

SEQ ID NO: 819822 - DNA, 588 bp, Homo sapiens
cccagtgcctggagagtcctccttccctagctaagcgctgcyctcacataccacctcctccagaatggcaacagccctgtttgtgtgctgttactgcctaccaggcactggtgtaagagcatcagcctctttcatccccatggcaaccctgtgaggtgactcctattagtgctcttgttgaggatgaactaataaatgaactaataaataaaaggtgggcctagatcggaatgcatatctagccctaagagcgggattctggcaatgtctggggttaggccctgggccaaatggaaactgataacaaaagggactgggaggagctacaaacctgaaatccgctttttcctgcagtagatcaaggccactacagcagcaacaatggctgctacagcagtcgcaatgaccacagccacaatgatccccattggtgaagagctgcccatgctgggcactagggaagacagacattagggcaggatggggggttactattttaatgacaacgtttgtattctccctgtcccacctcccacctccaatgctatgtcccagtgcttgtcacctgaagctcttctgtgtctgagt

SEQ ID NO: 819823 - DNA, 544 bp, Homo sapiens
aaaagcattatttgggaactgatgaatgtccgtattgaaatgaaatcctcacaatttacgtgcctcggccgcagctccagccgctccctccgttcggggtccctgacttcccgcaacrtacacgtgcatgtgcgtacacatgctcccgctcaccgtcgacaggtttgagattctcgcctattctggatgtgaaaatgaatcttgagaggtcccattagtcagaccaacctggccacgggcattgaagcgtggagatgcagcagttcgtggggaaaacccaacggccaggctgaccaaagcgcatgtgcggggttggggttcctgacagacttctagccgaagtttgcttcccattgcctgacctacgctctctatcgtctctccaaatgtcaaggaacatgtggagatggtacctatccccagcgccaagattcgctgtgggactttttttcccctcccctccttagcacagatgagcccagttctacaaccctctattcaacccgtactgatcttattgtttggctgattccccaggtcaatg

SEQ ID NO: 819824 - DNA, 541 bp, Homo sapiens
aaaagcattatttgggaactgatgaatgtccgtattgaaatgaaatcctcacaatttacgtgcctcggccgcagctccagccgctccctccgttcggggtccctgacttcccgcaacrtacacgtgcatgtgcgtacacatgctcccgctcaccgtcgacaggtttgagattctcgcctattctggatgtgaaaatgaatcttgagaggtcccgttagtcagaccaacctggccacgggcattgaagcgtggagatgcagcagttcgtggggaaaacccaacggccaggctgaccaaagcgcatgtgcggggttggggttcctgacagacttctagccgaagtttgcttcccattgcctgacctacgctctctatcgtctctccaaatgtcaaggaacatgtggagatggtacctatccccagcgccaagattcgctgtgggacttttttcccatcccctccttagcacagatgagcccagttctccaacctctattcaacccgtactgatcttattgtttggctgattccccaggtcaat

SEQ ID NO: 819825 - DNA, 800 bp, Homo sapiens
tatcacctcagacaatgaggccatttcattgtgggggcccatctaggatccaaagtagattcatcagaagggtgagkataggagcagactccaaatatttactttcatttcagggccttctgccctcaattttaaaattaaactaaaaactgagtgtctgatggccagtttaaaacctttaaggtggccacggatctcaagactcagatgacacacttggtgggaggatcttggcaaacaccccagtggcctcagagtgctgggaaagttcgctctgtttaaaccagtttcctttcatggagatcctagctgtcatgttgggctggaaaaggtccagaggcaactgatggttccaggcaagggccacacccctgtattacctgaaggcttctggagtaacccaagcctccaactgccacactgttgggtgtcagcaacaggatctccagcttttcctatggcaattttcctgctttcttgtccgtaatcaccatgtctcttatccagtctctgtatgcaatgctgtgggaattcatacagctcaggaaaataatcctgttagtcaagatcaacaaatgccatcgtaaccaggaatatagctaaagggaatgccatttttgtgatttttctaggaacaaaaagtttcgcaccaccaccccacccttgcccccagtgaacatctctctctctccccttggtttggagagcacatggtatttaaacagcgccacctagtggaatgagaaatcctctccatgagccatcttggcaaagccctttactgaaacactctattttct

SEQ ID NO: 819826 - DNA, 607 bp, Homo sapiens
agctattgctattattataattttaaaattatttaatccactgactatgactgaaacaactttaacattgccctcagcttgagtaaactatagacaggcttcttcctgactctaggccccttactcaccatttcttagagcatttattttagaaaacttgtcattttaatgtctttatttgcccctttgtgatgtaattttttaaaaatgtctcttgtcagttatataatccttatgtttctcagagacccccacccaggcccatcccctctgaaatgtagttatcaaggaatataggcttcagatctcccagtttctgtaggaagtagtagatacccacctacctaacttcggtgtgtatcttgtagttgtaaaactacttccccatgatgaagataagataaagtttactttcttttttggtaaagggaactagcaaacacagatggtctacgatcccccacttctcctcttaaaaactctccttccctttacttcagcagagctgattttcctggcttcctctgtgctctccctcctattgctgacaatagtgttagaggaatatcaamttctatttgctcatcggtcccagtgcaacttttct

SEQ ID NO: 819827 - DNA, 620 bp, Homo sapiens
taaaggcaatgagcatttaaaaaataaaaccacaaatgtagaatattgtcaagatctaatccactgacttttgtgaccaygtcttttgtacataaggaagtgaaagagtaaaaaaaaaatctagaaattttgaacatacataatgatagtatatacaataaagaaggtaggggttgggatcaagggtttggtagataagggaagtggctacaaatgctagcagatttccttggccaagttacattttaattttcttatttattacttattacttcttaacagagctttgaggattaaatgaggagatatccattaagcactcagcatggtgcctaaaataaaataagttcaataaagattatatattatttattattaatagtagtattgaatagagatcaagcaacattgctaacaagtttagctttgaatatattaagtatgatattttacaaaaaattccaagtgaatatgtggagtaggaaatttgatgtttgcctttaagctcaagagagactttaatctttagatgtacatttaaaagccatcagcatagaattagtaggtgaaaccatcaaaagtagaagtcaataacatttcattatttaaacatgtttcta

SEQ ID NO: 819828 - DNA, 600 bp, Homo sapiens
tattttaggttcattcttctgcatatggatatccagcaccatttattaaagtgactgtcttttccccagtgtatggtctcatcacttttgtcaaaaatgagtttactgtaggtgtgtgaatttgttcctgtgktctgtattctgttccattgttctatgtgtctgattttataccagtcccatgctgttttgattactatagctctgtagtataatttgaggtcaggtaatgtggttcctccatttttgttctttttgcttagggcagctttgtgtattctgggcctttagtggttccacatgcatttcaggatttttttttttgtttctgtgaataatgtcattggtattttaacaggaattgcactgaatcgttagactcttttgggtagtataaatatattaacaatattgattgaatccattaacatggaatatttttccatttgttgataggatgtatcacattgattaatttgcatatgttgaaccatacttgcagtccagggatagctcctatgtggtcatgattattaactttctaatgtattcttaaattctgattgctagtcttttgttgaggatatttgcaccaatttt

SEQ ID NO: 819829 - DNA, 541 bp, Homo sapiens
atgattttagaatattgtggcacatttcctaaatattccacccatggaaaatcagtgatgtctgagtatatttaatggttccttcaagttccttcaaaaaagctacagattatctaatgtccttctattacattggactatctttggaatatgctttcttggtccttgttcaaatccacagaccagtcaaaatatcacaatattgcctcttcagctttcctatgcagagaattcaggaagatttgtgaggccttgagtttccctcacatattatagaaggtataaaggtatttcacagcagaagatatacaggacagcaggctgaatagccagacagttaaataagaagtgctgagacagattctaatgtttgaaagtgcaagggccagtgaggacagtgatgtcaaatacttgtagtggagaacgagagttgagagagaacagcgcactgagcatcctctattattagcagccaaattaaacatgtagcatacctyatttaatccacacagaaattgagagatagctatctacacttgag

SEQ ID NO: 819830 - DNA, 556 bp, Homo sapiens
tctcagtgactttccaattggtaaatgcaaagaacattttattcaactgagctctgataagtgtaatactcttgatcactccctttttcattggcacctatttttctgttcatgccttaagtgctagtatcccaagggcataatccttgacgcataaatccattcactctgcacttcccagggatctaatccactcctgtgattttaactgctacctacatggttaatgacacttatatctttatagccataacttgtcttctgagcttcatatgtgtatgtacaaattgctggtaaaatctgtaattaaatatatcacaggaactttgaaattacatattttaaactcaacttatcctacaccccaaatgtgttgtctttttatgttccctgtatcactgaatttcataatttttcacccggtttccccgccaggaagatggtagtcatccttaaatttttcatcttgcttagccccaaaatgawatctaacaagtctcatatattggaactttgtacattcttttggatctattcaattgtaactaataatctc

SEQ ID NO: 819831 - DNA, 604 bp, Homo sapiens
taggctttgtcaggtcatggttgccactataacaaataggtctggttacttttgttaaaaatatatttttaatatgcaaatactaagagagcaatatgaaaataataaactaagttttagaggagaggaaatttttcaatttgaactgaagaacataaggcatcctatcctacccacccaacacttcccaggatattgcagacacaagataaaacaagtagaaaaattacatcatcatttctatagatgcagaatgaagcatttggcaaaattaaacactgatttagaatacaaacaataggagtaacttatcaaataggaatagaaaaaaacctttataatttaataaagaatatcttaaaaatcctaaggcagagaacacatgcaaggttgaaatactgaaatttttctttctgaaactgctaataatgcaagaaatcctgttattatcacttgtattcaacattgagctaaatgatgtagctagtggaatgargaaagaaaaaccaaccacaagttataaggaaataatagtattattattcctgaatctatcagtatgtacctaaaaatgcaaaagagtttataaacaaataatcaaaat

SEQ ID NO: 819832 - DNA, 606 bp, Homo sapiens
aatccaatcaacacttaatattaaccatcacaataactcaaagtcaaarcaatcaaatatttaccaacaagatgttgcaaaaataaattgttttataactatacattagaataatttgaaaaagtaataagggcaaactaaagatgtacacaaaaactttcattactgatatggtttggctgtgaccccacccaaaatattatcttgaattttaatcccttattgtaacccacacctgataggggaaggaacttgtgggaggtgattagatcatggggacagttcccccatgctgttctcatgatagtaggttctcatgagatctgatagttttctaaacggcttttcccctttttgctttgcacttctgtctcctgccaccatgagaagaaggacgtgtttgctttcccttctgccatgattgtaagtttcctgagccatgcagaactgtgagtccattaaacctgtttcctttataaattacccagtctcgggcagttctttatagcagcgtgacaatagactaatgcaatttccatctgtaatagagtaacagagatcagagttactctactaccttaatcaaccagaaaagtaatgttaagt

SEQ ID NO: 819833 - DNA, 505 bp, Homo sapiens
aaagcaaaggtggtgttgggggaaaagaatctgaaaatgtaacactgttaaagagttctgatttaatttgctagtgtaatacagaagagawtcacaaataaaaagtctttatttgcttgaagagcctctgaggtttttcaataccattgaaatgctttcctcaactcaagtacttttcatatatcagagaagtggcaaatttaacaaagcctacattaacgttccgtatttctattctaaataaaatgcttcagtaagtaaacatgagtattcagtaatgctgcaactggagacaatgaaaaaagctcctgtttcataatatattgataagtaaattattttaaaagaagcaaacagtattgttgaacagtgaaaggctaaaccagtcataaaatagaaactacttgagtacctttgtttattttctatgacaatacaaaaaaaatgttggcatacatgtgttttgtaaactgtaggtattttgtgtagataatagtcaaaccca

SEQ ID NO: 819834 - DNA, 632 bp, Homo sapiens
aggtttggctgtggaagtgcctttctagatcaattttgcattagtttctgctagacacctgaggtataccatagaacttggatcaatttttaatataatattcaaaacttgaggcttccctgaataaatgagtagtataaatttaaatcccagtcttcatgaatccaaagtctgtggcttcaacttctcaggagagatatttttcctttcttccagagctcatacataatcaaacatgtttttatattatcatctgcctttgctgttaggtgtctttaaaactctactccatcattaccttgagaatcccaattttctgtcaaaaagtttgttccagtcttctactttataagaagctgaggtcttgacacctattgcaatggcagattataaaagtcttgccactactatgttacatcttttatccaaactctatttcaatcccacccctggggaaagtaactattcatgtattcacccctgtgaaaggtctcatttctttgcaatttcatctttggagtatctgaaatcttcccttctctcctggacactcggctattcctttttttktgtaatgcagaatttcagattttgtaaaaaagattttaaaattgcttacttcaaatgttaga

SEQ ID NO: 819835 - DNA, 587 bp, Homo sapiens
atatgttaactcaagcacgtatgcacatgcacactcccattcacagagtcaatttttgtttcaaacatgtaaaccacatttcaaaaaataggaactatttccccttaagtatttttktcttgtttcatttgcaaatttgttaaaagcagatagaatcttccattttttcaatcatgatgataaaatttttgatcagaggatttaccaatttgagtcatgtgattcatttcatatatatcctatcaaaatattattcctatcgctcatcctgtaaaaatcaagtctgaatgaaaaagttttaatctgtcatgtggaaataagtgtgtgtgtgtttttagtttcttctcaaacaaataacacattatacaaataaaaaatagtggtaccttctatgatatttacctgctagatctaaaccttcccattatacttaattcagtaggagttgagtacttttgtaaattgtcgtcaggtcatttgatttctttatttctcttaaaataaagtctgcattcatttacatttaacacaattgtagtggttctgtaatttagctacataataatgtcattgctgagctttaagaa

SEQ ID NO: 819836 - DNA, 611 bp, Homo sapiens
cagctagccttgggatgactatgttagtgactgtccctgctttcaaatagtgtatcacctagtgggagcaacaaatatatatgccaaaagagaagtacaaacaaaaatttaaaataattccaaaatgtgccaaaaaatagatcattttcaggaaataatttctgaggcctttaagatggttacagttttgatcagaagggtagagatagtctagttgatatcccaaatcttctatttatcttgaattctccatcacatgcctcatggctccaactgtatacatacttcttccactcctcattttcaggctcttcgtcacttttctcaattggctgattactcttgcttcagtctttgagaagattgaggactacatgtactccatcaaattctatcttctccatttggaattttatctgtatacttctaccttcctcttatttcacaggaagatgtacccttaggcctttcaacttgtggccactacttaaaagtatattttgagtggaagtgacaaagaagcatttgactytcatatagaaatggcactctgtaaacagtaattgttacctggtctgaggcaacacctgccaatatacagtcatgcactg

SEQ ID NO: 819837 - DNA, 405 bp, Homo sapiens
ttaatattaatagatacttttccctcatgaatgtgttgttttctggataaatcatagagactgtgtgttcggtgagaaaaaccagttataaaagggtatatgtaatgattggattcatgtgaagttcaagaacacataaaatgtgtttatgtggatagaaattaaatactattaataatttctggctattgaggggacaggtattgactggtaagaggcatgagggaatcttctgcaggcaacgggaatactttgaatgtttaaatgtatatacatatawaaaaattaagctttacactgaagatcgatccactttccttcatataaattgtaatcagtttttaaaatgtttttttatcatgccaaaacaaatattttaaaaacctaaatattaaacagtattaa

SEQ ID NO: 819838 - DNA, 492 bp, Homo sapiens
tccctgtgtctgtagaaataagcttaagtagcctgatagcatacttttcaatrtaagaaataatttaatcgaattatacaatctgtatctcttttagaatcatttcatttcctaagtaaaaaatctacactaagcaaagtctcattcagctaaaaaaaaaaaaaaactgccttgaagaggtgacacctggaccacatgaataattttatgcatcccctgctcattcacacatagcagaggatgacaaaagtttagtgtcatgtgatcccctttcttctcagaatccctatagcattgtgataaaaagaaaatcagcagttatactacctagcttcaaatctgaactctataaattattgtatgccctccttgtggtatattacttaatatttttaagtccagtttacttatcttcaaaatagaaagaatcatagtaacctacagtgatggttaactttagacgtcaccttgactggattaagaaatacccgg

SEQ ID NO: 819839 - DNA, 612 bp, Homo sapiens
atatatactattaaatgtcgatttgaataggaatgtttggttaaaaaagaggtgattaaaaaaagtcagcaggacatcctcatcaagrgtgattaataagaaccacagccatgtgcaagtgaccttaacggaagacatgatgtcccctgtccagctatggacttctctgatgcagtagggaccttcccaatggcctcaagatagagatgattatatgactgaagggatgcactgatggaagtataacctctccactggcaagaagaaagtaaggcagtgttaacaggacacctagagcatgccaatgtaagttcctcactcctttatagattgtgtggcctatttttagtctaggcacctgcctctttccccctctacttatcatctaccctgtgcataatgagaaatgtgagaagcagcagtaaaacaagtttttctatttggccagaaaaataggtttaaatccatttattgtctcagtcacaaccaacatgaaagtatgtaaataagatctgcagtaattttttaggccatgcagcaacttttggtgaacattaagctagttagtaataatttttaatgtgcgaattaatctgtatatgtctaagtgac

SEQ ID NO: 819840 - DNA, 674 bp, Homo sapiens
ggggcaatgagggcagctcgatgggatcctacaggcgccyctcaccacaaacagtctgggtgccatagttggcatgttgatgatggaaggcagacaggttcctgggtggaaatggtcagatccccagtgaaactccaccttcaagctaggaatggcctgaagcctgggggccaggctgccagttccaggcaaagtccacagcctggagtgaaaacttcattgatgacttttcggccactcagatggtgctttttccgggcccttccattgccatccatggaccaatcagcatggcttattctcttctgagcccataaaatcccagactcagtgagacttagaccttgggactactgcttgagggaaggagaacccactttgggtctcctccactcaccaggacaacctccctgcagaaagaacctacacactctgcattgcctctcccctgaggaactgtacactcgtcagaaccacatacctgtggaaaggagctactcactttcacttctggcctcatgaaatctgttctttcactcaataaagctcctttcttccttgctcactctccagttgtccaagtacctaattcttcctggttgtgggacatgaactgggtacccgcccaatggcaagactgaaagagttgtaacaaacagggctgaaacattccc

SEQ ID NO: 819841 - DNA, 646 bp, Homo sapiens
tttaagaactataacatgcaaggccatattaagcactgtgagtgactgcctgaaagcagtttataatgtagtgtctgtgtgcacacatrttgggggaaacaggttaaaaagacagcatacaaaatagtgaccgtctgaaataatgaggtgagcattgtgtgaaagcacaccatcggaacaaagaaagagagaagttatgaacactccccagcatgcctctttagcatttcagaattttcataaagcctaccaagccaccatttgtttccacaaccagtcctagcagcagaccctcctcgcttccagtctaccaagtctaggtattctgctgtttggctgttgcttgccttttcgttagaccaactctcctctacctctagttgtacatctcacactattaccaagtacaataaaagcatcacatgccaccacactactattttgggaagccctgcaatgactaccagtgtaccaattaaccagtccaaccctggatataaaatgttagttcctcaaacacgtgatgcagaatgggaagatgagaggaagtggggtgagtagccacactagttactcttcagaaatagccacactacctaagcagaacaggttggattaaggtctgcacatgagccaaagctgagaa

SEQ ID NO: 819842 - DNA, 571 bp, Homo sapiens
acaaatgtgtgatattttcaagaaagtaggtatgaaaatgaggtagtttttatttaattttccattggaacttcacactgttctataaaatcaagaatacctttggactcctaaaaattaataaaccaaaaatgtgcttctaattaagaatctgtatttcactatcctcatatacagaaaataaagagaagttcatagaattattttgagacttaaagcttaggaaaaaattttgtaaaccgttaaattctatacaaatactactactaccaataataatatattcaactctggatatgctatgggagcctcagatttaaggtgaatgaagggacaaccttttagctctgacctgcagctacttctctgcctagctaaagcatttaggaaggatgggagggctcattatgcccaagtgtctacactattacaatatactaacatattatagtatattactgtatattgtatatatgattcaagcaccataataaggtgggagtcattgataaacgattaaaaggatccwctggttcttgaaaaatagcttattcaagggtcgtaatggggc

SEQ ID NO: 819843 - DNA, 574 bp, Homo sapiens
gtgagtgaattctcctgagatctgatggttttataaggggcttttcaccctttccctcagcacttctctcttgccagcatgtgaagaaggacatatttgcttccccttctgccatgatagcagttacctggggcctccccagccatgcagaactgtgagtcaattaaacctcttttctttataaattacccagttttgggtatttttttttttttcatagcagtatgggaatggactactacagatccttttaagcacaaggcaatttactgggttttcaccttgtccacatgaatctgctattttaacaatgtacaaagttatttagcttttttaaatttatgctttggctccacagttaaaggctgtaggctcctaggggttgagggactgggataatgtcatatatacatttttgtatccataacagcacctactctaaggccttctgcacagttggtttgaataaattttaattgatttaattgataataattagacaaactgaactaaatttttttaacagatacctgagtgccaagcwtaacagatacctgagtgccaagcataataa

SEQ ID NO: 819844 - DNA, 567 bp, Homo sapiens
agttactggataagagggttgagagaaagagagtcaaagacaactctgaaaacagtgtaactggctgagtaagtgatgattcaataaatagagaaaaagagagtaagaagaggaaggagagatttggtaagaaaatgactcaatcacttctgtaccaaaagcaaactagctgactggtgactaacaccctaatccaactagttcctggtttgtccgtttatggaggactgagtgacagagtaaaagttgatggaaagacgtaaagggcctctttcccaacaagggtaaaatctgctgctttcctgcttctcacgcaaccgagaatcctgagtagcaagcagccagactggctcaaatggaagcatttctcaatgcttgatacgacgttgatataagaagtaggagaatgtaagctgaagacagggagaaaaacatttggagctggcagagaaagaagcaggacactaatgtgaacaaatgtcactrtccactgggatgtgaccacacattaaatcacatttgtttactattttatgtccacaatgaagattcacatgagagaataga

SEQ ID NO: 819845 - DNA, 627 bp, Homo sapiens
taatgcaaaattgatgaaaaacagaaacattccttgttcatatatgaacatctatacatcatacagatgtgaggtctcccccaaatcaattttaaaacttaacrtaatttcaatgaaaatgccaacaagtatttttttttttttttttttgagacggagtctcgctctgtcacccaggctggagtgcagtggcgcaatcttggctcactgcaagctccgcctcccgggttcacgccattctcctgcctcagcctcccgagtggctgggactacaggcacctgccaccacgcccggataatttttgtatttttagtagaggtggggtttcaccatgttagccaggatggtctctatctcctgacctcgtgatccacctgcctcagcctcccaaagtgctgagattacaggcgtgagccaccgcgcccagcacaagtattccttttaaatgaaactaaacaaaataatacagaaaatccagtataaatagctaagataacactgaaaacggagaactacagggaactactagtccaatccaatgttaaattacattataaagcttcagaaattaatgcaaaagtatttatggctagtattgttatataaatagacaaatcagtgtgatt

SEQ ID NO: 819846 - DNA, 456 bp, Homo sapiens
gatcatattataagtattttctccatcttacttttttcaatagtatctcatcaaaatccttctaaggcaactagtatagctctaatggacttctttaatgggctacatatgacatgatatggatgtatcatgattcaatcagccattcagtcccccagtggcagtcctttacttcaagattactgtttgctcatttttttaaatttaaagcatttagagaccatttcaacaaagtactgacatctgagcttattctctcatctatggaataaaaataatatcacctattttaacaggctattcaaaggacaaaataagataaagtatataaaagtctctggcacaaaagggtaaatataaaatgacasactttttttcttttttcaaacactattaataaattatatataggactagccatatttggtggttttaaagatatttctataacttatt

SEQ ID NO: 819847 - DNA, 502 bp, Homo sapiens
gaaaccttatctattacgtttttttttacgttgtcttcatgtttaaaaatttttcttacttccaggtttttagctttaaattttcatatacatacagatagatcaacattcattttaatttcttttaatttcatctttcccagttatcactttaatgtactatatcagctaaggaataaaatacattggtataagacaaaactcccaaagcacagttgttcaaaagtatgctataaaaattaattctctcacacataatattctagatgtgggccagttgtctaaaacagcaagcaatttggtatatgtagtcttccagggacccatgtattttccatcatgttgcttctctattttagttttttttcttttgcccttatcttcagaatcaaagstggctcaccagcaaaatagccactttccagcctgtgatggcaggaaaaggagaacagagaacaaatagattcttcttaatttttttttttttttgagatggagtttc

SEQ ID NO: 819848 - DNA, 504 bp, Homo sapiens
cctagggtgccagtggagagcagggctgggggttcagatctttgagttccgcatggaccccactttgcagcaaaacctatagagagcaggcaggactggactccacagggastcaggcaggccatcatccccagcagctgctgtttgcttttgaagagctggagctcctccgattttcttttttcctttataaaaaaagtattgaggtacaagtacacacagggaagcacacagcttgcacagccaactttacacatttctacagccaaggattgatttgcctccccagtgaagatgcagaaccttcccaattttaagtgagagcacctcggtgctgcctgcccaggctcgcccctgacctcctggctcacccttgctctgggggcctgagcctggaaccccttcggggacagactggggatccaggcctctaacctcatcctgggtaggtcccccaagggtgctcagaggtccctcaaggcccttctaacaggaaagggggct

SEQ ID NO: 819849 - DNA, 512 bp, Homo sapiens
acactgattgtgggaatgtaaaatgttacagccactctaaaaaaawgtttggtaatttcttaaaaatgtcaacatgcacctaccgtgcgacccagcaatggaacccctgaacatctactacagagaaattaaaacctatattcacacaaaatcctgtatgggaaaatgaaatttattttatttattctattcctaaatgtcagaagctgaaaacaatccacatatccttcaatgtgtgagtggttcaacaaactgcagtccatgtgtagtgtggaatactacttagcgataaaaaggaagagaccattgatatgtgcgaccacctggatgaatcttcagaaaattatgctcggtgaaaaaagccaattccaaaggttgcatattatgtgatttcatttatacaacgttcctgaaatgacaaaattataaacatggagaacagcttagtagtcacctgggattaaagagagggtaaaggaagggaagagggtgtggctataggagccacaagt

SEQ ID NO: 819850 - DNA, 580 bp, Homo sapiens
ccaagaaccagaaaatatcaaactgaatgaaaaaagccatcggtagacactaatatcaagatgacagtgatgctaaaattatctggaaaaggttttaaagcagttattataaaaatgcttcaatgagtaatagtgaacatacttgaaacaagtgaaacaataaaaaatcaccaataaaatcatctcagcaaagaaacagtaaatataaacaaccaaatggaaatgttagaactgaaaaatataacaactgaaataagaatctcagtagatgggctcaacagcagaatggagagaacagaggaaagaataagtgaactggaagatacaatagaaatgactgactctgtacaacagaaagaagatggaatgaaaaacaaagagagcagagcctcagggacctgtgggactataacaaaaactaaatttatatcatttggggttccaggaaaagataaaamaagaagatggagctaaaaaagtactcaaagaaataataattgaaaaatcccccaatttgacaaaacccataaacctacggattcaagaagtgaatgaccaataggatacatcaaagaaattc

SEQ ID NO: 819851 - DNA, 682 bp, Homo sapiens
tcgatagatagattagatagatagatagatagatgctactaagtattgattagtgttaataaaaagcaaaattaattgaagtaccaatcatgtgcctcactgtgctaggcctttagtcctaataggaactttataaggtaggtaattttataactctgtataacagattaaaagactgaaattaagaatttaggtaattttccctagtagtcagccagcagataaatggagtcttgactcgttaacatttggaatgtgaaggccaaaggtgttgactttagcacttcagttcttgaatatgcctttattttattttaaacagattcttttttctttgagaatctccatacttggagatttttaaaaagaacatacatatatgtataagtgtgtgtgtgtttgcataaatcatagctacagcaaaaaacctcctcagaaagaatgatttaagttatattcaaaatggggtgatttagaataagtctataaatataaaaatataaaatctaaacttcaacaaaaaagctatgtcacggttttccatggtacattaattcaaagaaaacgtatttattttgctcccagtgagmtaccttgagaacaaacaaggatgaatcagataccaggcctattaccaaaaatcttataataataaagaggcaatgtcttacacaagaataag

SEQ ID NO: 819852 - DNA, 556 bp, Homo sapiens
ttccagcttttacccattcagtatgatgttggatgtgggtttgtcatagaygacttttattattttgagatattttcctttgatacttagtttgttgagagtttttaacatgaagcactgttgaattttattaaaagccttttctgcatctgctgagataagcatgtgattattgttttaaaattttgtttgtgaggtgaattacatttattgatttatgtatgttaaaccaacttcacaccccaggtataaagcccacttgactggagtgaattaactttttgatgtgctgctgcatttcttttgctattattttgttgagaattttgcatgtatgttatttagggatattggtctgaagttttcttatttcaatgtgtttctgccaggttttgatacaggcatgatgatggtcttatatagtaaattggggaaaagtccctcttccttgacttcttgaaataacttcagcaggattgctaccagtttttccttgtatgtctgataaaaattggctgtaaatatgtcttgtccagggtgttttctttttctggtt

SEQ ID NO: 819853 - DNA, 588 bp, Homo sapiens
tgacattaaacattagcgttctgtacaaatccttcctggataactttgtttctatttctagatcctactgagatggttgttagatccataagacacacatctacttatatgcctaaactatcttagtatacaattgtgcaactacacccttgacccaatttccagagcattttatttggatggactgagaactttcaaaataatcagtgctcattcatttttacttaatagtttatatcctaatttatctctttcctgtcacaattataataaagtaacaatgagaaactaggttgttccttccacatttgacttagaaatctcctcagctaactatccaacttaatcagttagaaattacatctttcactcagtggctgcaaaaaattcagctcagttttcttacactttatgacaagaatagccttccctccagtttcaaatagtgtgttcctcattaccaggtaaaatatcaccagaaaaactgtcaaagytcataatctagcaacattctattcataatatatgtattctctaagatagtagaagctttctctctagctctcctcattactttcggagtcctca

SEQ ID NO: 819854 - DNA, 608 bp, Homo sapiens
atattgaaattaggccagttaataatcctgcaatgacctgtagggggttcaagtaaagggaagagttgcacatctctcactctaaatcaaaagctagaaatgrttaagctttgtgaggaaggcttctgaaaagcccaaataggctagaagctaggactcttgtgccgaagagttagccaagtggggaatgcaaaggaaacactcttgacaaatattaaaagtactactccagtgaaccttctacaagcaaaaaattatgacttgatgaaagcttagatgatcattagcatttttttagcgataagatatttttaaattatggtaggtacactgtttttaagacataattctattgtacacttaatagaatacaatatagtgtaaacataactgtcatatgcattaagacattaaaaaaccaaaaatttgtgtgacttgctttattgcaatattcattttattgcattggtctgaaagtgaacttgcaatatttctaaggtatgcgtgtacctctcctcaagtgatcccattgccaatgttaaattaactcacaggatatagtgttagtaatcagcaaacagtaaagtcttaggaaaatagctagaaca

SEQ ID NO: 819855 - DNA, 608 bp, Homo sapiens
atattgaaattaggccagttaataatcctgcaatgacctgtagggggttcaagtaaagggaagagttgcacatctctcactctaaatcaaaagctagaaatgattaagctttgtgaggaaggcttctgaaaagcccaaataggctagaagctaggactcttgtgccgaagagttagccaagtggggaatgcaaaggaaacactcttgacaaatattaaaagtactactccagtgaaccttctacaagcaaaaaattatgacttgatgaaagcttagatgatcattagcatttttttagcgataagatatttttaaattatggtaggtacactgtttttaagacataattctattgtacacttaatagaatacaatatagtgtaaacataactgtcatatgcattaagacattaaaaaaccaaaaatttgtgtgacttgctttattgcaatattcattttattgcattggtctgaaagtgaacttgcaatatttctaaggtaygcgtgtacctctcctcaagtgatcccattgccaatgttaaattaactcacaggatatagtgttagtaatcagcaaacagtaaagtcttaggaaaatagctagaaca

SEQ ID NO: 819856 - DNA, 608 bp, Homo sapiens
atattgaaattaggccagttaataatcctgcaatgacctgtagggggttcaagtaaagggaagagttgcacatctctcactctaaatcaaaagctagaaatgattaagctttgtgaggaaggcttctgaaaagcccaaataggctagaagctaggactcttgtgccgaagagttagccaagtggggaatgcaaaggaaacactcttgacaaatattaaaagtactactccagtgaaccttctacaagcaaaaaattatgacttgatgaaagcttagatgatcattagcatttttttagcgataagatatttttaaattatggtaggtacactgtttttaagacataattctattgtacacttaatagaatacaatatagtgtaaacataactgtcatatgcattaagacattaaaaaaccaaaaatttgtgtgacttgctttattgcaatattcattttattgcattggtctgaaagtgaacttgcaatatttctaaggtatgcrtgtacctctcctcaagtgatcccattgccaatgttaaattaactcacaggatatagtgttagtaatcagcaaacagtaaagtcttaggaaaatagctagaaca

SEQ ID NO: 819857 - DNA, 453 bp, Homo sapiens
actaagccaagtgttaattccctaatcatcccactatttcaagctctggtggagggaatagagaagggtcatttctgaccattgagggacttttttctagyagtttctgccaaagttcgaaatagcagtcacatgatttctggtcaaaatgatgaacttgtgtgaacctcaaaaacactgaaagttcatctcagtttggtgatctaactggaagtaatttttaaataagaaaatatttttaagtccatggaaaaacactaaactcattattgtttcatttctcttttataaaaaatgtgatgtatgaaaaactgagggtctgctttaatttgacaataatatattttcttcagctttgatttgaactgttttaaagatctgtatacctgggactcaagaatctccgattcaatgctaattagctgaatgctacgggcaagtcatttaacatct

SEQ ID NO: 819858 - DNA, 479 bp, Homo sapiens
cacgtccccaccagactcaggagcccagctagcttcacccagtggatcctgcaccggggctgcaggtggagctgcctgccagtcccacgccatgcrcctgcactcctcagcccttgggtggtcgatgggactgggcactgtggagcagggggtggccctcgtcggggaggctcgggctgcacaggagcccactggaggtgtggggagtctcaggcatggcaggctgcaggtcccgagcccttccctgccctgcgggaaggcagctaaggcctggcgagaaattgagcacagcagctgctggcccaggtactaagcccctcactgcccaggccggtgggaccggcgggccgctccgagagtggggaccgctgagcccacgcccacccgaactcgcgctggcccgcaagcaccgtgcgcagccctggttcccgcccacgcctctccctccacatctccctgcaagctgagagagccagctc

SEQ ID NO: 819859 - DNA, 634 bp, Homo sapiens
aaatacataaagtacaaactgataaaactgaaaaaggaaatagacatatccataattatggttggatatttcaatatttttgtatcagaaatgtatagaataagaaaacagaaaatgagtagaaatatagactatagaccagaacaatattatcaaccaactttatctaattgatatttatgggacactccactcaacaaccatagaaaatacagaatgatatacagaattcttttcaagtgcatgtcaaatatccatcaagacaagtcacaggaccataaaacaagtcttaaaaaagttaaaaagatcaaagtaataccaaaaaaattttctgatcacaatgcaataaattagaaatcagtaatagatagctatctgacaaatattcaatgttgacaaatgaaacaacacatttccaaagacctatggatcaaagacaaagtcataagaaaaatcataatatagttttaaatgcatgaagagaaaaataaaacatcaaaatttaagatgcagtcaagacaccaatagaggcaaataaggatacagggctaaagttaggcatataactttcttctccaactggtgtgaaagagaaaaaamttaagcccacataaggcaaaaggaaggaagtaat

SEQ ID NO: 819860 - DNA, 646 bp, Homo sapiens
agctgatctgattttggcttttgaaaatttactcagactgtagtgttgagaatgaccatgcagtaggtggggcaaaagtaaaagcaagtacatcttttagaaagcttttgcagtaattcatgtgagatgcaatgstttgggccagactggtagcaatgcggatgttaaaaaatcattagattgcagatatattttaaaggttattaaaggttattagcctttatggcagaattggcaaatattaatagattaggtagaggctgtaaagagcgtcagagatgattccaaggttattgatctgagcatctatagggatggagttgccattaaccaagaggagaaacgctgcagatagagaaaagttagattattgttactatctaaattatctgcccatctctagttttgccccctttcaactctcaactttttaaacagaaaacctgactgagtcctaagctaattaaaaatattcattagatcatcatctcttttaggataaagtccaaactccttgacctgatttcattttttatattttgtctctccctgttctttttcctcccatgcttcctacccttatcatcacaccattagtcaaataatacctaacatattagatatactatctttccgtttctaaaat

SEQ ID NO: 819861 - DNA, 568 bp, Homo sapiens
tgatattagagtaatgctggcctcagaaaatgagttagtaagtattccttcctcttcaatttccaagragggttttttaattttaagaattagtatataaccttgttcaaatgtgtttctttaaaaaaatgctttatttaatatatgttgtttatttattaacattgaagtcatggtcaatagttgtataactcacgcctgaatgaagcttatctcaaatacttatcgtcatcgtaaggcacagccttcttgtgcttagggatactagacagtgtttcagcactatgcatggacgtgcactttaaatagcaaaatcgccaacataaagtataaaatgcaaaaatgtgcattaaagagaccataaaggtgatgtttgcttacactatgacaactaaacatatatatatatttgcattatatatatatgtattcttatctatgcatttcatttcactctcttctctgttttagaaaaaaattggggagtaatagggatagaaagaaaatttttagttgacctatggaaattgttagtttataggaagattaagaacatagttagagtacc

SEQ ID NO: 819862 - DNA, 395 bp, Homo sapiens
aaacagaccatcttgtatggtctgtatgggtgcattataacttactttttacttccttattgatggattattatgttgtttttttactataattaaaatgattactattgtatataaatgtattttaacagtatatatattttgtatatttttggtagttatggtcatttgaagtgctaggttctactcagaaattttgctggacatattgtgatggccaaattttatgtgtcaacttgtcaattgtgtcaattttaagtgtcaatatagtgcccagtttttatcaaacactagyctagttatggctgtgatggcattttgtacgtttgattaacatctgaaacaaaaagaagaaattctacctcaatgccataattgaaatactacctgaattt

SEQ ID NO: 819863 - DNA, 564 bp, Homo sapiens
agcagccaactttctgtaactgtaaaatcaagcttgaaagtttgcaaatgcttgttttttggtttcaaagaatcttaytatgtgaaagcagatttttaaagtttttaaagcagatattcactgcctgaatgaatacctctcacataccacagtgagcatgactgaaagtttacaccattagctaaaccctgggaaaaactaatgcagtgagtcagagtttctggtgagggaggcacatctcttgcctgtttacagtagtattcaacaattgggggcagcccttccatatgatgccatttaaataccacaagttatgggccaggtgcggtggcacacacctgtaatcccagcactttgggaggctgaggcgggcaggtcacttgagatcaggagtttgagaccagcctgagcaacatggtgaaacgtcgtttctattaagtatataaaaattggctgggtgtggtggcgcacacctgtaatctcagctactcaggagcctgaggcaggagaatcgcttgaacctgggaggtggaggttgcagtgagccgagatcgcgccactgca

SEQ ID NO: 819864 - DNA, 637 bp, Homo sapiens
cgccgcagtgtattttatttattccatttaacacagaagaatgtgctacaccagagactggggaccatacggcgtctttgactgtgcctattgcagggtatttactcaactcacaggagcagctcsgagtcaggaactgagggggattgttggatggggtgtggttcctggcctccagtctttctcattggctggctggggttggtgaccagtgcagttttttctggtgagatgtgtaaatgttgcctggcctttttagcatcccagctcattaattcgtttatgcatttatcatttattcagcagagattgactgagtgccttttttttttttttttgagatggagtctcggtctgtctcccaggctggagtgcagcggtgcaatcttgggtcactgcaacctctgcctcccgggttcaagtgattctcctacctcagcctcccgagtagctgggattacaggagcgcaccaccatgcccagctaatttttctatttttagtagaggtggggtttcaccatgttggccaggctggtctcgatttcctgacctcaggtgatccgtctgcctcagcctcccaaaatggtgggattacaggcatgagccaccatgcctaacctgactgagtgtcttcta

SEQ ID NO: 819865 - DNA, 297 bp, Homo sapiens
gatccacgtattaatgtttctgaatactggaaactgtgctygtggctggggaccaggaataagtatagtggagtccttgctggcaaggagtcctttaacagaggaaaaagacagggcagggtatgacataaagaccagattctatttggagctgttgactcaaagagcaaaaggagatggccgttagcgtatcagacatagaagccatattccccatgggcaaaaatgaagaatgttctgtaagggtccttcaagctataccaccctgtggtcctcactagtgttcatggtcctgtt

SEQ ID NO: 819866 - DNA, 622 bp, Homo sapiens
aattttctttatatagttcctacagaatatttgtgatgaagctgytgatgaatacaaatatgatatgatattgatgatgtattgatggcagtgcctgcttttcatctttgctgcccatgagcaattgaaatgtagttgtgtgtgctcttttggagaacgattttaaatcagccgaaatgctctgtaatgttactaaccttctttgaactgagtcctctaaatttcaggtgcattttgttcaaaatcagttagaaatagtcaaaatattcagagtgaagcacccaaaaatgtaattttggaggcttttagctacttgaaatcatagaaaacaaagtttgcaaacaggaagatattcaaagttctacaaaaccaaaggagaaactaattaaacagcatcagcttaatagtgaataggacttaactttctcaaattctgtaattgaattttggcgtatcttgacttggaggaagaaactttagatggacttcctatttttaattggataaatttacaggctatattagaatgcagtgaaactgggatgtccaaaaagtttgctgcacaaaaatttggtgaaaacttcaaaaggattatttaagtcagtcatttgataagctttgt

SEQ ID NO: 819867 - DNA, 644 bp, Homo sapiens
tgcaaggaatatcaaattctgttttctgaatatgtcaaaatctcaatttccatacagttattaaaatgtgagtgagcggcaacttttattttgcttgtatattgttttagtgtctatttctgtgtaayaaatcacctcaacccgtaaaagcttaaaaacagtcattttaatatgcttgtggactgggggaaatgagttgagaatttagcaaagcttaccaaggagtggctttgctttattctccaatctgcagcctcagctgggaagactgggaggctggaggtaactggatgatttagatttctctagcatataatctttaacatgctttgtaaatctgagcaaaacagaccatgtgaatataattttctcatctgtaaaatgaagaaaataatattgtgtttttccatagttgtacataacatgtacatgtatggaatgtgtgtgtacatacatatatatgtgtgtacattcatgatatctctttctctaccttaagccacatttcctaaaataaaatgaattaaccacctcaatttacatggcaggaaaattcagtttgcttattaacataattcatctaccaatgaaaacattttaagtgtgttatggtgtttccaatggtgttaatacatgttgagagg

SEQ ID NO: 819868 - DNA, 633 bp, Homo sapiens
catacttacacaccaactagtacaacaccatttatgggtgaggggttctaaattactttattgttacatacacattttacattttaaaataaatttttagagtagtcactatgttccaggaatttgagtagtagtcggataattcttgtctaattcattgtgttaggtatacagcagggaacctgacagacaaaaatctggtggcaagttagtcgaaagactaggcttggagtacgaaattcattcagttatgccctcctacccatttggcgccccctttaaaggaattgtagacctattaaaataaagagaaaaggtagtgagtaaaaaagtccaactattattaaaatataatttttcaaaaaattagaaaatgtgattttcatacaaatataatatgcatgtatgtcaaagattgtactgaactcattaatattaatgaaccagttagatggtaaaaccagcctaaaaaacatttcggaagctaggtatttataggcagagtagtaaaggaatgtcaaaataagataactaaattggatacaaaaatgattacaatgactataattttgaggctctytcttccaccatactgatgttatttgcatctttaccagaaaaatctacaaatta

SEQ ID NO: 819869 - DNA, 547 bp, Homo sapiens
cctgcaataaacatgggagtgtctctttgatacactgatttcctttcttttggatatttacctagaagtcaggtttcctattcatatggtagctctatttttagtttttttaggaaccttcaaactgttctccatagtggttgtactaatttacattatcaccagcagaatatgaaggttcccttttctccacatcctcaccaatgtttattattgcctgtcttttgggtaaaagccattttgactggggtgagatggtatctcattgtagttttgatttgcatttcttcgatgatcaacaatgttgagttctttttcataaactgtttgccatttgtatgtcttcttttgagaaatttcttttcagattttttgtccattttttaataggattattagatttgttttcctatagagttgtttgagctgtttatacattgtagttattaatcccttgtcagatrggaagtttgcaaatattgtctctcattctgtgtgttgtcttttcactatgttggttgtttcttttgctgtgccgaagcttttt

SEQ ID NO: 819870 - DNA, 364 bp, Homo sapiens
gaggaggggagtgttctctagagaggggaagttcgcagaatggttcagataatggctgcatggataggacctcaccttccgtttctcaccttcacagacttttcagctggactttcttatcacaagcaaagcaaaggatcctggaaacattgtccccacactgctcgtgatgggaactggagcaggattggtcttgttctagggcacagtttggagctgtgtttgaggaggaactgagatgctccccttgcccaccccaatgttcacctaccaggcctgtggtggttaggcactgagggcagttkttaaaacgctactcttatctggaacaaaatgtgtctgttatctggcaaggaggcccatt

SEQ ID NO: 819871 - DNA, 561 bp, Homo sapiens
ctgctggtagagatcgtggtgatggtgcttgtgatgttggaggtctaaaatgcaagaggagacattatttgtagtcagtcacgtcctgtataatatatgagagcctggttctgtaggaacataggaacatctgactcccttttccataaggtttgtatttaagtagcttcagaaatgaaattagtggcagtttgcacttagttataggaatattcagttgcatgaagcttatgactttgggttccttattaatgtcataaagtcagaaatgggatggctggaaagttaagtcaggatccctgagctttctatattggccaagttgtgcaaaaagaattttggtgtaaaatggtgtctttgttcaaaacagtgcctggctaataggctctgatatagctctcaccaaagatctactgaaatatttacacacattaaaagtagaaaagtagacaactaacggccaacgtttgaagtgaagckatactgaccataaaaaaggactgcacagaaaaagacagacattgtcttggtcacatgaaacagacataatcgggaaaatga

SEQ ID NO: 819872 - DNA, 466 bp, Homo sapiens
tgtatttatttaaatagtctttggcattgyagtaagttcaaaactgatcataagtacctgacactgcacatgtaaaaattccagttttaaaaaaacctccagaaaagtctatgttgtcgtcataatgggttttatgatggccccctaaaatatatgtccttgttccccagaacgtgtgactatggtctcacttggaaaaagtctttgcagatgtaattaagttgaagttctcaagatgagatcatccttgattatccagttggttctaaatccaataacaatcatcttcataagagacagaagggaagacatagatgggaagcagtagagcatgtgaagatggatgcagagattacagtgatgctgccacaagccaaggaacgtctgatgccaccagaagctggaagaagcaaggaaggatcctcccctagagcctttgcagggagccctgacctgctgacacctt

SEQ ID NO: 819873 - DNA, 528 bp, Homo sapiens
agagatacacaatttttcctttcacttgagcaattacagaccattgtagggatattaattggcctaatttcaatattgttgtgtttaggaaatggagagtcccaaggaaagggagagagatgggggagcagctggtcagtggagtggtcagaacacacacaatttttatggattaagttcaccgtcttacatgggcacagtttgtggtgctgtaaagcaattagactagtaacatcaaagatcactgaccacagatcactgtaacagctataataataatgaaaaaagtttaaaatgttagaattatcaaaacatgacacagagacatgaaatgagcccatgctgctgagaaaatggcaccaatagagtttcttgatgcagggttgccacagaccttcactttctaaaaaatacaatgtctgcaaagtacagtaaaataaaatggagtatgcctataatacacaatcyacagggttgttgtaaaaataaatcaggtaatacacagaaaagcttagcactgtgcccaga

SEQ ID NO: 819874 - DNA, 568 bp, Homo sapiens
ctatagacaccttgaccttgaagttccagcctccaaaactgtgagagaagacacttctgttgtttaagccacccagtctctggtgctttgccacaaagtcctcaaacactcagataccaagtgtgatgctgatgaactggccacattcttctgactttgctccactgctcttccaatgttctctttggagacagaaagactaggtcaagaaggaatgagagaggaggccaaaggagaacaccttccaaacagagaagaccctctaaggtgaatagtaaagggggccacataagctttctgagagccacagtgcagaagtggcaggtcaggaggctgacaccagaggaggaaagggccaccatgagatgcaagcaaagcctaaactcaaaggctcctcagaacccaggacaaagtatgttgtgaaaaacatggtgtgcaaggayaacctatatgtagctccatggcagggagataggccaaggtgccaagagggaacacacagaggggccacggaaggatgactggatcctggacctccagcaaacagccacagcatgccctgagctgg

SEQ ID NO: 819875 - DNA, 536 bp, Homo sapiens
tatatattcataatgggtatatcgtcaaaggaattagttgttaattttggttgttatctttgtcagatatggtataagataatgttcacccaggaaatgaaattccaaacttttgaaatatcttcatagttagaagttatttaaaagcataggaattatctcttaacagtttgaaaacaatcaacataaaaagatcttcagcattatttttttcccttaacggtttgaaaactttcccaacttttttggtcattagtttatttagttatatcttgacacaattttataattattagcacagaattttaactagtagtttcttaaattttttaaattttttctacatatttagttatatctcatcctgattcctacattaatgtgccttttcctttattatattttccaagtcttaacaaatatttggttttctcaaaatcctagattttggaactatttactaactactttttactattacagaatttattaatttsttttatttgtttaaaattaattccctccacctgctttct

SEQ ID NO: 819876 - DNA, 528 bp, Homo sapiens
tcatcattatacagtaacaagtggtttgctgataaactggctctgaagaaaataattgaaaagccctgatttgtagcatttgcaacccttgtggtrtaaatgcttccactgtggcaaatttccaagttactgatacaaggtcattgcactcagagttggggcaagatggatacaactaactggccctcaggagcaagctccaacataccactgatagtaagtttcttttctttttttcccccgagactgagtctcactctgtcacccaggctggagtgcagtggtgtgatcttggctcactgaaacctccgcctcctgggttcaagcaattctcctacctcagcctcacgagtagctgggattataggcacgtaccaccatgcttggctaatttttgtatttttagtagagacggggtttcaccatgttggccaggctggtctcaaacccctgacctcaaatgattcacccacctcagcctcccaaagtgctaagattacgggagtgagtcaccatgcctggcctgaa

SEQ ID NO: 819877 - DNA, 602 bp, Homo sapiens
atccgcagttggaaatcaaaccctcaccaccatcactttatgcaccttcaggatggggctkccttggccgctccccaccccttctgcccatctgctgggatggcttggtgcccactccaagttggttggagcctatggaggtgccaggcaacaatgtgttttgatgggcagcctgcagaaggtggcaattgccatctcttgtgagtgaaggccgtaagcgctgccagccctggcatgccaggtctctgtacacttgttcacacctgttgactctccagtgccaagaaaagcatactcgagctaggaacgagggtagggggagatgacactctccaagcaccagcctctttgggtttccttgtggggacagatagaacttagggagatttggtcagcgagtttcagacccatacctgggtccagcactggaattgctcagtggctctttgtcctctaatgttagtctgtgcccactcaaggaaaggtgcccagctgggaaaccgcagcacaggtacaattcaatacatacacagccttatctctaagccagagaaaagaggaaaagagaaggccatgctgagtttaggaaacttctttccact

SEQ ID NO: 819878 - DNA, 231 bp, Homo sapiens
ttgtgtgaatatatgttttcaattctcttgggtatatacctagtagtacaattgctggctcatataaaaactctatatttaaytttttgaggaaactgccagactgttttccagagactgcaccgtattgcatttctgttagcagtgtgtaagtattccagtctctccaaatcctggccaacactcattattatctgtcttctttataatagccatcctggtgggtgtgaa

SEQ ID NO: 819879 - DNA, 494 bp, Homo sapiens
aaaacatcctgcactctataaagaaaaaataataattcagttaaagtgagwtctgtttctatgaaatacaggctaggctctgcttgactagcacactgccctgaagctgctgcatactctgaataatgataacggtctgtgcctacgggacccagggcctggctatacctctggactgtagtttcggctcagactctgggagaaagaggaggcagctgcttttacttaattgctaccaatgcaagatccatttttaaataagtaatgcaatttacactcataaagaataggaaaaggataaaggttccaagacagtatttgcaaagcagctttgcaggccaaaaaatgtttctaagtcataagtccaaagttcaggactgagctttctatcccgaatgttgagggcacctattgaaacttggaaccacctacttttgccagccatgcagcccgattccactcgccgtatgtctgcaggtagcggcaggcgtctg

SEQ ID NO: 819880 - DNA, 632 bp, Homo sapiens
tcatagatataatactagcactctcggggaaattggaattgagaacacaatgtgggaaccaccagcttagaggcaagagctgaagctctgaagatagtgaaggcctccctgggggagatgggaagagaggaatgaaggcagaagaaaagttgtttttctttcaaatcctctatattttatattattccctgcttccttttcctcctgcttcctgggttgggatggggatatctcctcttggcttataaaattatctagagaccaggagccaccttgtagagtaggggtccccaacctctgggccatggaccagtaccagtccatggtctgttagcaacagggccgcacagcaggaggtgaatagcaggcgagtgagtgaagcttcatttgtatttacaaccacgccccatcactcccattaccctctgagctcagcctcctgtcagatcagtggtggctttagattctcacaggagtgtgaaccctatggtgaatggtgcatgcaagggatctagattgcgtgctctttatgagaatctagtgcataatgatctgtcactgtctcctatcacccccaggtgggactgtytagttgcaggaaaacaagctcagggctcccattgattctacat

SEQ ID NO: 819881 - DNA, 582 bp, Homo sapiens
aaagcctgggagtcttttccttttgtgtatttcttccttggagaaattgcctagttcagagtaatttctaggtcagtgaaccctaatgtttctgaacaggtagtagtatttatggaccctgtctatagtactttaggcttttgaatcaactatggcagggggtattgcattactttctgtgtgggaaaatctctgtatatatctgtcagactataagctaagttgttagctgtactacataggactgtggctcattactcaaatactcatcatactcacatgcaacttaggataccacaagttttccattcagagtgtgttatcccaagagtcattttaaaagaatcacttctccagtaaacctactccccattttacttctttgtgcatgattccaagcaaagcatttcttgactgtgttacagccggtatactcctgttaaaaaaaaaaaaaaargaattaattggtcatggcaaaatatggtgaccagcttagaacaggaggctgcacttcagggcctcccagagactgacaccagcttggacttcattttctgtttctaattcacttgcctgattctg

SEQ ID NO: 819882 - DNA, 557 bp, Homo sapiens
cagcaacaatcgctgaggttaatcctgcaggggaggggtgacctattattatccccacttacagtccaggaaacagaggctggggaccagaatgacacaccaaagccaccagcaagaaaggtcaaatagtgagggcaccttgaaccccagcgcccatgactttcggggcaaggatgggaggaaggtgtaggatgtctcttgccccgctgtgggcctggaactgccaccccatcccaagaccacagcctccctcctgcccaggcccccctgctgatccaggccaagatggagccctgcaggaggtcagaggaggggacttctttgcaccctgcgcctctttccaatcgccagagggcagggccctacccacattggggatgggaagtcaaatgcagaagttaggtgaagtcagttcttggatactcctgtamtgtcaccctggtcttatctcatgccttagcccaagctgtgcacacaatggggtcctaggtccccctcacctcccagattccaccttcccagggatgggaccccctagaaccctcgggggcctgggc

SEQ ID NO: 819883 - DNA, 647 bp, Homo sapiens
ctacctgttctcactcctcatccctccccatcagaagaggctgcctcagcgttttcaggatggctcttcctcattttgactatgtctgtgggccctctggtttatctgtgtttcttaaactgaggcctcttccatcctcaactcgactcctctaatatcttgtcatcattgtctaaataactactatggctatatgttgtcttcaaacttttttgaaaatgtaccacttttagagagcatacttaggggaaataagtcacctgttacttgttcctcactctctactcttacctacatcattctggtacctcccataatacaaatttctttattcatagataagattataaactggtcaagatattgagaaaaatgcctcactctatggaaaaaaaaagttaagttagactcctatctcaaaccatatactaaggtaacttctagatggaacttaatgtgaaagggaaaatcataaagataaaggaagaagatattggagtgtatatgtataatcatggagtagagataaacttttaaaacagaatggatttgactaygtcaaaacataaggtctctattcaaaaaggacaccactatagacaatgataatggacaggtgacagactgggagaagatatttacaatat

SEQ ID NO: 819884 - DNA, 645 bp, Homo sapiens
aaaaaatgtcaaatttttggaagggatgtaagaaattattgggtatggtggggttctaggtaatgtttactagtcttttgggtattttctaattctgyagtcaagatgcactgttaattgaccagtttacaattttgtagatatagaaattgtaaaaattgaaaatgatgcaggttttctgatcataaaaataaaatggttaattataaaaatgatttatcataaaatgattaatcttaaaaatgatccctaaagatgacaacacaaataaatttggtctgaaagagaatataagtctctgaaagccatattctcatttgaaccagttttaaaactttacttgtttcttcaacaatcagtaaataaacaaaatctttggtagtgttcattttctatttttatgaaattcatgattttactgttttgaaaattatactttaagattccattaggctaagttatctcaaatatattcaactatataaaccatcgaaaaaagagaagtggttccttcttaacacaaaagtactaataatagtgctttgactcttttaaaccttgctgtagttagttttctttctagagttgaaaggtgcctacacattaaaatggacacaaagcagtccaaaatcttaaattgctcac

SEQ ID NO: 819885 - DNA, 627 bp, Homo sapiens
ggggaagcaaacatatccttcttcacmtgatggcaggaaggagaagaatgagtacccagtgaagggggaagccccttataaaaccttcagatctggtgagaacagcatgtggaaaacaacccccgtgataatctccacctgttccctcccacgacatgggagtataggactacaaggtgagatttgggtggggacacagtcaaaacatatctttgatacttgtatcaaagatcaaaacatatttttgatacttgtatcaaagaatttgaggacatattttaaaagcattgtggtcttcatgattagttcacatgaattattttaatagctttcttattgttctttctgattcttgtggaatcaactacagttcattctacacccaacagctgaaataattattcaaaatgtaaattagatcatttagcatccctgattgatgctttccagtagctttcctttaaacctagaatgaaattaaaatggctactaatgccaacaaactcttacatgctggcaactgccaacctcagtgactttaacttttaccagtttcattctcttcctctaagatctagcccagagtttcttagcttccacattactgataaatggggttagataatt

SEQ ID NO: 819886 - DNA, 648 bp, Homo sapiens
aagtaaattcttataagggaaaccaaaagatttttaaccagcagaaacaaatgcctgataaaaccaaaagacaggtttccttatgatctaataaagtaattttgtcttcataattagcaaagtgctattgctaaaatagcacttaggagatgatgctcagatattcccccagtgggaataatgtacatgattcagactgtgagcaatgacagcataggataacttacacattgccaaatcatatccccgggtgccagaatgtgtgtgaatcttctacctactaccgactcatgtctctaagatacgttgacagacctatttgtcatgtctctttagtctgtggtgtggtgtaatacaaagagcactgggttgaaggtcagaaatgttagagttctagttcaggctctaacacctgtgacattgtgcatgtcacgtgaccttgcctggtgtcagcttcctcatctgtaaattgaggttaatgatacctacattactcgctttacatgtctgttctgaagatcaaatggtatgtacttatgagtgytttggaaattttaaaatattaaatattctattactgtaggttttttcacatatacctttggccctacttaggggtcccctcccttcctccctttttcccttcct

SEQ ID NO: 819887 - DNA, 529 bp, Homo sapiens
tccggaattgtatgcccagtgcctaacgtaactatatactatagtataattgtgcacagtgagtgtccaaagaatgcatattgggtgtcrttaaaatctcagctgggaggtggggagctgggatccattcaaactgacaacgggccaggtgcggtggctcacacctgtaatcccagcactttgggaggccgaggcgggcggatcatgaggtcaggaaattgagaccatcttggctaacacggtgaaaccccgtctctactaaaaatacaaaaaattagccaggcgtggtggtgggcgcctgtagtcccagctactcgggaggctgaggcaggagaatggcatgaaccctgggaggtggagcttgcagtgaaccgagattgtaccactgcactccagcctgggtgacagagcgagactctgtctcaaaaacaaacaaacaaacaaaacaaaacctgacaaagaacaggggaaagaatgtaaattggggattgggagagtatcaaagaagaaaagaccatgagaaaaccag

SEQ ID NO: 819888 - DNA, 462 bp, Homo sapiens
atacatgtggtttggtcacttcatggctgaggtaagaacatgcttgtggaagacaagtctgtggcttggtgagtctgtgtggccagcagtctctgatctgtgcaaggtattaatgtgtcagggccgagtgttctggaatttctctagaggctcgcatgggctcctgaaccaattgtttctgtcctgctggtctgtctgtcagggttggaaaagtccaagccataggacccagttttctttcttagctgatgtttcctgctagaacaccatggactgttacttgccttgagttggaagtagtttgcatttatacctgtaaatatatttatccttttaatttatgtaaggttttttttttgtatgcaattctggattctttaaagagatgacaatgaattttggttttctactgttatgtgagwacatcagtccccagcaacacgtcattgtgtaagtagaaat

SEQ ID NO: 819889 - DNA, 618 bp, Homo sapiens
ttttgactttttaataacagccattctggctggtgtgaaatagtatttcattgtggctttgatttgcatttctctaatgatcagtgatgacctttttktttttcatatgtttgttggctgcatgtatgtttcttttgagaagtgtctgttcatatcctttgccttctttttaatgagactaaggtgtgtgccaccatgcccagctaattttttgtatttttagtagagatggggtttcaccgtgttagccaggatggtctcaatctcctgacctcatgatctgcctgcctcagcctcccaaaatgctgggattacaggcgtaagtcaccatgctgggccactttatttccttcttttgcctgattgccctggccagaaattctaatactatgttgaataggaatgttgagaaaggacaaccttgtcttgtgccagttgtcaaggtgctttcagcttttgcctattcagcattatattgactgtcagtttgtcatagatggctcttattattttgaggtatattccttcaatacctagtttattaagagcctttaacatgaagggatgttgaattttatcagaggctttttctgcatctattgagataatcatgtggtt

SEQ ID NO: 819890 - DNA, 657 bp, Homo sapiens
acttgatccagagctgaattcaagtcctgaatatccttattaattttctgtctcatttatttgtctaatattgacagttaaagtctcccrctattattgtgtgggagtctaaatcttttcataggtctctacgaacttgttttataaatctgcgtggttctgtactgggtgcatatatattcaggatagttagctcttcttgttgaattgatccctttgccattatgtaatgcccctctttgtctttttttaaaatctgtgttggtgtaaaatctgttttatcagagactagggttatactagggttgtaacccatgctttttttgtttttcttttcatttttggtaaattttcctcaatacctctattttgagcctatataggtctttgcatgtgacataggtctcctgaatacagcacatgatgggttttcactctttaaccaactttccagtctgtgtcttttaattggggcatttagctcatttacatttaaggttaatattgttatgtgtgaatttgatcctgtcatcatgatgctatctggttattttgcacactagttggtgaagtttcttcatggtgccattgtgccactggtttttatattttggtgtgttttgcagtggctggtaccaacttttcctttccatattt

SEQ ID NO: 819891 - DNA, 612 bp, Homo sapiens
tttcatttatggtctattttggatacacatttggatttctagttaccacaacatacattgaattgtaaagagatgggaagtttgaatgtaacagatggtaaattaagctctaaaataaaatagatggatgttaatgttaggcattgtttttattagggctgtttaaatttctacacccagtgactttttgtcagtgttaaaactcaatggcaaataggagacgctttaaaaggtgattataagtgtatattttaatataatttggttttaatttttaaaaattactttaaaattatgcatgcctgtcattaagccattcaaataagataacacgcaaaggagaaaatataaatgtcactaagttgcataattcagaaagcaccactgctaatattttggtgactatccttccaaacacatctctctgtaagcatatacaaataagtatttacaaataattctacataaaataatgttatatatgatactttaacttccctttaactcaatatgtcattattggttccattcccctggttttggttccattcccctggtctctttctrtattaatgaataggggaacatcattgcatctaatatttgattaat

SEQ ID NO: 819892 - DNA, 563 bp, Homo sapiens
tacaagagtggttctcaaaatgtggactagatctagatcagcagcacagcatcacctggaacttgttagaaataaaaattatacatgcctgcgaaaccagaacctctggggctggagcccagaaatgtgttttaacagaccgttcaggtgatcctgatgcttggctaaaaatggagaaccattgtgttagagtgaggaaacacaggatgagccgaagcggtctatagcagctgtttattctctcatttaagaaatagcccttcaacaatggctttgtacagaaattgctcaaggtcttgaggatgtacagatttcatagtttgctgtcattacttataaggcatgtttctagtcatttctttactaaagcctcttcctctttttcctttaatatcagtccttaggggctttgttcctttttctctgcacatagtttctcttratttttccccatgttactttttattgataaatcctaaatccatatttctttcctccatcttacccaaccttctgtctcatacgttccacagttttcagacttcttgatgtcattacaaatt

SEQ ID NO: 819893 - DNA, 630 bp, Homo sapiens
attttctggaacagaaaagaaaattatatatagaagtttgctccttaaagagagatcactccttcaatatgttctataggctaccttgtgattatgaatgtaaatcaattctaatggtagtgagacagctgttttactgtcaaaggtatcctctttgtaccaattaaaatctggaaaaaccaagcttctcaattcataaagttccctgtttttctttggtttctactaagaatcagtaaaactaaatgttgagaatgacctatgtaaaagtacacagaatcgataacaaattctatgtaagaatttctgaaatttattttatagccccattttcaaggctaaatcttgctagcaatacactacttctttaaacacagaaacaattcacctgaaaagttacatcacttgtttatgataccaaatcacaaacagttaattttcaaaaaggcgggagagttgcctatggaaagttctcttagtctaccttcctggactaagagaaggaagtctgactgaataaatctaataytgtgccttcttacctgaaaatcacgaatgtaagtcaggaaaaaaccaaagaaggaaaatgacatagaccattctgctgcagtagtgatcatgtgaagcaca

SEQ ID NO: 819894 - DNA, 608 bp, Homo sapiens
caggcgcggtggctcacgccactttgggaggctgaggcgggcggatcacctgaggtcaggagttcgagaccagcctggccaacacggtgaaaccccgtctctactaaaaatataaaaattagatgggcgtggtggcaggcatctgtaatcccagctactgaggaggctgaggcaggagaattgcttgaccccaggaggcgaaggttgcagtgagccgagatcgcaccactgcattccagcctgagtgacaaagcgagactctgtcttaaaaaaaaaaaaaattaatatttcaaatcaaggagagaaatcaaagctaatttcttacattttgaggaattctttcacacaactgtatcacaaaggtactgattaaaactgttttaaagtaatgtttatataatattaaataactggtgacgagatcactttagatcaaatgagagaccaataaccacgaatacacttagcttcatagtagccaaattttctatagtcgagcaatgatatattttcgtatttggtaaatgatagctcttacrgaattccacttgaaatgggaattaaaaattcagtcaattccatttgtattttactgttgcagtattcta

SEQ ID NO: 819895 - DNA, 567 bp, Homo sapiens
aggttgtttactctattgatagtttcttttgctgtgcacaagctctttagtttaattagatcccatttgttaattgttgtttttgctgcaattgcttttrgcatcttcatcataaagtctttaccaggtcctacagccagaaatctatttcctaggttatcttccagcatttttatagattttgatttttgatttaagcctttactccatcatgagttattttttgtatatgatgtaaggaaagggtccaggttcaatctcctgcatatggctagccagttatcacagcaccatttatggaatagggagtcttttccacattgcttgtttttggtaaattttatgaaatatcagatggttgtgtgtggcattatttctgggctctttattctgttcctttgatctatgtgtctgttttgtaccagtactgtgctgttttgtgtattgtagctttgtagtatagtctaataatgtgatgcctgcagctttgttctttttggttaggattctcttggctattcaggctcttttttggttccatatgaatttttaaatagtttttttata

SEQ ID NO: 819896 - DNA, 519 bp, Homo sapiens
aggttgtttactctattgatagtttcttttgctgtgcacaagctctttagtttaattagatcccatttgttaattgttgtttttgctgcaattgcttttggcatcttcatcataaagtctttaccaggtcctacagccagaaatctatttcctaggttatcttccagcatttttatagattttgatttttgatttaagcctttactccatcatgagttattttttgtatatgatgtaaggaaagggtccaggttcaatctcctgcatatggctagccagttatcacagcaccatttatggaatagggagtcttttccacattgcttgtttttggtaaattttatgaaatatcagatggttgtgtgtggcattatttctgggctctttattctgttcctttgatctatgtgtctgttttgtaccagtactgtgctgttttgtgtaytgtagctttgtagtatagtctaataatgtgatgcctgcagctttgttctttttggttaggattctcttggctat

SEQ ID NO: 819897 - DNA, 519 bp, Homo sapiens
aggttgtttactctattgatagtttcttttgctgtgcacaagctctttagtttaattagatcccatttgttaattgttgtttttgctgcaattgcttttggcatcttcatcataaagtctttaccaggtcctacagccagaaatctatttcctaggttatcttccagcatttttatagattttgatttttgatttaagcctttactccatcatgagttattttttgtatatgatgtaaggaaagggtccaggttcaatctcctgcatatggctagccagttatcacagcaccatttatggaatagggagtcttttccacattgcttgtttttggtaaattttatgaaatatcagatggttgtgtgtggcattatttctgggctctttattctgttcctttgatctatgtgtctgttttgtaccagtactgtgctgttttgtgtattgtagctttgtagtatagtctaataatgtgatgcctgcagctttgttmtttttggttaggattctcttggctat

SEQ ID NO: 819898 - DNA, 554 bp, Homo sapiens
gtaatttggtaggaataacaatgaatctataaattgctttgggcagtatggccattttagcaatacagattcttcctgttcatgagyatggaatgtttttctattgtgtcatctccaactgctttcagcagtgttttgtaattcttattgtagagatctttcactttcctggttggctgtattcctaagtattttacttattttgtggctaggaaaataataatgtgaataggattgcattcttgatttggatctcagcttggaagttattggtgtataggaatgctaataatttttatgcattgatttgtatcctgattccttactgaagttgattaccagtatctggagactttgggcagagacgatggggttttaggtatagaattaaatttgtgaagagatatagtttcacatcctctcttcatgtttggttgccttttattttcttctctttactggttgtcttggctagcacttccagtactatgttgaataggagtggtgagagtggtcatacttatcttgttctgtatctcaagggaaatgcttcc

SEQ ID NO: 819899 - DNA, 607 bp, Homo sapiens
attttgtcccagtggtcatgtgtctgtttatatgctggtatcatgctgttttaattactataattttgtagaatattttgaggttttgccmccaactttgtattttttgcttaagatctttttgacaatttggggtcttttatagttccatatatattttacattttttaaatttatgtgaagaatgtaattggtatttttatacatattgcattaaatctgtagatcgctttggatagtatggatattttaaaaatatttttccaaccatgaacatggtatatctttccatttatttgtatctttctcaatgcctttcatcaatgttttatctttttcattgcagatatcttaacctccttggttaaatttattactaggtattttggggtaactattaaaagtggaattgttttcataatttctttttcagatcgtacattattagcatatagaaatactactaatttttgtatgttgattgtgtacccttcaactttaccaaatttgtttgttagctcgaatagggttttttccccctgtgcaatctttaacttaatgcgttcagagtttttatcatgaaagatgttaaatttcatcaagtgct

SEQ ID NO: 819900 - DNA, 615 bp, Homo sapiens
atctttttcattgcagatatcttaacctccttggttaaatttattactaggtattttggggtaactattaaaagtggaattgttttcataatttctttttcagatcgtacattattagcatatagaaatactactaatttttgtatgttgattgtgtacccttcaactttaccaaatttgtttgttagctcgaatagggttttttccccctgtgcaatctttaacttaatgcgttcagagtttttatcatgaaagatgttaaatttcatcaagtgctttttctgagtcttttgaaataatgatatagtttttgccctcgatttcattgtccatgtgtgcacaatgcttcgttcccacttataagtgagaggatgtggtatttggttttctctttctgcattactttgcttaggataatggcctccagctgcatccatgttgttgcaaaagacatgatttcatactatttatggctgcatagtattccatggtgtatatgtaccacattttctttgtatgygtgtttaactttttaagttaatttttatttataatttttgtgggtacaaatgtaggtgtagacatttgtatgttacatgaaatatttttatatag

SEQ ID NO: 819901 - DNA, 581 bp, Homo sapiens
atttatcatcagttgagaggtatgtttatctaaacaagctttctatatactccactggactgataacttcctaggtttattttccatgtttgctcatgtgtccactccagagttacctggctctgttgttcaaggtatcaaagtcctcacgatgatgccgaagtgaaaatacactctaatactaaccacaggtttctaaaaattatactcaggtttgcatcttgccacacctttactttatgctctcattcagtgtgttggtcccagaaaatctggattgtatctatgtaagattccataacactggtaacctctgtctcacatttaatccataaataaagaggaacttgaggcagcacagttagctttttgtaacacagcaagggctacacacaatacacaacatctcctttctaaacaaccccaaatacttggtgacaaaatagtaaagatttcataygacagaaatctgctgtaggtacataagagaaataagtagcttcatccacagaggtgattacatcaagaaaagcataaaacaatgtaaataaaagaatgaacacacacatacacaaaaggtt

SEQ ID NO: 819902 - DNA, 581 bp, Homo sapiens
atttatcatcagttgagaggtatgtttatctaaacaagctttctatatactccactggactgataacttcctaggtttattttccatgtttgctcatgtgtccactccagagttacctggctctgttgttcaaggtatcaaagtcctcacgatgatgccgaagtgaaaatacactctaatactaaccacaggtttctaaaaattatactcaggtttgcatcttgccacacctttactttatgctctcattcagtgtgttggtcccagaaaatctggattgtatctatgtaagattccataacactggtaacctctgtctcacatttaatccataaataaagaggaacttgaggcagcacagttagctttttgtaacacagcaagggctacacacaatacacaacatctcctttctaaacaaccccaaatacttggtgacaaaatagtaaagatttcatacgacagaaatctgctgtaggtacataagagaaataagtagcttcatccacagaggtgatkacatcaagaaaagcataaaacaatgtaaataaaagaatgaacacacacatacacaaaaggtt

SEQ ID NO: 819903 - DNA, 630 bp, Homo sapiens
tctaaacacatgttcctaatctcattgctggatcttactctccttttatcaaatctgtgtgtgccctaaaggtttattcatgtaattttaacattcattcatccacaactgttttcctctatcattgtggtaatgtcaactcacatatttgtttctcattacatatgtttagttaaattaataatcatagaacaaatcttggatttgtcaaaaatttgataagataaattttacagtggattctattgccacagtttttacacagaaaaatagtaacttctgaaaagttttcttcttgttggcaggaataaacagttcactgttaattttttctgtagctatatctacatgatagttaaatatttcaacatctaaaatattctgccatcttaaatctacagttttattaatagtttttttttgcttttattttaaaatttcaatgttgtcatttatacttctagtagaaaaaaaaagccaaaatactttctactagacttaaccttgcagcattatccactttaaaatggagttggattgcmtggacacagtctaaaaacaaaattatgttgcatcatctaaggagaaataaactcattttcaaggaatgaaaactctagagtttctaga

SEQ ID NO: 819904 - DNA, 489 bp, Homo sapiens
  misc_feature 1, 2, 3, 4, 5, 6, 7, 8, 9, 10, 11, 12, 13, 14, 15, 16, 17,18, 19, 20, 21, 22, 23, 24, 25: n = A,T,C or G
nnnnnnnnnnnnnnnnnnnnnnnnnggatggctaatgagacataaccctcttgactatgtactccctccaagaaaacgctgcacctctctgtttccctactgcatcctccagccccagactttgaacaatagcttgtctttcatccctattttgcacaaaggaggcagtatccctatctctccccactgtgcactctgccaactgtgtgttagagtcctaccaatcatctccacattgcaatagcatgagcagatgtgctttccctcccatccacagtgagcattgtgactaggaagactgtggagtaaaaaagcgatgtgatcattccaacgctgaactaagcatcagaaaagaagcagcactctttttccttcctgtcatgtgctgtggagctcatgaagtagagcrctgctactatcctaatcttgcactagctgagtgacagcaaagatgaagcaaccaactcccacctaattagaaaatagagg

SEQ ID NO: 819905 - DNA, 270 bp, Homo sapiens
tcagtaataacattcttaagataattaggtgaaaatctatttgtggtaagttgtaacaaagcataattatactgaattttaggataggtagaatataaacttaaagttttctattctctttcaaattgatgtgataacaaataggagaggcaacttgaagttctggtttatagttaggacctgtttgccagttaagcctggacttgagttatgccctggwtgtaaactccctcctctccaagcctcatttaaaagtattggagtaactct

SEQ ID NO: 819906 - DNA, 609 bp, Homo sapiens
aatattctattttattttcagtctgataagagtattggctggtgaaaacaaaaattattatagctctaataaaatatwaaacaaatccaaatcaaataaaggagtacaatcagccaattgtgccactactattaaaaattctagtataagtatgataatatatattttctctgtatgtttatgctttattttgtgtgtgtgacatgtttaaataaatcagtcatataaataaagaattgtcatttaaattgagatgtattgaattaagtttgtaaccaatatttaatcttctaagaaaaattaaatttctaagtcttccttattagctgtacttagcttactgtataataagaaaacttacaacttatttattaggttagccttaataaatcgaatgtgaaacaaaacttaagaattaatgagtgttaagcaccaagttttatgcaaatatttctactgtttccatgaactatttatttttttcaggcctgaaacaagagaccatggaaggctggaacaaaacaaaatcaagtaatgaagaatgtgctgtaccaagaccattgctcctttctgatcattctgatttatcactgaatcagtccagataat

SEQ ID NO: 819907 - DNA, 551 bp, Homo sapiens
aagaaaggaggtctaattggctcttggttctgcagtttgtataggaagcatggtgctggcatctgctcagctgctggggaggcctcaggaaactacaataagggtagaagatgaaggggaaacaggcacatcacatggctagcacaggagcaacggggtcggagctatacacgtttcaacaaccagatctcatgagcactcactcactattgggatgacagtaccaagaggatggcgctaaaccattcatgagaaatctgcccccgtgatccaaccacctcccaccagaccccctctccaacattggggattacaatggaacatgagatttgggtgtggatacacacctaatccatatcagtaggattacagctgagcaatagcagaagtctgatctggaaagttcagatgaactgatgctatgaagccttgaaagataaactgaataactagtagagactgattaatgagagttcagccaagtttaaatatgttaatayagtgatgtgcagaggtatgcaatagaatctgtgccttctggcctttgaggc

SEQ ID NO: 819908 - DNA, 611 bp, Homo sapiens
tccacttggaagataagccatttcctgatcctcagaccgataagatgccaacagacagtatataaacaatctttgcctctgctgcaaggaattttagcatttgtcattccctctgactgagaatctgaggtgcccagggttcaacactggggtagagtttgattggttgtaactggcttgtaccagctcttaagagacaattgttaaagtttcaggaattttgtgatcaattaacatcatgttagtagtattcaattgattatttataccacaaacactacaaatggacaaaaaccacaaatcagggttgttgttgttgctgttgttgtttcttctgaagatccagttgttacccatttaccagcataccaccggttcactgctgagtctctttgctgcatccagaccagggagagcgtgctccactgatgaaaatggacacaaccaaccccctgaagttcatttattaaacaaatatttaatgaatgcctacctgatttcagatacttcggscacctcctaccattgtgtagaacaagtaagggctgaaattcagcccactatctgcctgcacacctcaaaggagtcttaagattgtgaaaaatgtgaaa

SEQ ID NO: 819909 - DNA, 570 bp, Homo sapiens
gtagtaacaatgcatttagttgcaatgctagtagtaacaatgcaatgcagggtagayagaatcactacagttttatatgcagtatttcttaaatatattaaaaaccatgacttcgatttcagactggtttcatggaacctgcagcctcctcagaagtacttaaggaattctataaataataatgatttaaactgcctgaagtattatagctttctttcatctgtgttataacatattggggttctactaactgcacagtgaaaaagtcccgatgcttgaaaagactgcaaaccaccctagactctgttagttactagtttaggagcttaccagcagaagcagtatctgcaagcgaatcatgagtctgattcaatatactatccacaacatctgagaaaagggaagctgtgtcccgggggctgtcagccacagctgtttggagaacatgtcgttgaaattcagcctccttggtgcggcacacagtgaggatcatagcactggcagagagtggggaaataactccagtgatggggggccggccttcaccagggtccacatcagcaacctacg

SEQ ID NO: 819910 - DNA, 615 bp, Homo sapiens
ctatagcaagatgtatttatagtattaaaaagcttaagaaaccatttcaatcaacacaaaataattcagaagtatatgtgtatcactcatcctgaattttcgagcaacaagcagtttgtttcaagttcattaaaatcttgtggcagattaaaatcagattctattattacccattgagttgttttgaaaggtgtttcatgaaagcacaaacaaaacagtatttaaaccaaatgaccatctaagagcacaactttgtgaaaaacgtaaatcttcataaaccaagtaaaatgttttcgattacaccatttccaatttaccagctttattcatattcagtacactttaccactcggcaactacaaaggccaaagtattactaaaataaaactaaacatttaattaaacttccacttaaaaaaaaaaacccaaactgagaaatttttaagtgttacaaattttattaaaaattaacatttcaagaggtcatacgyatacaaatcaaactgcaaaaaattccaggcataaaaactattatctgggttagtgtgccatctttcttctccaaatgtcaaaatgtccacaaaaaaagtctttagaaagtcaaatccactgtcc

SEQ ID NO: 819911 - DNA, 595 bp, Homo sapiens
taagaaaaaaggccagcatcagtaatcatcaggtaaattcagattaaaaccacattgagatatygtctcattttgttagaacggctattatcaaaaaggtaaatgataagtgttggcaagaatgtgaagaaaagggaacccttgtacactgctgatgggaatgtaaattagcacagccattgtggaaaacaggttggaagttcttcaaaacattaaaactagaactacacaacccaccaatcccattactggatatatatccaaaggatctgaaatcagtatgtccaagacatatctgcattctcatgcttattacagcattattcaacacagccaagatacggaatcaacctaagtgtccatcaacagatgaataaagaaaatgtggtatatatacagagtggaatagtatccagccttaaaaaatgaaattctgtcatttggagttcacgtggatgaacttggaagacattatgttaagcaaaataagccaggcacagaaagacagatatcgcatcattttacttatttgtggaatctaggaaagtcaacttatagaaacagagagtaaaataaaatgataattaccagaggc

SEQ ID NO: 819912 - DNA, 594 bp, Homo sapiens
tcccagatttaaaagtgattgaggctgagtgactgaggctgatgcctgtggtaccagcactttgggaggctgaagttgaaggatcacttcagcccaggagctcaagaccagcctgggcaacatagtgagacccygtctctatcaagaaaaaagtgatggagcagaagctgggatattggagaagagagtcttgcattggctgggaggttgctttgggtagtatggacatttaacaatattaatccttccaatccaggaacgtggaatatttttccattttttagtgtcctcttcaatttctttcattagttttttatagttttcattatagagagctttcactcctttggttaattcctaggtatttaattttatgtgtggctattgtaaatgggattactttaaaaatttctttttcacattgttcactgttggcatacagaaatgctactgaattttgtatgttgattttgtattctgcaactttactgaatttttttaatcagttctaatagttttcttgtggagtctttaggttttcctaaatgtaagatcatatcatctgcaaacaaggataatttgacttcttccttt

SEQ ID NO: 819913 - DNA, 590 bp, Homo sapiens
ccgctgacttccatccctccagacacagggtgtccgctgtgctcctgatccagcgaggcacccattgccactcccgatggggctaaaggcttgccattgttccttcatggctaagtgcccggkttcatcctgatcgagctgaacactagtcactggtttccacggttctcttccataacccatggcttctaatagagctttaacactcacctcatggcccaagattccattccttgggatccgtgaggccaagaaccccaggtcagagaacattaggcttgccaccatcttggaagcagccggctgccattttggaagccacctgccaccatcttgggagctctgggagcaaggaccccccagaaacatgtccacctcggcctcccaaacttaatcctatttatagtgttagaacaatgcctatgatatcgtaaatcaggctggatgtgtacttgccatttacatccacgtatgtgtatgtttccatgtgaatacctgtagaacttaatgcctgacacagaaggcactcaatagatgccagttgttcttatcattggacacacagaaacatagacacagacacttagatg

SEQ ID NO: 819914 - DNA, 633 bp, Homo sapiens
atgttttacaaaagtttaacctattatctacagcatctctactactactgggttgataaaaaaaaaatgacttcctcactggtgagatatatatatatatayacacacacacacacacacacacacatatatatgtatatatacacacatatatgtatatatacacacacacatatatatgtatatatacacacatatatatgtatatatatatacacacatatatatgtatatatatatacacacacacacatatatatatatacacacacacacacacacacacacattttttgtttttaagacagggtctcattctgttgtccaggctagagtgcagtggcataatgatggctcactgcagcctccatgtcctgcgctcaagcaatctccccacctcagccttccaagtagctgagaacacaggtatgtgccaccatgtccagctaattttttattctttgtagagacaggatctcactatgttgcccaggctagtttcaaactcctgggctgaagcaatcctcccacgttggcctcccaaagtgctgggattacaggcatcagtcacggtgtccagccactagtgatatttttaaacaattatcagatttatcattttagaatagtttc

SEQ ID NO: 819915 - DNA, 635 bp, Homo sapiens
ggcctgcggggggcgctccgggatccccaatacccagccccccgggtcctggggacgacctgtgctccgacctggaggaggcccctgaggctgaactgagtcaggctcctgctgaggggcccgacttggtgcccgcagccctgggcagcctgaccacagcccaaattgcccggagtgtctggaggccttggtgaccaatgccagccagagtcctgcgggggtgggcccggccctccctggatctcctccctcctcccaggggttcagatgtggtggggtagggccctggaagtctcccaggtcttccctccctcctctgatggatggcttgcagggcagcccctggtaaccagcccagtcaggccccagccccgtttcttaagaaacttttagggaccctgcagctctggagtgggtggagggagggagctacgggcaggaggaagaattttgtagagctgccagcgctctcccaggttcacccacccaggcttcaccagccctgtgcgsgctctgggggcagaggtggcagaaatggtgctgggcactagtgttccaggcagccctgggctaaacaaaagcttgaacttgccacttcagcggggagatgagaggcaggtgcactgagctgcact

SEQ ID NO: 819916 - DNA, 635 bp, Homo sapiens
ggcctgcggggggcgctccgggatccccaatacccagccccccgggtcctggggacgacctgtgctccgacctggaggaggcccctgaggctgaactgagtcaggctcctgctgaggggcccgacttggtgcccgcagccctgggcagcctgaccacagcccaaattgcccggagtgtctggaggccttggtgaccaatgccagccagagtcctgcgggggtgggcccggccctccctggatctcctccctcctcccaggggttcagatgtggtggggtagggccctggaagtctcccaggtcttccctccctcctctgatggatggcttgcagggcagcccctggtaaccagcccagtcaggccccagccccgtttcttaagaaacttttagggaccctgcagctctggagtgggtggagggagggagctacgggcaggaggaagaattttgtagagctgccagcgctctcccaggttcacccacccaggcttcaccagccctgtgcgggctctgggggcagaggtggcagraatggtgctgggcactagtgttccaggcagccctgggctaaacaaaagcttgaacttgccacttcagcggggagatgagaggcaggtgcactgagctgcact

SEQ ID NO: 819917 - DNA, 633 bp, Homo sapiens
actcaggtgttttatttacacttgtaacctgctaaataactgttgttagcagaacgactggtaaggcactttygttgaataacatgggtctttaatgagatttttccagataattaatgttattgtgggtataaactgcggatattataaaaaacgtaattttatccccagaatgattataattaattttcatttcattccacttaatactgagatgctatctaaatctaaggttaaaaaatactttgtaagtaataacactatctttaacagtagacatttataaataaatgtctatgtattgtttgattattgtcttatataatagggcttgcaacatatgattccattctttatccagaagtaatttatataactagctttaaatctccataaaatagtaaaacagtataaggtttaatgaagaatgcagatttcaaccataaatagccttctattttaatatttgcagtaatgtttagatactagtagttatgttctggttcacagtaattacattgttttattctgttcttgaagtacttcacacaggtgattgtttctgcaattgttttatataaattatcttacaactcattttgaaatgtagattaatgttatgaattacagtag

SEQ ID NO: 819918 - DNA, 551 bp, Homo sapiens
ccggcaagttagtttgccgtagtttcatggatgtgtgtagtataatgaagatcatgtcttactgtggagcaaaggacaggcaggcttagtgcctgttaaaaaaagrtttacattccctaagctcagaggtcctctcttgtagcacagttcatgatgcatacaggtgttatgttgtagaaattgaggcttagagaatctgtccaaatgctgataatctggctacttctacagttgtgagtaacacattgccctttgttgctgacccaggaatctcatgtcttatactggcatccacgaaactaaggcaaactaagcaatgtatttatgatccagtttctcggcatcctcatcagcatttggtgttgtcactactttttgttttagccattctgatagctgtatagtggtatctcattgtggttttaattggcatttccttaataattaatgatgctgaagatgccttcatgtgcttatttgccatctgtatacagtcatgagttacttaacaacatggatacattctgagaaatgcatcattaggtgatttt

SEQ ID NO: 819919 - DNA, 601 bp, Homo sapiens
aagatatactctattatttgtctcacgtgtgtccgtgtaaagagaccaccaaacagrctttgtgtgagcaacaaggctgtttatttcacctgggtgcaggtgggctgagtccaaaaagagagtcagcaaagggtggtgggattatcattagttcttacaggttttggggtaggcagtggagttaggagtgctgttttgcgggcaggggatggatcttacaaagtacattctcaagggtggggagaattacaaagaaccttcttaagcgtgggagagattacaaggaaacttcttaagggtaagggagattacaaagtatattgatcagttagggtggggcagaaacaaatcacaatggtggaatgtcatcagttaaggctattttcatttcttttgtggatcttcagttgcttcagaccatctggatgtatacgtgcaggtcacaggggatatgatagcttagcttgggctcagaggcctgacattattgttactgtttttatctgtaattttctttcttcttcctttatcctagcaatgattgagagaatctaagttgaaacagataattgagaaatatgcctaatgaaatggataaagt

SEQ ID NO: 819920 - DNA, 610 bp, Homo sapiens
ctttgggtaggttctttagtttcctcctcatctaacagggctgttgtgggactcagtgagagagaggatggctggaagtgcacataggatactgcctggcagactgtaggcaytcagtaaacgcgagttctccgttaacacgaaaacattacaaacagctaaaatgacagctgcttgagagaataatcggtaagtgccacaaccgggctagaaaaggatgaaggacaagctcctgcccactcctttggaaactccacacctgggccggagaaagactcgaattcgaaaactaagtttcagtcgcacctgcctccgggctcgcttcagcctccgaggggtctgcggaggcgacgtcccagtcaggagggatgcgcgcctgcgagccccccggggatctcggagccgctccactgcggtgcctgccgctatcttccccacgccttagtaactgcgacgcgacggcagacagtgtaggcggcaaccgacggccgggacgtctaacctcaagtcccagcaagccccgcggccacgtcctctgactacctcgcgccagcaagacccaaactacggatcccgattgactccgcgcggcgcgtcacgctgtcagctc

SEQ ID NO: 819921 - DNA, 610 bp, Homo sapiens
ctttgggtaggttctttagtttcctcctcatctaacagggctgttgtgggactcagtgagagagaggatggctggaagtgcacataggatactgcctggcagactgtaggcattcagtaaacscgagttctccgttaacacgaaaacattacaaacagctaaaatgacagctgcttgagagaataatcggtaagtgccacaaccgggctagaaaaggatgaaggacaagctcctgcccactcctttggaaactccacacctgggccggagaaagactcgaattcgaaaactaagtttcagtcgcacctgcctccgggctcgcttcagcctccgaggggtctgcggaggcgacgtcccagtcaggagggatgcgcgcctgcgagccccccggggatctcggagccgctccactgcggtgcctgccgctatcttccccacgccttagtaactgcgacgcgacggcagacagtgtaggcggcaaccgacggccgggacgtctaacctcaagtcccagcaagccccgcggccacgtcctctgactacctcgcgccagcaagacccaaactacggatcccgattgactccgcgcggcgcgtcacgctgtcagctc

SEQ ID NO: 819922 - DNA, 610 bp, Homo sapiens
ctttgggtaggttctttagtttcctcctcatctaacagggctgttgtgggactcagtgagagagaggatggctggaagtgcacataggatactgcctggcagactgtaggcattcagtaaacgcgagttctccgttaacacgaaaacattacaaacagctaaaatgacagctgcttgagagaataatcggtaagtgccacaaccgggctagaaaaggatgaaggacaagctcctgcccactcctttggaaactccacacctgggccggagaaagactcgaattcgaaaactaagtttcagtcgcacctgcctccgggctcgcttcagcctccgaggggtctgcggaggcgacgtcccagtcaggagggatgcgcgcctgcgagccccccggggatctcggagccgctccactgcggtgcctgccgctatcttccccacgccttagtaactgcgacgcgacggcagacagtgtaggcsgcaaccgacggccgggacgtctaacctcaagtcccagcaagccccgcggccacgtcctctgactacctcgcgccagcaagacccaaactacggatcccgattgactccgcgcggcgcgtcacgctgtcagctc

SEQ ID NO: 819923 - DNA, 455 bp, Homo sapiens
cattcaccacacagaatgtgctgggaactgagttggacactctgttggagacctccctccagtggttgaccatctgataagagagccaaggcacgtacacaaaagrctaaataattacaaccctagcataaccaaagcaccagtgaagctagtgaagccataaataattatggagttcagagaagggtattgtggtaaattacaatgaactatgaggcccttttttcctttgacggaatctgaatccttttccacatttgattatatttcattatttagggcaggtttatggtccaccttcatttcaataagaaaggaggaagaaagcagaagaatctgaattataaaacacgagttgaacacctactgcaactacgtggtaggcactggaataaaaagacaattggaacatgatgcccagtgttgtaattgaacctcaccttaagggttatatc

SEQ ID NO: 819924 - DNA, 630 bp, Homo sapiens
tgggccttggtggtcttgtttataacccttaaattccagtcatcaatctacacctcatttagaagccttgtctactgtattttggcaatttgccaatgactaaaatgcacagtaaaaatttctacatgtgaaaatgagaaaaagcagtcttgaattaagttgtcaatcctaaagcacattctaatttgctctgaaaccttaatttaaaaatcacagagttgacttttcttcacctataaagtaaaactttatctgacgaatatttttcctaatgggatagagatatcaaaacttaaaaacaatcagcaattatttcttagatgtaaggaaaatcagataacctattacaatctaatgagcttcctgttaaaaataatattaagtcaaaaataaatgttgagatacccttatatgacttataacatcaaacactatgtacagtgactatatttttcatttgcaatccatatatttcaatagtgatataagtgaaaaaaattaaatttcactatacattgcactcgtgtgtacaccagaacttgaaattctacaacttatratagttctgctgggcacggtgactcatgtctgtaatcccagcatctaccccatctctactaaaaatacaaa

SEQ ID NO: 819925 - DNA, 514 bp, Homo sapiens
aactttaattcagccacttcacctttgtaagaactttcagcactctcgcctgtaaagcagaaataaaactaatcacattttaggaattttgtaaaggttacacaaaataatatacattaaaatcttagcatataattaaaactgaaaagatcttagaaacttgtcccttttacttcatctctctcaagttcaaagttccacagatctctaggcagggtcaaaatgccaccagtctctttgctaaggcatagcacgagtgacttttattccagttcccaaccagttcctcatctccatctgagagcacctcagcctggacttcattgtccatatcactatcagcatttcggtcaaagccattcagcaagactctatgaagttcaaactttcccacatcttctgaccttcttctgaggactccaaactgttccaacctcaccctgttacccagttccagagtcacttccacattttgggtaatttttwagcaggatcccactgtctacggtaccga

SEQ ID NO: 819926 - DNA, 549 bp, Homo sapiens
tggctgagaatttttcaaaattcttgaaacactagaatctataaataaatatatgtcatrtactatataataaataaataattagaaatcgacatctcaaaacattctaacaaaagtgcagaaatcaattattaagattaaatcgggccaaatgaaaagagagatcacaggtgaagaaataacaattagactggcggaaatggtgagagaaaataaccattattctagaattgtgtccccagcagaactatcatccaaaaataaatacatgctttgtttatctcaactgaaatacctgtgttttgtttcatttttttttcctcattggcttgaagttgaattcctacttcttccaactctaccaatctttctcttaactccatttcctgctttagcataacatataacataatgaatctttgagaaaaacattttttatctagttatcttagtttgttctgttctgctgtaacagaataccaaatattgagtaatttagaaaaaacaaaaactttatttctcacagttctggagactgagaagtcagag

SEQ ID NO: 819927 - DNA, 479 bp, Homo sapiens
gtttaaggcattcaattacctttctgtgtcaggtrttggaggttttgtcactatgaataatctttaattatttaacagtgtgtaattattgaataatatataattaacaaaatttgctaattaatgtgctcagtgagacaaaactcctcttaaacctgtgtgggctaaaaatgaagagaaactgaaataatctcatttctgtgaaaaaaaaagtactaattctgttttgtttatttaaatgtgataatgtcatttcactgtcatagattggtacctttgataatgatccatttgctttctataaaaattaatttctggcaaaaaaaatacatgtgtatgcttttgaagttatttggaaagtcgtcttttctgagtgaaaataaaacatctttagtcaccaattatgtttgtaacattggagagtgcaaaaagtacatgatactctgttgaataggatccgatattagatggtaaaaaaa

SEQ ID NO: 819928 - DNA, 544 bp, Homo sapiens
ctaaaatctaaaaagacttaggagggtggttacatagagtcatagcagcaagtatagcatgggtcttctgtctccattttggttgtgtcacyaagttggttagggcatggctcctgttcccgcagaggttaagttgaccttgtttgttagaaaaaagacaaactaaaaaccaaacctctttgcctagcaaatctggctgccccaagtgtatgtagggtaccatatatgccaatgcaggatccctatactgtgtcatctaaggtatctgatgaccttccccaaggctatagttggatcaagatttacaccccttacatgctccagcaacttccctatctcaggtcttagatattctaaagcaagacccattgcaatctgcttcacacatttctggtgccaactattgtcttgagtttggtgaatgacggatttgttgacttttcatcagaaccaatgatatctttatctaaagtcctcaaagtttcttgcatactgttatctgtctgcaagtcgtagggaatattttattttcaatatttttaaa

SEQ ID NO: 819929 - DNA, 598 bp, Homo sapiens
tttatatacttcctccaatttgaaaagcattttctcaagattttatattgattaaatctgttgaaattacatgtaaaatctcatagtacacttctttgtacatatyactaatgcaacagtgtctatattagtcctgtcttagtctgttttgtgctgttataacacaatgccacagatggataatttataataaacagaaatttatttggctcatggttctggaggctgggaagttcaagatccatgacatccagtgaaggcctttttgctgtatcataacttggaagatggcagcacaggggcagcgggaaggtagagagaaagagagtgagagaaaatgccacgctcattcttttgtaagactctaacacccagaatactagcattaatttgtttatgagggcagagacctcatgactgaattatctcttcaagtttccacctatcaacactgttgtattggggatagcttacaacatacgaactttggggacacattcaaaccatagctaacatattagtgtactgattccttctcaaatatgataaataaagtagttaaaatacaactgaaaatatggtgaacaagtaggaaata

SEQ ID NO: 819930 - DNA, 610 bp, Homo sapiens
tacatacactgatttgtgttccagatcttaatcatccccatccccgctgaaatgggtgcataccttgaattgtttaaacamccttgcgatatctagggaaatgatgaggattgaatttgactcaaaccgatgactgttaattctaaagctaagaaagagtttaaaattcttcatgtattaatataatcaagtttgtgcagaaagaagttgaagattggtttgttaatccactacttagatgattttaattaaagcatttaataattaatttaaaaacaattaatttaacttgaatttatttaaacaccattttttggtagtgacttataagaaaaacttagaatttaagaaggaaggtgtgtttgagttttgctctgacaatctatcacaaaagtaatcctatctatatttcagcgtctctcaaaatgttatgataattattctgattaaaaaaatcaaactttctaaaacatgttggtgtgtaaggttgatgaaattagatgttctcttagagctctgcatgacaagccaagattcatattggttaataaatcatgatttactaatggaaaaatttcactagggatacctgaagaccaaacttcatgta

SEQ ID NO: 819931 - DNA, 593 bp, Homo sapiens
ttagagacggggtttcatcatgttggccaggctggtcttgaactcctgacctcaagtgacccacctgcctaggcctcccaaagtgctgggattgcaggcatgagccactgcacgtggcctatacattttcttatactatcttatttattttaattttaaaaattccagtaagtaaaattcactttctgaaatagagttctatgcatttttaaacatttatagttttttgtagctaccactacagacacaacagagaacaattctagtatcacaaagaattccatcatgctacccttttgtgttcagacccttcttccacctctaaccctggtaaactgctgatatatttcctgtttttatatgtgtgccttttccagaatgtcatataagtggaatcatctatagacaacttctttgggtttggtttctttcaggcaacagaatgtatttgagattcatccatgttgtgtgtatcaataattcattcttttaaattgctgagtagtattccattgkatgggtgtatcatggtgggttgaccaattcacttgaaggacatttagattattttcaatattgatgattgcaaataa

SEQ ID NO: 819932 - DNA, 335 bp, Homo sapiens
ctgcatggctttctcatcacttgtgtgttcactggagtagcacttttaatttccttccagaacttttcttttgcatttacaacttggctgtttgttgcaagaggcctagttttagacctatcagggcttttgacaggcctttgtcactaatcttaatcatttctagcttttgatttaaagtaagagctatgggactcttgctttcacttgaatacttagaggctattgtgcagttattctttggcataatttcaatattgttgtgtctcagcaaatagggargcttgagcagagggagagagatgaggctggtcactggagcactcagaatgtgc

SEQ ID NO: 819933 - DNA, 602 bp, Homo sapiens
tcactttatccatttcattaggcatatttctcaattatctgtttcaacttagattctctcaatcattgctaggataaaggaagaagaaagaaaattacagataaaaacagtaacaataatgtcaggcctctgagcccaagctaagctatcatatcccctgtgacctgcacgtatacatccagatggtctgaagcaactgaagatccacaaaagaaatgaaaatagccttaactgatgacattccaccattgtgatttgtttctgccccaccctaactgatcaatatactttgtaatctcccttacccttaagaagtttccttgtaatctctcccacgcttaagaaggttctttgtaattctccccacccttgagaatgtactttgtaagatccatcccctgcccgcaaaacagcactcctaactccactgcctaccccaaaacctgtaagaactaatgataatcccaccaccctttgctgactctctttttggactcagcccacctgcacccaggtgaaataaacagccttgttgctcacacaaagyctgtttggtggtctctttacacggacacacgtgagacaaataatagagtatatct

SEQ ID NO: 819934 - DNA, 619 bp, Homo sapiens
ttgtaacaaaaataattatctcaaagttcytacttaatgggtggccaaaaaataacatttcaggcagtagaaacaacctaagcagaagccctaaagcaacaaagaactgggcttactcaaggaactgaaagaatgtaagtttgacatcctcttggggtgagaacaaagtggcaaaatgaaaaattgaagacctcatcaagaaccaaacaatgaaggaatttacagtgcctaataaataacttggatgtgttttaattgtaatgaaaaatcaatgaagagttttgcgcagtaaatctttattaagttataatcagataagtaagtctgttagtggagaaatgattggaaggagataagaattaatggaaagaaactagactggttcattagagagccaggaaaaggtgatgatgtttgagacaagcttttgacagcaatacttgctactgaatttgctactggcatgaattaagtggaaagaatcaagtatgactcaaccactctgcttctagctcaaacaatggattgaatgtttctgcaaaatactgagtttggaaagtcaggggaagaacaagggataaaggcattaaaaagagggataataagagttcagtcttaa

SEQ ID NO: 819935 - DNA, 588 bp, Homo sapiens
gagtgttaacagctcataaatgcagcccggacccaaagagtgagcagcagcaagatttattgcacgaagagcgaaagaacaaagcttccacagcacagaaggggacccaagtgagttgctgaggctggctcgggcagcctgcttttatttccttatctgaccccacccacatcctgctgattggtccattttacagaatgctgattggcccattttacagagagctgattggtctgttttgacagggtgctgcttcgtgcatttacaaaccttgagctagacacagagtactgattggtgcctttacaatcctttggctggacacaaaagttctccaagtccccactagattagctaaacacagagcacagattggtgtgtttacaaacttttagctagacacagagtgctgattggtgaatttagaatcttttagctagacatggagtgctgattrgtgcatttacaatcctctagctagacataaaagttctccaagtccccacccaactcaggagaccagctggcttcacctaatggatcctgcaccagggccatgggcagagctgcccgccagtcccacgccgc

SEQ ID NO: 819936 - DNA, 427 bp, Homo sapiens
gaaatgagcctgtgttaatagtagcaggaaaaacacaagaaaaagataatgtaagagagagattcctggagacttgcaacatttagagaatgtataagataaatatataaacataaaggatgcagaagacactggctggagaatgtgactggaataaacttgataaattctcacaatatcttttagtttgcactgatcttttaataataacatattaagacttctatgtcttacccacacaaataacctaagtggcattttaggcactactgcaagtctaatagagaggattactgtatggaagcagaaataactttcaacatcattcaaagtgtaacacatgagcaatgatagagcccacttytctcctcaattgcttcaaataaaaacaatctatgtggtcctttctggtatgaaaattatttta

SEQ ID NO: 819937 - DNA, 572 bp, Homo sapiens
tcaaacatctgtaagtcagctggtgggcaggttggggagtctttcaaatattcataatcagctagtgtgtcaggaggaggcttccyaggctgaaatgacctctgctgggcagagttccaaggagaaaacagaaaagtacaagaactttttaaaaagtctttatttgtactatgtttactaacttctcattggccaaagcaagacacatgaacaaggctagagtcaaaggggaggagactgaaacattaaaaggcagcaagaatacagagagccactgattggaggcattaataaaaacaacctttaaagtgccttctgagctgcaaaaatcatgaatgttgctcaaattgtttctcaaaggccaattaagacttcagagccaacaataaaaggtttggggctaagacctcatcttcccaatatgcctatcattagaaatgacttcaagatagctgtgtcaggggtcccccagaccacccccaggctcaaggattggctagaagaactcacatgactcatatgaactcaaatgactgttatactcatggttatagtttatcgtagcaaaatga

SEQ ID NO: 819938 - DNA, 601 bp, Homo sapiens
tcatctccagtatcaaattgagaaggaccacaggcttccgcctgcacagaatcyccccttaataatcctgtctctcgtggacccagttcctgagggccacttctttgtcctgttgtgttggtcctgactgtccccctccaatgggacatgggttcacgctccctggccagaatagggaccaggtccagcttctcagcagaccctcccagtgttcgactggccagagtgagattcagggagaggtaaaacttgctcatggtcccaggccgatgtgtcagaggtatccgggactggaacccacatctgccctggatgctgctgtgtctggaaggaaggagctgggtgggttcctcttgactgaggactagctcaggaggaccagcagggagggtgcaggcctctggggcttctttgagaattccagacctttttccagaaagcatttgatgctgtgtggggctgtggggatgcgaagtccagcagttgtctactcagcaggacactttgctgtggtgcccagctcttgactggactcttctggtctgggtgaaaatcctgatcatgatcccaagattataaagcactcactggcctcagtttc

SEQ ID NO: 819939 - DNA, 453 bp, Homo sapiens
ggagtctgcatggggttgaggcaggtggatggaggaggcaggaagggtgtctgaggaggaaggaaagtgtctgggaaaagctaaatgaggaaaattgagctggggaaagaggccaggagggtagtggaggcctgggcatcagtgaagagtcacctgatcctcagggcggggccaagagcagctcctgtcacagcatcctgtaggccaggcctcactcattactggggctgggctcctcagacacatgtggggtgtggactcatttggcggggtggagaaagggctgtccctgtctgtatcttgtgagggtttgttgtcacatcagcctatgcggrtgtccccttttatctactcatgggacctctgtattcggggatggagtgtgcgtgtgtgcatgtgagtgtgtatgtgtgtgaacatgtgtgcatgtttgcatgtgaaagcatggggggc

SEQ ID NO: 819940 - DNA, 611 bp, Homo sapiens
atgtgagtgtgtatgtgtgtgaacatgtgtgcatgtttgcatgtgaaagcatggggggcatgtcagtgtgtgtagtgcatgggtaagtgtgagggtaagtgcatgtgtgtgtgtgtgwgagtgtgtgactgcacatgtgtggcatgcacgcatatgaggatgtgtgttttcacccatgtgtagagtgtgtacaggtgttcaatggtcgtgcaagtgtgtgtactgggtgtgtgcatgtggtgtgtgcacacacgtgtggtgggggcacagatgtccctcttgagcttgccccccacccaggcagcatccgtggacatgttgttgtccttacctgccctggcctttgggggttgctctctcctcccctgccctgtctctccctgctccttccttgcctgaggcttgggtgaggactgcccagcccacctgtccatgccatgctgccagccctcatcctgcactcagggctgaggacgtctgaaagctggatgctccccagccctgcctggagtgaggccagccttctgcctcagctcccagggctctgtggccatctcccatgcccctctccccatccctgctggggagtaggagcaccatggtcctctcct

SEQ ID NO: 819941 - DNA, 548 bp, Homo sapiens
gggtgagacaccactgcctgtactacactccaccctgcacttcctcatccacatatttctcacgttaagttcattctatccagactcagcttctccagaggcatttggtcatgatttctggaaacctttccagatgaactacagccctgactacttcagtgggtcccaaggcctcattccacccactggggacatagcaccatgtagcaactattggtttagatgtatactgcatcctaaagaagagggggcatcctttcagggtgtcatctcccagctggccacagctctatcaagatgacagctccaggatgcttgggtatttatttatttatttatttatttatttattgagacatagtctcgttctgtcgcccagcctggagtgcagtggcgtggtcttggctcactgcaagctctgcctcccgggttcatgccattctcctgcctcagcctccckagtagccgggactacaggcgcccgtcaccacgcctggctaatttatttatttattgtgagacggagtcttgctctgtctcccaggctg

SEQ ID NO: 819942 - DNA, 572 bp, Homo sapiens
agggcattctcactaggtaagccctagtaggccagatttagttttagttttttaactcagaagtacattttaggtttccaactttaaragttgttttaagcttaagacgttaactttgtaagaatttgtaaggatctaggcatcttccagagtgagtttagaaagttctgtatagttatctgaggtggcatatattccatatggatgtctttgcacagcgctgcatggtgactcagagccctgtgttccctcctcctggctccgtactgtggactctggcaggtcccttcgatcctcacagcctcagtttcttcaggagagacttaggctgggatagactccacacctcactttggtgctgggactccactcatggaagagaaatagcacttagcctggtttccttctggggactgaattggtcctttggtctctgaggttcaaaggtgacaagatcatttagtggtgatgaacaggcatactcaatcaaatacatgttgaatgaagaatggttgcctgggctaatcccaccttttaaattctatgtgtccatctatagtacattctagtga

SEQ ID NO: 819943 - DNA, 572 bp, Homo sapiens
agggcattctcactaggtaagccctagtaggccagatttagttttagttttttaactcagaagtacattttaggtttccaactttaagagttgttttaagcttaagacgttaactttgtaaraatttgtaaggatctaggcatcttccagagtgagtttagaaagttctgtatagttatctgaggtggcatatattccatatggatgtctttgcacagcgctgcatggtgactcagagccctgtgttccctcctcctggctccgtactgtggactctggcaggtcccttcgatcctcacagcctcagtttcttcaggagagacttaggctgggatagactccacacctcactttggtgctgggactccactcatggaagagaaatagcacttagcctggtttccttctggggactgaattggtcctttggtctctgaggttcaaaggtgacaagatcatttagtggtgatgaacaggcatactcaatcaaatacatgttgaatgaagaatggttgcctgggctaatcccaccttttaaattctatgtgtccatctatagtacattctagtga

SEQ ID NO: 819944 - DNA, 607 bp, Homo sapiens
gaagtctagtcttactgataatcaagccagcgagaacttatagcttagtattatggtacacatgtgatagtacagtcatgttgctgcatcatatttcagtcaatgacagactgcatataccgtagtggtcccataagattataatggagctgtattaggctgttcttgcattgctataaagaaatacctgagactgggcaattgataaagaaaagaggtttaattggttctgcaggctgtacaagcatggcacccacatctgcttggcttctgcggaagcctcagggagcttttaatcatggtggaaggtgaagcaggagcaggcatgtcacatggtgaaagcaggagagacttatgaacaaccagatctcttgagaacttgtgaacaaccagatctcttgagaacacactcactatcacgaggatagcaccagcccatgagaaatctgcccccatgacccaatcacctcccacctggcaccacctccaccactggggattacatttcaacatgargtttgggtggggacaaatatccaaactatattatgagctaaaaaattcctattgtctagttgcataatagccattgaaaggtcatagcaca

SEQ ID NO: 819945 - DNA, 625 bp, Homo sapiens
gtacgtaaatcacttaaatctggcataacatctttttaaaaaagcacaaaaattgttataaagttaagcaggatgataagctctagagatctgctgcacaacattgtacctatagtaaacaataatgtattatatacttaaaaatttgttaatagggtagatcacatgttaactgttttaccacaataaaatttaaaaagaaaagtaatcataaattaatattattgaatttgcaatataaaacaggaaattgtcatcaataacataaaaagggatgcagagatataaagaagtaagagtttttatatatgattgaagttatcaggttaaaatacatttttataactttaagatgttttatgtaaccagtgtaataataattaacaaaatagcaattgtaagtcttcttctgttaataattactttaaatgtaaatggatcaaatgtatcagttaaaagaaatagtttgcaactacttgggaggctgaggcaggaggatcacttgagcccaagagttcaaggctacagtgtrccatggtcttgcctatgaataaccactacactccagcctgggtgacatagtgagactcccctctctcaagaaaaagcaccccaaaacaacccc

SEQ ID NO: 819946 - DNA, 659 bp, Homo sapiens
taactggtcctatcacggagatgacacttaccatgtaagattcaggaagatggcaattaaggagacttcagcatggtgcctggtgtgcagtaaacacagagaacgtaaccatcactgacagcatgttgttcaattattaccataaacctaataagctaagagttagaaatattctcatttcatgaacttgtaaagtgaaacccaagaagggcagttgatttatttatttgtgcaacatcaggaagctaaatgaggttttcttatttctaagccatcttctttttactacaccaggctgtctttcatttgcttgggagtaaaaggatcaataattagctttctgaggtcttgagaagttattagcctccagtaaagctagaaactatgtgggctcctgaggtgatttttgcatttgtggctgtggcaaattgcagctcgagggttctaagctcttaatttgttatcattagcagatgtgatagattagctttccaagtggttctaatattgcctcagtgttgagagccactgtctcagagacattccaccacctgagtaggaacgactgcracatgtccagggagtactgtttgtaatagcaaaaaactgggggcatgggggtgggaaactccaaatgctcgacaggagacaggataaag

SEQ ID NO: 819947 - DNA, 407 bp, Homo sapiens
gattaaatgagataacatctaacacagtgcctaaccatttgctaggaaacagtagattttagctctattattccctctccatttcaccttgctggtttcagccaagtgcttagactggtcaaagtaattctgaatcccagaaaatccatgcaactcctgatgatcaaaaaatattctcttttaagtgctcacatatcatctgcttagtaaaccatcctagagtgtttctagaaattaacattgaatttacaaaggtttttcctacatctaagatagaagtcagattgtatctagagttctttccctcacttttatgaactgtgacatgatcatattgaagagggagaaatgaaggacattgtractcattaaatgcataagacccagaaataatagaaagttgactt

SEQ ID NO: 819948 - DNA, 631 bp, Homo sapiens
taggtgtttcgctggcttttttttttttttttttttgacacgggcttacctgggctggagtgcagtgctgcagactggcggaatcatagctcactgcagcctcaaacttmtgggctcaagcaaacctctcatcacagcctcccaaatagctgggactacaggcgcatgccacaacacctagcttatttttgtattttttgtagagacagggtttcaccatgttgcccaggctagtcttgaacttctgggttcaagtgatctgctctcctcagcctcccaaactgtttggactacaggtgtgagtcaccgcacccagcctacttttgttttgatgttcaaattatcctatttgggagcccctgccagctggctcctgtgtacttttaacatgtcccattactttttgagcatatctttactttcttttagaaaatatttatatatttatttttaattttaatttttaaaaatttttatagaaacaagagtctcgctatgttgcccaggctggtctcaaactcctgggctcaagggatcctactgcctcagcctcccaaagtgctgggattacaggtatgagccatggcttctggccttccttactttctgatgcaagatatttctcgcttat

SEQ ID NO: 819949 - DNA, 635 bp, Homo sapiens
accggaccccagaagcctaagccctcrcccctgtgccccggctggtcattcgttcctccagatctttgcagcactaagaagatgctgcctggtgacatttcctgaattgtttcccacgggtcttgtctttcaggctaggacaagttgtttaacctttcacgtgcgtctgtctctcttgcttccctcaattggactgttagctcctgagggggatgagggggtcctgctttataattccttgtgtgtcccacggagccaagcctggtgatgtcttcagtacttgacacttcagatctcagaaaatacctgctcatcgattattggattgaataggttaaggaggagaaccgtctcatgggcagacctggcctgcagccaagacagaagctggatgcgcctccctccggactcttgaccccaccaaatacgacgcccatatatgtcaactgtggcattggtgtttgtcccccacacccctaaaccacaagccaataaattgcagggcactcagacatcaggatgtgtccttcacttgccaccagacctgagctggctacaggccaatgacagcatagggctggccctgcccgcctcccatctggcagcaaggatccagttccagattgtgacctgtg

SEQ ID NO: 819950 - DNA, 601 bp, Homo sapiens
tataccaccagggagtctaattttagtagccattygccccagcaaagcactttgcaagtagttattttgagaaatggtattagccattcggttatttttaatgccccttctgtgacaggcatttgtgacataaacagcagctgaaagaccataaacccatagcccttagatgtgttcagggcccaggcagcagccccttgggatgtcccaagcccaattcaaatggagggaatgggcgagcatcttgtacgccctgccggtcccgcctcactgcctactgctccgttcactggggatgggcagcaagatttgactgaatgggaagcccctctggtctgtgacagccagtgtgctaatgacaaccttcagtgcttgccgacagagtgcaggtgaaaatccacactgctaatgaaggtccctcgtgggctgtccccaacctgatgttctcagaccctgctcccaacacatggcttccacactctctgccttcccacatcctcccctctgctcaagctgacctctcatttggatcagcccactcctcatctctcataacccagcccctgctgatctgcatgctctgattccccataatgaaaga

SEQ ID NO: 819951 - DNA, 567 bp, Homo sapiens
gccacagccactttctcctcctccgccgaggctggggaggtgagagaactctgctctggccaacgccctggagacggcctcctgctagtgacggctgggccctgactggggcaaggaagagctctgggccggcaggcggctgggtcgtaaaagtgcatgcacctgctgggcatccttgggccctgcaggctgcacccagccccaggctgacatcctgttctcagtcccagcgaggagccttccctcctggatgcttgaaggttccagcctgctatggtctgaatatgtcccccaaatgtgtgttggaaactcaatccccaaagcaacagtgttggaatatgggaaatgtttaggtcatgagggctctgcactcatgaatagattaatgccattctaaaagggcttgatggtgccattgactccctcatcaagaagggagtttggtttcattttgcccttccagcttctgccatgtgaggacagagcgctcctcyctctagaggatgcagcattcaaggcgccatgttggaagcagagagcagaccctcaccagacaatggacttgct

SEQ ID NO: 819952 - DNA, 609 bp, Homo sapiens
aaatagagaaatggaggtttgtaaggcatgataataaattctgtttggaacctgttcagtttgagatagctgtgagacatctggatatagaattaaaatatggatctgagactcagaaagctgtctgggctcgggtaaagttgattaagaagttactggatgagtctgggcatggtggctcatgactgtaatcccagcactttggaggctgaggcaggaggattgcttgagcccaggaattcaaggctgcagtgagctatgatcttgccagtgcactccagcctaagctgcaaaacaagaccttgtcaaaaaaaaaaaaaaagaaagaaaagagcagtcactggttggagctgaagctaagaatattcacggcattgcctaaggaaaaaaagtgaaaggatgatgagtgaagaggcaagactcacacaactaccaatttttaagtaaagggaacagagaggatgatagacaatgaagttagaacaattacctagatgccaaagaggaatttccaagatgctaattaaaagacatacttggratttaacaattagtccaactctctgcctgtaaaataaatgaagaacagtcccaaagaagctaagtaat

SEQ ID NO: 819953 - DNA, 606 bp, Homo sapiens
tagattgtaagctcctagaaagtgaggattctattttattcatctctataagccctsacaatggtttgttctgggcctcgaatagacaaccaagaaagactgttaatttaaactaaaaactgtattggaaaatcaacttaacacaccaagaaattgtgttcccagccaatatatgagcagaaggttgaaattattatttgatcttaaatatcttgttaaatttgcattaaccactagattatgtaactttatctttgaaacgtcataacacctctcttacaaatgttccataggctgctaatggctggggacttggaaaagaggggtgggaaacagaagaaggaagcttcatatgcttataaactctattgaaagtggaaaaagtaatcttaaatcttagtcttaagaacgtccccatagacaaaatttgcaaacatagttatttctattgctctttagtacaagatttcttgcaagagacaaggcttagctttgcctaattatttaaattgaacagtcagtaataaatgttggtcttcttgggcttccccacaagctgacaatgaatcatcctggtctatatttctaatttatcttggagtctga

SEQ ID NO: 819954 - DNA, 608 bp, Homo sapiens
ccttaccttatgggccacttcttgtcagcattaactgttgtttttcttttctttctttttcttggctggatggtcccagagctctctttcagcccattgcttctattttctacccattttctatccagtcctatgacaattgagatagtcaatatgctaattgtgttcagcttcatgtccttattttggctttttctgatggcatgcagatctgctrctatactgcttctttaatacctccatgacagttcaaaaaaggcacttcaaactcaagaagcacattttcaaaaccaaattttgattcaattctttctatacaaggtacctaaagtgttcttctccaagactttccagttgcagtaaatggctcaccattttcccagttcaccaaaacatcagctacaatagcagattatttcttgaatttttattatccctcacatttaccctacacccaagccatcaaaatatcttcttggttcaccctccaaaatgtatcctgtatctgtctgttgccttccagcttcaatgacaaagcctatttcaagccaccatgatttttcatgtggatccccgattgcttcctaagaaatcttcctaattttact

SEQ ID NO: 819955 - DNA, 522 bp, Homo sapiens
tttatctaggcattgtcagttgggcaatccaacatgatgctttgactttttaaaggctgattcaaagctgtagagwataggaaattctgtaccaaggtgccaggtgcatcaaatgttcagaccggaagtagaatatagcatccaactgagcacttgggattgtagcaagaggtcactttgtttctggtacatggcctcccttcattcctgcccattgtataagctggtcatctagccattccagtgatgctaggcattgtccaacatcctatgaatccattgtcttactagctgcctagtgctagtttatattatttgaagtgaataaccctgaataatgcacattattcataagaacccccataatctgaatctcatacactcctttgactacatcttttcccagctccccagtgtgcactaagtttcagccaaggggtctaagtaatctttcttgaaaatgccattgctgtttctgtcatgctatattacatttactatttcaatttttttttttttatt

SEQ ID NO: 819956 - DNA, 522 bp, Homo sapiens
tttatctaggcattgtcagttgggcaatccaacatgatgctttgactttttaaaggctgattcaaagctgtagagtataggaaattctgtaccaaggtgccaggtgcatcaaatgttcagaccggaagtagaatatagcatccaactgagcacttgggattgtagcaagaggtcactttgtttctggtacatggcctcccttcattcctgcccattgtataagctggtcatctagccattccagtgatgctaggcattgtccaacatcctatgaatccattgtcttactagctgcctagtgctagtttatattatttgaagtgaataaccctgaataatgcacattattcataagaacccccataatctgaatctcatacactcctttgactacatcttttcccarctccccagtgtgcactaagtttcagccaaggggtctaagtaatctttcttgaaaatgccattgctgtttctgtcatgctatattacatttactatttcaatttttttttttttatt

SEQ ID NO: 819957 - DNA, 620 bp, Homo sapiens
attcagcacttgctgatttccttaggatattgcattcttatcgatgttagagtgttctattatttgtcatatttttattatggcttataaaacaatctcaggaggcgtcctattttcaatgttctgagtatttttagatagaataggaattatgtcttctataatgttttatttgtattcattcataattgtgtatgtacacacatatctttgaggtatttctttggaaactattaaagtaatttctatgctcgttgccatatttaatatttaacagtttcttgtgtcatattccattaatttaaatttatattagaagaacaatattgaagatttgctaacatttacttgtgtacactattgtctttaaattacttattacctgtgtatcttaggctttttatatatatgcttaatcaatttcattatggtgtatttatattttattattttttgcacatataaagatttatgtattttattatgaatrcaaaatgggctttgggtttgtcagttttattaattttctgtcttataacttattaatttctctccattattttttggaaatgtatttgtatgtatccctagtctttatttacatgtgtttagtacttgaa

SEQ ID NO: 819958 - DNA, 632 bp, Homo sapiens
gcattgatccctatatggactgatgatagcttggtctacggtggtgagaaatgataaggctctggatatattttggaggtggtgatgataagatttcaaggtgtatcagatgtaggatatgagagacagaaaggagtcaaaggtgatttccaaatgtttggtttgagactggaaaggtgcattgccaaaaaataaggtcaggaatattgtcagccacgatatttagaaaatctgattctcattggtgaggataggaatctttcttcccctgctctgcaatgctgagaagtctttatgaaaacaacgcaagtaccacaataaaatactattcaggtttttatatgttccacttaaaccaaaccactgtatcatataagctagaattatgtccacattaatttttgttgtactttgattttaaaagtcatgggaaatggatcctagaaataaataattcatggaaactacattattaagttaattctaaccaatagcatgtcattaagatacaaatgtgaaaayagttcaattttattttttaattaactcttcagaagtaatagccgacaattgtccttgatcaggtcaaatgctgtttttaaatgcctgacagtttttaagtctttaatgga

SEQ ID NO: 819959 - DNA, 536 bp, Homo sapiens
caccaacagtgtaaaagtgttcctatttctccacatcctctccagcacctgtttttttcctgacttgttaatgatcgccattctaacttgtgtgagatgatatctcattgtggttttgatttgyatttctctgtggtataatatatcttaagagtcttgtgtctgtcattacaacttaaataaacttattagaattgtaaacttaagcatttacatgtattttacctagatattgaagtattcagtctttagaaaaaatgataaagagggggaaaacattagtacaaaataagatatactaacaaaagtttgaaacgatacaaatgaggcaatttaccagttacctaagaatgcacaaatgcattaaactaacagggatgtgttttaatagctgtgatattttaagaagtgccgatacagctattccatttcttattcaagtatctctaaggcacttctaggtacacataactgggagaaaattttaaaaaccaaccaaacaaaagaaaacttttcctatctgttccaaacacaca

SEQ ID NO: 819960 - DNA, 633 bp, Homo sapiens
gcttcttcagttcagcaagttgaagcgccatattttggggtataggtttctgatccccaatgccttcttcactaaagctgaatgctttggaggggaacatgttccagaagaaactgtgtaagtttgggagtcagacaaaactagatcctaatcctggtatacccatttatcgactatataactttgagacagttacttaatcctgctcaacctcagtttctgttctgtataatggggactcacacctcacttgtgaagttgggataaggaatattacacatatatatgatatatttgaagtacctaaaccataagttttgtctttaaactctggctttttgcacatataggttgtctgaattcttggtggaacttacagaattatcatcatttgaggttacagccatcagaacttcacaataaactaaatatcatttttggaggaattatacataattaaaatatttgtagcctgcatcatcagtggtagttgccaagactgtgagagatgaagakatatatatatatatcttcatcttgtggcacctagaaccaactaataagcccctagggagaatgctaaatggctatgatttcctcatgccctggagttatagctgaggctaaattaca

SEQ ID NO: 819961 - DNA, 625 bp, Homo sapiens
ataaattcagtaaagttgcaggatccaaaatcaacacatgaaaagcaataacatttatatactccaacagtgaacaatctgaaaaagaaaccaaaaacgcaatcccatttacaatagctacaaaaattataaaatatctaaaaagaaatgtagttgaagaaatagatctatacaaggaatactataaaatcctgctaaaaggaattgaagaagacacatggaaaatgaaaagacatttcatgatattgtattggaagaattaatattgctaaaatgataacaacataaaatacactacaaattcagtgcaatccctatcaatagcaatgacaatcttcacagaaatagaaaaatatcctaaaatttatgtgcaatcacgaaagacagtgaatagccaaagcgcttttgagcaaaagcaacaaagttggattggggcagagcaagatgacagaatcattccccctacaagaacaccagtttaacaactgtctatacaaaataaacactttcataagaaccaaaaatcaggtgagtactctcactcacagcmcctgagtgtaacttcatattgctgaaagagaccctgaagaggtaagaaaatcagtcttaaattgctgtcagcacc

SEQ ID NO: 819962 - DNA, 622 bp, Homo sapiens
tacagggctaaaccctatatctacaaataatataaaaattttacctgggcattgtagattgtgtctgtggtcccagctatgcaagagctggagactaaaggatcacttgagcctgggagattgaggctgcagtgacctgtaattgtgcctctgtactccagcttgcgtgtcagagtgagatccagtctcaaaaaaaatgaaaataaaataaaataaatcctaaagtttctttaagcatgaagaaatgatctttgagattaacttggaattttggaaagaataaaaagcaattaaaagggaatatatgtggataaatattagtaaatattgacagtattaatgcaaaaaatgacagttgtggaataagtggaattaaaattcatgagaatataaatgcaagaataactcatgttatatgaagtcaatgtgtttctggtgcttagtaacatcagtggggaaatggtaagtataatattctcttttatgctgtaaaaaattcatgcgaactcttaaaatatgtattaattaaatyctccaaggcaactaagattagtaaaggcaaaaggaacaattaaaatttttaattattccacataactaataaaggagagaaactggaact

SEQ ID NO: 819963 - DNA, 543 bp, Homo sapiens
aggcatagtaggttcaattttaagagataatgtcagttttctaaagtaaaaagacatggaatcaaccaagattcccatcaatgatagaatggataaagaaaatattttatgtatttattatatacattatatataatatatataatttatatatatatacacacatacaccatggaatactacacacccataaaaaagaataaaataatgtactttgcagcaacaataatgaagctggaagccattatcataagtgaactaacacaggaacagaaaacaaaatacctcatgttctcacttaagtgagaactaaacactgaacatacatgggcacaaacctaagagcagtagacactgaggactgcttgaggtgggaaggtaggagagagacatgggttggaaggctacctattgggtagtatacccactaccttagtgatggaatcatttgtacgccaagcctcagtsccatgcagttttcccatgtaggaaacctgtacatatacccccaaacctaacataaaggtagaaaaaagataaata

SEQ ID NO: 819964 - DNA, 668 bp, Homo sapiens
aggaaacttgggttaccagagtatttccacaaatgctattcaaattagtgcttatgatatgcaagacactgtgctaggagccagaaaacaaagaggaggagaaatcagtcattatgtgggaacaacatagcaagatatttagatcattttgactagttaaaaaagcagcagagtacaaaatcacacatgcaatcagtataatccaaatcatgtaaatatgtgcctgtagaaagactagaggaataaacacaagaatcttaacagtcattgtcattagacactaagtctaattattattattagacactatgatatttgagatttaaaaaatctttaatattttaaaatttagagctcttctatttttccatagtattcaagtttgacaatgatcaagtattactctttctttttttttttttttttttttttttgagatggagttttggtcttgttgcccatgctggagtggaatggcatgaccatagctcactgcaacctccacctcctgggttcaagcaaagctgtcgcctcagcctcccgggtagatgggattacaggcgcccaccaccacactcggctaatgtttgtatttttrgtagagatggggtttcaccatgttggccaggctggtctcaaactcctgacctcagaggatccacctgcct

SEQ ID NO: 819965 - DNA, 578 bp, Homo sapiens
atagcctagtgatttattagcatattaatttgctttgccttccctgttgtaggagggagagggagaagaaaggagagtatgggtgaggaaatgagagtgcagtggagggaagagagaaaaagggaaaaagaaaaggagagagagagagagaggaagagaaggcaagaggagggcattagagaaagaggagagaaggcaagaagagggaaagaggagggggcagcaggaaaggaaggagaggggaaggaaggacagataaggggagagggaagaagagaggagagataattttgtgtgtgctctgttttttatattttcccctacccatatagagaagatgctgtaggttccttggcagaaattgcttaaggcaaatctcatgactggcatttgagaaagtttttgttatgttatattggttatccccaaggggaagtttggaaagagtgattgggtgtgcaaggccccagggatatggtgaggggaaaggagaggcaggagggcagagagaaggaagctaatctgcccctcccrtctgggaacttcccaacaccctgtgtaaagaagaaaggagagtt

SEQ ID NO: 819966 - DNA, 271 bp, Homo sapiens
tcagtaataacattcttaagataattaggtgaaaatctatttgtggtaagttgtaacaaagcataattatactgaattttaggataggtagaatataaacttaaagttttctattctctttcaaattgatgtgataacaaataggagaggcaacttgaagttctggtttatagttaggacctgtttgccagttaagcctggacttgagttatgccctggwtgtaaactccctcctctccaagcctcatttaaaagtattggagtaactctg

SEQ ID NO: 819967 - DNA, 491 bp, Homo sapiens
ttatcatatatatacacacagaaaaggatggctaatgagacataaccctcttgactatgtactccctccaagaaaacgctgcacctctctgtttccctactgcatcctccagccccagactttgaacaatagcttgtctttcatccctattttgcacaaaggaggcagtatccctatctctccccactgtgcactctgccaactgtgtgttagagtcctaccaatcatctccacattgcaatagcatgagcagatgtgctttccctcccatccacagtgagcattgtgactaggaagactgtggagtaaaaaagcgatgtgatcattccaacgctgaactaagcatcagaaaagaagcagcactctttttccttcctgtcatgtgctgtggagctcatgaagtagagcrctgctactatcctaatcttgcactagctgagtgacagcaaagatgaagcaaccaactcccacctaattagaaaatagaggct

SEQ ID NO: 819968 - DNA, 654 bp, Homo sapiens
aaataaactattaacataataaacagacaacctacggaatgggaggatattcacaaactatgcatctgacaaaggcctaatatccrgaatccataaggaacttaaacaattcaacaagcaagaaacaataaccttattagaatcgggcaaaagacatgggcagacacttctcaaaagaagctgtacaaatggccaacaaacatatgaaaaaatggtcaacatcactaatcatcagagaaatgcaaatcaaaactacaatgagataccatctcacaccagtcagaatggctattattaaaaagtcaaaaaacaacagatgctagtgaggcttcagagaaaagggaatgcttatttactgttgatgaggatgtaaattagttcagctgtggtggaaagcagtttggagagttctcaaataacttaaaatagaactactattcaacccaacaatcccattactgggtgtatatccaaaggaaaataaatcattccaccaaaaagttacctgcaatcatatgttcatcacaagcaatattgacaatagcaaagacatggaatcaacctaagtacccatcaatgctgtactggataaagaaaatgtggtacatatgcaccagggaatactacgcagccaggaaaaagaatgaaatcatg

SEQ ID NO: 819969 - DNA, 624 bp, Homo sapiens
tcagtcaattatagggtctcactctgttgcccaggctgaagtacactggtgtgatcacggctcactgcagcctcaacctcctaggctcaagcaatcctcccagcttaccctcccgagtatctgggactacaggcacacattagcaacacctggttaattttttattttttttgtagagacagggtcttcccatgttgcccaggctggtcttgaactcctgggcctgagctatcctcctgccatgacctcccaaattgctaggattacaggcacgagccaccatgcccagcctaaatttacctataattatacacatttcataaaaatacgtaaccctaatttcatcacaaacaaaacttttcaacactcatagcacaaatatttttttgagagctggctctgggccagagagtggaggcacagcagtggagatgcagaaaaggtgtgagccacaggcagctcctgttctagtggtggcggtgaatgctgacctcaggcacagagaaatctgcagtaygatgtcaggtggtgactggtgatacaacgaaaactaatacaggaaaaaggatagagaaagtcttgggggcaatattttatatgaaatgaccagggagggcctctttg

SEQ ID NO: 819970 - DNA, 570 bp, Homo sapiens
cctgatctgtaaagcagaggcaatggccttcactctcaagtatgttgtttagattgatttgttcttcaggtgccaggtggcacatagcaagccctcaataaacggaagcccttatttgtatgtttctgaggagtcttcatttcctccaacctagactggatgtcagtgcttcttgctaatccaggtaccattccctcctgccatttgcctggcctgcatggctgtctttgataataacacttagtgtatctcgagcatcactatcttatttgcatctcacaacaaccttgcaggatacatattatcatcattcccatttacagataacaaaactgagattcaggaggaggttgagtcacttgcacaggggcaaacagcttgtaaatagcagaactggggtttgcccccagacctgtctgatctcagaacctgcctgttctaccactcgttttatctccttaattatctgtcctgtctctttgtgccctctgccaagagtaactcttctgcactctrtggacataatagcggatcctttgaatgaaatcacttcctgcttggagcgcaccc

SEQ ID NO: 819971 - DNA, 425 bp, Homo sapiens
gactacaattcccggcatgctcgggctcggtggggtgacggcgggcggtggctgcgctgcacccgactggtgggcgcaggacctgggtcggcaccggagcctgtcatcccggagcggtcggcgggggtgcagagacggcgatgcgcccctgtcccccgcacccgggccgctccgggctcgcgcctcccgccccgcgccccgccccctgccccaccccagtcgggaggcttagctggggccgcagcgcggcggcaacatcactctcgctgccgctgctccgccccatccccttctgtttttctctctcattctccagtggcggcggcggggaaggcggaggcagaggcagcagcagccgcgctggctsgaatgaatgatcccccagcttggggggaggactccaggtgagcctctgccctcgggag

SEQ ID NO: 819972 - DNA, 425 bp, Homo sapiens
gactacaattcccggcatgctcgggctcggtggggtgacggcgggcggtggctgcgctgcacccgactggtgggcgcaggacctgggtcggcaccggagcctgtcatcccggagcggtcggcgggggtgcagagacggcgatgcgcccctgtcccccgcacccgggccgctccgggctcgcgcctcccgccccgcgccccgccccctgccccaccccagtcgggaggcttagctggggccgcagcgcggcggcaacatcactctcgctgccgctgctccgccccatccccttctgtttttctctctcattctccagtggcggcggcggggaaggcggaggcagaggcagcagcagccgcgctggctcsaatgaatgatcccccagcttggggggaggactccaggtgagcctctgccctcgggag

SEQ ID NO: 819973 - DNA, 512 bp, Homo sapiens
ccaggctggagtgcaatggygcgatctcagctccccgcaacctccgcctcccgggttcaagcgattcccctgcctcagcctccctagtagctgggattacaggcatgcgccaccaagtctgactaattttgtatattattttattttttagtacagacggggtttctccatgttggtcaggctggtctcgaactcccaacctcaggtgatccgcccgcctcggcctcccaaagtgctgggattaaaggcgtgagccaccacgcccggccaaggggtcctctttttcaccgaggcaaagacacggagcctcttgagtaagtcactcaaggagatagcgcatgtgaaagaggggagtggaatctaggcctcccgcctctggctgaatccattcccgggatcccacccagcccttcactctctcgggaatttcccagagggggattcggtgaccccgattgacccagtgtgtgcattcacatcttgtgttagcagggaggcgggcaggggtgtgg

SEQ ID NO: 819974 - DNA, 512 bp, Homo sapiens
ccaggctggagtgcaatggtgcgatctcagctccccgcaacctccgcctcccgggttcaagcgattcccctgcctcagcctccctagtagctgggattacaggcatgcgccaccaagtctgactaattttgtatwttattttattttttagtacagacggggtttctccatgttggtcaggctggtctcgaactcccaacctcaggtgatccgcccgcctcggcctcccaaagtgctgggattaaaggcgtgagccaccacgcccggccaaggggtcctctttttcaccgaggcaaagacacggagcctcttgagtaagtcactcaaggagatagcgcatgtgaaagaggggagtggaatctaggcctcccgcctctggctgaatccattcccgggatcccacccagcccttcactctctcgggaatttcccagagggggattcggtgaccccgattgacccagtgtgtgcattcacatcttgtgttagcagggaggcgggcaggggtgtgg

SEQ ID NO: 819975 - DNA, 630 bp, Homo sapiens
ggaaaccacagaggtctctggaaacagggctgcctggcatacatgcatgtacatacctggacacaatgctaatgcccactatgtgttcacagataaggagaaacttcagaaccacaaggggccacaggattgtggaaaggccctcgggtcgggcagcagctccatgaatgctatggacagcccttctggaaaggtcactcagcagccaaggctcagccagacatcagagcagaggccacccccaccacctcccgccaccaaagaaaacgaggctacacatggaacagaaatgattagaaaggaaaaaaaataagaaatagaaaagacaaattccaaactgcaaaggcccggaaaaaatgcctagtgtaaaaagtgaagtagtaaccatctctgttccagcaggatgggctgatcaggtttttcacattgggcccaactccaggttgaatagccgacacaggccctgagcatggcgtgatcaggtctggggaaaattgctgccctgggcctggcctgtggacctgaagtgtcccatcttgtctcccactgtccacccccacyccatccctgccagcactcacacacacagcggctccgcgatggatccagcatgaggccaggtctgcatgt

SEQ ID NO: 819976 - DNA, 649 bp, Homo sapiens
tgaacatgaaataagcatgtacaactctgagcacaacacttgtcccattttaggaattctcataatgtccattattcagatttccctccttggtgaaggaccagtggggccccccagtgattatggacattctgcccaaagatggcctctgactgcctcctcagagcaagatagaaccaaagtcaccacaaacagtgaggtcgaaaaagagtctggtcagacccctggctcaggcaggtgccacctagccacccctgccccagcccttcctccgctctccgggctagaggtgccacatgtcagtgacacccacccctgctgggttgggagggtgctcacttaagcctgaggcacaattcattcccagcaggcttcaagtcccttggaagaagctctcagaacatctctgagccaaagagacactgccttttcagctgacaactggaattctgaaaatcccatttctttagagtaggggactgggcatctcatccagaatcccagagaacaggagccccaccccagcacagctgttccccaagcyggggtcctccagttcagcaaatgcttgtgccgggtgcaagaagcagcagagagaggccacttgcagagtggctggaagcaggcaactggagtcagataggccggg

SEQ ID NO: 819977 - DNA, 691 bp, Homo sapiens
tactggcaagcatctaatttatgtcaaatctaatattattttcctagagtgaaagttttccctgtcttgtcttagtcctaaggaaactttttaagattttctttttcagaagaagatgaattgtgaaagcaaagttgaataacacatgttaaaatttgttgtgaggaagcaaaatgtgtcacacccatttaaaaacacttgatatatatatatatatatatcccaaaaatacttaaaaatgactgaacatcggccatttcttttaacattaaatgttaaagaaaaatttcaagtgttatattttaatcaaaaccaaagcttttgagtaatttgagaggggagaaaaatggagatgggaagcttttgcaggagaattttttgctcagacccagttcaaatttgtgattccatttaggtatattattatttccataactctgaagtttctgaaacaaatgtccttctttttgctgactgtctcagatgtacctagctgtgatggtagacagtggtgttgttaaaatggaagatgaagcatttcaggaagtcacaaaaagcaactggtgttcactgagcatcaatcacattgagcttgacaggcaatgcgtagccatgactyagccatcccctcaaccagaactctccaatactgtgtatcattgcctccattttcatagaggcagtgaccgat

SEQ ID NO: 819978 - DNA, 647 bp, Homo sapiens
caaggagctcagggttttgcctattcagaaaacagggagcagaatgtttcctcaattaaaactccaaacctaatttaaggattctatattctctctagcttcattctagaaatttttatctagtcttgggtataagggaaaagctggcttcccaactgattagtgtttcttatctggagatcttaacataggaaaacccaaagtaaaaaagcttacattttaatccctggattcttatagtaccactgtcctttgagacaatgggtgcctcatgactttgctaattttcccataaaaataaaaagcagagtagtgaaaagagagtaagacaaattggtaaaattcctggataatctttgtttttcttcgcagatgcaccccactatgtgtccaaaccctgactcttgcctatggtttctggttgggtttagccaatagaagacactggcaggagaacagtgaggtcagcattttgattattggagcagcctcttggccaggatgtggagaggttaccacatccctgtacgkgtggctacgggtggtacaggtggctacgttgtcttccccacagagctcctccacaccacttcctggagccattcctagcagagtaacaccagctcccagggcacagcaccagcctg

SEQ ID NO: 819979 - DNA, 526 bp, Homo sapiens
aagaaatctcctatgaaatttataaaatttacacaagttccaaatacatgacttttctgggaactcttcatcaaactgaatgaactcrgaaatattccccaacttgtatttctgtgagctatatgtcaaattattcagttgcatccaatgtcagtaggataggattataaatcattctactacaaagacacatgcacatgtatgtttactgcagcactatttacaatagcaaagacttggaaccaacccaaatgtccatccaggatagactagataaagaaaatgtagcaaatacacaccacagaatactatgcagccataaaaaagcatgagttcatgtccttttcatggacatgaatgaagctggaaaccatcattctcagcaaactaacacaggaacagaaaaccaaacaccacatgttctcactcataagtgggagttgaacaatgagaacacatggacacagggaggggaacatcacacagtggggcctgttgaggggtagtgggggcaaagggagagaga

SEQ ID NO: 819980 - DNA, 639 bp, Homo sapiens
acatacagacacacacccctatatatctcccaaaatacagaaaaacaaaaatgtaaaaataatctataacaacacagtgtagaaatttcaattagtttacctgtattgatatttatatcatttagatgatggagctgaacctaaccacagtattttgtggaatgatctttaaatacattttattgtatttcagaagcctccacatgcctcttcctcatccttcttcatccttccaggagtaatttactaatgcaacatttatgacctttacttcgctattattcttaatcattttattagtatttaaacaaaatttggactttgtttaaatgtaatcaaattgcacatgttctattgtttctgatctctctctctctctctgtctctctctctcaatattatgtctgtaagactcttccaggtttgtgcttacttatgcaatacttttatttctatgactgtagttatagctttccatatcaatatactattatttgcttcttccttctatggatattagaaggtttatttccagccttgggttatttaggctggaaatagggtttagggttctttccagtctatttaaatatatttattagacttatattwgaaatataattagacttatattttaaa

SEQ ID NO: 819981 - DNA, 589 bp, Homo sapiens
atgacatctgacctaagggtcctgatgacgtctattaaatattagtaaatcttaatttctttattcgtttttgaaataatgaatamtaattataaatagtatatatatactatttcaatatatattaaaataaatataaatagaattatatatttatattttatataatataaatgttttatttatattatttattttatataaatataaatagaagtttattttttattctaattattcctctattgattttgttaacaaggactcaagaaccacacaacagacagcagtgacttaagaaaaggaaactatattatttgcataaaatgaaactataataataaaaataactgtaagtgatgtcatccattaaaaactcatatttaccattaaatttattagtaccagaaactgtgctaagcccataatgtatgttgacatgcctataaggagcctatactttttaataaatagtttttgattgtagaaatgtagttttgctatttttcagctattttgacaacaatatcagcacattgacaaattagtaacttgaaacaaatattaagttgacctaaattctggagtt

SEQ ID NO: 819982 - DNA, 571 bp, Homo sapiens
cttctaccaaaaaaatcaaagatgtttctttactgtatgtattctcacccttagcttccaatgccttttttatagtgaagaactttttctagaaataatgaaaatgttagcatttgtattattctaaatattttcagagaaatgatgaaaaaggatgataggaacagtaacaataaaatgatgaaaatgtgaaaccgcataaactaggctagcatacaagtagaagatctcccaactgtttaacctttattctcaaaaggaaaaagaaaaagcaattgcaatcacattacgagtgcctggcctaggtttttaacatgattaggagatttcatgcatgatgtcctaaagagaaggcaatcaagaaaataattttgcatgctgtatattaatgaatgtcaccatattaatagtagtaaaggcacaaactgcaattactttttccttttccaactcttcatgtctttagtatttatttcttaataaaacaagccaaaaamaatttttaagtggtataatggcctatgaaaatccagtaaaagtttggatcctaatatatacattaaaatgataa

SEQ ID NO: 819983 - DNA, 572 bp, Homo sapiens
tttttgtccatttttttgtcttgccactcctaacgcacacaagagagtccctaagataacttctggtagcctagaactccttgggaaaaaaaaggaggtgccacagaccccgttttgagaaaaaaatctccattttcctcatgaaatcccaagaattaaaagtggatacatgtctctcaaaatcaaaggccccattctgttttgcattgtgttctctgacagcattgagttttgggtgtatcaaatgactttgcattgggagagagcttttgtgtgtaataaccatgtaggaaatatactttgaaggatggctaatagtggttttggagggatacttaaccctttgcacattagaatcagagaagcatgctattggccacctgaaagatacgaaaacatcctcaccacccattaagagatgaggagactcccacgggggatgggccggttataaaatggtctgattggctttggttttctttgaaatcaaatgtatggtagaagcactccactgtcttctcctatactatcttcctcctttgagggatccragatccagtataaaatggcac

SEQ ID NO: 819984 - DNA, 394 bp, Homo sapiens
ctccctttaatacccctaaacaagacagagtaacagctgacgaaagactagagtcaggacttccaggcaagaaatattacagcctcttttgtaatstcgcaaactggaaacagctcattaaaagggaaatgttagcatgaactgtggcttttgtctctaaggagtattaggcagctaatctctctctacaaagaaaactaggaaaatgtccacgaaaatctttcactgtgaaaagcaatgtgtggtattttatgtactatgatatcatttgtaagattaaaagaaaaaaaggctttctcagactatatgggtttgtaggatttctggacaggagggatgggaggaagaccacaccccagagtgctaatagagattatctcatcgggttaggacc

SEQ ID NO: 819985 - DNA, 390 bp, Homo sapiens
tctcaaaagaagacatacatgtgaccaacaatcatatgaaaacagagctcaacatcactgatcattatagaaatgcaartaagaaccacagtgagataccgtctcacaccagtcagaatggctattactcaaaagtgaaaataataataataataacagatgctggtgaggttgcggaggaaaagaaacacttatacactgttggtgggagagtaaattagttcaaccattgtggaagacagtgaggcgattcctcaaagacctaaagacagaaataccatttgacccagaaatcccattactgggtatatgtccaaaggaatatacattgttcggctatacagatacatgcgtgcatatgcttattgcggcactatttgcaatagcaaa

SEQ ID NO: 819986 - DNA, 455 bp, Homo sapiens
ttagagaactgtgtaggtctcagtgaggaccatgtataaattaggtagaaatggaaccatatctgtaatacaagaggaatttagtctcctaatgtattctaatcccaacttcctaaactcactctggattttgtggcccatcattataatcactaccttacaggtactctgactcccttgcctatctctccctctgttgcacttatgcctggcaaaattctccctaatgaaatccaactaaactcttactttatacctccacctaagtattgaaatatggcttggggaaaaaaaaaaacagtcatgctgacatgtctcaataacctatttctctgctcccctttacagttaaattccttaaaagattatactctatccacttcccctactcctactccttgttgaactaatcaggctttcattcccatcawtccacagaaagtgtccctgtcaag

SEQ ID NO: 819987 - DNA, 386 bp, Homo sapiens
gaattctgatgagttaaaaattattctctggaactccaaattccttacaagytcataggggtttccattttgaaaacaaatctaggtcaggcacagtggttcacacctgtaatcctagcactttgggaggacaaggcggggggattgcttgaggtaaggagtttgagaccaacctggccaacagagctctaattttgagtttgtcaaagtataacatgtttttaatgtatatgaggataatgtttttcaggcagggccctgtactctcactgaacagctcttcccttgaactcagtaccactcacacatgtatacatcttaagtccactcttcaacatctctctcataatccagttttaaattttcaactggtgagcattaccaca

SEQ ID NO: 819988 - DNA, 581 bp, Homo sapiens
tctgaagcactattttgctcttgacagatgacttcatgtttttaggatatacaattttttcaaagtcccattcccaagttttgttttgaggatgttaaacacaatatcacacagctaaaaatgaactttaatcaagtaagatttggcatgtgtattttgtaaaaagtctccagttgattgttacctccgtttcctggtgagacctgctacatacatggctttcttgcatctgactgacttcttgtctactaccttcccttgtccttactccagttcccaatttgtgattttctaaacttagcccagtctaagtttacatggaaaactcatccactgtcacatatttaactaattccatgttgacaccatgttcatattagagcttcagcatgtttccatctgttcttaagttttctccttataaattaccttgtatagcctgaaaaatgccaactctattctccaatgttccctacactctaaacttgaaactttytaaaaatcagagctgttcaacagtctgctgcatctggtacatttccaactggcagcagttagttacatctcttatttctagacag

SEQ ID NO: 819989 - DNA, 572 bp, Homo sapiens
agaaattatttcaaaattcatatggaaccaaaaaagagcccaaatagccaaggcgatcctaagcaaaaagaacaaagctgggggcatcatkttatctaacttcaaactatattacaggggtacagtaccataaacagtatgtaccaaaatagaataccgagcctagaaatagggcggcacacctacagccatctgatctttgacaaagctgacaaaaacaagcaatggggaaaggactccctagtcaataaatggtgctgtgataactggatagccatatgcagaagattaaaactggacctctttcttacaccatatacaaaaatcaactcaagatggattaaagacttaaatgtaaaacccaaaactataaaaaactttggaagacaacttaggcaataccactctggacataggaatgggcaaagatttcatgatgaagatgccaaaagtgatcaaaacaaaagcaaaaattgacaaatgggacctaaatataagatcatctgcacagcaaaagaaactgtcaagagagtaaacaggcaacctacagaatcggagaaaatatttgcaaa

SEQ ID NO: 819990 - DNA, 541 bp, Homo sapiens
aaatagtatagaactgttcattgtggcagaactaacaccatgagaaaaaataaatgtaaatctgcagatttcattaaaaatatataaggagaatgttagtatagcaaatgattcacttaaaaagattgtaagccatatgatgctgaccaaggtaacgtttcacctctccctttacatagagatcatggttcaccaagcattgcctgagtggcagaaaggccatgggaggcacaagaggaatgtggcagagtccatgaccttaagcaactttaacctgcatgggacccatgcaattagctataatcagatgttatgagggtgagatcaaagcaagttgcattttgagcccagggaaaggctctaacccccagaaaggaagaagatgacatcttactggaaggttaaaggtraagaatggagagaacaacattctaagcagaggaaagagcacttacaaatgcacagtggtgcaaaaatgatcacaatctattaataaagccaaataattttattagagtaagagaggtgagaaggtgagaga

SEQ ID NO: 819991 - DNA, 601 bp, Homo sapiens
tttcaaatttcacattactttttcctccaaattttgtttcctccaaatttcgtagagatgagacataaagaacggtgtgcagtgacttccaggagacaggaaatacattacaggagttaatcaaacccagcttaattattaaattcatttctggaggaaaggatgggtcctccaaattagaatctatgagatgctctcgggaaaaagactctgcaccagaagccactgacatgcaggtgctgggtttctgatctgggagtttccattgggccataaattcattgtatgtcttagaataagttacttagtttccttaactgtaaagtgttttgatcaaaatccaaggactcttctcaattttgactagtaccactcaattatctagatacttacgtatcgaccattttattgcaaattcttcacttcacaaacctgtcttcagaaaactggagaaggtcaagcaagcattcgagatgattgaactcaaactcagtttcttaacaaacacttsatggacagataaaatgtgccagatattgagttgtacatgggtaaaaacttatctttattctgataagacaatgtcaataaagaatatata

SEQ ID NO: 819992 - DNA, 332 bp, Homo sapiens
aacaatgtttaaccaacatccattgaataagtgaagtatgaataaaagaatgacatacttttatacataacctttttttcttctgacaatgttctcatgttcctaggaggctgtgtagtcctactccatggcatattaggctactgatatacaaagcaatagcagcaagaatttatagaatgcctcattggttagaaattcttgtttaatcctcattcttcataawcagatagaggttaagaggaatttcatttcatcctttatgaacttgtcacgatactttatcgagaagtctgtgactggaaaatggaaactcagggtattcccaatat

SEQ ID NO: 819993 - DNA, 605 bp, Homo sapiens
gcaagcttattcaaagtaatatgagattattttgaagcatttgtggaggaagtcttcctaagtayaataagaaagcttaaagctactgaacaaataatgaccaatttaatatttaaacattcaaacttctataaatcaaacatcacagaaacttagtcaaagaataatctacagagaaagtatgtgtaacatatgtgacgaagttttagtatcactaaaatatgtaagttcttaaaatttgttttaaagacacaaacataattagaaaaatattgagaagatatgaaaagttgattgatgaaaaaaagaagtcaaaagtcaataagtgggaaaagcaagttatacaatagattcaaggccattatttgcccataaattgataaatggaaaaaatgattgacagcatctaatgggagcataagaaattcacatacattgtagataggagtgtaaatatcctcatattctcacttctctctttctccagcttagattgatacagcttcagatgccctaagatttcattataatgcacctgcaaaaggcctaatccaaacccctgtgaaattcaaatctctgccttctctatggctgcccctgagcag

SEQ ID NO: 819994 - DNA, 524 bp, Homo sapiens
gttcacttatgataatcttaaagacttcaccaaaaacaatcttagttttgaaaaaaatgaattcagtaaagtttcagatacaaaatcaatgtacagaaattggtagcatttytatacaccaataatggtctagcagaggaccaaatcaaaaaaggcaatcctatttataataactacaaaaataaaatatttaggaatatatttaaccaaggatgccaaatatctttataaggagaactataaaattgtaatgaaagtaatcatagatgacacaaacaaatgggaaaacatcccatgctcatggattagaagaataatattgttaaaatggccatactgcccaaagcagtctacagattgaatgaaatccctatcaaactaccaatgtcactttccacagaattaaaaaataaattgaaaaagtcatatggaaccaaaaaaagcctgaatagacaaagcaattctaaacaaaagaacaaagctggaggcatcagattacttgacttcaaattatactacaaagc

SEQ ID NO: 819995 - DNA, 444 bp, Homo sapiens
aagttactcgtttccaaaatttcaaaaggaagaagtaagaaaaaaagagagtgaagggtcctaagcaagtccaaaacatagcaagacaaatgttacaacttaagacttgagaataatcctctttggcttgcttccctgtcttctggacccactagggtgacaatctgctcctatggctttactgagcagttgtcatgttcccaacactctgctaggaggggatcccacactcaaggctttaggcaacccctcacccacatctctggctggagactgtttagcttattaaaacagaggcactagacccatcctttgaaactgaggaggcagcactgatgatctctgaattaccttcaaggtcattctttcttttttttgaagaatagtgcatttacagtagaatagttktatgattgggtcatgtaggatctaaaaagtttgaca

SEQ ID NO: 819996 - DNA, 685 bp, Homo sapiens
gtgtttaaagtcatgcatttttgttaaagcacagggcataggtaaagaaggacagatggaaagaaatacagataaattaacaarcccatacatagattcacagagctagagaggtagaattcaatagaaatatgactgatgtatttcaggggagggaaataaggtataaaccaaaatttctaaaatattgataaatgaattggtgtattctctatctaaatatctgttgatattaacctgctttgtaaatctttgttattagtagtcactattttttataaaaattatcatacttattcaaatcaagcaaagactacatatattatcagccaattgtcacaaatttatgtgtttgtttttgttttgttttttaagagacagggtctcactctgtctctcaggctggagtacagtggcaagaccatagctcactgcaagttcaaacacctggggtcaagtgattcacctcagcctccctcgtagctgggactgcaagcctgtgccaccataccaggctaatttttttttaatagaaatgaggtctcactatgttgcccaggctggtctggaactcttggcctcaagagagcctccagtctcagcctcctaaagtgctggaattacaggcatgagttgccacgcccagccttaatttatgtctcatccagctttgtctttccatagg

SEQ ID NO: 819997 - DNA, 606 bp, Homo sapiens
aaatagagaaatggaggtttgtaaggcatgataataaattctgtttggaacctgttcagtttgagatagctgtgagacatctggatatagaattaaaatatggatctgagactcagaaagctgtctgggctcgggtaaagttgattaagaagttactggatgagtctgggcatggtggctcatgactgtaatcccagcactttggaggctgaggcaggaggattgcttgagcccaggaattcaaggctgcagtgagctatgatcttgccagtgcactccagcctaagctgcaaaacaagaccttgtcaaaaaaaaaaaaaaagaaagaaaagagcagtcactggttgaagctgaagctaagaatattcacggcattgcctaaggaaaaaaagtgaaaggatgatgagtgaagaggcaagactcacacaactaccaatttttaagtaaagggaacagagaggatgatagacaatgaagttagaacaattacctagatgccaaagaggaatttccaagatgctaattaaaagacatacttggratttaacaattagtccaactctctgcctgtaaaataaatgaagaacagtcccaaagaagctaagt

SEQ ID NO: 819998 - DNA, 603 bp, Homo sapiens
ccctggctcactgataaatcacccctcagaatatagtcatactgcttgttgaggagttcttatgacccaggccctgggctctacatacattatttaatctcatcactggttaagagaaaaattgaagctggtaaatggtggaacaaaattcaaactcatagctgtctgaaaagtacatgcttttcccctgtactttgctgctcctaatagatctgtcctgccactgtgcaaggccactagctatccttgtcagattattttaaagccgaattcagttattttcagtaaattgtatatatcatgacattccaccattaaatacttcagtatgcatctctataaaataacattttcccactaataaaaacattatcatagctaacaaatcactaactagcccagtaaacctaaatgacttatttaaatgttatattttctttttttttttgagatagtctcgctctgtcactaggtttggagtgcagtggtgcaatctcagctcactgcaatctccgcctcccaggttcaagcgattcccctgcctcagcctcccgagtagctgrgactgcaggcacgcaccaccatgcccggctaatttttttt

SEQ ID NO: 819999 - DNA, 565 bp, Homo sapiens
gttcattttcttgaagccaggtagtgaaagagagagacttcttcctgttataaatacgatgttgcagctcagccctgaagaaaagggaaaacttgctgcggttgctcaaggtgggtaaaaggagagtctcagaacttctgacttctaacttaaactaaacagcctggtggttgagaagttgtctgtatgtgtaacttttcaattttgctcatttgaattgggtctgtcatatgagtaggccgtgactagatttgaaaagctgactttttaacatcttgaggcaactgtagtacatttatataattttaacgttcagcaaaatacaataagtgcttagcttgatcttctagctctttgaaaattggatttttatcctggtgttgcgttctggtgttcagctgaacgtggttttgttttaaattctactttttaaaamacatttattagtttgttccttttctacttcacccctcttccttcctccaaccccaaatagcctaagacaatggagtcatatagcccaacacttggtctatatacagcagtccactttctaggcaaatgc

SEQ ID NO: 820000 - DNA, 543 bp, Homo sapiens
atcctggctaacatggtgaaaccctgtctctactaaaactacaaaaaattagccgggtgtggtggcaggcgcctgtagtctcagctactctggaggctgaggcaggagaatgstgtgaactcaggaggtggagcatgcagtgagctgagatcgggccactgcactccagcctgggtgacagacagactccatctcaaaaaaaaaaaaaaaaaatcatttggggcccggcgtggtggctcacgcctgtaatcccagcactttgggaggccaaggcaggcagatcacttgaggtcaggagggagttcaacatcagcctggccaacatggtgaaaccccatctctaccaaaaatataaaaaattagctgggtgtggtggcgtgtgcctgtaatcccagctgcttgggaggctgaggcaggagaatcacttgaacctgggaggtggaggttgcagtgcactccagcctgggtgacagaacgagactgtttctcaaaaaaaaaaaaaaatcatttggaaatgattgggaaattgaaatttttttttaa

SEQ ID NO: 820001 - DNA, 631 bp, Homo sapiens
gggtcaacgaacttcatcatacacttatgtcatagcattttttttgcatcttgccttctttagtacaagatttaatrcttaagaatatagtctttgaggcccggcatggtggctcacacctgtaatcctaacactttgggaggctgaggcaggaggatcgcctgagctcaggagtttgagatcagcctaggcaacattgtgagaccttgtccctaaataaaaaaattagccacgcatggtggtgcacgcctgtggtctcagctacttggagatctgaggtgggagactgcttgaacccgggaggttgaggctgcagtgagctgtgatcacgctgggcgacagagtaagaccctgtttaaaaaaaaaaaaaaaaaaaaaatatatatatatatatatatatatatatataatcacggaatatatatattccgtgaactcagaaaggtttgctgatcatagaatcttagacaaattacctaacctctatagatcttatcttcacatctttaaaatgaggatgcttctacctctcagagaatgcatatgattaaatcagataatatatgtcaagtgttcagcagagagcccaacacacaaaattctttcagtgattggggaatatactattttt

SEQ ID NO: 820002 - DNA, 617 bp, Homo sapiens
ttaattacttgatgcaaaagcataatggaatagtataactggaaytggtgggttgtactgatttacaataagatatcaatcaaaagtaactcttaagtctttaatatttgttttccagggaaaagtctattaaaatagatataacaaaggccataaaataatccagtctgtgctagtctaattgtttaatgctggaatagaaaacagaactacaagtagccagaagaatgtgcttttgctttgcttctctcccctctcctcttccttcctcctctctcattacaggaaacagctctaaaactcaatctagaccaagaggaataaaactaccatccctttgacacattcaaaagttgattaagttttcaaaaagcttagtaaaataaaaggcatatgtagctgactttgagggactagtctaaaattaaagaaattataaatgattcctacaggactttcacgcaaagtaaacttacatgggagcaatcaagcaaggctgtaagtaaaaataattccaaaccttgagataaacagatatttagcataggagagaataataaagtgggtcaattcagttctgagaaaccttaaaaattgttattttcttctaattttaa

SEQ ID NO: 820003 - DNA, 619 bp, Homo sapiens
gcagagggcttctcagagaggggcgctgggcagttgcggcggcggaggtagtgcagagcaggaagcagcgcggaagcacagcgggaggcggagggggacgcccagcctcgtcaaggtcttcggccaccccgcccgggaggctcgaaactggctttggggtacctgaatgcctcgactcccagggagacatcgggagctcggagccactctccctgtggcgatggcacctgcctcaaggccgtctcgcttgctgatgcctggccgggaaggaggatggacgccgctggcatgtgccctggtaagtgtgtctgtttgtcatcagtgtacattctgcatgtggcagcagggcgagggggaggcgcacgtgtctaaagtgcacggagccttcctctacccctatgtatatacccttcagtcaatgttccaagaagcgggtcagggcggagggtatccatctggactctggaagggcgtgggtttgacatcggtaggtgtgacaggaaagtccagcctgtcagrgttgggctctacagtggccgaaatcaagaaaggatggacgtgtcggcccagggctggcctgtttccggatatgtcacgggggtgcctcgttcctcgaggg

SEQ ID NO: 820004 - DNA, 598 bp, Homo sapiens
agccttaatgctcatgtgatakagaagtgggaataggaaggaaaacattctttaattcatgtctctctttcgtaacagttaaaaccttcttttatcaatgacatccaattcagcttttgcaataccagtgggcctctaattatcaaaacaaaattcaatcaaaacaattcttaaaaccacaaataatatttttggaaaagcaagtacacacacaaatcagcaattataatgtatataggagtagcccttatttgaaatcatacatttcacattatgttctgaactagtggtctaggaaattatgcattgtcatatgaaatagctaagaatactaaagtggtttcagatactataatattgagaaaaaactgttaattctgcaaaataactactttataaataaaaatatttacagtaggacctcacagggattcagttattacaactaaagcttctgtagtgctcatctaaggaatggctctagcagttctccaaataatatctactttaaataaactcactgaatccacttgtaaattatttccctttggctgtgtcattattcactatgctttcaaggaacatggtgatgaaagaa

SEQ ID NO: 820005 - DNA, 527 bp, Homo sapiens
ttcacttattatattttctaactcgaaagatttctcttccactcacttttctttctttytttttttttttgagacggagtctccctctgtagcccaggctggagtgcagtggcgcaatctcggctcacggcaacctccctgcttcccgggtttaagtgattctcctgcctcagcctcctgagtagctgggactacaggcgcatgccaccatgcctggttcatttttatatttttagtagagacagggtttcaccgtgttagccaggatagtctcgatctcctgacctcgtgatccactcacctcagcctcccaaagtgctgggattacaggtgtgagccactgcgcccagcccacttttcttttacaaatatataattcctatttctctttatattttacctttttcatctatttttccttcctaattattatgttccttctgatgttggtctttttttaatttagggacaaactttttattactaaatatcctctggatccagaggtcatagggttatttttatta

SEQ ID NO: 820006 - DNA, 532 bp, Homo sapiens
aatgataaagtggcactatgtaccaggcacctgctgtagattaatttctttcaaaatcccatgaaatagtttctgtcctcattttacaggcaactgggccacagagtttgggtgctttggaggtcacacaactaggaaaagcaaagctaggattagaagtcaggacatctggcactggagtctgttttcttaactgctagaagagaaaataactcacattttctctagggtgcactgttggcctaaacaagggaaaaaaggaaaattaaaacctaaaagttaagaaaattagtcatacggttagagaggtcagagcttatttctgttatacactggaatccagtttgaacataaaacctttcacatcaggtattatttttcttacaattccaattatgttcagcaagtatatcccaatgctyttctgtgctgtcaagacaagcaagatcctattgtgtgtgctatcattggtagattcctcgtctaggcactcttggccagtgttgagtccgaatgctgttattatgtgaaa

SEQ ID NO: 820007 - DNA, 497 bp, Homo sapiens
ccgaggtgggcagatcacctgacttcgggagttcgtgaccagcctgaccaacatggagaaaccccatctctactaaaaatacaaaaattagccgggcgtggtggtacatgcctgtaatcccagctactcgggargctgaggcaggagaatcgcttgtacctgggaggcagaggttgcagtgagcagagatcgtgccattgcactacagcctgggcaacaagagcgaaactccgtctcaaaaaaaaaaaattaatatgtcctttttgcggttgaaatggctttgagttaagccttattaatactttaaaatcaatcaatgtattgcttattgaggtttaaaaatcactgaagtttttacataaaagtaaatgttttcagatttaaaataataaagtgtcccaataattaaatgtgcagctagcaactgaatattatttcatttatatttgtttgaagataaaaatgtattttcatatttctgtgtggagtatgtggat

SEQ ID NO: 820008 - DNA, 601 bp, Homo sapiens
atttgggtgctcggtatgctcattgctactggaatatcattgcttctggatcatatatatgtgtgtgtgtgtgtgtgtgtgtgtgtgtgtgtgtgtataaatccatatatataaaatatgtatayatatatatgtatgtgtatacacacacactcatacatacacacatacatttccagttccaatccaaccccacagggtttattgttttcctacattctgcacatttctttgcacagtaagaacccaataatatcaacacatttattcatttctttagtcctatggtacttatcatatgggttcagaattgttctacccatatcattatgacatacaagctcactaaaaagaactcaaaatctgtgtgtagtttgttttgtgtttacccttagaaagatggtatataatgcactgtgtttaaaattatttgtattcattttttcttttctttttaaatctagttatacaatttatttcagttttcatttcccccagccttgtagatttaatttttttattatgtagaatatcaatatatttccaaaagcaaaactaaatagaaaagtgtttgtgcattcatgtagctaactatatcctt

SEQ ID NO: 820009 - DNA, 609 bp, Homo sapiens
tcggaagttccttatgacaaagaatagctgaaccataaaaacttattcacaaggctaaggtgggaggatcacttgaggtccggagttcaataccagactgggcaacatagtgtgaccctgtttctataaaaaaaaaataaaaaattagctgggcatggtggcacatgcctgtagtcccagctactcaggaggctgaggtgggagtggctcaccctgcactccagcttgggtgacagagcaagaccccctccctaaaaagaaaaaaaaaaaaacaccaaacttattcacaaaaaatgtacctctttaaaggaatgctaactctctgatattgacatttttaaaataaagcattcaaggaaatatttcaaaaaactaatgttttaaaattcctgcactgaatatagctaaaaagcctgcagtgttactaatgtaaacatcatcttgtttattttagtttatattagatgccttcgatacagatataaatcttagctgytgattaatgcaaggatgctatttcactgcctgacctgctgaatagttagtatacacaaccgtaaaaagatcacttcaggaaatcggtcctagaaaaagctgtgaaacatgaga

SEQ ID NO: 820010 - DNA, 501 bp, Homo sapiens
gggctaatttaagagcattttctaaactagttacacttgggctagcaataaataatagcrgtctgccaacaagtaaaatcttctcattgggcaactaagattcattttcaaaacaggacccatcactaaaaaactaaactataaaatgtgatgaataagaactgggaatactgggaatccagaatacagtattcagtttgctttctctaccgtttcatcaattctatgttattttcaaaaacagagattttcttttcacttcctgaaggtttttgtaaatcttgcccttaggccgaaagcttaacatgtgctaaaaatacacacaaacctccatatgttttctatctaggtcacacaaagttggagcacctggatgtgccaactaagaatctgactctagtcagtatgatgacagtgcaaaaacacctcaaaaatatattattacatgcacaccatcttaggtttgaagttagccaaatatatcttgcccctaattcctac

SEQ ID NO: 820011 - DNA, 531 bp, Homo sapiens
attatagattctcgagtattttatatgtagaaaattgtgttgtgaataaacaacatttaaattcttttttttggtccaatctctaygcatttttttcccttgccctatgcatttgctgaaggcttcagcacaatgttaacaacaggtagtaaaagcagatatccttgccttattgctgatcttagcggataaacattcagtttttcaacatcatgcgtgatgtcagctttaagtttttgtcaatgctctttttctggattgagacagttttattcaattcttctgttcctattttctgaaatatttactttgaatgtgtgttgaatttttgtcaaaggccttttttcttctgaatttattgagatgctaggggtatggtgtttctcttttgttctgttgatatggtaaattatgggtattctaatggtgaattcatggaagaaaccctacttggtcatgatgagatgccctgttttgtattgctggatttgtttgctaatattttcagagactcttgtgcctatgtctatg

SEQ ID NO: 820012 - DNA, 615 bp, Homo sapiens
  misc_feature 592: n = A,T,C or G
gtattaattgaagatagactgtaatatgttaaaggtacatatttcaacttctagaataacccctgaaactaactgtattaacttcctattgttgctgtaacaaactctattatcttacaattctagaggtcatagtctaaagtgggtcttatggaactaaaatcaaggtgtgaaaagagctgcatttcttctggagtcaattcagaagagtctgaattttcctgtgtccagaagctgcccacatatcttggctcttggctgcatcacactggcttgggtttccaccattatatctccttctgtgactcttgccttcctcttccatattttaaggactctgcgatcacattgaacccacgaagataacccagggtagttttcctatctaaggatccttgtcttaatcacatctgcaaagtctttttgccatgtagggtaacattagcagattctggagattaaaatgtggacatcattaggggaatattattctgtctaccacactaacaaaagaaatgtagctaaaatatcaayatggaatataaagcagaacattttagaggtgcataatttatccaaaagaggagagtanaagagaaacagaaacaatgaaca

SEQ ID NO: 820013 - DNA, 392 bp, Homo sapiens
gttacctatcattttaattttagccattttactgtgcgtggagtggtgtatcattgtaacttgcatttccataatgactaatgatgctgagaatcttttcatatgcttatttgccattcttatgttttctattgtgaaatatctgttcaaagcttttgcccatttttaactaggttgtttgtcttcttgctattgagttgaagagttctttatatatactagatataagtcctttattaaatatgtcttctgcaagtattttctcttcattgctggactttkattttaaaatatattttgtaaagcaaatatttttaattttaaaagtccaaataatcaaattctccctctctgtagcttctactctgtggtcctatcaagacatctttgcc

SEQ ID NO: 820014 - DNA, 563 bp, Homo sapiens
caagcagagagccaaatcatgaatgaattcccatccacaattgctacaaagagaataaaatacctaggaatagagctaacaggggaagggaaggacctcttcaaggagaactacaaaccattgttcaaggaaatcagagaggtcacaaacaaatggaacatattccatgcttatagataagaggaataaatattgtgaaaatcgccatactgcccaaagtaatttatagattcaatgctattcccattaaactaccattgacattcttcacagaatttaaaattcatatggaaccaaaaatgaacttgtatagcaagacaatcctaagcaaaaagaacaaagctggagacatcaacagacctcaaactataccacaaggctatagtaaccaaaacagcatggtattggtacaaaaagagacacataggccaatggaacagaaaagagaattcagcaataagaccacacgtctacaaccataggatcttcgacaaacccgacaaaaatgagcaacaggaaaaggatccmctatttaataaatgatgctgggagagctggctagc

SEQ ID NO: 820015 - DNA, 552 bp, Homo sapiens
tccccttcctgtgtccacgtgttctcattgttcggttcccacctatgagtgagaacatgcggtgtttggttttttrtccttgcgatagttcgctgagaatgatggtttccagtttcatccatgtccctacaaaggacatgaactcatcattttttatggctgtgtagtattccatggtgtatatgtgccacattttcctaatccaaaacaggaaacataggcagtcctcgaaagattctggagctgttgagtggaaagccatcaggaattagcatatctctctttctgtcactgtctgtctgtctctcttcctctctgtctttttgtgtgtgtgtgcacgtgtggacgtgtatgagtgcttttctctgtttctctattctcacatgttgtttctcacctcaccttcattttggtcatccacttttgtctttttcctccctcagctgatcagttttcattacttgaccacacttatagccacattcaatgagtcctcaacggtgtccataggttattgaaaactgcgatgtaaagtgaaacaacatgtaatga

SEQ ID NO: 820016 - DNA, 621 bp, Homo sapiens
ctctagggatatatagattgtgtgaatatatacacatatatatgaattctgtgagaatcaaaacgtcttcatgagactatgatattaaagtgaaattytgccctctactatttgctgttttggtgattttaaaattaaatattatgactcctagctagataggggctattggttgtagacagcaatacgtccaagtaaaaaatgacatttcacagactgccttcgaagatagagatgatcctgggaattcttctaaagtagttatgataagaaggctttttccaaataagctccttaaaagggagtaaatttcagttagcagaagctctctttcaccttttgaactttctcttttatcctgtctaaatgcagataaagaggctaaaactggagcttcatcctgtcaccatgaaggaaaagattagtgactttcagagacctcagcctgacattgtaaagtggccaaattgccatcagcagagaacacctgctccagatatttgttcagtaagaaaaagaaactcttaagtagattaagtgactgtcatttttgtttgctatctatgcagtctaatttaagttctaaacggtattccaaggcaagcttctatcggcaagcca

SEQ ID NO: 820017 - DNA, 435 bp, Homo sapiens
ttttggttgatccaaacttttctggcaaaatagcaattgcttttgtaatagatgacacaaactcatcttcatactgtgtgtaaccttgggaagacctgctaatttgagaatataccctcctgtctctgtttggatggtgttctggatatcatcatttgctttgccatgggtgttgtttgggttcctgcttaaagagctactgttcttcacagaaacttccaactcacccagactgagatttgtactgagactacgatccacatgttcaatatctgatatctgatgggaaataggctttactgaattatccatttgggctgtaattaatttcagtgatgagcgggagatgttgttagttgtgctcagtaactttttgatagtagygggagtaggagtaaatcttgtactaattagtgaatattctgttgatggtgg

SEQ ID NO: 820018 - DNA, 590 bp, Homo sapiens
ggtctgtagaatagtcgattcaccggcgtctgtatcaccctctcaaacctattcacatttactcacttaccagctgttattgaggcaaaaatgacaagcataaaaataataactggaaagggccagataaataataactatgctgatgtgaatacttcttgagtaacccctttaccaactatgaaccatgttcaaagtcattacaccattcaagtctcacaaccaccacctatcacataggcattaccatttcccattttgcaaaatggaagatcagaatatttagtgccttgctcaagatcacagagctagtaataaaaaaatcacatttttcattctccacttccgactcagtgatctggacagtgccccactcagtcattctaaattaagggcttaagtctgggttttccaaaagaagcactgtcaagcagtagtttgggggatgtttacagatggaaaaacaaaacagggtttcactatcagatcttttttttgggatacactgagttaaacatagtgaaatgatttgatttrctatgagtgggatctatagatcctgtaacatgcgaatttgcatcatgaccccg

SEQ ID NO: 820019 - DNA, 597 bp, Homo sapiens
gcatgggggagtcacttcaacctgctgagcctgggattccccagcagtacaggtgaatgctgacacctgtctcagargatgggtggggtgtggatgcgagggtgccttataaactgttaagcgctctccagttggaattatttttactctgtaaagctctggccatgttgtgaatagggcaagaagtagtagagtccataaggaaagaaatgcatttcatggaagatgctctgctttgaagttcataggtgtttcaatggtggtggtgatggtggtggtgtttcatttttgatgggtttattgtttcagaaaatccacctgcatcctcaatcatccttacttatgcactaaaatgagtctacagagagcaggctggcaggtccccttccttgccctcaggtggtaacacctgcctgatccgcacatgacactccagacacatctgttcccactgctcccccacaccccactaacatggtcatagccaagggctgctgccactcggaagccaatttacaaggaagcccgtgaggcttaggctccaggacccctcacttgggcagaacctttccaaagctccaaaccccattttgtatt

SEQ ID NO: 820020 - DNA, 597 bp, Homo sapiens
gcatgggggagtcacttcaacctgctgagcctgggattccccagcagtacaggtgaatgctgacacctgtctcagaagatgggtggggtgtggatgcgagggtgccttataaactgttaagcgctctccagttggaattatttttactctgtaaagctctggccatgttgtgaatagggcaagaagtagtagagtccataaggaaagaaatgcatttcatggaagatgctctgctttgaagttcataggtgtttcaatggtggtggtgatggtggtggtgtttcatttttgatgggtttattgtttcagaaaatccacctgcatcctcaatcatccttacttatgcactaaaatgagtctacagagagcaggctggcaggtccccttccttgccctcaggtggtaacacctgcctgatccgcacatgacactccagacacatctgttcccactgctcccccacaccccactaacatggtcatagccaagggctgctgccactcggaagccaatttacaaggaagcccgtgaggcttaggctccaggacccytcacttgggcagaacctttccaaagctccaaaccccattttgtatt

SEQ ID NO: 820021 - DNA, 619 bp, Homo sapiens
cctacaaccacctgatcttcaacaaacctgatgaaagcaatggggaatggattccctgtttaataaatggtgctgggagtacttgccagccataagcagaaaattgaaactggaccaccttccttatgccatatacaaaaatcaactcaagatggattaaatacttaaatgtaaaacccaaaactataaaaaccctagaaggaaatctaggcaataccattcagaacataggcacagttaaagttttcatggtgaagatgccaaaagcaattgcaacaaaagcaaatatagacaaatgggatttaattaaactaaatagcttctgcacagtaaaagaaattatcatcagagtgaacagaaaatttacagaatgggagaaaatattggcaaactatgtgtctgacaaaggtctaatatccagcatctacaaggaatttaaatgaacttgtaagaaaaaaacaaccccaataaaaagtggttgcaaatgacatgaacagacacttctcaaaagaagacatacatgcggccaacaaacatgggataaagctcaatrtcgccgatcattagagaaatgcaaaatcaaaaccacagtgagataccatctcacaccagtcagaat

SEQ ID NO: 820022 - DNA, 614 bp, Homo sapiens
ttatcataaaagcgtgttggcatttgttaaccrctttttttctgcatctatggagatgattacatggtgtatatcctttattgatatggagtactacattaactgattaaaacaatcttacattgctgggatgaatcccaattagtcgtgctatataatctttttaatttgttgctggattttgttgtctggtattttgttgaggactttaatgtttacattcataagagatgtctttctggtttcatatcagggtaatactagcctccaagaatgagttgaaaagtgtttctttctcatctattttttggaagtatttattagaattaatgtttaaatgtttgttagaattcaatagttaaatattctgggcttagaattttttttctggaattacaaaattgctatatgtatgtaaaacatatatacatataaacacacacacacatatttgtgtgtgtgtgctttttgagataaggtctcactctgccgcctaggctggagtgcagtggtggaattgtggctcactgcaggctctatcctgggctcaagtgattctcctgcctcagcctcctgagtagctgggactacagacatgctccatcatacctggt

SEQ ID NO: 820023 - DNA, 607 bp, Homo sapiens
atgagcagagattgcgccattgcactccagcttgggcaacaagattgaaactccgtctcaaaaaacaaacaaaaaacaaacaaacaaaaaacaactatgagttggactttattgtttctattttgctgaaaaggaaactgaggtttgaaatagttaagtgtctttcccaaggtccacagcttcctcagttctgtgatgtctctcacagctctctggctggctccttctcattttgccacttctctcttggattgctcatgagtcttctcctggcctgcctttccctagcagcctcctgccctctctccttgcagtgctgcccaggcctgttgaaaagcaaattttatcacttggcgcttctggtgagcatccttcagtggttcccgggctttcaggatatcattcagaagtatttcttcaggccttaaggccttcagtgacccaacctggctgatcttctggcttcttctccatctctaggagtgcactttgctcctgccctatggaactacagtagtcatcagaaatatcaygctgtttaattatgactttacacgtgctgttacctctgcctgaagatttccttcccattcttttgttttattca

SEQ ID NO: 820024 - DNA, 575 bp, Homo sapiens
ccaaactttctttcatcttcctgtcttcttctgagccctccaaactcttccaacttctgtgccttagccagttccaaagctgcttccacatttccaggtatgtgtatagcaacaccccactcctcrgtgccaattttctgtcttagcgcatttgtgttgttataaaatagtaccggaggctaggtaatatataaagaaaatagatttatttgactagtcattctgtagtctttataaaaagcatggcaccagcattagcttctggtgaggacctcagtccgcttccacttacagtagaaggcaaaatggagctggtatgtgtaaagatcatatggtgagagaggaagcaacagagactggggaggggccaggctctttttaacaaccagctctcccggaaactacatagcgagaactcactcactacacgaggatggcatgaagccattcatgagggattcacccccgtgactcaagcaccttccattaagccccgtctccaacacgggggatcaaatttcaacgtgaggtttggaggggtcaaacaacccaaatcatagcagaagcagaccaaa

SEQ ID NO: 820025 - DNA, 611 bp, Homo sapiens
tagtcaaacattcagtttccaccaaagcccagtaacaggccaagtgctgtctctcaaaaggagagtagctatctgcaggagatgacagggmcttgatccaaaatcctagaggcttccactgtgattcgcctatggagcttcccaaaggctaacacctcaagcaccactggatctgatgggtcatatggcccaagtggcagagcagcttgcacagcagcctggacctgttgcagagccttctgctgttctggaccccactcaaaactgtcaggctttcaggtcacttaataaatgggccagaataacacacccaaatgaggaatgtgttgcctccaaaatccaaataggcccacaagatgttgtgcctcttttttggttgtaggaggggccaaatgctgcaacttatcctttatcttagaaggaatatcttgacaggcctcacaccactggactccaagaaattttactgaggtagaagttccctgaattttagtcaaatttacttcccatcctttggcacataaatgtcttaccaataagtccagtgtgtttgctgcttcttgctcactggatccaatcagcatgatgtcatcaatataatggaccagtgt

SEQ ID NO: 820026 - DNA, 610 bp, Homo sapiens
ataaactattagaacttttttttaactccccaagctgcaacattaaatgcagagtccctacttagtgggcccaaatcaataaattcagcctgatccaactcatgttccttccaccattatcccacacccttaatatccattcccatgcctgtgctccagattgcagtttacataaattagagaactcaaacagttcttttcgaatgtagtgcacctcctcatgggtcacactctgcacctcacctctaggggcccaccaagcctttagtctagttataggcctagaagcaaacagaggtgttgggggtggcttctgaggagaatcaacattattttgcctggcaactgcctcaggcagcgcagggtttatctcttcagacaaaggtggaaaggctgatagcagcatgggtgggggagaggacgttgccactactggggatggggaagctgttacttctggccaaaaatgttcatcagagtttattaactcagtgtccccagcttcatcagggtcctcccacatgtccccattccaagttgcagggtcccattcttttccaatcaatgccctcaytctaacagtagacacctggtgaggctgtgcatgcat

SEQ ID NO: 820027 - DNA, 483 bp, Homo sapiens
tccccaatgtcctagacatcctaccctctttggccaggccattaagctgtgaaaaaacacactcagtaacttggataatgtcatagagtggtccttcccacagcagagtcaatgtaaagacctatgggagggcttcaggaatgactcctcagacaggagccctgggaagggcttctccaagagagaaagtgcactccagaggcaagagcactggccaagtcctgacctgataccggatgagctgtgtgatcatgggcacatcacgtctctgagccttggtgttcttcctgtgagatgggccaataacaccaggcacctcataggatggatgtgaagactgcatgatagagtagatagaaggcagttaaagcaacacctggtgctatggtttggatgtggtttgaccctgcaaaagctcatgttgaaatttsgttcccaaggtggcagtgatgggaggtgggacctagtgggggatagttgagt

SEQ ID NO: 820028 - DNA, 442 bp, Homo sapiens
aatgggcaaagatttcatgacgaaaatgccaaaagcaattgcaacaaaagcaaaggttgacaaatgagatccaattaaayttaagagattctgcataacaaaagaaactatcaacagagtaaacagacaacctacagaatgggagaaaatatttgcaaactacgcatctgacaaaagtctaatattcagcatctataaggaacttaaacaaatttacaaaaaaaaaaaaaaccaaccccattaaaaagcaggcaaaggatattaacagacactcttctaaagaagacacagatgcagttaacaagcatatgaacaaaagctcagtatcactgatcattagagaaatatgaatcaaaatcacaacgagataccatctcacaccagtcagaaccaccattattaaaaagtcaaaaaataacatgctgataaggctgtggagaaa

SEQ ID NO: 820029 - DNA, 607 bp, Homo sapiens
gggacatacctcaatgtgataaaagccatctatgacaaacccacagccaacataatactgaatggggaaaagttgaaataattccctctgagaatcagaacaacagaaagatacccactctcaccacttytacttgacatagtactggaagtcctagccagagcaatctgacaagagaaagaaataaagggcatccaagtcagtaaagaggaagtcaaactgtcactgcttgcttatgatataattgtatacctagaaaatcctaaagacttctccaaaatgctcccagaactgataaaataattcaacaaagtttccggatactaaattaatgcacacaaagcagtagctctcctatacagccacagcgaccaaactgagaattaaataaaaaactcaactccttttacaatagctgtaaaaaaaaaaaaaaaaaaaaaaacccttagggatataccttactaagaaggtgaaagagatcctctacaagaaaaactacaaagcactgatgaaagaaatcataggtgacacaaacaaatggaaacacctcccatgctcagggatggatagaatcaatattgtgaaaatgaccatattgccaaaagta

SEQ ID NO: 820030 - DNA, 560 bp, Homo sapiens
gtgaaggtatagcaatcttcttcagtttattttyttattgtaatactgtggctcctccgtacacttttgttttctagttaatcttcagtttaggtaccaggccaacaggaataaggaaaaacattattggtggtgctataaggaaacagggttgatggtcatttaagaagcagcatcgtcattgtttcattgttccttttaaaagcaatgaaggactaaataatattaataagcaaaagattaaataaagatctttaaaattacacaaacaacaactggtgctaaaaatagtttattacctagtaacaaaaataattactactattttatctcttaataaatatatgtcaggaatgtgttctgtgtttacataagatatttcattaatccatacaatggcaatgtcatgaaattattaattttctcatgtttcaagatatgaaaacaacaatcaagaatctgagacataactgtaaatcctaaggttttttgtttttgtttttctttttctttttgtgagacagaatcttggtctgtcacccaggctggagtgcagtagc

SEQ ID NO: 820031 - DNA, 642 bp, Homo sapiens
tttagatatttttgcttgagaataaacggtactgccacttgtttgtgctcttttcttgacatacacygtaaatctgacattcagtgtgtcatcctatttgtatatgttctttttcacattgtaaagccaagtggccaacaattaagaatttgaagtcttagaaatcagttataattccttcacaatgtggtagtcccagagtaacatctgtaagtgaaacaaaataaaaatttaaatatcttcatctttaaaaattggaaatcttggggcatttaggggaggatgagtaggtgtaatgttgattagtatgataagataactttaaaaaacataacacttatagactgtggatttaacagtttagggctcctaatgcgttattatgattcatctccacattcagagactttacatttgtagttaaatgtttgaatatttgactggctgctgcttttccttttagttgttacattatatgccactctaggaggtccagccattgttcatgcattaaatgaaacagaggtgaccaacatcattactagtaaagaactcttacaaacaaagttgaaggtgaggactctagttactttctaactgtctgatactttagaattttcagtgtcatgagccctattattg

SEQ ID NO: 820032 - DNA, 642 bp, Homo sapiens
tttagatatttttgcttgagaataaacggtactgccacttgtttgtgctcttttcttgacatacaccgtaaatctgacattcagtgtgtcatcctatttgtatatgttctttttcacattgtaaagccaagtggccaacaattaagaatttgaagtcttagaaatcagttataattccttcacaatgtggtagtcccagagtaacatctgtaagtgaaacaaaataaaaatttaaatatcttcatctttaaaaattggaaatcttggggcatttaggggaggatgagtaggtgtaatgttgattagtatgataagataactttaaaaaacataacacttatagactgtggatttaacagtttagggctcctaatgcgttattatgattcatctccacattcagagactttacatttgtagttaaatgtttgaatatttgactggctgctgcttttccttttagttgttacattatatgccactctaggaggtccagccattgttcatgcattaaatgaaacagaggtgaccaacatcattactagtaaagaactcttacaaacaaagttgaaggtgaggackctagttactttctaactgtctgatactttagaattttcagtgtcatgagccctattattg

SEQ ID NO: 820033 - DNA, 599 bp, Homo sapiens
tccacacagatccctgttttatgctctccatagctctatctcattgtcaaggtaaaatccaaatgggtagagaatccttcattgatttgttttataagttatttttcaggtggtatcctgatgtcagtgtggaccaccctgctaaatttgagaaatatcaaaatcaatttaaataaacatactttgagggatggctttttttctcacttcaagaataaaaactttctggccttgttttttttaaagaagtacttttttgggtaaacaatgaccatgagaatggaaagagatttcagggaggtcctggtgacctaaggtaggggacagaagcttgagtttgacccatgtttgcacccatgttctgtgactaatggattatgggaaatgtaagttgagggacaggtttttggtgggaagatggtgagtttgagttttgacatcaggaatgtgaggtgtttattggacataggtggatacagccagagsgattgatgcttgtgagagaagtccaggctacagctgagtgactaagatctggagacggagaggcagcacagcaggcaggtaggtgtattaactctggagccaaattgccaggt

SEQ ID NO: 820034 - DNA, 599 bp, Homo sapiens
tccacacagatccctgttttatgctctccatagctctatctcattgtcaaggtaaaatccaaatgggtagagaatccttcattgatttgttttataagttatttttcaggtggtatcctgatgtcagtgtggaccaccctgctaaatttgagaaatatcaaaatcaatttaaataaacatactttgagggatggctttttttctcacttcaagaataaaaactttctggccttgttttttttaaagaagtacttttttgggtaaacaatgaccatgagaatggaaagagatttcagggaggtcctggtgacctaaggtaggggacagaagcttgagtttgacccatgtttgcacccatgttctgtgactaatggattatgggaaatgtaagttgagggacaggtttttggtgggaagatggtgagtttgagttttgacatcaggaatgtgaggtgtttattggacataggtggatacagccagagcsattgatgcttgtgagagaagtccaggctacagctgagtgactaagatctggagacggagaggcagcacagcaggcaggtaggtgtattaactctggagccaaattgccaggt

SEQ ID NO: 820035 - DNA, 583 bp, Homo sapiens
atgaatatttgaggatcttcataattccaactcaatccagctacgtactacatttggcattacatgaacctgtactaaggagagtgaacagacagcctaatttttaagtgaaggttgtgttagttgaagtaacaaattcacttttaaatatacctcttttcggccaggtacaatggctcacgcctgtaatcccaacactttgggaggctgaagtgggcagatcacttgaggccaggagttcaaggtcagcctggccaacatggagaaaccccgtctctattaaaaaatataaaaattagccaggtgtggtggtacgcacctgtaatcccagctacttgggaggctgaggcacaagaatcaccagagtctgggaggcagaggttgcagtgagccaagattgcgccactgcacctcagcctgggccacagaccaagactctgtctcaaaaataaacaaacaaacaaacaaatstacccacctctctttcccccagggtgaaataaaaaataaaattaaagaaaattcaaaggccagaggaaaaatataacagttccaaacatacaaaaaaaaagttagcaaaagt

SEQ ID NO: 820036 - DNA, 569 bp, Homo sapiens
gactatattggataccctattagatacctgtctaaatgtaattttttttttttttaaatgagrtggggtttcgctctgttgcccaggctggagtgcagtagcacgatcatagctcactgcatcttcagatctcctgggctcaagtcatcctcccacctcagcctcctgagtaactggtactacaagcgtatgccactatacccagcttatattttttatttctattaaaaaatatttttaagttacttattttagagacaaggtctcgctatgttaccgaggctggccttgaattcctggcctcaagcgatcctcctgcctgagctttcagagttactgggattacaggcatgagccatcatgcctggctctaactcgttttcaatgacagaatatatattctattttgttcctatatcatattttatttaactcattttcctcttgatggggacttgttaaatagtttattgttttacttatgtttgtattttgaggaatagattctttagaagtgacattcatggttcacttgttggttgtgcattttgatggatacgcaaaaagtg

SEQ ID NO: 820037 - DNA, 498 bp, Homo sapiens
taggcatttatgcagcatataatgaagtttcagtcagtgacagacacagactgcatatatgacagtggtcacgtaagattataatgtatttttactgccttttctatgtttagatacacttaaatacacaaatacttaactattgtgttacaattacctatggtattcagtacaataacgtgctgtgcgggtgtgtagcctaggagccgtaggctagataatgcagcctagatgtatatatagtaggctataccatcgacattcgtgtaagatatgctatgatgttcccatgatggcaaaactgccaagtgtgtgatgcatttctcagaacatatccctgtcattaagagatgcgtgactatattggataccctattagatacctgtctaaatgtaattttttttttttttaaatgagatggggtttcgctctgttgcccaggctggagtgcagtagcacgatcatagctcamtgcatcttcagatctcctgggctca

SEQ ID NO: 820038 - DNA, 610 bp, Homo sapiens
ttcaacctttgttaactaatggatcccaagtgcctagaacagtatctaacacacaacagatagtggtattcaataaatttgttgttattttgactccatgtcctgtgttcctttctagagttttttctcttattttatgagttatctatcatgggagcaagggtgctgctcagcatctgaaccctgcttctgttttggggaactgtttgtgccaacaggaagcagctaactcctactacaaaatctagaaaccccaattatttacttcgccagctctcctggcaactagagtgtggacacgtgacccaggcttagccaatgacacataccttccagaattgtcactggtagcttggatagttttttttttttttttggtggcaacaacatctggttcttcagtcagggacaggagtgccagtggaactatcttccaaggtcagcaatgtcaggcctcattctattttttatttctgtaagtttgactactctagatacctcatatatgtggaatcatagagtatttgtctttttatgactggcttttcacttagcatattgccctcaaggttcatccattttgtagcaytcgtcagaatttcattccttg

SEQ ID NO: 820039 - DNA, 508 bp, Homo sapiens
ttgttcctcttgttatccatttttcagttccctttctaatgagtttgttctccttataattttcttgtatctctgacccttcaatttgacttcattttgtgttcaagccaggaaaacctaccaatttgaacttgaaagagacagaactcacttagcacaattttcattctttacgttgtcgttgtaccacgttaaaatgttttcccttcaaataattatatggcatagcactttgaaatatgaccatttgcggaaacccaatttcagaaaatcaaacacagctcacgaaggtgctgactggataacaaattcaatccaggatcatagatgcctctaaagagatagttgccagatgttcttttggatatgggagaagataaagaattaggaaagaagaggcaaaggagagaacaatcatgaattaagcagggactttttaggggaaaarctagaaggggaatttttaattccaaataatttcctatctgtcaaactggccaactgatat

SEQ ID NO: 820040 - DNA, 514 bp, Homo sapiens
ccaaattaataaacatgtttccataaattcccattgacatttgctctccctaagcccaataagattggatataatgcaagctccttaatcaaaattwaaaaaaaaatcatttttcttcaaaacacattgataagcccccagaaaactctacttattcaatacaagttttggatctcaatcatgaaaatatcaaattatttcaatataaattcaggaaaaagtatactgaaattgcacaaaaaatgtgaatctacctaatgcttatacacttagaaatggttatgtacttaagtgtacttacacacttaaaaatggttaaattgtaacttttatgttatgtatattttaacacacagggaaaaaatgcacactgaagcattgtacaaaaatttaaaagtgagtaaaggaaataccaagcccaagcttccctgcctttgacctcatgagcatatttaaatatctaattatatcatcacatatactttttggtgttttggcaagttttttttaagca

SEQ ID NO: 820041 - DNA, 585 bp, Homo sapiens
aacttgtagcaatgtatcgaatagtcgtggcaagagtgggcatctttgccttgttcctgatcttagagtaaaagcttttagtcttttctcatygaatatgatgttagctgtgggcatttcatatatggcttttattatgttgaggtagtttccttctattcctagtttgttgagtgtatttatcatgaaagcatgttgaattttatcaaatgtcttttctgcattgattgagatgatcatttggtttttgtccattttcttaatttggttattacattggttaatttttatattttgaactattctttcatttcatttataaatccctcttgatcatggtgtgatcaacgtgtgcttgaatttggtttgctattattttgtttagggtttttgcatcagtattcatcagacatattggtctacagttttttttgtgtgtctttttctggttttggtattaggataatgctagcctcatagaatgagtttggaattgttctctcttaatttttttggcagaatttgaggaggattggtaatcattattcattaagtatttgatacaattattcagagaagccacat

SEQ ID NO: 820042 - DNA, 631 bp, Homo sapiens
cgcaactgtaagcacagtggctgcagtctagtggaaatattttggggtcacaggtagttctgtattcaaatctcagctctggctctttctagctgggagacttgagcaaattatttaacttcctgatctatagcttcctcgactctaaaatgggggtaataaaactttgtttacaggattgtgtgaggattgagactgacacaggtaaggcgtcttctaccatggctggcacttagtctgttttgcttattacttagggctcaactttgaacgaacttgaggttacaaagctcagtatcaggttatcctcgggttgtttcctctgtaatcctcatttccctcagagcatggtgagagtcttgaagacatgaaacattttatgcttttctaccttccttgtgccttgcagagtcctcagtatccagtcagcacttaatgcttatactgccacttctggactgcctttcaacaaatttctcaaagttagagaccatgaagggcatggagactggtgcttttcatgccgtgcttctgcagattttggtgggsaggcggtaataggggaatgaaggtggagccatatgaaataaactcttaaaggcatgatagtgaccaggaaaaataatatgta

SEQ ID NO: 820043 - DNA, 634 bp, Homo sapiens
aaaacataaggcatcatcaaaaaaggccagaggaataaacagaaacttgcaattcttttttcttggatatttaaagacataatgacagaagaagaaacaattcaggtgataaccacatatactattcattayaataggctttatatggtgatgatctgaaaagttactgaggcattaccctaaaataaacaccatcccaaactgccattcatcttgaaatactgcatccatttattatgggtttcatttccctcctgatggacaggtttttcaaatattacttccctgtattgtcagcactactacctctctagaactttccatccttctgctattcctcttgatctcaacttgatttttatctgacagaagaaacgagataataaaagttgcttaattaaaacttaactatgtgcatgacgtataatcagaaaggtaaacacaacagacaagtaatcaaattacctaatctgcttccatttctgggcattgccatgaaggagccaaggctccctccaataacactgtgtggtctccgcaatgggggcttcttgaaagatcctgtgtactggtggaggaaggaatgcatactgtgagacgttggaggcctgccattcttcacaataggctctgt

SEQ ID NO: 820044 - DNA, 653 bp, Homo sapiens
agccattccatgagagcccctgcatctccctcttcaggtcttctccctcctctaggtctactctgcttcgcccactcacctctctcctccaggagccaattatacttattattattactgactccactttatgggtcccaaatgacaaatgaggatgagggcagaagaaaaggaatgctcaggttggatatgagagggagatgaatgtgggaggtaggaggaggaagaacaagatgggattggacgcaggtggattcaggaggtaaacccaggctgtcttggggtccccagcctggtttgggagaggctgtaagtcatgccaacatgcaacacatgggccaagggttgtgtgggcaagaagtccagtgcttgcaggccggtctccagtatccatgagggacttctgttggcttttaagccagagcgcttcgggccataggctaggtccctctgctggtctctggataggtttctttgcatccagggtgtcctggctggatcacattttccagactgatggagagtggtatgggtcggggctctgagcrtgtcttgatgtggtccttcatggttggacagatatcctggccataaaaaccctgactcaaagcctgacccaggaaggaatggaggactccagagagtagatgcct

SEQ ID NO: 820045 - DNA, 635 bp, Homo sapiens
ggttagaagtttatgggaattctggatccatggtttcctatggtckcttttacagatcttgttaatttattacccttggttacacttttaatggaaatcatgaagaaatggcaaaggaaacatgagctaattttttttccagtgacacatttcactgctatttaaatagctgttttgccaaaccaaacacagcgcttacagccagcggtgacacatgaaggagatcactgtggccgatcctgcctgcggcatccagaacaggcgagactttctctcagcttccccaagggccggacgccaaggggggcgggtaggagagctggagcctggggcacagctggagccccagagctgggtgcgtgcagcttccacccaccctgggcacggctgcttctctgttgcctcctgtccactccttacccctgaggagccctggggtaactgttttctcccagcagcctgggggaccccccagagtgggccacagcaagagcaccagcagggcctcctggccctcactgcaggatgatctgctcaggcctttagtggggaacattactgggttgcataaaaccagagacagactttggggaagccctggccatctcggttccagttctgtggtggcggcaaca

SEQ ID NO: 820046 - DNA, 530 bp, Homo sapiens
gctgacctcagtgaggggctgctgctcatggggtgcctgtctccctgggtactgctggaggccaagactaggggagaggagcgtctccactgggaacactcactctatcacatccaaggtgtcgcttttgagttgtgtgctgaatcccactttaagaacctgcaggagctcaggaaaaatcagatggcaggtccttctgtggtgtgatgaaggatgcatccacctgctctggtccttaccaggtacttgcagcatccctgcagaagggcgcattatagccatgcatcagctgctctagggccccttggagaataggatgttttacctagagggtgctaaacttttgcagtggcttttcttagaatgcaagacctcagcatgaggctcagcctgatgggccccacctctgggcagagaaaactgagctctcaaatgccacaataytggcagaggcatgcctgggacttggcatctgggcaccaagtcagtgggtcttctagggcctgtctttgggctgttagttcttaagg

SEQ ID NO: 820047 - DNA, 609 bp, Homo sapiens
gcacctgtaatcccagctacttgggaggctgagggtaagagaatcacttgaacccaggaggcagaggttgcagtgagctgagatcacgccactgcgctmctgcctgggaggcagagggagactctatctcaaaaaaacccccccaaaattactaagtaccaactaggtctaggcatgcggcaagggtgtaaagatgattaaggcagaatgctggctcctaaacctgtcccagcagttcccactgctactgcctctgttcttgcctcaattattgcttatctccttgagcacgatgtcctaagaggcctccctgcctctggtctctccagctccaatcagctctccccagtgccaccagcatggtatttctaaaatatggttatcctcatatgctgaggtgatggccagtatgcctgtcataagtacaatccaaatagtgtcagcagtgagaaattttttaagcaacttatgtgttatatgttattaaaggagattcaaattttggaacaaagtacatcatggggggaaattcattgactttcataacaatacactacaattatatagtattgaatattgctgaacattaaccaatattcaatttggatt

SEQ ID NO: 820048 - DNA, 609 bp, Homo sapiens
gcacctgtaatcccagctacttgggaggctgagggtaagagaatcacttgaacccaggaggcagaggttgcagtgagctgagatcacgccactgcgctactgcctgggaggcagagsgagactctatctcaaaaaaacccccccaaaattactaagtaccaactaggtctaggcatgcggcaagggtgtaaagatgattaaggcagaatgctggctcctaaacctgtcccagcagttcccactgctactgcctctgttcttgcctcaattattgcttatctccttgagcacgatgtcctaagaggcctccctgcctctggtctctccagctccaatcagctctccccagtgccaccagcatggtatttctaaaatatggttatcctcatatgctgaggtgatggccagtatgcctgtcataagtacaatccaaatagtgtcagcagtgagaaattttttaagcaacttatgtgttatatgttattaaaggagattcaaattttggaacaaagtacatcatggggggaaattcattgactttcataacaatacactacaattatatagtattgaatattgctgaacattaaccaatattcaatttggatt

SEQ ID NO: 820049 - DNA, 585 bp, Homo sapiens
tattatgcattaagttctgggacacatgtgcagaaygtgcaggtttgttacataagtatacacatgccatggtggtttgctggacctatcaacccatcatctacattaggtatttctcctaatgctaccctcccctagctccccaccccccgacaggccctggtgtgtgatattcccctccctgtgtccatgtgttctcattgttcaactcccatgtatgagtgagaacatgtggtgtttggttttctgttcctgtgtcgatttgctgagaaggatggtttccagcttcatccatgtccctgcaaaggacatgaactcatccttttttacagctgcatagtattccatggtgtatatgtaccacagttttttatccagtttaacattaatgggcatttgggttggttccaggtttttgctattgtgaatactgctgcaataaacatatgtgtgcatgtgtctttatagtagaatgatttataatctttgggtatatacccagtaatgggattgctggatcaaatggtatttctggatctagatccttgaggaattgccatactgtcttccacaatagttgaacta

SEQ ID NO: 820050 - DNA, 585 bp, Homo sapiens
tattatgcattaagttctgggacacatgtgcagaacgtgcaggtttgttacataagtatacacatgccatggtggtttgctgsacctatcaacccatcatctacattaggtatttctcctaatgctaccctcccctagctccccaccccccgacaggccctggtgtgtgatattcccctccctgtgtccatgtgttctcattgttcaactcccatgtatgagtgagaacatgtggtgtttggttttctgttcctgtgtcgatttgctgagaaggatggtttccagcttcatccatgtccctgcaaaggacatgaactcatccttttttacagctgcatagtattccatggtgtatatgtaccacagttttttatccagtttaacattaatgggcatttgggttggttccaggtttttgctattgtgaatactgctgcaataaacatatgtgtgcatgtgtctttatagtagaatgatttataatctttgggtatatacccagtaatgggattgctggatcaaatggtatttctggatctagatccttgaggaattgccatactgtcttccacaatagttgaacta

SEQ ID NO: 820051 - DNA, 599 bp, Homo sapiens
taaaaaaaaaaaaaaaaaactttaatcaagtggtcattttataattatattggggaaacactaggraaatattctccaaataccacagacaagtcagaaaagaataaagtgttaaagatagaagatgcaggaaatctcatggatccccttttagcactgctcattgacagataaccttactcaactacaggtctttgctgtttgtagctatactatttttaacttatttagtgagatataattcacatatcataaaatttactcatttaaaatgtgtaactcaatgggtttcgtatttcatagggttatgcaacactgctatctaagttgagaacatttacatgacccagaaagaattgtggtaccaatgtacagtgatttctcaccccaccataagccctaaacaatcactatttttctttctttctgtatagattttctgattctgaacatgtcatataatgtgcatatacaaatctttttatatattcctggatttggtttgctagtattttgctgataatttttatatctttactgataagggatattggtccgtagttgttttttttttcttagaatgcctttttgtggttttg

SEQ ID NO: 820052 - DNA, 586 bp, Homo sapiens
ttatgaaccacctacatttgcaaaatcactccttcctaatgagcccacgtttgcttccctctcatgccaaccagaagcagtctaatcccttttctacactctcagcatccaaatatttgaagatattcgtgtcccttgtcctcgaagggagcctcgtgcaggttaaagatcccctgttccttcaatggtagctcagacatcagcctgaaaagcagctccttgctgtgggccctgcaccattttcatcacggaggtggcaagagatgaaatgacgattttgtcagtgggcgattttcagacacagacccttaggaaagcatggctattatcacagcagctcccaagtgcccacaacaggccctcctctgtgcacttcacacccttttaccatcctgcaccagcccccactcccctctccgattgattcccggttcacactaattaggctttgcttggactgtaacaggaacgagagctttgccattttctttaaggaagccatgtgaaaggctgacctgctggtggttgccaggcaaccytgatgatcctacaggagagacaaactcgagagcgacagggcaagaaa

SEQ ID NO: 820053 - DNA, 586 bp, Homo sapiens
ttatgaaccacctacatttgcaaaatcactccttcctaatgagcccacgtttgcttccctctcatgccaaccagaagcagtctaatcccttttctacactctcagcatccaaatatttgaagatattcgtgtcccttgtcctcgaagggagcctcgtgcaggttaaagatcccctgttccttcaatggtagctcagacatcagcctgaaaagcagctccttgctgtgggccctgcaccattttcatcacggaggtggcaagagatgaaatgacgattttgtcagtgggcgattttcagacacagacccttaggaaagcatggctattatcacagcagctcccaagtgcccacaacaggccctcctctgtgcacttcacacccttttaccatcctgcaccagcccccactcccctctccgattgattcccggttcacactaattaggctttgcttggactgtaacaggaacgagagctttgccattttctttaaggaagccatgtgaaaggctgacctgctggtggttgccaggcaaccctgatgatcctacwggagagacaaactcgagagcgacagggcaagaaa

SEQ ID NO: 820054 - DNA, 637 bp, Homo sapiens
gctgagcgctcatcacctggaggaacttgtgcctctctcagtggtagtagaggggctgcttcctcccagcgcggtcacagccgggaggcaattgggcggtgagcccacaggggacgtctcctcgaagagacatgtcctcccttcttcagagggaggcaaaacagggggagccgaactggctgagggtcgaggtgaaaacacggcctggttcaggaggactttggaggtggaattgtgaatggcacatgaacggagccatggaggaggatttctaatcaaacttaaccattgattgatatagggaaactgatcagggtggccaggagttccagtaacaacccgccacacggcttgaacaattgtaggattcaatgatcctttagagggccacccaactccaaaccttggccattctacttcacagagtgtccggagcttgcctttttaaaggcagactccgtaattctctgaaaaaccaagatgtaggggtgggttgcccctacacacctgtgggtgtttctcgtaaggtgggaygagagatttggaaaagaaaaagacacagagacaaagtatagagaaagaaataaggggacccggggaaccagcgttcagcatatggaggatcccgccagcctct

SEQ ID NO: 820055 - DNA, 704 bp, Homo sapiens
gcttttgtattttccataacatacgttattttttgtttccattcatcttattttctaaaacctcttgtgatctcttctttgatttcatggttatttagaaatgtcttgtttaatgtttacatatgcaaattttccaaattgtcttttttattgatttctaattctactctattgtggtgtaagaacatactttgtaataattcaatcttcgaatttattgagacttgtttaatggcctaatgcattatcttcctagagaatgctccatgcccagttgagaaatatgtgcattctgctttttatgaccagagtatgttaggtctagttggcgtattctctattcaagtcttctacattttgctgatcttctgtctagttatattcatttttaatgttttaaaattaatatttcaatattttaatattttatattaataagatagtaaacaaattattatatttaatttttaatatttaaaataaatataaaataaatttataaatttaaatataaatataaaataaattttatatttactttttaatattttattttagttttgatgagtaattcttggttgagtatttttcttttcaaatatcttcccatggcctctggtctccatrgtttttgatgattttttaggtgctaatcatgttgaggatcccttttatatgaggtgttactttgcttgtaacatttg

SEQ ID NO: 820056 - DNA, 611 bp, Homo sapiens
tacttattatagaattccaggctctatcaatgaattgaatcctcttcacctgttccagtctctgctgattkattgtaaaagcccggatagcatttttttaaaatctttcccatgttgcatggaataaatatgtcggtgctggaatgcttaggaattttaaattgttcatatggtctaaaagggaaaagttatttgtttttaagattaacttcttttgagattattgctgtccatatttaggtttcaagtactgaatctaatgggagatttgtgcattgatataacagctgtttcctttcatactctgtagattatgtatctgcctaaagggaggctttgaatgtatcataatcatctatattcttaataatggtaaaaagttgtattcagaggatatctttaacattgtatcaacctaaatgcttcttttattaaatttggattaacatacttgcagatttgatttctttttcagttatttgaatatattttttcatttctatgaccatgttacagtttaaatatacaagcagtaaatgttatagtttaaaagtcttggtctttttccttaattttgtaagccatagaaattttaataagactgattattt

SEQ ID NO: 820057 - DNA, 638 bp, Homo sapiens
cctacatactgagacacctgaggcctaactcaatgagagaaaaaaattttaaatgtctcctaatttttgccaactaatttttcaggttaaggtcaaaatagttaacactgataaaccccttttgtatgtaaaattaattttttactaataaggattattttacaaactggtcacagtgaaaagttgtaatgttttctttcctcgggatctttgtgaacaggactgagtttgacaggtttaaatttgctgctaagagttaaattatttcctctagccttcagccctagaatcctgtcattctgcatttcagcaagactaagctatgaacagcttaaaacatacaggtaaatagttggtttcctttgcttccatgtccctagtcaactgacattggcaattaactttattcctattctttaagagtctacaaggttccatgagctgtcagtgttcacatcacatccactgtcctaagtacatccttaacccaaaatcagtatattttttctttagcccactgggacttaatatgtcacttcacacaatgtaatttcccataaaccataaatgacctttaatgcgtcagtgactgcatcraatgttatgataaattttttaatgactgaataatttggaga

SEQ ID NO: 820058 - DNA, 678 bp, Homo sapiens
tcagaacctgctctgagcctgatggatccttctccagccctcacccaggctcccagcttcttaccttgaggagcaactggtattttgttattctctgaatgggcttgatgaggaagtcactcagtgtcagcctctgatttatctcctgttttacctcctgaaacacaggcagcaatattagaagaaaaaggaactgaagaactggggtgctttgaataagggttcaaaggcatggaagacaggtctgcatgttttccaatgaagttgaagaatctttaagtaatgtgagaggtaaaattgcctagaggactgttcacttgttatgaacaacacataacacacatcaccactggcttcctgccttcctcccatgcttttacagtgagtacttccacaccttggtcttcatcccagtcctgggagaaaagctggaggggccttattctctccaccacttcagggcaaaggcagggaaaaggggcttcttctaggacacacaagcctatggagccaggccctaaacttagatctccaaacactcagctgagygctttttctaagtgatgatgctgcctttctcccagcaaaataaatccttctgggctagaccaagcagactaggaagtggctgcaaacccttcaaccaacagaagactccttagtaagtggtccctgggg

SEQ ID NO: 820059 - DNA, 607 bp, Homo sapiens
acaaatggatccctggacactgcaaataataaagagcccctaatgttctggtatgtacagttggctttctakaattaaaaaaaattttctgaagcgaattttatcatgaaatagttttaaaatacagaaaaatatagaaaaaaattgacatctatgtactcatcacctagatatagtgtaaacatttttccatatttactccaagttttttaaaaataaaagattacagatatagttgaagccttttatgttgcccagttgcaatcctactctctaattgccctcatcaaagttaaattctcttctgaagctagtgtgcatctttcttatccatgttgttaaacatttacttttatgtgaatatagtattattttgtgttttatagtttatataattatcataatgtaggtattactttgcaacttcatttattcaaaattatttgagatttattcatgttcatacatgtagatctagttcattcatgttaattttttttttctttgagacagagtcttactctgttgcctaagctggtgtgcaatggcgcgatctcagctcactgcaacctctgcctcccaagttcaaatgattctcctgcctcaa

SEQ ID NO: 820060 - DNA, 611 bp, Homo sapiens
ttagcctgaggtgggaggagagaggctcaaggtgtcactttttggctgctcatccattttctagaggaggcccctgttaaagaacaagggttccctgggaggagccatcaccctagagcctgtgccagagcctagtgtagactgattcgtgggtaagtgggcagcaggccacgggggacctggcagatgggctctatctgagagggagaagggggctggagcccgagattctccgggacagtggatctcagccctcgacatgcatcagaattgcccaggaagcccagtccccggaggtgtggttgggcccaggtactgggagtttctcttgaaagctccctggagagttgaacgtgcaggagggttgagatccccgccctgggtgatgaccagggcgtgatgtggggaactaggacaatgttggggcattgagctctgaccatgggagtgtgaggagctctgggaggccaggaatactgttttatcacccagaaacctctggcttggagcagaytcctcaccaggcattagatggaccagagtgcagatggatttgtctcctggtgtcagaatttgaaaggtctgcaacctgacatgtagacaagacatgc

SEQ ID NO: 820061 - DNA, 598 bp, Homo sapiens
agttgtatatttaggaatggtggcgtcaagatagagaagcagccttggtccctgatgctcacagaaccagccctggcaagtttacctgcagarttcatttacatgaaaactggacaaatggagaacttccttcttacaatcacaactgatattttgagttttcccattcacagtggaatctatcccaactgagggcatcatacatgctggacgagatatctgacaaaactacaacttatatctggtagaatcttaaaggattcagatttgaaacaacagcaccaacaacatctgaccctttctagaagggacaaagaggatggaaggagaataaaaagcaaggaaaataatgtgcttagctgttataactcaaactacgtcgagcaccttctagagcacaggtaggaaaaaatgagcagagagcaaggccagcaattatataaatatcagtaaagaaagcagaaaaaggaggaaagtaacttgaaagtaatcccttctacctcagctcctcctctctgacctacagacccatgatgaaggacaagccagcctaaatatcaataccttcctccttggacgtgtgggcccagctcacaaa

SEQ ID NO: 820062 - DNA, 568 bp, Homo sapiens
actctccaaggttcactacactgccatgaccttgggatttcccttcactctaatcccaagaaatcatgcctttgaaccatgttagaytttctgtttcctggacttgatatcttcttcttcttttttgatttatttgtggcttttttttttttttgagagacagagtctcactctgtctcccaggctggagtgcaatggcatgatctcagctcactgcaacctctgtctcccatgttcaagtgattcttccacctcagcctcccgagtagctgggattacaggcatgtgccaccacacccagctaatttttttgtattttagtagagacagggtttcaccatgttgcccaggctggtcttgaactcctgacctcaagtgatccacccacctcagcctcccaaagtgctgggattacaggtatgagccaccataccctgcctttttttcactttgatggaggttcctgagaaagatttatggtagatcagtctttttttagaccttgctgaacatgtaagacagagtaagagaaagtttggctggctattgaattccaggttagataaaa

SEQ ID NO: 820063 - DNA, 489 bp, Homo sapiens
tggttgctataatgcatatttagtgaaatctctgggcatgaaagcaccaagtgacatacctgcaaacctctagataccagacatatttctccctattcttattgtgtagcagtaaccccaaatcctcatcgaaatcagggtgtgtttcccagcccgaatggtagttttccttggccattatatatatggccatatttttgtggcctattggtccattgttatgaatatcccaaagtagttagatgatagtcacagctttcagttcagcaaaatctttactgtgttccctgacacatgtattctgcccctgggaacccgggcctctaacctggtttagtgtagtgtcatggagttaagaaggacagattccttatgtgggttacaggaagtgatggtaagagtgaccattcctacttgtaccccttgattcccatttctgtaaattstagctattggggctagagcagcatacatcagctgttatttcag

SEQ ID NO: 820064 - DNA, 489 bp, Homo sapiens
tggttgctataatgcatatttagtgaaatctctgggcatgaaagcaccaagtgacatacctgcaaacctctagataccagacatatttctccctattcttattgtgtagcagtaaccccaaatcctcatcgaaatcagggtgtgtttcccagcccgaatggtagttttccttggccattatatatatggccatatttttgtggcctattggtccattgttatgaatatcccaaagtagttagatgatagtcacagctttcagttcagcaaaatctttactgtgttccctgacacatgtattctgcccctgggaacccgggcctctaacctggtttagtgtagtgtcatggagttaagaaggacagattccttatgtgggttacaggaagtgatggtaagagtgaccattcctacttgtaccccttgattcccatttctgtaaattgtagctattggggcyagagcagcatacatcagctgttatttcag

SEQ ID NO: 820065 - DNA, 619 bp, Homo sapiens
gggcagggcttgagcccctaacaaggatcccagcacacagctacraggcttgttataggttgcaaagctttctcctgtgcaagatctgatttcagccttgctaaaacttttgagggcagatagttttaatttgttacccatttggagggtgaatttagtactgtttatttcagtacatatttattgagcatcaactttccacacagaattggtgttagagtttaataaaaatacaactcctgctctcaggaagttggtagcctagtgagagacacatatatcatttcaatggtgtatggtaactcttcctttcagtagactggcaactaatacatataggaggaattatttcatttaaaaagtcacgattttgcaaatatcaaaataatgatttattcaagcaagaatcatcaattgatgctgaaaacattgggtgcaagttgtatgaggactaggatatttaaagcctcaaagtatatccccatagatgattaattaattacaaaggaggaaatgataatcttacagttgagaaacttggaggataatacttaaccaggggatcaaagtaaataagaccaacagcaggacaaagtgataccatgtacctcctgatatg

SEQ ID NO: 820066 - DNA, 625 bp, Homo sapiens
actcagcaaccttgcagatgaggaaacaggtatagcttatacaaagtcgcacagctgggaagtgctggaactggaataaaatagagtgatgctggctaagagtttagcaccrtgcctgacacacagtgagcctcggtcagcgagagggcctaggtcatctgccccacaacgtgttcacacttgcaacctgcaggcatggcccagggctggggaggggggcgctacaggggatccaagaaccttctggatcatgcagacaacacagacaaggtccctgttctcaggagttgtgtgagccagtcaggagacaaacaatgaacaagggcgcaaacagtcgttaagattacatcagacagtgatgggtgctgtgaagaaatccaacacagtgatgccgtagagacttgtgatggatatgttaggtaagacagtccgaaggacctctctgcaaacttgaatgggatggagccggtcaagtaaagagcatgcggaagagtagtgccctagaaagagagaatagcatgtgctgaggcccagggcggggagccccagggtgggaagccaatggtagtcaggggctgggctacccagaaccttggagaccacgccagtttggattttcttctag

SEQ ID NO: 820067 - DNA, 612 bp, Homo sapiens
ttcctggagcttcacccttttaccatgcattatgaataattgaattaattattcaagacaggatttatgcttccatcaatgtaaacaggctgacctcttcactaataggccatctttgagaaagccttagctgctgacccaaccattgacccgtaaggtttgagtttatttcaagaagaagccaagatccacattctgaattgagatgaggtgacccacagccctaaacttactgccctgattttagacatacgcagaaactcttcaaagtgtgacataagcttaggcgcttggccaaagagaaacataaaacaacaacagggaaatgttttactgtaaaatgttagctcacttaattcttttaattttcttgcaataatatattaaaccctgtccaaaccccaaaaggatatgttggaaaaaatgtcacaggcaccttacccttaaatctggaacatggagagagatcttttggttcctacatacacagcctcacaggttacattactaataaattcttggaaaaaatatttgcagatcacatattataagcagcttttacttagaatatatraaaactcttacaactcaataataaaaagtcaaattacc

SEQ ID NO: 820068 - DNA, 566 bp, Homo sapiens
agaatttaataccacttttaaaattgccaayaataaataagtgggatttattttataatactaataccaaatcaatgtttaaaactccattaaaataatgaaccctagtaatagatataaacagaaaacttttatgattatctcaatgctgaaaaagcttttttccaaaatccaatatacatttctgatataaatagtcaagaaggttgcctgtagtcccagctactcgggaggctgaggcaggagaatggcatgaaccgagggaggcgaggcttgcagtgagctgagatcaagccactgcactccagcctgggtgactgagcaagactccatctcagaaaaaaaaatatatatatatagaatgtataaatatcttctcaaaattgtatatgtgtgtttttgtatttgtgcataggtgaatgtgtgtgtgtatgtctttgcttgaatataacttaatcctaaaagaagcattacatctattaggaaaatacttactctaggttttccagttcaggaaaccattacagatgctcactatttccactactacatgaaattaaactagt

SEQ ID NO: 820069 - DNA, 643 bp, Homo sapiens
gtagctagaccaataaagaagaaaagagagaagaatcaaattggtacaattaaaaaaataaaggygatatcacaactgacctaacagaaatacaaacaaccatcagaaaatactataaaaacctctatgcaaataaacaagaaaatctagaagaaacagataaatccctggacacatacaccctcccaacactaaaccaggaagaagtcaaatccatgaatagatcaacaacaatctctgaaattgaggcagtaataaacagcatatcaaccaaaaaaagcccaggaccacatttgtttacagccaagttctatcacagatacaaagaggagatggtaccattccttctgaaattattccaaacaattgaaagggagggattttctctaactcacattatgaggccagcatcaatctgataccaaaacctggcagagatacaacaaaaaaaaaaaatttcaggccaatatccctgatgaacatctatgtgaaaatcctcaataaaatattggcaaacataattcagcagcacattaaaagcagcacaatcaagtcaacttgatccctggaatgcaaggctggttcaacatacacaaatcaataaacataatcacataaacagaactaacgacaaaaaccatat

SEQ ID NO: 820070 - DNA, 351 bp, Homo sapiens
acccttatgtgaggactgatgctactctaaatgcrtacagtatgtagatagctttctgtcttctttatgtttactaaatttttgaaaagtaattgttttttaatcatttctctatctttatataaactttttcaaattgtcatgtattttcttattgtattattttatttacaaataaaattatacaatacaaagaacataatatattaaatattttataatatactttatttacaaataatacaatacaaagaatataatattaaatattaaaatatattttatttacaaataaaaccatacaacatacaaagaaccacatattgctttatttatttatttatagacagt

SEQ ID NO: 820071 - DNA, 626 bp, Homo sapiens
gatccactatttctattcctagtaacagtgctacaaaacaayagcctattcaaaaaatcagatgaaaatcaaaattataaacaaattcttaaatttaatctataacatatcaagactagcttctattcaacaatctcactgtccattactaaaacatcctctttagaaaaataaaagattcaatgagagaaggaagtcaaatagtcactaattaaagctttctaaattatctgtaagttgtgacaaactatgtcaaatatagtctatactactgagctcttttctccttacatctttgatcagagtgttaacaacccactcttgtgaaaatataagtccccaaagtcatgaaaaaatacctaacctaacagataacttcgtaagaaagaagatcctgccaagcaggaagaattgctgctgaaagcaacatggcaggacttaaaggaaacatgccacaaagttatctttgggacaagtgatcagagatggggacaaatgttaacagggctgaaacagatgaacatgagttcacatcatgagtcacttaaaacattactgaaaatattcaactgaaaggaaattacggttcttaaaaatcttaggttccagctgggctcagtggctca

SEQ ID NO: 820072 - DNA, 531 bp, Homo sapiens
aataggttttatataacaaaagggctgtgtagagatatatgtacatatttatgtttaaagattcttttgtagtgttatttatacttggaaataatcatccaacaagaaatttaagtacgtaagtctacatggtgtaatgtatagctataaatatgcttatagaaaagactataaagttacatttcagttattatagtatgacctcattttttaaaagtatgaaaaaaatatatatatataaatttggagattgtccagaatgttagcagtaattatttctagctgaatgaatctgtttgactaataataattttcttcgaagtatcctacatttaaatgcatttcccatgaaacagttcttctgttatactggaaggaaagaccttttttctttaatccttaggtagctcttgaaaatagtttagtgtgayactcattttaaattattttacaattaacaaagaaaaattaacatatattaacttctgatacatttgtcttaggtttggagctgttcgggatgtttctgta

SEQ ID NO: 820073 - DNA, 580 bp, Homo sapiens
accaggatccttggagaaatggctgattccaagggtgatgcaaggctagtagcagatgaattcaaagcatcttgttccaaaaagcaaggaagtgctcaaagaawgatggggcatgtcacaaggacacagcagccagctttaatgaacttccattggccaaatggagggcaaattgaggatctaagtaaattatgatagtaacaaattataaaccattgaatgaaataggaaaacagtagtccatgcttatgtaagcgaataaaaaaagaaatggggccgggtacggtggctcacgcctgtaatcccagcactttgggaggccgaggcggacagatcatgaggtcaagagattgagaccatcctggccaatatggtgaagcccgtctctactaaaaatacagaaattagccgggcatgttggcacgcgcctgtagtcccaggtacttgggaggctgagacaggagaatcgcttgaacccgggaggtggaggttgcagtgagccgatatcgcaccactgcactccagcctggcatcagagcgagactccctctcaaaaaaaaaaaaaagaaatggaaagttt

SEQ ID NO: 820074 - DNA, 626 bp, Homo sapiens
gacactataaacttcatcaacaggaaagccctcgccaaaaaagagcagttgaggaaattttaggcaggaatataaaattataataaatcagaaatgtagataagaatatctgggaaggarctttggccaaagacaatggctttgtaaaagaaagaacattttctaaagctatggttgctgtaacaactagcccaataaggtttactttccagcaaaagatttaaaagttcaataagctaggaaattacttttagatcctgaagttaaaagttaaggcccacagagattaaaagttaataatactaagagtcttaataaaaatttattcaaaaatctttttaagaacatttcaacactaaaaatagcagcaaataaagtgagaagcatgacacaagcagaaagcaagaagatgggtgcagttaggaaggcacaaacagcctgaaagaagtttcagctttccacaatctacctcaaatatactcttacaaattgtagaggacagagaagattgaagaaaaaaagcctgaagcaaaactccacttaaaatgtctttattctaatgtgaagttgaggctataaagacattgccagcatcacagattcaacaaatttatttagaattcagt

SEQ ID NO: 820075 - DNA, 626 bp, Homo sapiens
gacactataaacttcatcaacaggaaagccctcgccaaaaaagagcagttgaggaaattttaggcaggaatataaaattataataaatcagaaatgtagataagaatatctgggaaggagctttggccaaagacaatggctttgtaaaagaaagaacattttctaaagctatggttgctgtaacaactagcccaataaggtttactttccagcaaaagatttaaaagttcaataagctaggaaattacttttagatcctgaagttaaaagttaaggcccacagagattaaaagttaataatactaagagtcttaataaaaatttattcaaaaatctttttaagaacatttcaacactaaaaatagcagcaaataaagtgagaagcatgacacaagcagaaagcaagaagatgggtgcagttaggaaggcacaaacagcctgaaagaagtttcagctttccacaatctacctcaaatatactcttacaaattgtagaggacagagaagattgaagaaaaaaagcctgaagcaaaactccacttaaaatgtctttattctaatgtgaagttgaggctataaagacaytgccagcatcacagattcaacaaatttatttagaattcagt

SEQ ID NO: 820076 - DNA, 551 bp, Homo sapiens
ctgcaacccccattgactctgacttcctaccagaaagagactatatcttctttctgtacatctttgtacttggcttaatgaggcactccccactccagagtcgtgtgatatggattcctagtgttactggcatttgaattgggagcacttaaaaaaaaattcaaaaccccaaatttttagacctgtaaatgtagctcccgggcagtgtgacaaaaaacactacaaggcccttgtacagtacagagctctgccttcccgcttactcataaagccgacccttcctattgtacttagcaggaattgtggaacacaactgcatggccagtgcccaatttccctagactgtgaaggtaaaataggacaattgtcttcataactctctctaatgaaataatccctgtccaccacagttttacatatatatatayacacacaaacatacatatataccaaaaagtttacttctatgctgttttataaagatgcgtgatttcgttcaatgagcttaaaaatgtatatacaataacaatgcacaaccgtgaagatagata

SEQ ID NO: 820077 - DNA, 551 bp, Homo sapiens
ctgcaacccccattgactctgacttcctaccagaaagagactatatcttctttctgtacatctttgtacttggcttaatgaggcactccccactccagagtcgtgtgatatggattcctagtgttactggcatttgaattgggagcacttaaaaaaaaattcaaaaccccaaatttttagacctgtaaatgtagctcccgggcagtgtgacaaaaaacactacaaggcccttgtacagtacagagctctgccttcccgcttactcataaagccgacccttcctattgtacttagcaggaattgtggaacacaactgcatggccagtgcccaatttccctagactgtgaaggtaaaataggacaattgtcttcataactctctctaatgaaataatccctgtccaccacagttttacatatatatatacacacacaaacatacatatataccaaaaagtttacttctatgctgttttataaagatgcgtgatttcgttcaatgmgcttaaaaatgtatatacaataacaatgcacaaccgtgaagatagata

SEQ ID NO: 820078 - DNA, 539 bp, Homo sapiens
cacccttaattttacagaagaaattaaattaatatatcaggaatgattctcrtacctctaagtacagatattattgactctatttattatgcctcatgctttggtcccaaatgatactgttgagcaggtaagagttatacatttttaatagttttggaacaaaccaaagtcagcaaaccttcacagaaacttcttttttaattcacctagaattaaatcactgagcagagagaacactaaattcaagttcctgtagttaaattagtgaatatgcctatctctctctttcctttttaaatttttgttttctattgttattgttgttcacttgcttgctttcttgtctgagttttactctaaatatgaggctatttctatcctcagccatgataaggcaattcagcctagtgaaaagacactaagtctggaatctaaaactgagttcaagcttggctgtgagaagaattaccgtgtaatcttcagcaagacttgtaacacctttcacttagttattaatggggatggaagtcaaagcaatg

SEQ ID NO: 820079 - DNA, 564 bp, Homo sapiens
tcagtcttagctcaacacagctaatgttccacttggagcccagttatgggtctttctgtgatttagcccaaggtcttctctggtgtcctggtagctccttatcctgtgcacaagaacagccagaaagtgtgggggtgttaaaaatgcccaggaataacactcatccaaaggggttacgggtgagactagcacataaatactccagtcttccattgccacctggataatcctagaagacatcctatatattcctcagaggtttaaagtagaacccagaatccatccatcagtaacctttataacacaccgaataacagtttttcctctttcttgtcttgctctctccacttacttcctcctgctttctgggatcagctccaaaatacactgcctgcacccgagtctttgcctcaggctctgttttctaaggaaatccaaactaagaaccagagttatttaccaacattcagaagtatgakgattatactgtactgagagtacaaccaccaatggtgtggtcacgttcacatggtcaagacacacttatgtatgtgtttggatcct

SEQ ID NO: 820080 - DNA, 564 bp, Homo sapiens
tcagtcttagctcaacacagctaatgttccacttggagcccagttatgggtctttctgtgatttagcccaaggtcttctctggtgtcctggtagctccttatcctgtgcacaagaacagccagaaagtgtgggggtgttaaaaatgcccaggaataacactcatccaaaggggttacgggtgagactagcacataaatactccagtcttccattgccacctggataatcctagaagacatcctatatattcctcagaggtttaaagtagaacccagaatccatccatcagtaacctttataacacaccgaataacagtttttcctctttcttgtcttgctctctccacttacttcctcctgctttctgggatcagctccaaaatacactgcctgcacccgagtctttgcctcaggctctgttttctaaggaaatccaaactaagaaccagagttatttaccaacattcagaagtatgaggattatrctgtactgagagtacaaccaccaatggtgtggtcacgttcacatggtcaagacacacttatgtatgtgtttggatcct

SEQ ID NO: 820081 - DNA, 616 bp, Homo sapiens
tcacaaatcattgtcccatgaagcatgtaktccagtctttccaaagagcaaacacatggacatttatgcacaacatggaaaggatgtgcataaaaaaagttcattaatcaattccaaattggttcaccaatataacataaaattcagtgcagagatgcttttgttgtttgtttgccaattcttagctactgagagttgaagaactggattaaaatctcctggcaggacaagatgtttttttcctttttggccgagaatttagcgtttaatgggtgttcaataaatattatttttaattaaatggtggggggggtgctgaattaagtagagaaatgaaatatcaaaatacatttcagtcaatggatctcagaggcttcctcctctattctagtgatcaaggcagttttttgtttgtttgtttgtttgttttgagacggagtcccgctctgtcgtccaggctggaaggcagtgacacaatcttggctcactgcaatttctgcctccccggttcaagcgattctcttgcctcagcctcccaagtagctgggactacaggtgcgtgccaccatgcctggctaattttttgtatttttagtagagacagggtttcaccgtg

SEQ ID NO: 820082 - DNA, 502 bp, Homo sapiens
ctagttttatatgctcaaaaatttctagtcaaataaatatgaattttttcacaaaaataaatgtatacttasattttatttaaagtagccattttaatcgatgagaagcatacaaatcaggaagtaattttgcttttttaaaagaactctgagtgtaacaaatctaagttcaaatcgttactctgatgttaaacctccctgaaattcagctttcctatctgtacaatcaagataattacacctaaatgaatgttgcatatgaataatatttacaaagtatgggtatatttcttgcacgtgacaggtaccaccagcatcacaccaccaactaccaccattattatttctattagttattcaggagtgacaggtacaggcatacctctttttcctgcacttcactttattgtgcttctcagatattgtgatttttacaaattgaaggtttgttgcaaccctgcattgagcaagtctatcagcaccatttttctatcagcatgtg

SEQ ID NO: 820083 - DNA, 555 bp, Homo sapiens
ttgctgaggctcatttgaagaaaggtaactttaagtgttgcacatctacttggcattccgctgaggataaaaagctataaaatttattagtgttggtttcttaagcgaaactttacttacctcattgctatatactgaatgtttgtgtccccaccaacaccccaccaaaatccatatgtggaaatattaatcccctgtgtgatggtattaggaggtgtggcatttggaaagtaattagattgggaaggcaaagccctcatgaatgggatgagtgcccttatgaaagagaccacagagaacttccttatcccttctgccatgtgaggacacagtgagaagacagccgtctatgaaccaggaagtgaatccccaccagacatctctgctggcaacttgttccaggacttcccagcctctagaattgagaggaataaattctgttattcgtaagccatgcagtttatgacattttgctrtaacaggccaaatacactaagacattcattctagaaaatgtcagcatctagtcagagttggaaacaattagtgagattt

SEQ ID NO: 820084 - DNA, 532 bp, Homo sapiens
tatcagacactttccttggggtgtggataaaggtgttactttcaccaaagccccctataacccttytgtttcacctgagggtaaaaaaaaaaaaaaaaaaaaaaaaaaagctatgcaaggagaaatacttatgatggtcacagtcccactaaaacctgagatatatttggaagattataggacgtcctccaccccacactacaaaaaactggagagaacaaagcaatacagagaaagtaagggaatggaaacacaaatttcaggattgtgattatattttagctacagataaaatataatgagatgcacatatgtaggcactgtttgttcttaaatagaaaagagactcatatgtggtatttagtctgtgttttataaaatgtatgctatatctatctatctacctatctatccagtattaaatagggtaaaaataaactattgactatcaagtaactatagtaactaacaacttgatacactgatacattgatggaatatctccctagtcaaatatggatttagcctttta

SEQ ID NO: 820085 - DNA, 532 bp, Homo sapiens
tatcagacactttccttggggtgtggataaaggtgttactttcaccaaagccccctataacccttttgtytcacctgagggtaaaaaaaaaaaaaaaaaaaaaaaaaaagctatgcaaggagaaatacttatgatggtcacagtcccactaaaacctgagatatatttggaagattataggacgtcctccaccccacactacaaaaaactggagagaacaaagcaatacagagaaagtaagggaatggaaacacaaatttcaggattgtgattatattttagctacagataaaatataatgagatgcacatatgtaggcactgtttgttcttaaatagaaaagagactcatatgtggtatttagtctgtgttttataaaatgtatgctatatctatctatctacctatctatccagtattaaatagggtaaaaataaactattgactatcaagtaactatagtaactaacaacttgatacactgatacattgatggaatatctccctagtcaaatatggatttagcctttta

SEQ ID NO: 820086 - DNA, 591 bp, Homo sapiens
atattacttatttttaaattttaccacattatacaagcaattgttcacatataccaaatattaatatttaatgacttattttgaaaacagaatcaagcattatacataccatgtatactttgaaatccttggatattctcaagagattttgggctaaggtagtttagctaagaaagaaaacattaaacggaaaacattgcatctggtgtattatacttgcatcaaccagtttccaatgaagcacatatattacatatttggggagctgtggtaaagtaacaagacaataaataaatgaagcatctgagatgaactcctaaaaagataaaaggactattaaaaaatagttctgttttaagtgaatgaatgattaaatatgtcagaatttaatcattaattaatgattaaatttgtcagaagtgctattaacacagatccttttaactttgtttctcaataaagaatttccctaggagaatgccctacaaggccccmgatagcaactttgcccacagtgttctaattaactataccagagggtctgcttcgctgtctagttaatgctttctatctggtcctttgctggccatc

SEQ ID NO: 820087 - DNA, 617 bp, Homo sapiens
atcaagaataaattctggagccaaaaaatgtgattggcataatgaagaatgcatyagaatcctttaacagcagaactgatcaagcagaagaaagaattagtgagcttgaagacaggctatttgaaaagatacactcagaagagacaattgaaaaatgagtaaaaagactaccgcctaagtactctcaaaacctagcactctaaaatcaacctacaggatctagaaaatagcctcaaagaggcacatataaaagttattggccttaaagaggaggtagaggaagagatagcagcagaaagtttattcaaagggataataacagaacttcccaaacctagagaaatacataaatatccaagtacaagaaggttatagaacacagggcagatttaacccaaagaagactctacctcaaggcatttaataatcaaacttccaaaggtcaaggataaagaaaatattctaaaaacagcaagaaaaaagaaacaagtatgatataatagaactcccataggtctggcagcagacttttcagtggaaaacttacagaccaggagagagtggcatgacacatttaaagtgctgaaggaaaaaaaaaacttttaccctagaatagt

SEQ ID NO: 820088 - DNA, 551 bp, Homo sapiens
tattgtgtagaaaaataggataaaatgcagatgcaatagcagatagaacttttggtcatataaaatggtggaaaaagaaaaaaatcaattctgacttctagattttcaactgarcagtttaaaaggtatcattggcaataataaaaataggataaatagcaagcgaatttggtaggctggtgaaaatcaagtcatctgcttgacaatattaaatttgaggtgcctaagatggactagctacttatcttggggatcccagtgtaaaataagtatgtagagcgcttatttataaattagtaatgatttcaacatggtgatagcaaaacattaaaccaaatataggcaacttttttttattatactttaagttctagggtacatatgcacaacgtgcagttttgttacatacgtatacatgcgccatgttggtgtgctgcacccattaacttgtcatttaacattaggtgtatctcctaatgctatccctcccccatcccccaaccccacgacaggccccagtgtgtgatgttccccttcctgtgtccaagtgt

SEQ ID NO: 820089 - DNA, 541 bp, Homo sapiens
taataataataataataataatgataataaaagagagagagrgagatcggccccaatacaaaaataactggcaacttcaaaatcccactttcagcactggacacatcttccaagcagaaaatcaacaaagacacattggacttaatctgcactattgaacaaatggatataatttgtatttgcagaacatttcatacagtggttgcagaatacgcttttttttttcctcagcatgtggaacattctcaaggatataccacatgttaggtcacaaaacaagtcataaatcatttttgaaaattgaagttatatcaagcttcttctctgaccacaatggaataaaactagaaaataataagaaagaattatgaaaactatataaatacatggaaattaaaccctatgctcctgaatgaccagtgggtcagtgtagaatttgagaagaaagttgaaaatttgtagaaacaaataatgatggaaccacaacatatcaaacttacggaatacagcaaaagcagtactaagagggacttttatagct

SEQ ID NO: 820090 - DNA, 578 bp, Homo sapiens
aaataaatgaaattgaaataaaatacaaaaggtcaataaaacaaaaagttttttttttgaaaagttaataaaaattccgtacaaacctttagccagatattttttaaaaaagaaggaagatccacataaataaaatcaggaatgaaaaaggagatattacaactgatattgcagtaatccaaaggatcattagtggctactctgagcagctatatgccaataaattggaaaaatctagaagaaatggaaaaattcctagacacatacaaattaacccaggaagaaatacaaaacctgaacagaccaacaacaagaaatgagatagaagccataataaaaattctcccagtaaagaaaagcctgggaccccgtggcttcactgatgaattttaccaaacatttaagaagtaacaccagtcctactcaaactattctgaaaactaaaggaggagggaatacttctaatctaattctacaaggccagytactctgatatgaaacccagcataagacacatccaaaaaagaaaactacaggtcaatatctctgataaatattgatataaaaatcctcaacaa

SEQ ID NO: 820091 - DNA, 457 bp, Homo sapiens
acatttatttcttcattgtaagcaatgtattcagtgaaatattccatagcctctctgtaaagactatgagccatgcatgttaacaacattcaaagatctttccggccaggcgcggtggctcacgcctgtaatcccagcactttgggaggccaagatgggcggatcacgaggtcaggagattgagaccatcctagctaacacagttaaactccgtctctgctaaaactacaaaaaaaaaaaaaaattatcctggcatggtggcgggtgcctgtagtcccagctactcgggaggctgaggcaggagaatggcgtgaacccaggaggcggagcttgccgtgagctgagatcytgccactgcactccagcctgggtgacagagcgagactctgtctcaaaaaaaaaaaaaaaaaaaaaaaatctttcccagtttttattacagacaatctccaaattttca

SEQ ID NO: 820092 - DNA, 484 bp, Homo sapiens
tttcagaatgctgaaagaagtgtgattgagttagactgtaacagctcaaatcattataaaacagagcaagagcaacaaatrgaaaaaagtgaagaaatccctatcgacagtgttaaggatggattctgcaagcctcggtcattctggcaactaaccgactttcccagccagtctagatgccccagagaccctgttagcttcaaggaaaggtgaaaatcagaaactcagccaggatagtccttgtgttacatcagggcctgaggggcctcatgagctcactcacaggaggatagggtggtggtggtcctgtgaaggcttggcagctctgaggggcaaaaacacagtgctgagccaaggccaaaatgggggtgggggcagggggcactggttgattccacatcagccttggcatccctggaagccatgtacagtggccaggacaacaaaagtagtgcctacagcactcagacaatggccttgctct

SEQ ID NO: 820093 - DNA, 484 bp, Homo sapiens
tttcagaatgctgaaagaagtgtgattgagttagactgtaacagctcaaatcattataaaacagagcaagagcaacaaatagaaaaaagtgaagaaatccctatcgacagtgttaaggatggattctgcaagcctcggtcattctggcaactaaccgactttcccagccagtctagatgccccagagaccctgttagcttcaaggaaaggtgaaaatcagaaactcagccaggatagtccttgtgttacatcagggcctgaggggcctcatgagctcactcacaggaggatagggtggtggtggtcctgtgaaggcttggcagctctgaggggcaaaaacacagtgctgagccaaggccaaaatgggggtgggggcagggggcactggttgattccacatcagccttggcatccctggaagccatgtacagkggccaggacaacaaaagtagtgcctacagcactcagacaatggccttgctct

SEQ ID NO: 820094 - DNA, 541 bp, Homo sapiens
aacccaaaatgttaaaaaccctggaaggcaacctaggcactcccatcctggacctaggaataagcaaaatttcatgacaaaaacaccagaaacaatggcaacaaaagcaaatttgacaaatgggatctaattaaacttaagaacttctgcacagcaaaagaaactatcaacagacagtctacagaatgggagaaaatttttgcaaactatgcatctgacaaaggtctaatatccagcacctataaggaacttaaacaaatgtataagagaaaacaaccctattaaaaagtgggcaaaggacatgaacagacacttctcaaaagaagacatacatgtggccaagaagaatatttaaaaagctcaatagcactgatcattagagaaatgcaaataaaaaccacagtgaaataccatctcacaccagtcagaacggctattaytaaaaagtcaaaaaatagtagacgctgatgaggttacagagaaaatggaacccttatacactgttggtgggagtgtaaattaaatcaactattgtggaatc

SEQ ID NO: 820095 - DNA, 577 bp, Homo sapiens
agtttgatctcagactgctgtgctagcaatcagcgagattccgtgggcgtaggaccctctgagccaggtgtgggatatagtctcgtggtgcgccgtttcttaagccggtctgaaaagcgcaatattctggtgggagtgacccgattttccaggtgcgtccgtcacccctttctttgactcggaaagggaactccctgaccccttgcgcttcccaggtgaggcaatgcctcgccctgcttcggctcgcgcacggtgcgcacacacactggcctgcgcccactgtctggcactccctagtgagaagaacccagtacctcagatggaaatgcagaaatcacccgtcttctgcgtcgctcacgctgggagctgtagaccggagctgttcctattcggccatcttggctcctccttctgatttacatttataatcaattaggtttaagtaaaggagagtgttctccatcatacaggtgggtatcatccattcatttagaggtctttagagcaaaaaagktagttttcctggaaaagaaggaattctgcctcaagattttaattctgcctcaagaaaaattgc

SEQ ID NO: 820096 - DNA, 627 bp, Homo sapiens
tgtatacttgattgaattgaaggatacaaagtatggatcctgggtgtgtctgtgatggtgttgacaaaggagattaacatttgacttgtgggctgggaaaggcagacccacccttaatctgggtgggcacaatctaatctgctatcagtgtggctacagtataagcaggcaggaaaatgtgaaaagagagactggcctagcctcccagtctacatcattctgcagtgctagatgcttcctgccttcaaacatcaaactccaagtccttcagtttttggaactggcagtccttgcccctcagcctgcagaagtcctattgtgggacctgtgatcatgtgagataatacttaataaactcctcttaatacttaaacttaatacttaataatctcctctctctctctctcctatatataaaaggagatatatatatatataaaataggatatatatatataaaatatatatatataaaataggatatatatatatgtgtrtatacacatatatgtatatatctcttattagttctgtccctctagagaaccctgactaatacagattttggtgccaggagtggttctagaggaacagaattgaggatggagttctttcactggtttgggg

SEQ ID NO: 820097 - DNA, 523 bp, Homo sapiens
cagcagatggagaaagacatatcccaaatcatctaatgagcccattattatgctcttaacaaaatcaaaaaacaaactacaagatacctctgtgtagtatgaaaaaaatttttttaactacaagaaaaaaatcaacaaatatgtgtcataaccatatatctaaaaattcttacccaaacgttatcacattgagcaatgtgataacaaatgcataacaaatttataaaacaaagcaatgtataacaaatttaacttcttctgaatggtcaatagagtgtcttagtccgttttatgttactataaagaaatacctgaggctgtgtaatttattttttaatggtttatttggctcagagttccactacctgaaagattgagtacctagttaaggcttyaggctgcgtccacccatggtggaaggcaaaggggacccagggtgtgcagacctcatgcagcaaaagaggaagcagggggagcagaggaggtgccgggtgatttttaacaacaagctatcttgagaact

SEQ ID NO: 820098 - DNA, 612 bp, Homo sapiens
tgaccacctgaataaatggatggcaagttgttgttaaagtagcttttgtagaaggatgattgcattggactctagatcagaaaatatttgggggagactgggtattatctaggcaccygaactagaggttccaaagaagcaatttaatattactttggaaagtaaggattttctccctgttcacttgtcttgagcccctctatccacagcaactattgcaattccaaatatgaactacatattaaaaataatcaattcaattcaatatattgaactgggcttatgggaatgtgaagtatagttgtctgattagataattaatgtaggaggtaaatcttgcaggaaaaatcccgattcacccatgactgcctatgatatttccttatgctttcataccccaggtgatttgtggtagaggcaaatcctatgtctcatgggagagtttgcattattctgagcacttctgtgcaggcaggagacaagacttacacaaatagaatgttttctacaactgaaatatcatgggaacccaattccagaggaagggatacacattgctgggaaaacaaatcttctattaggtggccacattgccatgccaatacaaatcaa

SEQ ID NO: 820099 - DNA, 615 bp, Homo sapiens
ttggtatatgctggcttttcaccatataaatccacagaaatcaagatacagcaggtaytatgagtgccaaattttacagagggtcagcatagctaggggtccatataacctggaggttgattttggtttcatgttgatagaaaaataaattagtgataaattaaagatgatagaagcctttcagcccaaaatacaacctgtgttaaatttactgcgtgaaacacaaattgcagaatctctggttattttgtgaacctctctatcaaatctgcatcccatgagactccttgccagctataatcttttggagaaggatcactttagaataggctgctgctagatttacctgagcttaacatttatttggaaatattgattactcaaaatctgagtaggctgtcaatatgattgtctgtggttaattttatgtgcaaataatcatggccaatgatgtcacaacatacattttaaaacatgataaggtttgttccttagccatgagcctttctgcttggttcattccttctttttatttttttcttctatggtataaggacatttggaaaaataaactcaaatgaaaaacaaacttacttagtgcagttaatcccaaaa

SEQ ID NO: 820100 - DNA, 615 bp, Homo sapiens
ttggtatatgctggcttttcaccatataaatccacagaaatcaagatacagcaggtactatgagtgccaaattttacagagggtcagcatagctaggggtccatataasctggaggttgattttggtttcatgttgatagaaaaataaattagtgataaattaaagatgatagaagcctttcagcccaaaatacaacctgtgttaaatttactgcgtgaaacacaaattgcagaatctctggttattttgtgaacctctctatcaaatctgcatcccatgagactccttgccagctataatcttttggagaaggatcactttagaataggctgctgctagatttacctgagcttaacatttatttggaaatattgattactcaaaatctgagtaggctgtcaatatgattgtctgtggttaattttatgtgcaaataatcatggccaatgatgtcacaacatacattttaaaacatgataaggtttgttccttagccatgagcctttctgcttggttcattccttctttttatttttttcttctatggtataaggacatttggaaaaataaactcaaatgaaaaacaaacttacttagtgcagttaatcccaaaa

SEQ ID NO: 820101 - DNA, 685 bp, Homo sapiens
tttaaaaaattaaaaaaaaaatcagaatcaaaaccaggaaccttgtcttgaacaaagtaagaccccaatccatatccgttgaattgcagttgaatacakatatctgttgttttaaaggtattatactttccacaaataaaattatttttaggtaaaatttacaaaaaggaatgatggacaggaacaaagcagacatgtttggtcttttagatccaacagaccagtttgaggagagaaatagtgaaaagatcaaaacggtccaagagatgagatcgcagagatccttgagcccatttttaaagattttggattttattcttaaatgcaatgaacaaaacagtgcctcatttcaagcagaggaataacatggtatgactcatattttcagaagaccctcctggctatgaaggaagaatggacaataaaagaccatgtagaaggttttgaatggaaagcaggcataggatattaccaggttggacctgaatagtagcggtgaagactgaaatggcataacagtattagcagtagaatttctagaactcagtggatttcaaatatacagaatgcagaggagtaaggtctctatgatgattccaaaccttccattgctgtaatttaaaaaacaacccaattagcactcaagtcacataggtcaagtgatttttcttgatgagacgatcag

SEQ ID NO: 820102 - DNA, 322 bp, Homo sapiens
attaaatggataaaaaaattaggcatttgagaaatcattttagacatctataaccgcacaaaccaaagyccagaaggtgagcaaaacatggtagtttcagagaaccaaaagtagtgtggaatgccctgaggttatgttacaaagaaagagaatagacaaagatgaggctagtgaggccgactggagtcaaataatgaggattcttctgcgttatgctgagaatcctcttaggccaaatactacaaaaacatcctcttgagaatactattgttcgttttttcttagagtgactacaagcttctcattcaaatggaatggacag

SEQ ID NO: 820103 - DNA, 573 bp, Homo sapiens
aactcctgaaatcctttcagtcacatccatccccaagcatcacaccaggaagccatcactgaataagtggtggcaagagggtcatttcccctaccatctctataarcccaggaagcaattttctcagtccacaaccacaagccacgagctcaaaagcccatgtatatcataaagacagtgtttctgagcaccaccccggccctgaggttagctatgaatggtgcataactctctgtgtgagacgatccatccaatcgcaggtgtgtgtcagtataggcaactaaatagtggctttcaggggctcttttcagcttaagagacaggaacatcataaagcaaaacaggaagagactacgtcctaccggtgtggctgagcctgtttgggagaagttcgatctacaacaccaccccagacatgaaagaacttagacacaccaccctacccccacccccacccccacccagatacacatatacagtctatgataaccgaaggcctgcacccccatcccgggatcctcagtggattcggggccactccactgtgggcaagaccactcccctaagacctct

SEQ ID NO: 820104 - DNA, 563 bp, Homo sapiens
aagtactgagcatgcacccctgctactgctgcactgccattacttatctacagactattcatccacctcctagaatagtgactgctccatggtaaagcacctgtctggttctctgtgaccccagatctggtagctattaagtacgtgctcaataaatagttttttttttttcctttttttggagatggagtcttgctctgttgcccagtctggagtgcagtggaatgatctcagctcacctctgcctcctgggttcaagtgattctcctgcctcaacttcccaagtagctgggattacagttgcccgccaccatgtctggctaactttttgtatttttagtagagacacaagggggtttcacaatgttggccaggctggtctcgaactcctgacctcaggtgatctgtccacctcagcctcccaaagtgctgggattacaggtgtgagccactgcgcccagccatttttttaaaaaataaattttaytgcatatatttgaagtttacaaagtgatattgagatacatatagataataaaatggctaccatagtgaaacagatt

SEQ ID NO: 820105 - DNA, 590 bp, Homo sapiens
gtacgattccatttatacatggaatcatatgaatcatacgaaatgcccggaataggtcagtctacagaagcaggaagcagattagtggttacctgagactggaggatttgagagaaaatagggagtaactgcaaatgggtatggagttctttctggggtgattaagatgttctaaaactagttacggtaatgcttacacaactctgtgaatgtagtaaaaacttgaattgtacacttaaaatgggtgagctgtatgaaatatgaattatatcacaataaaggtagtatcagtgtatatgctcagcatcatgcttggccttgataaattggtaaatgttagctaccaatgtaatagtaactctctgacttcatgtgcagagcacgtttatagtagcaaagatggaaagaaaggaaaatgctgagagagtagatgaacatacaagttaactcagataccaggtgagggagaaggtgactgaatctgtggcagcmgtatggtaggagctgagtgctgcttttggagaaggtgaatgaagttatgtggtgcaagagcctgataccctaaaagtgtctagtaaacctgaatgtag

SEQ ID NO: 820106 - DNA, 579 bp, Homo sapiens
aaatttaaaaacacttagaacacttcagaaaaacatgtgacagggaaacgcacaggcacgtgtgtacacacttaactattcgaggtcgttaaacctggacgcccatcctttycctgtcttccactccagagtttaccactgtcttgcttgaagttggtacataacattctcttgcctcttttttccccctcccctccctttcccttcccttcctgacagattctcgctctgttgcccaggctgaagtgcagtggcaagattttggctcacggtaacctccgtctcctgggtttaagcgatactcctgcctcagtcgcctgagtcgctgggattacaggtgcccgccaccacaccatgctcatttttgtatttttagtagagacagggttttgccaagttggccaggctggtctcgaactcctgacctcaggttatctgcccgcctcggcctcccaaagtgctgggattacagcactccatctatctccctggagtcagactccatctatctccctggggttgcagattcacgccctggtattctgggcttagcctagatacagaccccgtgtatttttt

SEQ ID NO: 820107 - DNA, 624 bp, Homo sapiens
tgatgctattttgtgtttcaaaatggttgtactaaaattatcctcccactggctacatatactgattccttctccaaaaccttttcctaytgcttttaaagttccgggaggacagtcagtctatctttttttgcaggtccagcttttaacagggaactttgcgcaaatttagtaactcctgattgtctgattcattatttggttgaattaaagaattgaataagtttccccattctctttgaagtactctatattaggttttatgaacaagagagagggctgtgtaggagaaagcccataaattgcaatcagggatctgggtgtgagttctataacctcctcctaccttgcaaaacctaatagcttcatgatggcaaaatattctctaccgttaaaagcagataatcatcctacatcatgatgcagagacatctgacctagtgtctagcctgtgtcagagctcagcaagtactagttgctctttctatttcactctactctaatgttaaggcaggactctgaatatagttcactggtctgcattgggatgaacctcccagagacaactaaagcctcaggacaaacaaagcatttgcccgtgtagcctcagggcagcccagagcc

SEQ ID NO: 820108 - DNA, 572 bp, Homo sapiens
atggtgatcattaaaaagtctggaaacaacagatgctggtgaggatgcggagaaataggaatgcttttacactgttggtgggagtgtaaattagttcaaccattgtagaaggcagtgtggtgatttctcaaggatctagagccagaaatcccatttgacccagcaatcccattactgcgtatatactcaaaggattataaatcattctactataaagactcatgcacacatatgtttactgcagcactatttacaatagcaaagacttggaaccaacccaaatgcccatcaatgatagactggataaagaaattgtggcacatatgcaccatggaatattatgcagccataaaaaagaatgagttcatgtcttttgcagggacatggatgaagctgtaagccatgtcttagcaaactaacacaggacaagaaaaccaaacactgcatgttctcactcataagtgggagttgaacaatgagaacacatggacacagggaggagaatatcacacaccgaggcctgccaggggctggyggtaaaggggagagacagcattaggagaaatacctaa

SEQ ID NO: 820109 - DNA, 497 bp, Homo sapiens
ataacctgaatttccagcacagttcccaagtatttgggtagcacaagctggtttttcaggccctaatcacctgctggataaaccagccactgtggtcccagattgggtattaaattctgcagtccagagagrtgggagtggctttgagactttctcaaatttctctgcacccttcatttaaccgcaagtggtcacagtgtgtggtttatgcgttgagtgttgaatgcagctatacatacattgttgcctcattcacagattgctttatgtctgtatggcttgcctcctcagttacactgtaacagttttatgggcaagagtctatagtttgtttctctctcgctgcaatcactgagtagatactcaataaacaagattgaatgggtagagcaaatataaaaggccaatgttaaaactaagtctcagcctgtaatcctagctactggggaggctgaggcatgggaatcacttgaacccaggaaggatcccaggaggca

SEQ ID NO: 820110 - DNA, 553 bp, Homo sapiens
tattattttcttataattgttctrttttattattagttatagttgttaatctcttactgtgcctattttaaaattaaactttatgtaagtatgtatgtataggaaaaaacatagtgtatataggcttcagtattgtttttggtttcagtcatcccctgggaatcttggagcatatcccccacagatatgggaagactactggctaagacttaaaaaatcatgataatagaaactgaagaaagcttaaataatagagttataaaacatatggtgaataaagagtctcagtaaagaaatgaatatttagcaaataagtttaatcatataaaaagaaaactaggggtgattgttagatttggccactgataatctctgtgtgggaaagtaaggaaaaaatggaaatttactaaggtgaaagtggagattggaaaaattgaacatgtatattttacttttctttgtttcaggatctaaaacgacagtagtggtggatgtgtggggtgtgtgtgcgtgtttgtgtgtgtgtgtgtatgcatgaagaaaaagaatagta

SEQ ID NO: 820111 - DNA, 616 bp, Homo sapiens
tcaaaatctccatatagccaagacaatcctaaacaaaaagarcaaagctgaaggcatgacactacctgacttcaaactatactacaaggccacagtaaccaaaacagcatggtactggtaccaaaaacagacatatagatcaatggaacagaaaggagacctcagaaacaaacaacaccacacacctgcaaccatctgatcttcgccaaacccaacaaaaacaagcaatggagaaaggactacagcactctgccaccaggctcagctttttttttatttttggagagataaggtcacattatgttgcccaggctggtctctaactcctgtgttcaaatgatcctcccacctcccacgttagcctcccaaaattctgggatcaacatacttgaggaactctacttggctttattatgtgtttattgtctgctccccctaactagaatgtaagtttcttgagggtagagattatcttatttttgtctttatttgttccttaacttctgtacatgtggggcctaaaagatctctgtcatgtgagagcttctcgatcagaattgctgaaagaatatatgaataaaattaattattatacactgaaataagatttatatag

SEQ ID NO: 820112 - DNA, 616 bp, Homo sapiens
tcaaaatctccatatagccaagacaatcctaaacaaaaagagcaaagctgaaggcatgacactacctgacttcaaactatactacaaggccacagtaaccaaaacagcatggtactggtaccaaaaacagacatatagatcaatggaacagaaaggagacctcagaaacaaacaacaccacacacctgcaaccatctgatcttcgccaaacccaacaaaaacaagcaatggagaaaggactacagcactctgccaccaggctcagctttttttttatttttggagagataaggtcacattatgttgcccaggctggtctctaactcctgtgttcaaatgatcctcccacctcccacgttagcctcccaaaattctgggatcaacatacttgaggaactctacttggctttattatgtgtttattgtctgctccccctaactagaatgtaagtttcttgagggtagagattatcttatttttgtctttatttgttccttaacttctgtacatgtggggcctaaaagatctctgtyatgtgagagcttctcgatcagaattgctgaaagaatatatgaataaaattaattattatacactgaaataagatttatatag

SEQ ID NO: 820113 - DNA, 643 bp, Homo sapiens
accaaactgttactctgtacagcattgtcttgcatggtgcttgcttttactggaatggttttcacctaactcctatttatccttcatgtctaaactttaatatcagttttccatagycatcagtttccctgtatttacttttataagcaacctgtacttgatttcatagcacttactataattataatatccttttgtttaatagttattttaatatcttttctattaattagattatcaacttcttgaggaaagggggactcatgttcatcctgcttaccactcaatcttagcaggtgtattaggtcattcttgcattgatataaagaaatttctgagcctgggtaatttataaagaagggaggtttaattggctcacagttttgcaggctgtacaagaaacatggcaccacatctgctcggcttctggtgaggccttgggctgcttacagtcatggcagaaggcaaaggatgagttggtgtatcacatggtgagagcaggagtaggggtcggggggtaccatacacttttaagcaactagatgtcacaaaaactcactcactattgtaagaatagcaccaagccatgaggatctgcccccatgatccattcacctcctaccaggcctcaccttcaatactg

SEQ ID NO: 820114 - DNA, 643 bp, Homo sapiens
accaaactgttactctgtacagcattgtcttgcatggtgcttgcttttactggaatggttttcacctaactcctatttatccttcatgtctaaactttaatatcagttttccatagccatcagtttccctgtatttacttttataagcaacctgtacttgatttcatagcacttactataattataatatccttttgtttaatagttattttaatatcttttctattaattagattatcaacttcttgaggaaagggggactcatgttcatcctgcttaccactcaatcttagcaggtgtattaggtcattcttgcattgatataaagaaatttctgagcctgggtaatttataaagaagggaggtttaattggctcacagttttgcaggctgtacaagaaacatggcaccacatctgctcggcttctggtgaggccttgggctgcttacagtcatggcagaaggcaaaggatgagttggtgtatcacatggtgagagcaggagtaggggtcggggggtaccatacacttttaagcaactagatstcacaaaaactcactcactattgtaagaatagcaccaagccatgaggatctgcccccatgatccattcacctcctaccaggcctcaccttcaatactg

SEQ ID NO: 820115 - DNA, 629 bp, Homo sapiens
tcattattggtctgctcagggattcaatttcttcctggttcagtcttggaagagagtgtgtgtccaggatttcatccatttcttctagattttctagtttatgtgcatagaggtctttacagtattctctgatggttgtttgtatttctatggggtcagtggtgatatcccccatatcatttctgattgtgtttatttgatccttctctcctttcttctttattagtctagctagcagtctatatattgtgttaattttttcaaaaaactagctcctggatttggtgattttttttttttgaagggttttttcatgtctctatctccttcggttcagctctgatcttcgttatttcttgtcttctgctagctttggggtttgtttgctcttggttctctagttcttttagttgagatgttaggttgttaacttgggatatttctagctttttgatgggggaatttggtgctatatgtttctctcttaacactgctttaactgtgtcccagagattcwggtacattgtctctttgttctcattagtttcaaagaacttcttgatttctgccttaatttcattatttacccaagagtcattcaggagcaggttgttcagttttcatgtagt

SEQ ID NO: 820116 - DNA, 559 bp, Homo sapiens
gctggaacaaatctgcgtccgcctcgtgtggcctcgctgcatggaagggagacagcagagctcatgctttggcgaggctttccacatgttggaaatgtgacagctgcctggactgctcgtcctggtctttggcaacactgaccacctgtgtgtgaagcagcaggtcattcagtgtctttgagcctcaggatttctctgtaaaaatgaggatatatattcacaatatgaatctcagacaatattagctttgaagtttttagatataaaattgtttatgccatctgtccatggccactcatagaattaaatgaagatctaggagggcaggcgtgtgtctgaggccctctgtgtccccatggagctgtccaaccttgctgtcacacacagtcagtgttttaaaatggaattgactccttgacgatgtgctgccrtttctctttcagtctctctctcatggtttagatacctcgagcctagatggccagggcagtgcattgcgtgcagtgcagacagatgagcattcaaaaggtggcacggtgggggctcctggacattgcat

SEQ ID NO: 820117 - DNA, 613 bp, Homo sapiens
ttacactttctggttcctgtaatccaaagaatgctgctaatatttttcatttctgattctatgaaaattttaaaagaattttaaggtttttattgacctaataactccrcagtgttccactgtaataatacatacacccttgtttaggggcttagcaggatttataaaagtctaactttttagctgtgatagaataaaaaacacccaatttaaaggcttttagtgtcataatgggaaaaacacactacacatcactatttacccaggggctactaggggaccaaatctctattttataggaagatttctggaggaagtttttattgtattaaaggctactgtgcacagaatgctgtacagatttctattctagttttacacaaaggtgatactcgcaatctattacacattattacctatgtcgatgaaaagagtcaaactctgtaaaatgcctgaagagatttattctgaggcagatgtaagtggccatggcccgtgacacagccctcacgaggtcctgagaacatgtgccgaaggtggttgcggtgcagcttggtttcatacattttagggaggcaggagccatcaaacaaatacatttgaaaaatacact

SEQ ID NO: 820118 - DNA, 603 bp, Homo sapiens
ggtgccgagacagctgcggccggcagagcccgcgggttctaagattcctctccactcagttsctaactcctgccccactccccacctcccacaacaagaaaacattcttcaagagtagctggtgcctgtgatttctttcataagaagcagagtctttaattctgcattggagattagaggtttactctaaaaggtcagctcaggagactcttgaaaacagctccaatctaaatgcaaccagttcataaattcctgtcctatggagataagttatcgcagcaaatccaaccacaggcagtacagctcctgaatcatcagggagaattaaaaggagatgatgaaatgggtagcttttagattaatacaacggtataaaacccagggaatgagagaatcttgagactgttattttctgtatctgccatgacaaacgttccttaattctttaaacactcattaaagaaatgaaaattactttctcattctctaaaaacaattaacaaacttgtagaggggagagagtctgggggaatgggaattgaagatgaagggatgggggaaacgtccgctggagaaaagcgagagacacacgttttaccagaa

SEQ ID NO: 820119 - DNA, 552 bp, Homo sapiens
catgaaaatggactaatacatgtctcagacaatgaaggaataattctgtttcctttatatactccttatagatcttcttagcactccaaatggatctgacagtctaggtgagtatttcctaggtatctatggatcatattcagagctggttgcaaaatctgatgaatatgtttctttccagaaaacataagtgcacgcgttaatacattcacatataagcatacacacaattttatggggttctctgaaattcactcaagaaagtgctcttagaaaaagtgttccctggtgaaactgtttgggaaatctcacaggaaaaaattgtgatgtgaagaaatatattaaggaccctgaggcatcttggtgtcaaacaacctagtaactttgtttaacccagtatttcttggctgtgttagattagaaaaatccacttataaacatctggtggaccacaaattctcttgtggaacatagtttaagaaagaagaaattgkgaagagtttgttcataggctatcctttcagagcagtgattctttggctggatgtgaga

SEQ ID NO: 820120 - DNA, 617 bp, Homo sapiens
acagcgtcctgctccatcagctccgtttcggaacaaagagagcccagccacagctctggggtgataactaggggagggctggcccggccgctgggtccattgtcccagtatcaggctttgattacgggtccggggcctggtgggcggatctttggaaggggatacactttctttgtcccttactgtgtgtgagtgtccacactgtaatctggaaggaaggaagaaccctgtttcagaattaaactgaaaaggatcaagagattctcaaaattccacacccagacctccagtaatgcaacacagaaccacccagaagccaggcaggaagtggctgagaagttcatgctcctgtctgtgtttctaaagagatttcttaattaagcaacacaataagtaactgggaagcacacacatttttattccctacgagaaattctgtcatgaacactgtcatttaaaaatagagctagactcctcctaacactccctacaggacatggtccagggaccgtgtgttggacgtgatggcttcaagcccaattcccccagcactgagcatcttcagaggccaatgaaccaygttatgaaaccacactcagctctcaggccctgtgaag

SEQ ID NO: 820121 - DNA, 595 bp, Homo sapiens
tctgcacaggtatctcaacctccatcccaaccccgacccccaaagcggcaccgcctagcgccgtacgctaaccccgaaagcttgtgtgtggctgctcccaggttatggaggcrgaagcacacaggacccataaactgtgaccagaacagtgtgcagggctggcgctcggggtctgtgctcaaggtcccaggaccggccctgggcctgacgaagcgtacgtggacgagatgactgtggtcggtgggctgggatgtggtctgctctgacaacacagaaacccctgggtcttttgaacaggacgtgacccattcgatccgagtttggggaggatcaccacggcaactgagtgaggaaaatggggagagaggcccgctgggaactgagctcactctgcggggagaggttgtcctcaagtgtcccgacggcagcacgccgggaaacaaactttcttaaaaggggtgtgagcgactgctttacagctggcgaatcctgggctccagggtcccactggctgtcaggagaggccccaatgggaacgtggcattgggcatcctcagaggagctgcaggccaggcccagccccatggcagatgca

SEQ ID NO: 820122 - DNA, 627 bp, Homo sapiens
agaattgcctctcacgctctaatgtctaagcaggtctaagtcacgctggaaccttcttcccaaatccttctcttcccttcacagcctcctaaatctcttcctccctttcttccctgctcttatcactctcctggcctttaaaatctaaactgacagtaggtgcaggaaaacaatgagagtggaaaaaccgatcaagtcagggatggagacccccgttcccttcgccgcgttgcccgacagtcgccaccccacacccgaggggtcggtgagcagcacggccccttcctctaacgtgtctgtctggttccggctccagagtaacgccagcctcagaatgaggtgggaagtgcctcctcttggcttctggaagagtctgtgtaaaactggtgtggtggagttcatgaagtcatttgggcctgaagttttctctgcaggaagattgctagttactaattcctctaatagatacagtgttcattgtgttttgacgtttatgtcttyggtagtcgatgtcctttagaatgtgtttatgtccttggtagtcgatgtcctttagaatgtgtttatgtctttggtagtcgatgtcctttagaatgtgtttatgtctttggtagtcgatgtccttta

SEQ ID NO: 820123 - DNA, 557 bp, Homo sapiens
ggaccctcatggctgtgtctcccagcrggtaggaccgcccagggtcccagcagaagggtgtgcgggggctgtggccagcagaatagccacggccagctcggccttttcatgccatcccctgcttttaggatacagagaaactcaggccctggcagcgtcatgatgaggatgccaggacaccatcccagagctcttggtccacacaaaagaggtgggacctgaggtgaccatggcctgctggccaccaaagccacaccatagtccagggctgggtgggagccagagtggatggccgggtgcctgcctatttggcctctggtctctgtcccttggcactgttgggagttatgactctttccccaacaagagccttctcctttgggagggcaatcagggaaggaagtcaaaacttaactgcctgtatttttttagagatgcatcatgaaggatgtagggggaaatgatgtgaggtccttcagccaaaacaaacaagccaaacaccaaataaaaggggctagatgaagcaagtgtggcaaaaatcttgataactgttgaat

SEQ ID NO: 820124 - DNA, 582 bp, Homo sapiens
gaggaagctctttcagcactcctatggacaaatctctgagtgatatttcacaaagaaaagatggaaggataaacaagagccgactgacagcaagggcaacacggagggtacaaggtcataggttctactggctgataaaagaacctctgggaaatgcagccaggcttcttgaccagggtgagccttgagcacaaatgtaagaggaaggaaatgatgcagctgccctggagctttccgtcagaggaacagttacaaaaagctgatagaagccactgttgatggctgtgggttagccctgttgaaatggcagccctcccctacggtatgtgggcacaggaaaacattttctcagatggtcaacaactccatccttgagaaaccccagcttaggcaccagaccttcatcttgtccacaaagtgagagagcgccaccaaaccatgcagataagcatgttstagaaagtcctactaaagcaaagtccatctctctttacatataaaggacaaatgcaaaggacagtgctggtgtcactgcttattattaggaatgaacaagataatggctttcaaaactatgaaaga

SEQ ID NO: 820125 - DNA, 634 bp, Homo sapiens
gtgatggtgctacacgaggaaagcaaaaagtgtggtggggacacggaagagaggtcatgctgtatctcagaagccatctgggccattaccgggcataccaaatcatggatttagtaagtttaagtacatgcttccaaagaacttatgtgtaaataccactgaagagccttacttaattccagcaggttgctggggtctcacctcagccccctcccactcctcagtccttaagaactaaaacgtggcacttcaaacatgacaaatccaggcttcaggattcaaagaacgatttccagtataagttcacctcactataaggtgctacaattgcatatcaacattgtgtagtctgtaccacctgaaaaactgggcgcaaagccccgccaaatgctgctgcagttaggttaactaaactaaatcaatggcctgatttcccagaaaaagagtaacgagcattgtttaaggaaactgcaaaagaggaacctctccttgagtagaatcctcgactttaggccytcccaaacagcataattcaatggccattaactcaacctttttagtaagctaaatatgtcctggttagaaggtgctctttaatctgagatattgatcttccaacatttttggtgctaaa

SEQ ID NO: 820126 - DNA, 502 bp, Homo sapiens
aaggtatgtttaaactgcagcatgagatatacaggtgaggcaaaaagattctttgaataacgataaggactgtttggcattagactggatcaatagggaggtgtttttaaactttcccrtgtgtttcaaattttttcatcagatttttaataactggttatactcattggtaaaacgaaagacaccatgaagagtacagaaaaaaatatgaatgtatttgaagagcctggagaggtgtgtgtatagtgtgagtgtgtgcatgtgtgtgtgaacgtgtgagtgtggtgactcttgagagacctgggacagcagtgatcttcaggggaatcggggcagatgaccacgccctcctgggactcatcctgtggggcatctactggcaagagactaaggggtgggagaaagcttgacccagtagatcagctcctttgtgatgatgcctgggatgcctgacagagacaaatacttaaaggtgaggacactgattaaatgatttctacag

SEQ ID NO: 820127 - DNA, 642 bp, Homo sapiens
ttttgtttctcagatagaagccctgaattkgttaggcacatggtttcctggaataaaaatgaccttccctctactctcttccttgcagtaggtatggccctgtgacaaagttctgatcaacaggatgtacaatacccaggtggcacctcctccagggagggatcatgcttttctcctccccttgcctccctcctactagctggaatgtgatggagctgtagactgaggatggccgagcaacaagtggggaggaatgtgggaccctggtgaccatgaagccaccctggcagccctgcaggacaaaaggtgaacttgtactatgtgaaagctactcgtcaggatggtggaacctaatttgggtatagaatttgccacaccaggtgatataattttgctgtgtcccccacccaaatctcaccttggattgtaataatccccacgtcaagagtggagccagggggagacaactgaatcatgggggaggtttcccccatactgttctcgtggtggtgaaaaagtctcatgagatcggatggctttataaatgggagttcccctgcacaagctctcctgcccgccaccatgtaagacgtgactttgcttctcattcgccttccaccatgattgtgaggcctcccccag

SEQ ID NO: 820128 - DNA, 621 bp, Homo sapiens
ctatcagtgaatttatgaatgtttcttgtcttcttagtttaactgtctcttttagaatttttctaaattgtctgcaakccactgttattacatatataagttctatgtttgtttactaaatcttttaaagcctccctttccaaaagtcctcaccttctgagactttcattggttagccagaaaattctactcccaaaacagtccctgtgccctaccaaatagcagattagtctgttttaccctaagctctagggaattccaaatcctctgcaccccttcagcctccttagtcctgagatgcctatagactagattgccagataaaacacaagacgcccagttaaattgaaatttcagatgaacaaaaagtaattatttggtgtaagaatatcccaaatatagcgtaggacataattatactaaaaaaatttttcgttgtttatccgaaattcgcatataactgggtatcttgtattttatttgttcaatctggcaagtctactgtggactaaactctctccttggagcaagccaagaaaagtctctttaggccgggcgcagtggctcacgcctataatcccaacagagtgagactccatcttaaaaaaaaaaaaaaaaaga

SEQ ID NO: 820129 - DNA, 634 bp, Homo sapiens
atggagtgggaaatggaggggtgagccctgagctaactcaagaggccaactgcagagtcaggggaagcatcctgggcagtcagcgggcagccmgcctaaccaaggtctccctaggtccctggagtgatgggagaatagagaaaccacttttctcattgggactaataataatttggttaaccaaaaacttgtctaaagcagagaatcataaaaataaaagtagtgcataataccctagtataacataaacatgctgtatttctgctaacattttatagagggtcaaggtattttctttggatattataacattgataaaaattcttcatcatctttcttcaaaaaccactttcataatccatctgcaatttcccacttccatttctttaaaacaaatggaaaatgtaaggacatttatgaagcaatctgagtgcaaaagcctcccatattcttttatttttccacagttatagttgtctcacccacacctaattcaacagcaatttttagcaactcacacttatttgagtcttttcaaagcatgcaattttgttttcatagaaacagctctctttttatacttgatgttcattggtttatgtaatatttaattaaattacacaattacatcagt

SEQ ID NO: 820130 - DNA, 581 bp, Homo sapiens
ttacctttacaaatgtgtcagcatggaacttgtcatagccataaattaaaggtgacatacratatggactttgcatgcaaaatacccttctgccaattaataccttacctgttaagtgttagtaaatgctaattttaaatgattttagggtcttgtacgtttgtattgataaatgtgtcaaagggatgcaagttcttgataagtgtaccaacttcactgcactagaaacaaaagctagtaaagaaagcttataaagcagtgagataaaatatcaactttgcctcagtaacccatcaggaatgggtctcttgtttgaatatgagttatctaaaggtttgtgatccatgccacagcctttactcttatttacttaatttgatatgtttgctgtgttgtcaatttttgaaattaaaaaagaggatcaatatgtgggaagaaaacaaacaaatatttctccctggttgctgctttgttgttgcatctgttctttttctttatttttttgcttatacaataaaggggaattattaattttttctgcactccactgacatttctgggaagttatctgtagatgatga

SEQ ID NO: 820131 - DNA, 603 bp, Homo sapiens
ttatccaagataccataaaattggaatcatatagtgcatagcttttgcagattggcctcttttatttaacaatatgcatttctgtttcctccatgacttttcaaatmttgataactcatttgttttcagctctaagaatattctattgtctggaagtaccacagtttatttatctattcagctattgagggatatgttggctgcatccatattttggcaattacatacaaagttgttataaatgttcatgtgctagtttttatgtggacatacactttcaactcatttgtatcaatacctaggaacacaattgctggattatatggtaaaagtatgtttagttttgtatgaaactgtcaagctatctttcaaagtgtctgtaccatttcacagtccctcaaaaaaaaaaaaataaataaatgagagttccttttgctccacatccttgctaggatttgctgctgtcagcattttggattttggccattctaataagtatctttttttaaatttgcaattccctgatgacatgtcaatcgtcttttcatatacttatttgcccgatgcatattttcttaaaagctatgctttgaagtaagaact

SEQ ID NO: 820132 - DNA, 568 bp, Homo sapiens
ccaagagtctggaaacgttaggatgccctaaaacagggcccccaaaccccaggccatggaccaatattggtccatggcctgttaggaaccaggctacacagcaggaggtaagtggtgggagacctagcaaagcatcatcagtatttacagccactccccactgcttgcattaccacctgagctctgccccctgtcagatcagcagcggcattagattctcataggagcatgaaccctactgtgccctgtgcatgcaaggaatctaggttgcgggcttcttgtgagaatctaatccctgatgatcagtcagtctcccattagccccagattggaccgtctagttgcaggaaaacaaactcaagcctcctactaagtctacgttatggtgagttgtataattatttcattatatattacaatataataataatagaaataaagtgcacaatagatttaatgcacttgaatcatcccaaaaccaccccccaccccsagtccctggaaaaattgtcttccacaaaactggcccctgctgccaaaaaggttggggaccactgccctaaaacta

SEQ ID NO: 820133 - DNA, 642 bp, Homo sapiens
ttctgacaggccaagaatgtcaagatacttgggggactttaagaaaaaaggaattcaccccatttgtacaggcattacacgcatattctcatgatgaatccttgatttggcttgctagacttgagaggctcttaaaagtctaatccaaaatcccttatgaaaaaattccagcaaagccaacttaaaaaggatcctatgtgggcaatggctattctttttacactttatgcaactaatcaggcaaagtataataagactaaaatgtatattgagaataaattggtgttgctgtgatttctctttaatagaaaagggggactgaagaaagaaaaataatgtttcagaagaaaagtatagcacacctgttattagactgtagccctgaccattgtttttgagttttttattacttgcctgcaatttggactgaatactagattattttttggctatgagaaatctctaaagaagaacctggatttaattttcttcatgatgtttttagttggctcgctagtggaatcagttcttttwtttttttcattttggcatacaaattctctttttgattataattcttatgtgcaatatattactactattcaaattattaatgctatgtatctcttgttgttttacttt

SEQ ID NO: 820134 - DNA, 644 bp, Homo sapiens
atacatgcctatctaatgcaggatattttcagtgccgctttgccagccagagaccttcatggctggtgatgcccctgctcactcaaaccaccaggctgtgcctggcttgcactccagcgcagatcccatggccacaaggacagcgcactcagcccatggcagaagtgggtgtgtgagcaagcaagtgtggggtccggctagctgctccaagtgccagcacaggagcaggctttgtgtggggcttgcatttggaccaggcatgtcatgaccgactgctgtggtggactctggcctccagatgaggggaatgcggtggcacccaaacggggatgcccacaaccctgaagccccagagcaggtgttagagcatgctaacagctcctttagtccactgccctgctccagcctgcggatccagggctggcctgaccctgacactgcttcctgctgcatggggtggctgccctctgctgatggagaatgggagggttacagtgttacagctttcttcatactyaccttcagtgggtcccaagttcttgtcccacatccaagaagaatgagattacactgacagttgaagggtgagaagggcatataagagttttattaagctacaaaatagctctcagcagagaggggat

SEQ ID NO: 820135 - DNA, 621 bp, Homo sapiens
gaagcccagagaaaggagcatccagtgagtggggcagacctgtggtggatccaagcagggccattcacgggtgggacagaggcagcctccaggcagtagcaatctctgaggtcagaagaaaggcagtgtcatttmctgacgatcttccttgtttagggcaggaaaccagcctatagcttgaggacatggagaacagaaccaagccccaagtggggtttgggtggaatggtgatcgccagtcaggggctcactgaggactggagttcatgtggggctctggctttgtagataattggagtcttaggcagggaaattgaggcagaaagaggcaaatccagttatgctgagtcactgacacggcaaagtttaggcgagggtgcagctcagtaacccccgccctccactgccatccataggaatgccagatgcagagttcagggcaatggggtcaattgcagcttctgctggcccactgggaactaagattctgctggctttagccaggttcagctcaggtgatgaataggcattttggagggacgtgtctggagtggggcagggggaggtagggactttcggttaagaacccacttccaccagcagctgagaaagccctaggga

SEQ ID NO: 820136 - DNA, 470 bp, Homo sapiens
ctgagctgacactgattccagggcaaccaaaacatcactgyggtcttccagtttaagtatggacatatggaggtcaggtaattaatggagttttagctcaggtctgacttacagagggtccctggattcatcctatggtcatttccttagtgtcagaatgcataataggcgtcagtatacttagcagcttgcagaacccacacattggctccctgactgataggatgagggctattatggtgggaaaggcaaaatggaagccattatagcttcctctacctagaaaaatagtaaatcaaaacaatatcatacccctcgagggattgcagagattagtgccacttgtcttgaaagacacaggggtggtgattcacaccataacacagttcaactctcctatttggcctgtgcagaagacagaaggatcttggagaatgacagtggattatcataagcttaaacaagtggta

SEQ ID NO: 820137 - DNA, 470 bp, Homo sapiens
ctgagctgacactgattccagggcaaccaaaacatcactgcggtcttccagtttaagtatggacatatggaggtcaggtaattaayggagttttagctcaggtctgacttacagagggtccctggattcatcctatggtcatttccttagtgtcagaatgcataataggcgtcagtatacttagcagcttgcagaacccacacattggctccctgactgataggatgagggctattatggtgggaaaggcaaaatggaagccattatagcttcctctacctagaaaaatagtaaatcaaaacaatatcatacccctcgagggattgcagagattagtgccacttgtcttgaaagacacaggggtggtgattcacaccataacacagttcaactctcctatttggcctgtgcagaagacagaaggatcttggagaatgacagtggattatcataagcttaaacaagtggta

SEQ ID NO: 820138 - DNA, 494 bp, Homo sapiens
agcaagaagtagcaaacacactggacttattggtgagacatttgcatsccagaggatgggaaataaatctggcttaaattcagggatcttctacctcagtagaatttctaggggtccagtggtgtggggcctgtcgagatattccttcaaagataaaggataagttaccacatttggtccctcctacaaccaagaaagaggcacaatgcctagtgggcctatttggattttggaggaaacacattcctcatttgggtgtgttactctggcccatttatcaagagacatgaaaagctgccagttttgggtgggttccaggacaggagaaggctttgctaaggtccaggctgctgtttaagctgctgtgccacttgggccatatgacccagcagatccaatggtgtttcaggtgtcagcagcagataaggatgctgtttggaacctttggcaggttcacataggtgaatcacagcggaggcctctaggattttgga

SEQ ID NO: 820139 - DNA, 472 bp, Homo sapiens
actttaagccaataagttttggggtaatttattgtgaaacaagagatgactgatacacctagactcaagaagtcatgtagcatcattggctgcattctattggctaagagtgagtttctaaggccagcccagattcaagagaaggagacactgatgtaactactcaatagaatgagtgtcaaaaacatgtgcagtcatggtttgaactaccacaaaatgttaaggttagtgtacctttaatataactggggagtatggttccaaatatatagaaatgcaagatttttgccactcatgaaacatttataattaaataattgttcatgtaatttcttactgaatttctattattcccctaggctgtgatttgcagaggatagcaggatttgcmgatctgctttgctcatttttgtgtttcaagagccatgtagtgtttaacagacactatatgctcatgaggtatctgtttaac

SEQ ID NO: 820140 - DNA, 680 bp, Homo sapiens
tcaagcagtttgatatttatctctgcyagatactataagcttcaaaatttggcatgagagttataaagcttgcagaccaaaagagaattatgtttgtgtaattttttaacaaataagacatttaatattgttggtttaatgaaaatagctaaatcctgagttattgagcaaaaacactcatttggttatttcataggtaatttaggtaaactattttttaaattaattaattaggtaaatataatgaaataaatgcttgtaaaaggaaaatatcttgaggcccaacatcactaagctaaagggaaaattcaagctgggaactgctcagggcaaatctgccttccattctattcaaagtcatccctcttctcactgagacagatgtacattctgattgccttctttggaaagacttaccagaaactcataagaatgtaaccatttgtctctcacctatctgtgacctggaagcccccctccctgcttcaagttgtctggatggaaccaatatacttcttacacatattaactgatgtctcatatctccctaaaatgtataaaaccaagcggtgccctgaccacctgggcacatgtcatcaggacttactgaggctgcgtcatgagcacgtcctcaaccttggcaaaaaaactttctaaattaactgagacctgtctcaaat

SEQ ID NO: 820141 - DNA, 649 bp, Homo sapiens
ctggtgaccacacacacctgggtgtcagcaggagcccaagagagttgcaaaatttgtctttggtcaggtcacaatgcaccttaccagcagcgaatccatacaggtctgcagcaaactcaatccttgcctccttggaggaaagcggccaagaggcagaagtatgtttaaggcagagggagagaccaaagcaagttttagagcaggaatgaacgtttattaaaaaaattatagggcaggaatgaaagaaagtaaagtacacttggaagagggccaagtgggtgacttgagagatccaagtgccctgttcagcccttgatttgggtttttatacactggtgtggttctgaggtttgtgtctcttctcccgcgattcttcccttggggtgggctgtctgcatgcacagtggtctgccagcacttgggaggggccgcatgtgcagtgtgtttactaaagtcatgcacatgctcgcttggggcattcttcccttaccagttgagatttcctagaggaaggtcatatactggttaagctccgccattttgcctcagttcacatgcttgagcctgctcctccaactcctgagattctttagggaagctgctgatcaccagctccaggtgttwtctatctattgaagaccgtctctcc

SEQ ID NO: 820142 - DNA, 392 bp, Homo sapiens
ttctctatttccttctcaggacaaacttcctgaagagtctaacctttctgttctcagtttccattcactcttcaactccctgcaatccagccccttccaccaacactctaccaaaaacactttactcggttttcacgaactttgaggatgccaaaaccaatagcttctcttcaatctccacactactgagtatcttaatagatttatctcatatcactctgttccagatatagtgatcatcctgatgtatcccaaacgcatgaatgccttcattcctcagcacatacgctccacatgaaaatattccttcatgttcttaacttctgcttatctcaaaacccaactgaaatgacatctactgagtracatttcagtggtgtctactttgcacc

SEQ ID NO: 820143 - DNA, 635 bp, Homo sapiens
gaaggccaagacaatctcctgaacactgatttcctcagctcctgctaatatcaagaattagtttgtggttagattagcttatgcttttaaataacattaatgattttaaagcactggataaattctcgtttcaggggatatgaacaagtccattgccttgtatttaaacaaaatacaattttgccttttgcagctctgcaaaggttattgttatttactatgcatcaataaataatctttcaattatcttgtaagcacatccaaaaatagcatgacaatcaaaaggcaatggtgtatccagtaattgttccaaatagataattttgataaatatgatctttgcttaatttcaggtaaaaaagaaatcttacgaaatttagttttgctagacttaaaccatgcaaaaataccctatgaaatggacactctatttaaactgtatactactgtcttttacagtgattataacttattaaaatcattttttcatctcttgtatgaataatatatttacaagaaaacatwacttaagctaatacaggtggggggttcccacctcctgtgtttttttaaaaaaataagcagtttcatttgagttaaaaagtatatttctttataatatttgttatgtatgt

SEQ ID NO: 820144 - DNA, 627 bp, Homo sapiens
attcatgaggtgatgttcttaaaaaccactccagaggcacaggaggaacgctgaggacaagactgaatatagagatggaggaattacgtgtctactgggtagagatggagaaggcatatttatactagggatggttgaaatcatgcaagcatcttccatagctaataaattattttatccagttggcctttactgagggcatactgtgtaccggggcccaccctgttggatgccaggaatacaaagatgatcagagttcactttctgcgcttgaggatcccacagattagaaaggaggaaaaagagttactttccatacaaggctataaatgttacaacagttgaatttttcagatgaagtggaaggaaacgtctagaaggaagaggactgaaatgaaagaagactgggggaaaagaaataataataaacaaaaagaaaaataatttgaaactttttagagaagatgattgaccccattgtggagatcaagattaaagatgaatggcaggcagctgtggagagcagaggtggagatattgggaggatcagactaaagaactgaaatttcagttgtccaagcgggcatgctgttytacagcctcacatgtcttgggcctattagaaat

SEQ ID NO: 820145 - DNA, 625 bp, Homo sapiens
tagtagtagaaattgtttatcttgggatccatgtgtcccaaattatctctgaccacttaaagtttgccaggtcctcctgagttttaaaacaaaacagacacacaaaacccctctgtactttaacgtagaaaaaagactttactgagaagtacagctttaggaaagatcactggagatgagaggtcataaactatttctaaggataaaatatcctatttccagaaaaatctgatgttcaagagattccaactggggtcatggtgagaccatcattaaagatgcaaatcggattacaagtggagacaaattccaccaaagtctgaagtagaaagtttgtagttgttaacagtttctgataaaacgtatataattttgaaatatttcaaattctaagataaaagttttacatgtttacatgttgatgggcagaataaagtttccaaaagataatgcctttgctttgtttctgtgtttgatgaaagtatcttaaaacagcacaatataaaattttttgctactttctagattttagtactttcatgttaatttctgttaagaatcataaatcatttttttccaactttaatttactatagyacatttttctgtgtatgaattcatgatt

SEQ ID NO: 820146 - DNA, 646 bp, Homo sapiens
aaaaactaagcatttttaaaaatcctactagattacccccaaagtaggaaatatccatgccatttccccactcagaatgcaatagaattaaatagtaaaaacaaarcagtagcactgccaacatgaaaaacattttattaaagtgggactgtgaaaacagtgttttaagtaactcttgaactacacaagaatgcaaaataacatttaaaacaatacacaaataaatgatagtgatagctgtatataagaaaatctaagggatgcagccaaagctgtaaccaatgaaaaataatggccttaaattgcaagatgtaaaaataaaaattaaatgaacaaaacatacaatataaaaagctagaaaaagtgcaacatatttaaatatgatgaattaataaaatttaaaatttactaaatttagataaaacaaaatgtagattatcaatgaaaccaaaagaaggtacttgaaaaaaaaaaccaaagaaaacacacaaacctctggcaagtgtaaggaaaaacaagaagagagaaaacagaaatcaacataattacaaaatatatttgctaaatagataaggagttttttaaaacaagagaaagtatgtataattttatgtagcaaattttaaagtctggaaaatggatgttt

SEQ ID NO: 820147 - DNA, 485 bp, Homo sapiens
tgaacctacatttttggggaactcagttcagcccgttgcaggctacatgcccctggcctggcctagggagctggaaccactgtttgctgtgtgctatgtaaagccatctgctagcgtatcagagatccatgcagccctctccgccaacaaatcaggaggggctatgtggatgggacagattttgtcactgttttttgttgttgttgtttatttcattccactcactgtttttatttttttagagggaggaatgggaggaggtggaggtcgggatgacctctctgggctaacccgggctgccctcatgtccctcagttcctgggacccaatgtggaacccctgatagctgcggctggaaatccaggctggtcgtgggcctgaaccccacccctgggcagatcatagccatggtccctgcagccactctctgccaccttcactctggggaygaagtgcagattccaggatgggagccggccctcatc

SEQ ID NO: 820148 - DNA, 572 bp, Homo sapiens
gggaagctgcaatgggaaagcaggcagtaaaatatgtgttagcaagaactttaagcaccgtgggcaactggagcccaaccccactggggagctttggaagacagtatagaacatgccttagaatgatccttcctgaggtgaggagctggggtatgaatacacccatcccactctcccactgtcagtagccgagggctgctcccgcagggtgttgattttctggtactttctgacctgctccacacatggctggagtgggctctggctaggagtggaagaggatctaagatgatctgagcaggctgctgcagagtcagctatactcagacatcacattgcatgtttaacatgtcgctgtctctttagatttgaatcctattgttttggtggtatggtctcttttttgcaagtgctctgccttttagattcccttcgtcccctttcccctgtccaatatgaaagcaagccaccagaggagstttctcagcctcctagtgggagaggaatgggcatcagatcttgtctctcttcttctgtggctgatccatggcttgtatctggtgaagtgtgat

SEQ ID NO: 820149 - DNA, 576 bp, Homo sapiens
tttcaccatagcacccaactctatctgtccccagttaacattacactcctgctcctgaaaccgtcaatcattctgggctgcaggaacacatagatcccaggtagtcagcagctacatcactctcaggatgtccgcagtactagagcttttggtaaaggccctgctctgtctgataaatttgttgtgatccccatgtattttgttccaaagagctctgcctggtaccttgatattaggaaagacacaaactgatgctgtggcatctctgtcctgatacattaaccgcgatgggccggcacgtggaatcctggctcagctcttaagccccattgcccgcagtgctgtgatgtgttactgggccactcaggaccactggcagccatgcacctggaagcaaatttgccctctgctgaagaggcccaggtgtctggaataagcccatggctcccagtcctccgagactgagcttgaaccgagacacyggctcctaacacatcttcctctccaacgtgcatttgagatttggctttttgtgtgtttctgtggacggatggatggatatcaacctgcatccag

SEQ ID NO: 820150 - DNA, 592 bp, Homo sapiens
aggtagcagtgggctctggttggagaacccaccacccaccgcacccagaacagacctgcagttgatccattatcatatcagctcatcgccttttcaaaagcatcctggtttggatcaggaagtgtaaggtcacactagctctgatgaacaagggcagggaagtctcagctgccagccgggtgtgcagctgcagcacagaggcctgcccggagcacacagctaggaagaaacccgtatgtccccagaggccgggggccagctggccataggcaggagggggcccgggagggagccagcagtggacccagggccaggagaggtgggacagaggcacggcaaggacccctgcctggccactgctgcccagaggagtgcaaggggatggctgctttctatctggacctgggacacttgagacagtcactcaaccccctcatgcctcagtttcttcatctgtaaaacatgaacaaacctttgggattacaagggtttaaacattraatgagataaccaacgtgcagtccttttggaagccataaatcagtactgcgtgtgagctgttgtgtttagtaggtttaggagcagcagcccc

SEQ ID NO: 820151 - DNA, 535 bp, Homo sapiens
actacataattgataagagtattaggaataactatagtcttgcccttcaaactgatcttgaaccaactgtgtacatactttggggcactaaggaaaacatacctggggcaggaacccttcctagcattttatgattgggcatgttacagtggtctcagaaagccccgtgagggcatggaagaaagggtcagccaagaaaacccatcaaaccctttgcaaagttatgtggcgtctttttcctgtgtgtgtatttctttctcatcttttgtctttttaaaaatttcttaagtaatttgtgagtggattcttatataaggtttaaactataaaacacatacagaaatcctatgaaaattttccttcaattcccatctctgtgttcccatctcacatgcacacacacacacacacacacacactcactcwctctctctctctctctctctctcatgcccccataggtgtccagtcagtaatgtgggcttcatcctcctagttctctatttacaaaatcataatagtttttagtatgaat

SEQ ID NO: 820152 - DNA, 588 bp, Homo sapiens
aaaatgaaaaacataccaattaaaattaaaaattgaatagataattttaataacagataaaactatgctaaagggagaattataaactagaagagaaatataagaaaatgttctacaatatagcacagaggttttttttaatacaggaaattaactaataagcatgcagaaaaactgaaaagagctaatctacatttgatcagagttctagaataagcagagagagtgcaaggaaaagagacaatttgaagaaataataagtgagaattttcagaactaataaaagacaacaatcttcagattcaagtctttaataaattctaaatgaattaaatcaaaaaagaaatccacatctcaatacatcatagtgaatctgaagaaaaaaagatgatcaccaataaaagaagaacaaatttttttggagacaggatcttactctgttacccaggctggagtgcagtggtatgatcacagctcactgcagccttgaccttccaggctcaatcgaycctcccacctcagccttcctgagtagttggaactacaggaaataagcctgacttatttccctattttttgtagagacaa

SEQ ID NO: 820153 - DNA, 566 bp, Homo sapiens
tggcctcccaaagtgctggaattaaagrcatgagccactgcatgtagccaaaggaagaacaattagactagtgactttcttatcaacagcaacagtgtaaccagaagatgtagaataacttcaaagtctaaaagaaaataactgtcagcctagatttgtatatggagaaaaattatctttcaagaataaggaagaaacaaagacattgtcaggtaaatattaagctgagagtttgtcaccaacagaccctcaccaaagaaaagtctaaagaatataattcaaaaaagaaggccggtcccagaaggaaagtctgaattgcaatggtgagtagagaaagtggcaaatgcacaggtaaatttaaataaacattgactgtgtaaaacaacaataataatgtctgtggaatttttttttaaagatagaactaaaatagccaacagtaatcatatataggcctggggggagagttaaagtgttcaaaggtccttgaattttcagaagggaacaaagtatccataatttaaatttaatttatttaatttatctaattaaataaactttaactt

SEQ ID NO: 820154 - DNA, 589 bp, Homo sapiens
gacatcaagtcaccaagtcagtttgagggagaggtaagaaggcctgttyaaacaatgagtcagtatcagagatctaaaacatcacaaaaagcgcagactcttcttctggctgttgaattcatgtaggataagggtatatatatatgagagattaaaaaaaaagatagcgataccatcataaccaccaaaaggcctggctttatccttccatctatatgttttcctccttaatcttacacttactcatgtaatctcaatatatatttgtgtgcttgatagaaacttaacctaagctcccacccctccttcagggaaaaacaaagaactagctgataatccagtacttcagatgctttattatagtgaaggccagcaaaacattaaaccagagaagccagcagcatcccttctctgtcacagaccttaatggtcaagcagtagatggtgaccatctctaagaataatttcaagaagggaaagaccaagaaaatgccacttgctaaggggaatattcaccagagatagactaggaagaggctccaagtcagctcaggtataggtcacttacaggcaagaagggaaaaaagct

SEQ ID NO: 820155 - DNA, 589 bp, Homo sapiens
gacatcaagtcaccaagtcagtttgagggagaggtaagaaggcctgtttaaacaatgagtcagtatcagagatctaaaacatcacaaaaagygcagactcttcttctggctgttgaattcatgtaggataagggtatatatatatgagagattaaaaaaaaagatagcgataccatcataaccaccaaaaggcctggctttatccttccatctatatgttttcctccttaatcttacacttactcatgtaatctcaatatatatttgtgtgcttgatagaaacttaacctaagctcccacccctccttcagggaaaaacaaagaactagctgataatccagtacttcagatgctttattatagtgaaggccagcaaaacattaaaccagagaagccagcagcatcccttctctgtcacagaccttaatggtcaagcagtagatggtgaccatctctaagaataatttcaagaagggaaagaccaagaaaatgccacttgctaaggggaatattcaccagagatagactaggaagaggctccaagtcagctcaggtataggtcacttacaggcaagaagggaaaaaagct

SEQ ID NO: 820156 - DNA, 574 bp, Homo sapiens
ggttagttcttacttccaaattcataatgttgtcaagatatcttgtcacatgatcactggcataattaaactgttaccgcatggtgttccaaggggaatgctttctggwgtcagttcccttgtgcatgtgatgaggccctagattttagctaggggctttttgtttcaccaaataaaacgatagctttctcgcccatgtccacggtgaataacaatcctattacaccttaccaaccattacggccacattgcagggtaaggagttgaaagaccttccagcatttgttatccacagggtgtgtcatttaaatccagtatcacataaagcttgaaaaataacttttatgcagaaaaatgtatatgaaggaaactctccaatttacctttggaccagaacatggtctataaaagtggcacattatgcaaatgaagtttactttctcctcctttctttttgcttgtgtaatataaagaatcacatgttatagaaactgatccttttctttgaagccaggggctgagaagtccctccagagcataacacagtgcttaagtactgtacttaggcacagca

SEQ ID NO: 820157 - DNA, 516 bp, Homo sapiens
aacttatatatgtatataagataacaagtaacaatattattagaaacccagattttcaatkaaagataaaagagatactagtatcaaatcaattaagttagctataaattctgtaatctgattgagtcacatatttgagtaaacaaatctgtaatctgaaattagaattggcaatgttggtatgaatttatatatgtatatatacacatatacatacatatatatacacacacatatacatatatatatcccagttgtgtccactgaaaggccaagaagaatgacagtctaatggctgtgagcacctggatgtccaaatttgtagtttaaatgccatttcccactaaaaggaaccagtgaggctttaggaaatgattgatttcagaactagggcaggaattacacaaggtgggcctgtggcattttgttatgcctgaaagcaaggtagctattaaatactgctgaggtgatgtgaaaacaaaaacaaaaacaaaaacaacccaaggccctatagct

SEQ ID NO: 820158 - DNA, 585 bp, Homo sapiens
acaaatgtttattttgagaattgatrtataaaggaaaaaaatcaagcatttattcttctgtctattcgagggtacccaaatcattcgtaagggtcataaatgcaacaaaatggtagaattagaaagtcactattcacacctcctaatgaaacattgagacaaggcaactatcatccattgtgattacaattatgaggtgaaggttgatggggaactttataactgaactactgatttatcgaacatcactaaaagcaaggcagccaggcacctcttaatggaataaggtaggaagtacacaccacctatgaaatatttttgcccaaaaatggaccctaaatctaatcaaatttttaggtctactaccaaatgacaagaaacatgaagggcaaagaaacaaaagacgccaacaaattccactgatatattcaaggaaagataaataaataaataaataaattttttaaagacaccaagatgatataatcagtcaagccaaggatgagaactgatatagattaaaagttctaaaatattctcaactaacaatgttgcatattctttctttctttcctttttctttct

SEQ ID NO: 820159 - DNA, 548 bp, Homo sapiens
acaaaaaaaaaaaaaaaacccattagcctggcatagtggcccccccctgtaatcccagctactcaggaagctgaggcccgagaatcacttgaacccaaaaggtggaggttgcagggagccaagaccatggcmctgcactccagcctggatgacagagtaaaactgtgttaaaaaaaaaaaaaaaaaaaaaaaaaaaacagaaagaaaatgtaactgaagccaaaagctataaaacctaattagcagctgagtgaggaacccttgagaagaattggaagactcaaagactgttgaacaggagctctgagaagacaaagtattcaactagatgatcatcttgttagagttgagaaaaagcttagtgaatatttacgtacaacttacctaccataaaatttacattaaacgagacttatctgtatcttgtcagcataaagttgtttctaagaatgtttaccaagaatggcaaagagctttcctgtaatattgatttgctttaatagtgccaatgattgctgatttataattctgatactatgaatgtttgt

SEQ ID NO: 820160 - DNA, 407 bp, Homo sapiens
aacatttcattccattattaaagttctagatgccagctgaactttaaggaaatgattcactgtggatagctgagacttctacatagctaaggacgtgcttctccaccatccatttccactccttccrttatccctttttctcacctctgtctgcctctgttgctgtgaaaccatttggaatcgtctatttacatgactgccttctacggtgagccacaatgcccacctttatccacatggctattctagctactggagctgggcgtggtggcttgcacctgtaaacccaacactttgggaggccaaggcacaaagatcgcttaagcccaggagttctgggccaacctgggaaacagagcgagaccctgactctcaaaaaaaaaacaaacaaaaaacaattagctggg

SEQ ID NO: 820161 - DNA, 615 bp, Homo sapiens
cctaagaatatagacgctcatggaatccatctagactcagccaccccatcagagtgtttgcacttcaggaacaatagatgaacagtataggtgaattacaagaagctgagactggcagtaaaaggattagattaagatgagcattagtactgcagcaggatgaagagacactctacttcttcctagttgatgtttgaaagcaagcctatatccaaagactaccagggtgtatgataaatcttgaagatagctgcaggactttggggcgagacactacactacacaaaaataagaattatgcaatcacttataaaaatgaaagaactgtgtccttatccattttataagacgtggcagagatttatatgagtcataacagtactgtgttctgaaagcaagagaggactacattttaacaaggaaggcacattcgctagggcaattttttttagagtggtcacaaaaaatgagacccaaataaaatgtcagtttgagcctttgaaagtcaatgatgtattacmagatttattaaattggtggcaacagagtatctacatatccagagattaagcagttagattgtgagagaagggacctctaacaagcagagactac

SEQ ID NO: 820162 - DNA, 587 bp, Homo sapiens
tgggttgtttgtttactctgctgtttattttgttgtgcagaagctttttagtttaattaggtctcatctatttatatttgtttttgttgcatttgcttttgggttcatggtcataaaactttttgcttaagccaatgtctacaagagttttttaatgttgtcttctagaatgtttatggtgtcagatcttacatttaagtctttgatccactttgagttgatttttgtatacggtgagaaatgaggatccagttttgtttttctacacgtggcttgacaattattccagtaccatttgtttaatagggtgtcctttccccactttatgtttttgtttgctttgtcaaagatcagttgactgtaagtatgtgtgtttatttctgggttctctattctgttccattggtctatgtagctatttttataccaggaccatgttgttttggtaactatagccttgtagtatagtttgaagttgggtgacwtgatgcctccagatttgttcttcttgccttggagatgtgggttattttgctccatatgaattttaggattgtttttcctagttctgtgaagaatgatgatgg

SEQ ID NO: 820163 - DNA, 550 bp, Homo sapiens
agattaaccaagaaaagaagagagaaaatccaaataagctcaattagaaatgaaacaggaaatattactttcatgcacgtccgtgtgaagagatcaccaaacaggctttgtgtgagcaacatggctgtttatttcacctgggtgcaggcgggctgagtctgaaaagagagtcagcaaagggagatggggtggggccgttttataggatttgggaaggtaatggaaaattacagtcaaagggggttgttcactggtgggcatgggcgggggtcacaaggtgctcagtgggggagcttctgagccaggacaaggaaattcgcagggttaatcactcagttaaggtggggcaggaacaaatcacaatggtggaatgtcatcagttaaggcagggcagggccttttcacttcttttgtgattcttcagttacttcaggccatctgggcatatatgtgcaagtcacaggggatgcgatggcttggcttgggctcagaggcstgacaattacaaccaacaccacagaaatacaaaagatcattcaaggttactatg

SEQ ID NO: 820164 - DNA, 572 bp, Homo sapiens
tttttttttctcatgaggtagtgagaaaatcaattgcagatcagtaatggtctatggcctggctcttgggacccagctggctcaaataaaatctggaactctagttatataagatttccctgagatgcccatatgctttctttcttcactagaagaagtaccaagtggtaaaatgttacacataggaaaattatgtgacattgatccaggtcaagcatgacatgtgaacattaactgatgatgaaggcctgtcaattggcagtgactgctagaatgtcatgctgaaattgatgcaaaggatgagtccagacacagaagcagccaatgtcgtgattgattagcagtgtctcttgcagagtagatgaggggtgtagcggtgtatttgccatttttagtctggctccatgtagatttacacataaaggttgagaaaatattagtggttttaagtgctccatcattctcttcattatagtacaataatagtccatttgcaactgtagtagaataatgcctgaaagtctgtcatctcaagagtctttgtgtmttaagaagtcatttaatctgtatcc

SEQ ID NO: 820165 - DNA, 595 bp, Homo sapiens
attctttctgctactgtccaaatgtttatgtccccccaaaatttgtatgttgaaacctasttaccaatgtgatggcattaggagatgggggcagggagtcttttgggatgtgattcagtcatgagggtggagccctaataaatggaactagtgcccttataaaagagcctcagagagctggtttgcctctcccatcatttgagggcacagcaagatggcactgtctgtgaaccagaaagtgagtcctcaccacacaccaactctacctgtgtctttatcttggatttctccacttctggaactgtgagaaataaatttctattgtttccaagctacccagtctatggtattttgttacagcagcccaaatggactaaggcactttccatttctgtattgtattgtgtgaatgtgtgcttctgtgttcctagagctaaaagctagtctgagtgcctgtctgcatgtccaggctttggtttgaatcttggtttattcctttcctggttgtttgatttggggcaagttatttaacctctgtggccccactataaaatttggctaatagtaataccctccttataagattgttgtaaaa

SEQ ID NO: 820166 - DNA, 522 bp, Homo sapiens
aaagagtttttccccagggattttgtcatccaacaaaaaagctgacaacaaattttctttggtcgaggtcaagatagctctgttctaccctcataggtataagaatagattgtgtagatataaagtatagataaatgtttccaaatatatgtcatccaacctttacaagcatagaatcataacaattttagcccccagaatttcttaataattaaaaatccaccattacaaccattttgattccaaggaaaacacctgcattttaactaaaggtcttagcaaatcaaactagaaaaagcctttaaaaaggagatcttaggtcccagagatactcccctttgaaagattattgggtaaatatgactcattttgttgaaagtaaggcagtttggagaatgacttagaaggtaagcaatctctctkattctttttatttaattatatgaactcaaagtgctgcaaaagccaagagattcacaagtcatttgcttcctttttggctttgaaggcaaaaaatgtagt

SEQ ID NO: 820167 - DNA, 497 bp, Homo sapiens
aaaggagatcttaggtcccagagatactcccctttgaaagattattgggtaaatatgactcattttgttgaaagtaaggcagtttggagaatgacttagaaggtaagcaatctctctgattctttttatttaattatatgaactcaaagtgctgcaaaagccaagagattcacaagtcatttgcttcctttttggctttgaaggcaaaaaatgtagtatattcttttccaccccaatatttcctctcactgcatttttattatacctacactcagtgctaagagctcaagtcttcactcaacgtcactgttgggagacccaatagctagataagaatacatttaaagtctgctatgataggaatatttgtgtgcccacaaaactcatgtattgaaattctaactcccaaagtgatgatattaggaggtcggcccctggaaggwgatttaggtcacatgagtggagttggtgcccttgtaaaagaggccctagagagc

SEQ ID NO: 820168 - DNA, 587 bp, Homo sapiens
acagcgtgctggcagtcctcacagccctcgctcgctctccgcgcctcctctgcctgggctcccactttggcggcacttgagcccttcagccccgccgctgcactgtgggagcccctttctgggctggccaaggccggagccggccccctcagcttgcggggaggtgtggaaggagaggcgcgggcgggaaccggggctgcgcgcagtgcttgcgggccagcgtgagttccgggtgggtgtgggctcggcggaccccgcacttggagcggtcggccggctccaccggcccagggcagtgaggggcttagcacctgggccagcagctgctgtgctcaatttctcgaggggccttagctgccttcccgcggggcagggctcggaacctgcagcccgccatgcctgagcctccccctgttccgtgggctcctgtggggcccgagcctccctgacgagcgccgccccctgctccacggagcctagtcccatcgaccacccaagggctgaggaatgcgggcgcacggcrcgggactggcaggcagctccacctgcagccccggtgcgggatccactgggtgaagccagctggg

SEQ ID NO: 820169 - DNA, 528 bp, Homo sapiens
aagctggaggccaggaggggctatatgggcctagcctccattaagccagaccctgggtgtggctatttctgcccagccagctactccagcagttgggagaggccaggacatagcccacatccttggtggatgggccacaatggcagggacaagggcagagtgaacgagttagggcagagcagctgcctgcctgccttctcccctcactgaagccccacagctcccagggggctcctccgcatcctgtcccaccctgcccacttcactccttgagccagggaatggttgccagtaccttgctgggcctcagctcttccatcgagcctggacaacccaagcagcaccctgagaaccatcccagaatatgcagagtgtcagagctggacatatggggaagctgaggcccagaaggggacagctagttgcctgaggacacacagagatagtggcacggctggaacttggggctagatctatagcrtaaaactccttccaagggagataagttggtgtctcccttttctagct

SEQ ID NO: 820170 - DNA, 624 bp, Homo sapiens
aggaagagtgctggagaaggcaatgcggtatgaagaaggcaggaggcaggactgggattgtgamcagccagaaacttccacggggcatgggtaggaacagacatcctggtcaaccagggcctttggcacagtgcatggctcctccccagtgacagacacagcagggctggggctcagagaggtctggttttaggagggccggcagggctattacagaaggccaggcttccaccctggatagagacaccaagtccacacccaggaacagtgttaactagttctggatggggatgttctctgactaatccgacagatgcctgagatgagatgggtggtggacagttaggcttgcagcacaggtggtctaagtcccattgtatagatgggggaaaagaaggcccagagaggttaagtaattggctccaggtgacacagcacgtgaatggtaaagttggattttaaatcctctcctgctgctgccaacacccacacaccttctgcctctcagaacagcagatgcccgatggacatggtggcttcatagactgagcccttggagagaaaactgggagcttagacagccgtcagttccacttccagcaccgccccgggctcccagccatg

SEQ ID NO: 820171 - DNA, 624 bp, Homo sapiens
aggaagagtgctggagaaggcaatgcggtatgaagaaggcaggaggcaggactgggattgtgaccagccagaaacttccacggggcatgggtaggaacagacatcctggtcaaccagggcctttggcacagtgcatggctcctccccagtgacagacacagcagggctggggctcagagaggtctggttttaggagggccggcagggctattacagaaggccaggcttccaccctggatagagacaccaagtccacacccaggaacagtgttaactagttctggatggggatgttctctgactaatccgacagatgcctgagatgagatgggtggtggacagttaggcttgcagcacaggtggtctaagtcccattgtatagatgggggaaaagaaggcccagagaggttaagtaattggctccaggtgacacagcacgtgaatggtaaagttggattttaaatcctctcctgctgctgccaacacccacacaccttctgcctctcagaacagcagatgcccgatggacatggtggcttcatagactgagcccttggagagaaaactgggagcttagacagccrtcagttccacttccagcaccgccccgggctcccagccatg

SEQ ID NO: 820172 - DNA, 574 bp, Homo sapiens
atctctatgatggggacaatggccctaattcattctccgcttcccaggaccctcatggagaaagctggtggccttcatgacaaaggaggcagccctgcagcgaggcaactccagaaggagctgacatcattcccgcctttctgtgtggcaggtgatcctcccagcccactgtctttgatcttgtacatccccatttcctacctgaggatggcacagcttgcaggggctaagcatcctaaagaaagccacatagtgggtatacggcagaaccaggacttgaacccagggtcagctcgcatctctcaaggcagaggctgtgaaagcttctggaaaggcgtaaaggtagggaaggtgagccctgaccagcaggctgaggacagagctccccactcaggctctgttgagacttggaagacaaggtaaagacatacaacagatgtcagctcagcagtggccaaaatgctgacttgggcttgggcctyggggctcagatctgcctgttcccagaacagcagagataacagggatcctgttacagcaccgggacacttctgggcaggtgagcacacctctg

SEQ ID NO: 820173 - DNA, 589 bp, Homo sapiens
agtctggctgaatcagaaaattggacgcaggagcccagcagtcacctgcccaggtgattctgatgcagccaagcttgggaattactgctttagaccaggggttgcctcctttttctgtaagcaaccaggaaatattttaggccttgcaggccatacagcatctgttgcaagtattcagccctctttttgtaacatgaaaacagccatgagcaatatataaataagtgagcatggctatgttccaatacatctttatgaacactaaaatttgaattttacataatattctcgtgtcacaaaatattttccttttgtttttttttcaaccatttaaaaatgtaaaaaccattcttagctagcaggctgcacacaacaggctgtgggctgaatttagcctatgggttatagtttgccaaccttctctagtcccaaatatggctctaaccttggaaaagaggagcaggaagttgagcccagcactgcctgactccsaagtcagtactccttcctgtaagttcgtctgccagatcccaaccttgggacactggcagaaaaactctctgggtctcactgcctttaacagtaaaat

SEQ ID NO: 820174 - DNA, 620 bp, Homo sapiens
atgggaatggcaactggaagccagttggtcagaagttcccgaggcctgaacttgcaactggtgtgtgtatgggctgggggggggggggggkcttgtgggaccgagccctcaacctgtggggtctgatggcatcttcaggtagatagtgtcagaattggattggaggacactcagccgctgtccccggcagaattgcttgcttgcctggtgtgtgggaaaaaactcacactcatttggtcacagaagtcttctgtgtggattgttgttaacacagtgagagcccagaaaaaaacactgtgaaaaaaaatccagtggaaccaattcctaatggatcagtccgcctttttacatctgagaacagtctgcagctctgcccaaaaatataatgtttgtgttcaggggaggggagttcctctcattaccatcctgctaccttctacagttaggaccctccaatgttgaagctcgtgattagtacctgggtttcttgttaagaagtagatatctgggctcaacccccagggaatctgatttagtaagtctgggtgagacccaggaatatgcattattagaagcttctaagaaatgttgatgcaggtagtccttagaccatttttttc

SEQ ID NO: 820175 - DNA, 586 bp, Homo sapiens
tttggattatattattctcaatataaagaatmaatagaaataaatagaataaatagaaataaagagaaagctagagttgtttgtaatcatagaatgttttgggaagacagtatttttaggaaaatgctcaaataaattcaacctcatacttaaatgttggttttactcttgaaccagttaatttatctattcattcaataaagacttattaagtacctaattctttctttttccagctttattatggtataattgacaaaaattgtatatgtttatgctatacaatattatgttttaatacctgtgtacattgtgaaatgattaccacaatcaagctagttaacatatgtatcacctcacatacatatctttttttgtgattagaatctttaagatctactctcttagtaattttcatatatgaaacacattattaactatagtcaccatgctgtacaatacatcaccaaggtgcccagtttttaaggaaatgctaatgattttttttttttaaatttgtgtagagattgggtcttgctatattggccaggctggtctcaaactcctggcctcaagtaattctcct

SEQ ID NO: 820176 - DNA, 590 bp, Homo sapiens
gaacttattcatttcttctagkttttccaatttgttggcatgtagtttttcataatagtctctaatgattctttgtatttctgtggtcttagctgttatgtttcctttttcatttctgattttatttatttgggtcctctccctttttttcttagtctagctaaagttttgtcaattttatcttttcgagaaaactttttgttttgttgatcttctgtaatttttttagtctcaatttcgtttatttctgctctgattttatttctgctctgatatttattgtttcttttctgctactaatgttgggtttggtttgttcttgtttttctggtctcttggggtacattttttagcttgtttatttgatgtctttttagttttttggtataaacctctctcttagtactgcttttgccatatcacatagattttggtatgttgtatttccattttcgtttgttttaagaaattttttaatttccttcttaatttcttcattgacccattggtcatacaggagcatgttgtttgtgttgccatgtgtttgtgtagtttctgaggttcttgttattgatttctagttttattcc

SEQ ID NO: 820177 - DNA, 556 bp, Homo sapiens
catgtaactaactcaacttcacattaataaacaagtcatagttttgccttagaatgtcaaagcttatccatgtctgggtttaaatatcagttgtaaagtcttcaacatygagaggatgatgaatgtagtagtctctttgagcatcaatggaaaccatatttgcattattcatagtgaatactaagatgtgaaatgacagtattcctttaattacagtaatgcctctgaaacatcatattctaaaagaaaagattttaaaattactgatgaaatgtaaactccagataatcttcctcctcttagattttatttgatgtcaactacttgacaccttgcatgatgagtcagagtggatccattaaaatacgatttaattgcagacaagtcttctaaataggccttaatattgtctctcctccatttggccatgctattaaggctctgactgtggaagcagatagtacaggagaaaatattaaatatcagtttcgagttgaacatataaaacatgtgaaaaaaaccccattaacttttggggatggtcttggatgttttc

SEQ ID NO: 820178 - DNA, 555 bp, Homo sapiens
tcttcaagaattaacacacatgacttagaaatgtgaacagtaataaaactaagaaagtctgcatttatagataatccatatcttttctgtattcaactatgtttcattaagtattaactatgtttcagatattctgatatgccctgagaataaaatgaagaataagttaaagacaataattctaacacatcagctaatgcttataataaaatggtgagggtttgcagggagataattgaccaaaaacaatgataaacatatattaagaacttgctaaatgccaggctgcgtgatccgtctatatttacagccaaatgcagtaaatattttttaattaaaaattattttacaatgaagatactctagcacagacagcctgagcgacttgccaaggtcactcagctggagaagtgacagaggaaggaaatgaggccagggctgtatgtcatagagrctctaattctacttttgcattatctagaattgttctttataaactaaatctagaaggcatgtgcattgtgaataaaagagggagatttgggcaagggagtg

SEQ ID NO: 820179 - DNA, 526 bp, Homo sapiens
cccacaaaaatttttaataaaaagtagaaattttcctacaaaggaaagaaaaggaaagacattttaaatagagggactggaatatgaccaaagcctgagttatatggcacggaaaactgtactatgagattgaataggcatgtcaaaaactgattgtgaaaacccatatgtagcatgataatgcattttggacagagtaaaaagaagtcaaaggaggatgatatgcaggaaattaacaagatcatatttatatttagaaagatcttctgattgttgggtcgccgtattgttaccacagtaagagatagtatctgagatctcagtcaaggcaatgaaaatgaaaaggaaagaataaaaaattttgagatagggcctgaagtttgattgagtatgatggttgtggaaaggtaagaataaaagaaaamtagtgcatttctactttgggcaaaggtgataacattaacccacattgtaaatgcagaaatgagaagaaggaacagagattttttttctttgtgtattcatt

SEQ ID NO: 820180 - DNA, 513 bp, Homo sapiens; identical to SEQ ID NO: 818399

SEQ ID NO: 820181 - DNA, 646 bp, Homo sapiens
agaaaatatattactaaggattatgctaaattattcgctgaatatactgtatctaccttttagtaatgtgtaaactataaaatgactcctggccaggaaaytattttttaatagtactgattgtataactactgacttaacttatgtgggtagctgaataaagggtcacttaaattaggatgaaataggtaataaatagatctatctttggcaaactcaaattaccagggattatgacatttttaaagtgagaagaaaattaaggctgtctgtatttgcagagtgaagattctagacaaatattttgctatacatagaataatatataattgaaatggctattttcatttttaggatacaaatattttcttaattaaatattgtctctctctctctccaagtggatatatctcatcaatgaaaagaggcaacacactattttccagatatttgaaaatacatatcagctgaaattatcatttatcacataatattgtaaacaatatgctgtttataccattctatttatagtatccagtgtttataataccataatatgtgtgatcatttaataaattctatacagtaatacatttgaatttaaatttaaaaaatatatttaagagcttagaaatgatacggactt

SEQ ID NO: 820182 - DNA, 627 bp, Homo sapiens
aggatacattattctatgttctttacaaaaagtcatttcctcaactctttgaatattttctgtgagatttgtttaatgcttttaaaagaaaattttacatatttgagaatgtattcagttttttttctgtgaagttatgcttagcggtcagaattttatacattcttttgaatttatgatttttaaatctttttagttgttcttttaatttaattttttttgagacggagtcttgctgtgttgcccaggctgcagtcagtggcacgatctcagctcactgcaacctcagcctcctgggttcaagtgattctcctgcctcagcctcctgagtagctgggactatagggatgtaccaccacacctggctaattttttgtatttttagtagagatattggccagactggtctcaaactcctgacctcgtgatctgcctgcctcagcatttttcaaactggtgtttcccatttaaattaaaagtctcaggagtgctcactacactactgcttatyaatttcatatcctgcactatacaaatataaggaattaatatatctatgacaacagaatactgcaagtattaaaaggataacaaaggtcttcctccctatgtctcattaggtttcta

SEQ ID NO: 820183 - DNA, 627 bp, Homo sapiens
aggatacattattctatgttctttacaaaaagtcatttcctcaactctttgaatattttctgtgagatttgtttaatgcttttaaaagaaaattttacatatttgagaatgtattcagttttttttctgtgaagttatgcttagcggtcagaattttatacattcttttgaatttatgatttttaaatctttttagttgttcttttaatttaattttttttgagacggagtcttgctgtgttgcccaggctgcagtcagtggcacgatctcagctcactgcaacctcagcctcctgggttcaagtgattctcctgcctcagcctcctgagtagctgggactatagggatgtaccaccacacctggctaattttttgtatttttagtagagatattggccagactggtctcaaactcctgacctcgtgatctgcctgcctcagcatttttcaaactggtgtttcccatttaaattaaaagtctcaggagtgctcactacactactgcttattaatttcatatcctgcactatacaaatrtaaggaattaatatatctatgacaacagaatactgcaagtattaaaaggataacaaaggtcttcctccctatgtctcattaggtttcta

SEQ ID NO: 820184 - DNA, 553 bp, Homo sapiens
tgaagaatgagctaatgttttaagagtctgatcattttacattttagtcacaaattgaggtagctttatgaatcagtgaaattttccaatttttaggggaatgctctcctataacatgtyatatctagtatatataggttggtcacaatatttcccatattttctcttaaatcctttctcttaaagcctctacactagttcagagatttatattaggatattttccattttgtagaagttaatgaactattttacactagctagaagctgtgtgttgcatgtagctgctacaattaaacgaaatttaattaattcatatgcaatccaaagaaagctcatattatgtaaatgaatagctagaacataccctttctgacagtaattatccatgactaatgccgaacttaagtttcagctgagattaaatcaatttaatctgatcaacgtgtcaaagatttcttctaagtacattcagtcagataacacactaaatgaattttaatcaagaacttatatcctggtagcttatagttttatcaaatagcatttactc

SEQ ID NO: 820185 - DNA, 575 bp, Homo sapiens
cagtgcctgggatattcatggtttgttattaggccaaggtttctcaacattgacacaactgatatttcagccagagaattctttgttctggagggctytcctatgcactgtagaatgtgtatccgacagtgacctctacctattagatgccagtaacactcacaattgtgacaatcaggaaggtcttcagacatagctgaattttctctagagggcaaaactcacctttgctttaaaaccgctgaaattagcataatctctacctagagctggggaaggtggaatgggtgtgggagtcagccataatgtcagctacagtggtattattctcattttgctgctaaaggatctgatatagattaagaaccttatttgtgatcgcacaactagtaatctggatctgcctgaatgtgaagccgatattctaacaactttaatatactttctctccttaatagttattatcacccactgagtatcttatgtttaaaagaatttgcatacatcactacattttttctcatagatgttccctgagatatgcattatttatttctttatttatttatttttga

SEQ ID NO: 820186 - DNA, 554 bp, Homo sapiens
agtattcaaatatttttgggcatacttttctcaggtaaacagcttcaaaataggtaaacaaaatatatactttttagtttcttagttagacttttattatttgctgctttgctaaaagttccagttctttatgattttataatgttttcagtaatctcataatgagaattatattaactacagacatacttatatgcctttgctgaatgccagaaataagcctagataaatctagccactgaggtaaaactctctttatgccattcatcagaagcataggaaatgtaagcaataaataatttgcagtttatttaacaataggtcttcacaatggattatctaggacttattagacaatgttatttcttcatctaatctgactcattttgatatggattttgtgtctgagaagagctaatgaatatatctgagtctccatttagagataaatgtgatggacaatgaatrtcagtatttcaatgttatgtcttagcatcagtgaattgaattggttggtgaatatgtttttcatatgctttatgtatatatatatg

SEQ ID NO: 820187 - DNA, 525 bp, Homo sapiens
tcttaggagtaattttaattatatgtgttctgtgatctgctaaaataatatggttaatttattaaggatatatgagttattttaaggatttcataatgtctagctctagattataataattctacactacttaaaaaatatatccactgtaactcacttgagtctccaactttataaaattcagtctttaacctgatattcaaggttgattaacatttcatctcaccttcattctccaaacacagtttaaatattctgttccttaaatctggcagtgaaaaaaactacgaatattaaaaaaatactgagcttgctatatatttttaattaatagaggttatgattatcatagtagttataagtgtgatccatggtatctaatctttagcttcatgtgtgatataatcttaccaatccataaataagtaatttattcagaagttacttataagaaatctayaagatctttatctcctacctgactcccacctaccaaacttgaattttctgctttaagtccctgga

SEQ ID NO: 820188 - DNA, 626 bp, Homo sapiens
tagccagcttgaattcctccccagaaaatgggtttttcatttctaccacagagctgggctgcaaaatttgcaaacatttacactttgcttcccttgtaaatataagttccagttgctggccatttctttgctcatgaatataagaataggttttttgaagcagccaggtcacatcttgaatttttttcttgcttaaaaatttcttccaccagatactctaaatcatcactctcaaattcgaagttccacagatttccagggcaggcgggggggcaaaatgcctccaagctctattctaatgtgtaacaaaagtgacctttgcttcagtttccagtaagtttctcatctccacctaagacctcctcagcctgaacttcattgaccatatcactatcagcattttggtcataacaatttaactagtctccaggaagttccaaatattccctcatcttcttgtcttattctgagccctccacacttccagtccctgcctgttacccagttccaaagtcgmttccacattttcaggtatctgtatagcaatgccccacacctggtaccaattttctgtattagtccattctcgcattgctatgggtaatgaataaagaaaagaggtttaa

SEQ ID NO: 820189 - DNA, 605 bp, Homo sapiens
agatctttactctccactgatttacttagaactgaagatattgaaattcaacacaggattattgtcattcactgatacatagggaattatctagctgtgatggctctgagaaatgtaacagaaacattagagcataccagtctgaagaaagactttcattacaaattaggttctacagaaaaataaggattaatttagatacgtaactattaataattatatttctgacactgatttaagagatgtacttatatctataatgtctgttttatttaagcatgaattaaatatttcaaatcaaactgtagtttagaatgcaaactgacaaattagagaataagtttaacatagaaagtgatacttgaacaagtgtttgtaaatgattgatttacattgttaactagccaaaatttatattttaataagctcatttaaattttctacatttttagtattttcttcaaaatctaaaaatatatttttaaaaattttcaaaaagctgagagataaatatttattttaaaacaaagccatgattgctaataattgttaatttgtrtaattacgtctttaaaggacgtattacatgtatgatcatttgattt

SEQ ID NO: 820190 - DNA, 599 bp, Homo sapiens
aatggtatatttctaatgataaaattttgttaatatatcataagaatgttctaatattattttaaaaattgtaactatttcartggcttcacaacattctgttatatatgtatcctattagatatttgactacacaataattgtttgatattaattttactattttatcttattataaaataatacatatttttttgcctatggtctgtgctttgacatttaagatttgtagaaatctacgtaaccatgtataattattttaaaatttaataaatattgaaaacattggattagtaacagaatactcaggaaaaactaatcaattgaaaataataaaacaaaatgttgatatagattttataccttgagatttttttcttactagtatgatctaaaatttttttaatgttaaaaataaacttgtgatgttttggtacaatatctatattaataattgaccagagttttcagtttctttatttgtgttgtttaatgtttgcgtctcataatcacaccaagagcttggagttcagtaaaaatagaaggtagtggaaaaagccattatattccacacattttaccatttgtaaaggcctttc

SEQ ID NO: 820191 - DNA, 516 bp, Homo sapiens
gaaactctgtctcaaaaaaaataaattaaattaaattaaaattaaaagtcaaaaatataaagctcttaatagagtataagggacaataaacttattaactgyaggttggaacaattattcaagtaagaaaatatataatttataaattaaacaattttaaaatttatctactttgaaatcaataagttctgctcatcagagaccacctaaagaatgatacaaggcaaattacaatatagaaaaaaaattaaaatataaatatactaaattcataaatatctcctatgagtcaatgaaaataaaaaaaggaattatatgaaaaagatttatatatagtgcctattgaaaagaaaataaggaaattgcgataatttaacaaaatgaaattctgtatataacattaagagaaaatgaactatagtaacataaatcaacagatattttcaaccacacaatgttgtaaagagagcatgttcaaggacttcatacactatatatagagctcaaaaaataaga

SEQ ID NO: 820192 - DNA, 583 bp, Homo sapiens
aaactctacctcctcctcagctgtggcatgctggtagtactgttggtacttggacacaagattgttcatgctgctcttggcctcagtgaactccatctcatccatgccctcactcatayagcagtgcaggaagaccttgcacctgaacatggctgtgaactgctccgagatgtggcctgaacagctcctggctggccgtgttgttgctgataaaggtgtcagacatttttagcccctggggtgggatgtcacagacagctgttttcacatggttggggagccaataagcaaagtagcagctgtttttgttttgaacatcgagcatttgctcatccacttcccatgtggacatgtggcctctgaaaatggcaggaactgttaggtagcagccataatgaggtgaggtgtcacaagcagctgtgatattcttggtgtcaaacatctgctgagtgagttcagccacggtcagggcctggtactgctgactgccctggctggtcagtggggcaaagccaggcatgaagaagtgcaggtaggggaatgggatgatgttcatggtcagcttccacaggtcagcattcag

SEQ ID NO: 820193 - DNA, 617 bp, Homo sapiens
acctttgcattaagatataatttacagcttaaagtattatcctttccccaaattcttgcaatttcacagagaaggaaggaagctgcagagattgcactcataayggtattctaggcttcagccattaggaggtcctgtaggatatcagggtttctgcgtataatgtcaagtaaggcctgtgccttcttttgctatgagcaaggcttgtactgaggcttcatgtgaatagcaacagggcagtctgaatttccaggataaaggtgggtggaaagcgagaggagagatgcaccgccttcccttcaagtgcttcatcctgctgaaagcaagtgaatatgaatggaatacagaattcctgcatccattatttttaactgtattgtggttattattgtgaaagacaggactttaaagaagctggcaggtgctaacttgaaagcacccacataaaacactgtccagacagttcaactctgttgggcaaatctgtgcaaggccatcaggcatccaaagctgaaaagaaattttacattagcctcttgttgaaaacctttctatttaagaatgcaatttttatattttctccataacaaagcaggatttatgaaccttgctctgtt

SEQ ID NO: 820194 - DNA, 631 bp, Homo sapiens
ctgtaaaaatgaaaaaaagatccccatgcgccttagttaaaaataatcccagaagacgttttgttttagagaasaatcatgttattttacagttaatatgaacttcattccctagaatttatactaaaccaatttgagtacatagattataagttgtctactcacaatgaacaaagtacagtatcagttcacaagaaatgaaaataaacagtaattacaaatatacaaaaccaacagttacaactttctttcattcatcatagattcacagtatgttttctcttggtctaggttaaaatgaaagggcagcattttatcatagtcaatcttttttattgcaaccatttttcataaggctagaaaaccaactggtgatgacatcttttaagaaattagttcatcaattcttaaacaatacttcctttatctcaaatttatatccacatcatatttataccatgatatgttttaaatatgtaaataaaaattaaaactgtatgtgaatacccctaaactcatttcctactgtttataaaaatatttttataaatctgacttatcatttaaaacatgcaatagattctatataaaatttagctaatggagaggtattgtttcaaatcatcacccc

SEQ ID NO: 820195 - DNA, 635 bp, Homo sapiens
cctaaactagtgttttcccctttgatttcaaaaattaaataatcttttactaaggatgatccatataaaaagctgtcatagcaaactgtaagccctctcctaccaccacccaaaatataacctatctacctattatgacactcatagtcacccactcaaagcttacaaattctactgttctcatggtcatgctcttctgggtaaataatgccaagttgggccgggcacagtggctcattcctataatcccagcactttgggaggctgaggtgggcggatcacctgaggtcgggagttcaagaccaacctgaccaacatggagaacccccatctctactaaaaatacaaaattagttgggcatggtggcgcatgcctgtaatcccagctacttgggaggctgaggcaaaagaatcgcttgaacctgggaggtggaggttgctgtgagccgagatcgcaccattgcacaccagcctaggcaataagagtgaaactctatctcaaaaaaaaaaaaaaaattaaaaaaataatgccacattgtgactggatggtttcatggtcayggtcagatctccaacctccagactgagagacagatctgaaacttgtgagctgcaactaaagctacacttagaga

SEQ ID NO: 820196 - DNA, 612 bp, Homo sapiens
tatgatgctggcctcataaaatgagttagagaagagtctctttttttccattgtttggaatagtttctgaaggaatggtaccagttcctcyttctacctctggtagagtttggctgtgaatccatctggttctgtgctattttttttttttagtttgtaggctattaattattgcctcaatttcagaacttgttattggtagtattcagggaatcgacttcttcctggcttagtcttgggagagagtatgtgtccaggaatttacccatttcttctagattttctagtttatttgcatagaggtgtttatagtattctcttaaggtagtttgtatttctgtgggatcagtggtaatgtcccctttatcatttttattgtgtctatttgatccttctctcttttcttcttttttagtctggctagcagtctattttgttaatcttctcaaaaaaccagctcctggattcattgatttttttaagggtttttcgtgtctctatctccttcagtcctgctctgatcttagttatttcttgtcttctgttagcgtttgaatttttttgctgttgcttctctggtttttttaattgtgaagttagggtgttgatttt

SEQ ID NO: 820197 - DNA, 656 bp, Homo sapiens
aattggttattgggaaaggaaaaatcttaatcttgctatgcataaagcatagatatgtaaacagtaagtaaatagatacataaaatgcctgcagtattaaaatttcatgagagacaattagagaaaaatgtctaaaagctattcttaggaagttgatagtgaaaaaacaattattgagaaacattggtctggcagaagagtggtgaatgtgttgaacttcagaagagaagagactgggcaaggagaggcaagggtatcaatgtggaggttaattcagctgatgcccagatcaggtatatcatgtaattaaatgaaaatgctgcttcttttcgtttagaattggcttgtatgtgatttttcagttattgtctttttgttggtggagttagtaatcactgaaaacaaggcataaagtttctcaataactattgtagggaaaaataacacataatatttatttaatcatgttttccaaagtcaataatatttttgaaatgtactgcttctgtataacagcattcctcatacttcacaatggytttatgttgtaacttctccctagcttcacagacattttctggataggtaaagttcctgggttattggaaaacaaaggagtcagcactgtgcattctgtgattctatgtacagaaaac

SEQ ID NO: 820198 - DNA, 587 bp, Homo sapiens
caataaccattgtttatttttttaaaactacctactatatcaggcagagctattttctggcaagcgacaataactggatccaaaaaaaaaattaaccatgaggaattggttgactcacctgacctaaaaagtagctagttttagtgatgactccaggaaaagtacaaaccttctaacacttgtttcctcatgtcactgcatatcaggttcttcttcagaccagcattctcacaatatagaagtcctgaatacaactgcttaaaactcagtgttctttcctttctgcttatactattcaaagctcaaatttaaaataataattacaagaagaagcatcaagaaagggctgctgattgggtccagtgataaacaagtgctctaggttgggccaatcatgctgatcaggagattaaaatggtctcattcgtgagtctagaaagctttagattgattggcaagttctgtagaatcccatgaattgaaaagaaagatgtgygtgtgggtatgagcccttctgcacacaaaaaaatcaataaatatccattatgactacctctgtaccaggaaatgtggaagacgtaatgtgg

SEQ ID NO: 820199 - DNA, 481 bp, Homo sapiens
aacagaatataaaaattattgataaggcttcagtgactggaggaacaccagcgtccttggttttgrgctgatttagataaaacgacatggatatacatggaatgatttgaaggagcggagagtttaaaacgcaagaaagaaggaagaagctcccctgtacagagacagagggcggggggctccaagttgagagaggaaacccccagtgcaatggcaaacagccagttatatgaggaggctgaaggaggtggtgtttgatttgcgtagggctcaggggtttggtttgctcaggcatgtcattcacgtagaggcgaagaaactggccctctcaccctggccttttaatatgcaattgcagggcaccatgatgttttacacacgtggggatatgtggaggtggccatgttgccaggcacattagggaagaagggaaaagatggcaggaattgccatgtttgggtggaaccagtttttaatggcc

SEQ ID NO: 820200 - DNA, 501 bp, Homo sapiens
ccaatatagaaaataattgaaatagataaaaacacaaccaaatagaaatggatattgctaaaaatcaccttcttaattaaattagcaacaaaagtgaaattattgttctatccatattggtgacattgcttcttaaattattcaaattaaaatatattctactggtgagttcaggaaaaattgacaataaaggaatagtatcatacacaaagaaatataactcactgttttagcctagcaactagtgtttacagaacaagttacagattattctgcaatacaaaacaatcctaaagtgtttttaaccttaaatcaaaattcaaattagaattagaaatgaaatgatgttctcatttcagcaatgaatacagaagtgaaatcacttgatttttytgaagactgtatttttcagtgttcatctggatttaacactttaaagaataccttttattccttaaataacattcagtttgtgaaagtaagcacacctttttcagctcc

SEQ ID NO: 820201 - DNA, 538 bp, Homo sapiens
acataggcattttcttcagatgttgatgaaaataattattttatcactatatccagataattccaamaagcaatatgcttgttgaggtgaaataatttttctaagatacaaacagaaaatatatacgattgaaatagacactaggtgatatttcacatatgcaatatgagctctgtttctttgacaagacagatgaatgaagaattcatgtttgaatgattggcattagtctaaagtattaaataatgaaagtgtccatattctctgcccagtatgatcttttaaaatatcatccacacaaatacaagtgaggtcatattttttacaatgaggcatcaaatttaaaggcagcaaaaaaataatgaatatacctcttaggctaattgtttaccttagtggttttaatgatatggaaagttgaagtttagagtgagaaaagcaccaaaaaagaaaataatcagtctcctgactttcatatctggtagtcttagactgaatgtcagaactgtcacaggtcaaataatggcccagtatgttt

SEQ ID NO: 820202 - DNA, 558 bp, Homo sapiens
atttataaataaagtattactggaacactgtcatgctcattcattgacatactgtcaatttatgccacaacaatagaattgattagttgcaacaaaccatatagcccaaaaacctaaaatatttaccayctgatcctttccaaaaaacaaaaaaaattcttgacacctgatgtataattatttcctattttgattcctgagattgcatacttgtttcttctcttaattttatcaagccatttctccagagttttgttattgtatggctcctacaacaactaacaaattttggccatatttcttgacttttctttccctgtattcttaatcactatgcatgtattttttatttccttttatttctgttgatatttctaacttcttccaataaattcaaaacattttaaatattaatttgttgtcctcataaaataagaatttaaggttctacactttcctctaaaatgacacattttataatgtagtatacattttttaattaaaaatattttataatttccattatgatttgctcttgggtgttgagttactaagaag

SEQ ID NO: 820203 - DNA, 558 bp, Homo sapiens
gtataactgagcattgctttgtgtctaccctcaggcaaatctggagattttctcaagcctctttatgaaaatggagagacctcacaagagatgctaatggacagctgaccctgctccctgctccatcacaggttgtagagtattaattctcaagttacccagacatttagttctgaatgtgcaaaaatggtttaggttcaaatgttttcaactactgacaagctcaagaattcagaggaggtagtactaagggaaatgtaattaatatataatatcaaaacttaagcatagcaccataacacctaatttttgatgatgtcaaatacttaaagttctccctttttattttctggtgaaaggtgcgtagtatacaaacctctactaacttcttgggcttctgaataaaggaaaggactacctaatgacagtaatagcttgactgctgaagaattatgtcarttaataaaaattgcttcataggaaaaagatgaattgtctcttcaaagtttttttaagcatgggtgaccaaagccatcccatacttagaagaaaatattg

SEQ ID NO: 820204 - DNA, 556 bp, Homo sapiens
gtatatatttacatatccatgcaaaaagggaatagattaaaagatgtttatgaatgtctaaaatcttaagtcagtttaamgtagtattataaatcaggtttgtgggtgatattttgtctgcttctagacttgtgagcaagttattaagttttaggttacttatatttaaaattcaaaaaggaaatgattgtgattgcattcaaagaaagagaggacattttgaagcttcttttttttactaatatcaaaacataatatcacatttgtaaaacgcgttgatggcttacaaccaagtaaaatacctcaataccccacttttgaagatcagtaatattggcctaagagtatcactctataggaattataaaaagttgtatttatgccctgagattataccctataatgtgcaaacattataggatagacaagtggatataaggtttctttctaggtttccttatatactccaaatggtaaaactagatggaagattaaaattctaaatgttgttaattttagaaccttcaatgtcagagttactttgtatgaatgagtt

SEQ ID NO: 820205 - DNA, 426 bp, Homo sapiens
ctacgttcccaggatgtgggacatggtttcaaaggagattattttggaacattgagttttamtgactgccctgctgggatttgaactcgtgtggggcctgtagcccctttcttttggccaatttctctcttttgtaatgggaatgtttacccaatgcctgtaccccagttttatcttagaagtaaataacttgttttgattttacaggcgcatcagtggaagggacttgccttgtctcagaagaaactgcacttttgagtgatgccgaaacaggttgagacttttgggggactattgagaagggatgattgtattttgcaatgtgagaagaacatgagatttgaagggtcagggatggaatgaaatagtttggatgttgtcccctttaagtctcatgtcgaattgtaattcccagtgttggagtcg

SEQ ID NO: 820206 - DNA, 507 bp, Homo sapiens
atccactctgaggtgatcattaaaacaaatctgctagaatacttaattctgtttatatgttgtctaaattgtcaggttttttcctcttcctatttagaatttttatatctcttttcatgagtgaaattggccagcaattttcttttcctgctgttctgtcgttttggtaacagtattacacttcatacagtgagttagggaatgtggcaaactgccgagtgatcatcccgctctactctctatggtttcctggacacaactgcatagccagagactgcatttttcagcctgcattgagctgaatgtgacccatctatatgattatcaccagtgaaatgtgagtttaaataaaattgcggaacttggactctttctcctgcaacctggcagacaaatgtgtccatgaccaaagttcaaccatgcagatgaggacaatatcctraggaatgatcaagcaatgaaatggaagagagggaatttgctgaataactttgtggaatagatcgg

SEQ ID NO: 820207 - DNA, 591 bp, Homo sapiens
agagccaaatgcaaacttctcccacttcccagtgttgcctggggccagccctgggcacaatgataatgtttctataaaacaattctcaggaagcctggtaggagagccgtacctttccacaattaagtgcatccttccaacttaaagacctctctgggatcagctgagattgtgaatgtgttttgagtatacacgaagtgtcatatcagggatggcagggaaagctggggggatgtttctgcatgtgcacgcccctgtgcacattctcagtgttacaaacttccttatgtccagtaagtcatctcacaaccccaaatgcttattgtattctggctgatgcagcagcagctgagcccctccccagacagacaaatgaagggatataaataagagtgggaaggaaacctttcagggagtgttgcttaaattattattggcaagaaacagaaatcattttaagacaacagaggtttattaataaggatkgtgtagaccagaactggatttgcttatgcttcaaaccaagatggccctgtggacccactgctttcctggtctctgtaatgtcctgtgtttacagcacctctgctt

SEQ ID NO: 820208 - DNA, 544 bp, Homo sapiens
aagaaagaaaaaaattggttaaattagatgtgataattcatataggaattttcccaaatatacagttttttgtaaaattaataagaaattttatcatgtttcctcatgtcagatataagatccagatacaggagtaattgcatttctaaatgcaggaaacattataaaataaaacttgaagtgtttttaatagtagacatatgaaatattttaaaagaataaatgtacaaagatatcaaataaatatttaaaaaataagtatatttatcaaaccacactttaaaagacataaatatttatagacagaaagattctctatagagaagatagcaattctgccatattaatctctagatttaatggaacttcagttaaaatacatgtaagtgcattagtggacattgaaaaaaacacataacctgatataaatgaggtamaatgatatactttgaaacaaaaacatttggaagataatgctgagccagatttctgggtgcatcagaaagctccaatgatttaaaagtgtggcattgatgatagaaca

SEQ ID NO: 820209 - DNA, 568 bp, Homo sapiens
ttggtataatggcaacaggttctatcttacaaagtctacctaataggcctcatcaatatatgcagaagagaaattaactatcttggacccactttccatgaatagtgccagggacatgctagatacttcttaaatacttgatatctgactgttgactgatatcttagtgaactactgtggaatgcatttaacaaaatctttaaaatatgtattattccactgggctatataaacacacatcaaaacattctactgacatcgaaaaccttaattttatacttcaggcaataaaatacaaagaattataaagctacatcctcaagaatacagggtaaatttaacacattagtggaccaactttggcagcaagataccaaaatttactacccaataagatagtattttaaccagtgttgctgcataatttattttgwgtttgtgagctgaaaatacttcaaaatgatgttctggctgtgcgcagtgactcatgcctgtaatcccggtactttgggaggccaaggcgggcgaatcgcttgtgcccagaaaatcaagaccagcctgggcaaca

SEQ ID NO: 820210 - DNA, 609 bp, Homo sapiens
atatagctaaagaaattgcgctgttcaagttcttgcttctcatgccaccatcagttgaactgtaatcataaataattttagtttttcataaggtattctgtgattaaagtgtattacctgcttttttcaattttaggattattggaaactctaatccatttcatgtgttatctttcagcactcataattaatctctgctatgagcacccaaaaattaaacctcatgctgtatgcttatattagattggaaatctcaggtaccttggttcatatgacacatgaaaataattttagatgaaaatattgtaatattccaattcaaatagatataataaaaaaggcacagtgtctgatcttatgctgtgtgagcacttggcactggccagctgctgtgaaattggataccttttaatgtctttctgtaataagcatattctacggaaacagtgaatgagaaaaccacacacctatcgtggaatttttattgcagcttacctgtggtcttttgtgaaactctatataatacaaaaaatcytgtatctgttctgcttctcccagtagtttcaaaaactgaagggcaataagctactttaatctctagtttggaag

SEQ ID NO: 820211 - DNA, 591 bp, Homo sapiens
acctttattctgccagcaataagaaaacattgaatattttaagaaagtgattgatttttaaaactatctgggtaggacaagaggaggttaattaaaagagcaaaatgctgcagctgccagataaataaatgctctctaagcctacagaagagaaagcaggttggtaggtcagccgttcccaaaatgttctgaattacctcgacagaagtgggaacagggccactagttatgtacttccccattgtccattcatttatctgaagttagactttagggcttcttgtgtatctgtgttcaccattcagcctggtagtagtactctacatagcaattgctaaataaaacctttgctgatgaattgtcagaattctaatatgcttattagggagaaggtgagaataaattgtaaatggaaattattacaatgtaaaatatgtagcaatgattatatacatatattatgctcctttgaggacataacacaaaactaggaaatcaaatagcacaactaaagcagataycaaatactgaaagagaagttgcaccaccagaagcagtaattctgtttttagtagaagtctcctggctgta

SEQ ID NO: 820212 - DNA, 549 bp, Homo sapiens
ccaacccaaaaaccagcttctcatgaaaaccttgcctccagtaagcaattcagttctctggtttccatgacatgttgtgcatccctccatgttaatatctgccacatgtggttgttwgtgcatgtgagtgcatgcatgcatatgcatatgtatgtttgtgtgcatgtgtatgtcttctgctatattaggacctccaaaggacaagaaccacgtggtatttgcccttgtctccctggcttccagcatggtgccaaccatgcaactactgtagttcttagaacacaattagtccatatttgaattcaaaagctgtaaggtcttcagtcatatcctgagatgctgagttgtagcaatataaggtttctactctctaccctaaggatgcaggcagtcttaggaaaagccatcacaaccactcacttaggagctgagagtttttccaggaagaagcattcagccctcagtatgaaacttttcactccagtatgaaccagggactttggtttttgattgcctcatccttggatttgctttgacaacttcttgaaa

SEQ ID NO: 820213 - DNA, 647 bp, Homo sapiens
ggtcagggatcagcttggcctctggactctggactatgccatataattttccttgaccaatgagatatttaggagatatgatacaagcacagtatggaaatgtaacttcttcaacactggggctttcttttctatcaggagaagaatgacaaacatgtggccctagcaaagcccaccagtcaagcctactttagaatagagccccccaaaaatcaacagacgtatacataagctcagctggtacaagctgatgcacccagtccaaccccgataaaaatggctgaagcttgcaggtatgtgatcaataaatgattattgttggatgacactagggttgtgtggttgttacacagcaaaagctaactgatacaagtgctgtttggtctatgttcctcatgtctcccagagtcatattcctaaaatggaactacaatgatcttaaaattattttgcctaggacccttcaatgacttcttgttatgggctgaactgtgctcctccaaaattcatatgttgaagtcctaaaccccagtagctcaaaatgtgactttacttggaaacggagtcattgtaaatgtaatcagctaagatgaggtcawaccagagtatggtagcccctaactcaatatgacccgtgtccttacaaa

SEQ ID NO: 820214 - DNA, 625 bp, Homo sapiens
gtcacgtgtcaataaaacactttaaccatattagaggtactgtgcttcaatatgactgatgtgttcagttaaaatgctgaagtttatgaatcttaccgtaaagcttgaagaakaacagtggagatacattacatgctatctgtgaaaaatggtaaaaataaaaagctaaaatgaaaatattgaatctttgagagagaaatgcaggcaccgaaatgtgctatcatctcatcactattctctataggcttgtggattagacaagtcgtatatgtctaaaactgcatagagggtgtttcagaactagagatgtaaaaaacttactttaaaataagaatagagctctccagtaaacctaatcattctcacagggcagatcggctttaaacgaatgtcacacttatctatatatagtccacagttccccaggggtgcccaagccccttaccccacaagaagcttgatatatatttcaacacacagaataacatatactttgccctaagacttccttttatgcttgctaacttcaggatcctcacaatggctgcaaactcctaatatttcaaagactgtctacattaatatctttcaaagcctcaaaccctggcaaggaacaaaaattgtt

SEQ ID NO: 820215 - DNA, 638 bp, Homo sapiens
gttgctttttgttggatgaataaataaatcaacaaatgtcaagtttrggcaaggatgtggagcagctggaacatttgtttacatactacaggtagaaatgttgttgtgacacaggaattccacccctagtaaataccatctagttaagtgcttcctatgcacatcaggagacaagtacaagaatagtcaaagttccactgttccactgtttgttatagcaaagcactggacacaaccaaaatgtccatcaacaatagaatagatatgtggaaacacatttccacttatttatatcatatagcaaggaaaatgagttaatcataactatagccaagccatgtgggtgaatttcaagaactaaattttgagcaatatatgcagcattatttcacttacgtaaatttgaaaaacaaaaaaccaaataatacatttttctgtgatactaagatatgcaataaaagtatagtgaaaagcaaggtaatcagggacacaaaatttaggacagtaattactgcagcggtggacacgatgggatggaatcccagaggagtaaagagcaattctgaaatataaaggtcatgttatttctctttgactgtatgaggagcatatagatatttgttgtatgtttttatatt

SEQ ID NO: 820216 - DNA, 571 bp, Homo sapiens
aggaacagtttcaggggcgcttagcattcctcttaagccctttgtgctgagtgtcacacgatatagcagagcagttatgacctcctggccttgaatttaaagaaggtcttaaaaatgtctcagggtaagctcccctaatcaactcttaactgcattggagacacccagatcagaatttgcattattaaaaacttctcaagacagaggagacagattcctgacgttgacacccatgtggcattttcatgttcctagtcgtcatgtgtgtagacgattagtctacagaaagtaaatcaggtgggattcatgccaggtgagaaattcagtgtggaccctgatagtcacttcattcagtttcattggctttagaggtaatgggtggaggtgggggtggagtgtggcagtagggtcatccatgaacaatgtgagctttactcaaaaacattactgaactggatccatctacatagcttcaagctcttgcttcaatgctcactaaagrcctttctcaccaccatgagatgagtcagaagtagctaaatctttcttaaactgtcacctccaggtgcat

SEQ ID NO: 820217 - DNA, 592 bp, Homo sapiens
tgtgatagggatttaattgaatttgtagattgctttgagaagtatggtcattttaatgacattgattcttccgatgcrtgagcatgggatggttttccatttgtttgtatcatctccatttcttttatcagtgttttttaattttccttgtagagatcttttacttccttggttaaatatattccgatatattttattttttaatctattataaataggattgacttcttgatttggttctcagcttggtcattattgatgtataaaaatgctactgatttttgtacattgattttgtatcccgagacattcctgaagtcatttatcaaatctaggagtcttttggaggagtcttaggattttctaggtataagatcatattgtcagtagagataatttgacttcctcttttccaagttggatatcttattttttctcttgcctgatagctctttacgacttcacataatgtgtttgatagacgtgatgaaagtggtcatccttgccttgttccaattcttcggtggaatgctttcaacttttccctgtacagtatgatgttagctgtgggtttatcatatatagcttttat

SEQ ID NO: 820218 - DNA, 592 bp, Homo sapiens
tgtgatagggatttaattgaatttgtagattgctttgagaagtatggtcattttaatgacattgattcttccgatgcatgagcatgggatggttttccatttgtttgtatcatctccatttcttttatcagtgttttttaattttccttgtagagatcttttacttccttggttaaatatattccgatatattttattttttaatctattataaataggattgacttcttgatttggttctcagcttggtcattattgatgtataaaaatgctactgatttttgtacattgattttgtatcccgagacattcctgaagtcatttatcaaatctaggagtcttttggaggagtcttaggattttctaggtataagatcatattgtcagtagagataatttgacttcctcttttccaagttggatatcttattttttctcttgcctgatagctctttacgacttcacataatgtgtttratagacgtgatgaaagtggtcatccttgccttgttccaattcttcggtggaatgctttcaacttttccctgtacagtatgatgttagctgtgggtttatcatatatagcttttat

SEQ ID NO: 820219 - DNA, 605 bp, Homo sapiens
tgctcaaggtcagagaactatttaattaatgatccacctcagaggcttcttcatttttctttgtaacatttatcacaattgaaattacaaagttatytgtgtaaattttgtattgtttggcttcatcctacactgtaatcatcctaaaagaaagaaccagtcaaccttcttcatcctactaccctcctaccacccagtctccatcatataacacatattcaataaataattcttgcatgactgaaagaaaagaaataatatatgcatagaatttaaggacattcctccaagttggttacattctgctagtttaataagccattatttcttctcgatgagctcaagattaaaaggattttgatgattcccatactagactggtaggtaccagttacagatgtactaactgttaaatattgaaatgctttcctatttgttggtaaacaattactgcatcaggcccacaaagttgtcttccgagatgtttcaaatccactgcccctgctgctaaagagttatgcttagcaaagcaaagcactctaagacactgctccaactccatggcctgattgcatcttttatgactggccaatgctcacgcactg

SEQ ID NO: 820220 - DNA, 542 bp, Homo sapiens
ccaagtttgaagagtagaaaatcaagagtttctttctgaatctgatacatttgaaatgtacaagctatgagaacaggtaaaatgttgtgaatatatatctgtagctcaggggagggattgagataggaaatataaattttgtggcatttacaagaacagtttcagtgaagtaggggaaaaagtcatgttggaatgacgagaagagagaatgggaaatatagcttttggaaaataatataagatgatatcttgatgacttcaaggtaaagaaaagttttaaagatgatttaaaaacagattttagtatcacaaataaaagggatttaaaggaaataatgctaaatttttcttaattagaaactttttgttattcaaaagacgctattgtaagattaaaaggcgaaataacagagtgagaaaagatatttgcaattgtargggtgggaaaattttacttttaccgtcttagggtttttttcagctagacctgagaattaagttgacataagacagatcaacaagagaaaatcatacaaagttaa

SEQ ID NO: 820221 - DNA, 558 bp, Homo sapiens
atcactttatccccagcagttcagataaggctcagcacacagatgctcagtaaatatttgtggaagggataaatgaatgatattttatgtgtattacagttctaaaattcaatagttttgtattaaatatcagttctaatatggcatttatatgattttatctttcaaaacattagcaatagattatatttaaatgataaaagaaaactataactgcagccaagtattctcaggattgtatttctcttatattagcctaaatgcaattaatctagctcatatactttgggcagcttatatatattctgttaatttctaaccttttccaggtataaaaatccacatcaatggactgttagttttggaacaaaaatcaaccctcccttaatgaaaagaaatgtcagaagatttattatccatgagaagtaccgctctgcagcaagagagtacgacattgctgttgtgcaggtctcttccagagtcaccttttcggatgacatacgccrgatttgtttgccagaagcctctgcatccttccaaccaaatttgactgtccac

SEQ ID NO: 820222 - DNA, 569 bp, Homo sapiens
gaaaaggtaggagaaacagtcctgaatcactggcaccatgcctcccccrtaccctggaagcagtgatgtggtgcaaagaatattttggcgtgctaggcagagagagatgacagtatttttgaggcactaaactcagtgctgccctattataacagaaaacaaacacagactaaactcagctgacacccacccatggagcgagtatgtaaaccagccacaaccagaggagaataatctaccccagtggtccagccttgtgttcctgcgagcctcaccaccacgggctaaagtgcactgcggttccaaataaacttgacaggcaggctaggcaacaaggattgaaacacttaggtgtgtcccagtgctgaactgggcccagagagagtggattggagaggacatgtaacctactgagaccagctgagagagtgcttgcatcacctctcccctaagcccaggctgcacaactcatggccccaaaagagaatcattccctccatttgaggagagaggacagaatagtggggaggactttgtcttgcatcttggatacaagctcagccacagca

SEQ ID NO: 820223 - DNA, 613 bp, Homo sapiens
gcatagtattactttatatggcttattcattgcttcatgggtcagttttatttctccagctaatggcagtgcgatgaaggggaaaatgcacaggctgattagcaagtgcrcaaacaaacataagtttcatagctgctctgagactcagtttccccatttgtgaattagatatattacctagtttgtagggctgttgagaggtttatatgaaaaccgcacagtgcctgccatagaatgattcacagtattgattatcaacttcatttatactgccctccccctctccctgagattctctcacaaggctgagctctagtcagtgaatagtaaccatgtcagaggaggaggctgaacatactgtctatagttattggtgaaataaaaaaggcagctttgggcacagtagctagaagaacaaatatgttttcagagatttttgtagtaattaattactggtgttttttttttttaatttgccaacaacttgatgttttcacctactatcttttgtttacattccacaatgcttctcgaggaagatcgtcatcacaatagggcaaaatgtggtcactcaaccacagaaaagtggacattttcttgggaatttcatcgt

SEQ ID NO: 820224 - DNA, 508 bp, Homo sapiens
agtgaggtggtgtgatctccactcactgcaatcttcacctcctgggttygagcaattcttgtggctcagcctccagagtagctggaattacaggagcccaccaccatgcctggctaatttttgtatttttagtagagacggggtttcgccattttggccaggctggtttccaactcctgacctcaggtgatccacctgccttggcctcccaaagtgctaggattacagatgtgagacaccacacccggccatgtttttagtcatctcttgtggggatgggaaatgataatactacttgaacttctcataggttaggctttcttatgggttaagtgctttagagcattgttttgctgtctcttctctaaccattatggagatttggggagctccttcagacccccaataaacttgtttgtggaggcctagggagtttcttcagaccttcaataaaacttgtttaatcctaaacaggtcctgttaagaagtttttcattgtcttgtcatg

SEQ ID NO: 820225 - DNA, 504 bp, Homo sapiens
gttacatagaaaatagaggcttggaccttggcaaaaaaaggtttatgggagtgggaggagaggaggcctggctagtagaggctagtagagtgttatgtagatgaaaccatacaggtagcagccatcagagagggtagatgggaaatgtttctttcagacttttaaaggtctttcagactttcagttaatcttagaccccacaggggaagacctggctgcactaatgcagattgtctacaaatgcaaatttcccctgcaaaagacagctttgcagggctacttctttctgctggctcactgacagccatcgcaaaatatggcaaagaaatatattttggggtaaaatatttttatttctttcaagggtacagataaascaagattagctataattactgcagttggggaacatacatggggattttaaatactattctgcttccttttgtgtgtctctaagattctccataagaaaaagtcttaaaaatgaagtcatatattgaa

SEQ ID NO: 820226 - DNA, 504 bp, Homo sapiens
gttacatagaaaatagaggcttggaccttggcaaaaaaaggtttatgggagtgggaggagaggaggcctggctagtagaggctagtagagtgttatgtagatgaaaccatacaggtagcagccatcagagagggtagatgggaaatgtttctttcagacttttaaaggtctttcagactttcagttaatcttagaccccacaggggaagacctggctgcactaatgcagattgtctacaaatgcaaatttcccctgcaaaagacagctttgcagggctacttctttctgctggctcactgacagccatcgcaaaatatggcaaagaaatatattttggggtaaaatatttttatttctttcaagggtacagataaaccaagattagctataattactgcagttggggaacakacatggggattttaaatactattctgcttccttttgtgtgtctctaagattctccataagaaaaagtcttaaaaatgaagtcatatattgaa

SEQ ID NO: 820227 - DNA, 504 bp, Homo sapiens
gttacatagaaaatagaggcttggaccttggcaaaaaaaggtttatgggagtgggaggagaggaggcctggctagtagaggctagtagagtgttatgtagatgaaaccatacaggtagcagccatcagagagggtagatgggaaatgtttctttcagacttttaaaggtctttcagactttcagttaatcttagaccccacaggggaagacctggctgcactaatgcagattgtctacaaatgcaaatttcccctgcaaaagacagctttgcagggctacttctttctgctggctcactgacagccatcgcaaaatatggcaaagaaatatattttggggtaaaatatttttatttctttcaagggtacagataaaccaagattagctataattactgcagttggggaacatacatggggattttaaatactrttctgcttccttttgtgtgtctctaagattctccataagaaaaagtcttaaaaatgaagtcatatattgaa

SEQ ID NO: 820228 - DNA, 654 bp, Homo sapiens
agtcttccataagatagccctcacctcagaggccagcagcaagttccaggccccccyggatcccccacaattctgactgatgagtgcttcagtttggataattcacaggaatgcctcacagaacccagaaaagcattatacttactcttacaatttttgtttgtttgtttgagacggagtctcgctctgtcaccaggctggagtgcaatgggacaatctcagctcactgcaattccgcctcccgggttcaagtgattttcctgcctcagcctcccaagtagctgggactacaggcacatgacactacaccgagctaatttttgtatttttagtagagataagttttcaccatgttggccaggatggtctccatctcttgactttgtgattcgccctccttggcctcccaaagtcctgggattacaggcgtgagccactgtgcctggcctcttacagttttattataagggtgtaaaccaaaaagtgtccaagacagatatcaatcagtatagaggtttattttgccaaggccgaaggtgcacccaggaaaaagaaacacaaatcacaataggatctgtggcctgtgccttttccaaagagggttttgaggacttcaatatttaaatgggaaagattgggtaggagggaaatgat

SEQ ID NO: 820229 - DNA, 496 bp, Homo sapiens
cttttcactagtatttaattattctgattttccattccaaccatatatttctgtaaagaagtaccagattttcttctttttttttttcaatccatagttacccctgagagagcagggaaagaaaaataaaagcacaaattaataaaaaatagcatgctatctccggtcaagtgaaactatctattgtctccagacctaagagcctagcaaggtcattgccaatgtgcaagataagaaaacccatctctccatgggtgagcacccataagtgatgtctcaggattacaacctcggcgagtgcctcctaccagactgactcttcgctccctcccctgcactgcccaccctgtattccagctctacttgggcaagaaactgctgtgtagggtactgatggggacagagcttsttcatgcttcactctcttccctaactgccccaccacagatttcctccactgctccttcaacagacacccccttctttccagggactc

SEQ ID NO: 820230 - DNA, 377 bp, Homo sapiens
gctaaataaaggaagatataggtagtatatgttaaagtaattcagtaaayattaataataatttatattaatagctgaacaacactgtcccagcaatcatcataggctatttaattttgtctctttctttcaaagttgtatctttttctttatgtcctatctagtcattttaaatctaggtattgataattcctaaggattgaaatagacacaagcaatccaggccaaatcatgatttctgtgaccatccctagagttttatatacattatgggccagagctcatatcctattggcgcaagcattgcattttgtaattcccaacttctctataagagatagcctaggttatgtttgctttcagaggcataacaacac

SEQ ID NO: 820231 - DNA, 377 bp, Homo sapiens
gctaaataaaggaagatataggtagtatatgttaaagtaattcagtaaatattaataataatttatattaatagctgaacaacactgtcccagcaatcatcataggctatttaattttgtctctttctttcaaagttgtatctttttctttatgtcctatctagtcattttaaatctaggtattgataattcctaaggattgaaatagacacaagcaatccaggccaaatcatgatttctgtgaccatccctagagttttatatacattatgggccagagctcataycctattggcgcaagcattgcattttgtaattcccaacttctctataagagatagcctaggttatgtttgctttcagaggcataacaacac

SEQ ID NO: 820232 - DNA, 459 bp, Homo sapiens
tcacaatcactcaatacccaccaacaaggaaagtgtgatggtgaggaagtcagagtgaaaaagacagtgatttcaactgattatagttaaaatgtcttacttttcacattttacaaagacatgtgaccctggaaagccaatgttagcacccatcctaaggctgtgaaggtggtgggggatactgaagcttatttagtttcattatctttctggagcatctctcttctctaatagccattcttaaaaacatgcaaataaaaaacatcttaataatgtaagaattttgaaaattgagtgaggaaagaattcaaattgtattaatgctcctacagtatttttggggtacacaaatgggacaaggtaaactccatccttctaaaatctacaatttcccacagaatgattcatgttycttttttttttaaagcttctctaatgaaacaatttattctaaatgca

SEQ ID NO: 820233 - DNA, 502 bp, Homo sapiens
ctgtataactgtttgaggaaggtaaaattttttccattgaaagatactaaatctgaggatcagaggagagtaagatgtcccagatcacaaaacattcaagagagagagccaggattcaaactatggtcagaatgatggggttgggagattctttatcaatatccaatctgcattccccaattcccaacacatttattttctgttttgctgttgttgtaatttacttttttcctagtgggggcagtcatttttgaaaaatatgtattagtagatgattcaatgtcacttatcttcagtttataaaggcagaattatatgtttggaagagtttcgtagagttttgtttgtttacagtcctcaatatctgctcatcatcctaattgtatttggtttccttttgaaaacagtagctccatctttcctgctgccatttctggtgattggtgctttcatttcagatctttctctctgtrctttggaagaagtgaagtgatcttaacat

SEQ ID NO: 820234 - DNA, 630 bp, Homo sapiens
ctgaggacacaaaggtgggtgagtgccctgagcggcccctcgttcccaggccctgcagccagactcagacacagaggactagcgggcraaaccccagcagaccaggcagaggcatagacacatccagggacacacacagaggtgtatgcacccaggcaccctagtggctctctccctgtgtccagggagtgactgactccaggtgaccagagcagggtgggctcctggggagggaggtaagtgcagggcctctggaccccaggcaacactgctcagccccgaaaaaaggacactgcgagggggtggggtaagacctgcgccaggtccccacacgagggagaaggttgtgcccatcatgcctgggctcactggcaggaggctgccagggcctcttcccagcagtggctctggcgtccatctgacctgctgctggatggctgcctggtggctgcagcgcggctaacgggaactgtctagggtgagtcatcgtgcccgggtggctcacctgggcccgctagctgtgcgtggtctccaaatgagcccaggaatgcgtgtgcccctgtgtgtatgtatacacgtgcatgggtctgtatcctggtgtgggtgttcatgcatgcaggcctgagtgta

SEQ ID NO: 820235 - DNA, 553 bp, Homo sapiens
gtcgtgttcacaatgagtaggctgaggaggaggaggaagaggagggcttggtcttgctgtgttaggaatggcagaggcagaagaaagtttgcgtgtaaggggacccatgcaagtcaaacctgtgttgtccaagtttcaaactgtgtatgatattttggttcagttgggattattccaggaatccaaggttaatttaattttagaaaatgtctaagtcactccattcacatattaaaggagaaaaaccatattgtcatctcaatggttgccccaaaagcacatggtgcttctaaagaagggagagacttgctcatcagaccgcgcacctcagaacaaagctgtgataatgaatatagaacaacacagcacggagagaaacggatcaacggaatgggaaagagaaccgggacaaagacccgcacatgtggcgacttgagttcrtcagagctggccagacacatctgttggaggaagacggaatagtcttaaatacccacgaggaaaagaagtgaaatggaactctgcctccagccttccaaagcaatcagttcca

SEQ ID NO: 820236 - DNA, 571 bp, Homo sapiens
gcagcttagtaggactgttgtgaggacatctgagtcaaccccactgtcaagagcttggggtcaggctcaccatgaagctagcacttagcaagacctagttcatcccattgcctgaactctccaccaggtgcccatgtacgacaggtgcccatggggcggctcaccaggggtgttttgcactccaaattctgggttgtggatggacggcacatatacatgggcagtgccaacatggactggcggtctctgacgcaggtgagtgccagggccctaacacaggaggcctgcctgaagcgtttccccgcctgcactcctggggacttggcctgacatctcagtgcatctggagaaagtcgtgtagtcctgtttacaattcactatggtagaaacaaccggagactggtctaataaatgatagaattctacacagccactgaattcatgctgtggaatcacattcaatgacatggaaagatgttcaagtcacattacccagggaagcatgsagattacaaaatacaagcctttttaggaaaagcaatgcatgaaaaacgtgtcagaatggtcatgg

SEQ ID NO: 820237 - DNA, 465 bp, Homo sapiens
gtggggatctcgaagtagctgggctcccgccggaacgagcagccctgaggctcagcaggggcgcggaagccgtggagctccccgtcctgctgcackggtcccttggggcgctctggtgtgggaagatgtcttcagaccgggcctcagggtaaccacctgccaccaccctcctcagccaggaccatccactccacccaagagggggagacaggccccatgtcccccggagtgggctcctcaagcccaggccatccccttcacacaccaccctctgggagccctcagggtctcaccagcctggccccaagaccaacctgggtagggctctccctggcgctgggcgtcaggcagcgtgctaccatcgtcctcaccccaccaggagggctgcccatacaggggtgtgcggtaagaggctgcctctgtggagggagcgagaggtcagaccctgtgttgctggggccccca

SEQ ID NO: 820238 - DNA, 574 bp, Homo sapiens
agcagtgtgggtgtgcatggctagctgtgtgtgtggggtaagaggtgagggatgtgggtgtgcacaggtagatgtgtgtacaggggtgggggtgtgagtgcacaggggtgagcagtatgggtgkgcatgataggtctgtgcacagcagtgagagctatgggcatgtatgggtaggtgtgcacaggggtgagtggtgtgggtgtgcatgagtagggtgtgtataacgaagatgcaggcatgcatgggtaggtgtgtacagaagtgaggggtgcaggcatgcacgggtaggtgtgtgcaatgggtgaggaatgtgggtgtgcaagggtaggtgtgcacaatgggtgaggggtgtgcatgtgcaggggtaggtgtgtgcaaagggtgaggggtatgggtgtacatggtatatgcatgcagagggttaaggggtgcagagaggcaggtgcggggcagagggcctggcagtggccctgtgtgctcaccccatccgcactgcctgggcctacctgttcctggtctccggtcccccttctccggcctggggttcgaggcctcgcagtatggtgtgtgttcc

SEQ ID NO: 820239 - DNA, 525 bp, Homo sapiens
aagggcagtgtccgttcccactgctgcccctcatccactgcacgtccttgccgtccttgaggcccagggagctgggaggggggcaggaggagtgttgtccttgtgtacaggtggggaaactgaggccccaccccaaaggcctgcgtgagaagcagagctgggacaggagctgctctcctcgttctctgcaattccccacccccgtctgggcctcagcttccacgtgaagagcgtggggagcacagtactcccagggtggttggaggatagaaatgacccatatgggttgaagagctggtgtggcagttgaacagccccacagagatgtccacatcctaacccctggaacctgtggctatgtgaccttacagggtcaaagacactttatagakgggcttaaattaaggctcttgagaggaggagtggagcctggatgaggcatgtaatcacaaaggtcctgagaaggaagcaggaaggtcagagtcagagaggagacgcaaagatggaagcagagccggagtgata

SEQ ID NO: 820240 - DNA, 599 bp, Homo sapiens
actgatatccaaggagccagatcggggtcggggaatggaaaattactaagaggaaagtcagggataasggggattctagctaacttgacctaggaggattctcaaaggcaggctaggctgatcagaccccacctggggggtgggggaggataagacacccagaaactgaaggtgatgagatatgtagggtggagggttctggctaaagtgacttcgtgagattcttactagactagaagtggattttacaaggaagtgcagagatggacctaagagaaggttcaagagcctggctaaagtttgatcaggcaaagaatctttgttagtgtcccccttttgttcaaggagagaagaaacattgttaattcctttggaaaatagaaatccaatttcttgttcagtcaccttttttgttcattgaagatctgctgacccatctgctggaacttgatggtgaggaggcctcctggatggcgctcacagtcagatatttaacaagtggagtttctatgaaaacacaagaaaaacaagactaatagctagaaactcagtttctgagtcgagaggacagccagccgagcttgaagcaccttcaggtg

SEQ ID NO: 820241 - DNA, 633 bp, Homo sapiens
gagtcgagaggacagccagccgagcttgaagcaccttcaggtggtagagccatcatggcggatatggccawcgacacagtccctggtttacagccaaatgcctgtggtgatggtattgagtgttctgatgaaccttctgagtggccacacatcaacaggcacgaaggttgtctactggatttgtcgtgggtatttctctgaagtttatataagttcctattattttcaacttgcagggcttcaggaaaacggaagttttagtttttagggatgccatgtcaggaagataggagaaaattggaaacgttaatttagagagttgtaaccagatatggaacgaagctagaactgagcaggaccagtcaggttcacaggcagataataaaaccccaaagataaagaacagggacagaacctcataactcacaggatgtgctatagttttctattggaatgtaatttttctttctaaagccaccattatttctatcaagtaagactattttgtttgcaaagtaagtctcatcccattaaccttagcctgatcattttcgtaagtacagaaagaatggtagttgaccaaaaggcctttgcttagtttgcactgctggaactttccattaagaacctcat

SEQ ID NO: 820242 - DNA, 594 bp, Homo sapiens
tttataaagaaaagaggtttaattggatcccagttctgcaggctttagaggaagcatggtgttgrcatctgttcagctactgaggaagcctcaggaaccttataattatagcagaaggcaaaagggaagcagacgtatcatatggccagagcaggagcaagagagagggacagaggtgccacacatttttaaacaaccaggtcccacgagaactcactcactattacaagggcagcaccaagactatcatgctaaaccatccatgagaaatccacccctgtgatcccgtcatttcccaccaggccccatctccaattctggggattacaattcaacatgagatttgggcaggaacaaatatacaaactatgtaacattctgacatatgacaatatccctttgtggtattaatttgcatttccttttttaaatttcatcttttattttagatctagcgggtaaatatgcaggtttgttacatgcatatattgtacccaggtagttggtctagtacccaatgggtgtttttttagcccacacccacttttttcttcccccatctaataatcttcagtgtctattgttcccatgttt

SEQ ID NO: 820243 - DNA, 594 bp, Homo sapiens
tttataaagaaaagaggtttaattggatcccagttctgcaggctttagaggaagcatggtgttgacatctgttcagctackgaggaagcctcaggaaccttataattatagcagaaggcaaaagggaagcagacgtatcatatggccagagcaggagcaagagagagggacagaggtgccacacatttttaaacaaccaggtcccacgagaactcactcactattacaagggcagcaccaagactatcatgctaaaccatccatgagaaatccacccctgtgatcccgtcatttcccaccaggccccatctccaattctggggattacaattcaacatgagatttgggcaggaacaaatatacaaactatgtaacattctgacatatgacaatatccctttgtggtattaatttgcatttccttttttaaatttcatcttttattttagatctagcgggtaaatatgcaggtttgttacatgcatatattgtacccaggtagttggtctagtacccaatgggtgtttttttagcccacacccacttttttcttcccccatctaataatcttcagtgtctattgttcccatgttt

SEQ ID NO: 820244 - DNA, 516 bp, Homo sapiens
ggtgcctgactcattgcctatttcctctgttttccacccaagtggtaaacaatgggctctattcaaatrtggaccgtctgtgagctgggaacctgcgtgcagacaaagctccttgtcccagggcagactgccagacccatgctctcctccactcacctcctaggctgtttaataagggccacttggcaaaaggcaacatattgtcatggtcctgtgaccttgtagttctctgtctcttttcccttcagcccgaaagaatatttctctaaattctcaagtcaacgcatttgagaacagcctttcaaaagatacttgtaggaataacagaaggtagttcaggacccagtcaaaaggactatctggctttatttacaataattttaatgcctctgtcctaactcctccaaagttattaatattttgtctgtagatggtggttgccaggaaagagaatcttgcaaagtcaagggcatgacaaagctgagaaatagagaaggctagcctaagactttggga

SEQ ID NO: 820245 - DNA, 664 bp, Homo sapiens
gcaggcatgtatctttataatattaatagaatgatttaggcccagcatgggggctcatgcttgtaatctcagcactttgggaggccaacacrggtgttttgcttgagcacaggagtttgagaccagcctgtgcaacatgacaaaatcccatctttacaaaaaaatacaaaaattacccagatgtggagacacatgcctatagtctcagctacttgggaggctgaggtgggaggattgcttcagcctgggagaccgaggttgcagcaagccaaaatcatgccactgcactcaagcctcggtgacagagccagaccctttctcaaaataataatagtaataataataataatagaacaatttctttttatttatttttttttttgcagttgcaagatttaatagagtgaaatagagtgaaaacagagctcccatacaaaggcaggggacccaaagggggttgccgttgccggctcgaatgcctgggtttatatcccgatccttgtccctcccgctgtgctcccaggcaatagatgattggctacttctttacctcctgtttttgcctaattagcattttagtgagctctctgattggttgggtgtgagctaagttgcaagccccatgtttaaaggtggatgtggtcaccttcccagctaggcttag

SEQ ID NO: 820246 - DNA, 588 bp, Homo sapiens; identical to SEQ ID NO: 816319

SEQ ID NO: 820247 - DNA, 626 bp, Homo sapiens
caagaactttttgaaaactacaaccttgcacaaagaacacttctgtgaggacatctgcctggcaactgcctgttgaaccttgtactggcaccaccctcgttattaatccttgcagccaaagacaactgttttaaaacaactggtgtaacctttcacattttgcctttaaaatgttccctttgcctcaatctctccagatatgcctatgatctgttatagcatgtgtatcctggattataatccctttctcatgcccaattatactcacgtttttggaaagccattctttctattgttattttagtttggaagttgcctgtgaaatgtgaggaagaaggcctaagttcatgtcatgtctctgttttgaaccattcaaaaatttgtatcacactcagaataaaatctaaactccttatcatggcctgtaagaccaaccataacatagcctttccctacctttttaattcatctcccaccactatgccctagccagtaagccagtgtcactgggtttctcattctccctcaaacatrgtatgtttgttccaaactctccccttgacatttgctgtcttctctctgtgaaatactctcacttcagatattcacaagactgactcaaatca

SEQ ID NO: 820248 - DNA, 626 bp, Homo sapiens
caagaactttttgaaaactacaaccttgcacaaagaacacttctgtgaggacatctgcctggcaactgcctgttgaaccttgtactggcaccaccctcgttattaatccttgcagccaaagacaactgttttaaaacaactggtgtaacctttcacattttgcctttaaaatgttccctttgcctcaatctctccagatatgcctatgatctgttatagcatgtgtatcctggattataatccctttctcatgcccaattatactcacgtttttggaaagccattctttctattgttattttagtttggaagttgcctgtgaaatgtgaggaagaaggcctaagttcatgtcatgtctctgttttgaaccattcaaaaatttgtatcacactcagaataaaatctaaactccttatcatggcctgtaagaccaaccataacatagcctttccctacctttttaattcatctcccaccactatgccctagccagtaagccagtgtcactgggtttctcattctccctcaaacatagtatgtttgytccaaactctccccttgacatttgctgtcttctctctgtgaaatactctcacttcagatattcacaagactgactcaaatca

SEQ ID NO: 820249 - DNA, 552 bp, Homo sapiens
gttaagaaggagctgacccagaggatgaaaatgggttgggaagaccacaggtgcaaagatggcttgggaactgtggttgggtgggggcaggtgaaggaggggaggcacagacagtagaccagcctctgggctgggtcctgaacctgaagggcctcctgtgtcgatctccagttggaacttttttatttttttttgagacggagtctcgctctgtcgcccaggctggagggcagtggcacaatcttggctcactgcaagctccgcctcctggcttcacaccattctcctgcctcagcctcccaagtagctgagactacaggcacccaccaccacacccagctaatattttgtatttttagtagagacggtgtttcaccgtgttagccaagatggtctcgatctcctgaccttgtgatctgcccgcctcagcctcccaacatgctgggattacaggygtgacagttggaactttaagaagagaacaatgaaatgtcatgaaagggttttaagcagggaagagaaattatcaatttcattgttttcaaaagtcgc

SEQ ID NO: 820250 - DNA, 552 bp, Homo sapiens
gttaagaaggagctgacccagaggatgaaaatgggttgggaagaccacaggtgcaaagatggcttgggaactgtggttgggtgggggcaggtgaaggaggggaggcacagacagtagaccagcctctgggctgggtcctgaacctgaagggcctcctgtgtcgatctccagttggaacttttttatttttttttgagacggagtctcgctctgtcgcccaggctggagggcagtggcacaatcttggctcactgcaagctccgcctcctggcttcacaccattctcctgcctcagcctcccaagtagctgagactacaggcacccaccaccacacccagctaatattttgtatttttagtagagacggtgtttcaccgtgttagccaagatggtctcgatctcctgaccttgtgatctgcccgcctcagcctcccaacatgctgggattacaggcgtgacagttggaactttaagaagagaacaatgaaawgtcatgaaagggttttaagcagggaagagaaattatcaatttcattgttttcaaaagtcgc

SEQ ID NO: 820251 - DNA, 620 bp, Homo sapiens
gttttagggaattttaagacataaaactctggaaatctagtagtctcgtactaatgattctttcattcttactcttattatcaagtacattaatagaaaaaaattggacaataattatctggtaaacaytgaatggattaaacaaaaagtcaaatattaaattagccaagaattatttaaatttagtatcttatacaaaacacaactatttcaaagaatgttacttcttaaaccaaacttaaggatctattttattatgtttcttttttttgaggcttctgaatacaaggaataataaaccataatttgaacatttctcttcactgtagatggtatgatccaaatatcattcttattatctacagtgttggctctcattttctaaaaagtcctaaatttaaaaacaaaaagcctttgttataaaagcatagggaagtgtgaatcttttgacatagattcttcacatattcattaattcaattaggcagatttggcaatgatgatgtgtgaaaagaacaatgaatatggaataagaataaaatatgctgcaaactaggctatgctatgtcctaggtttgcaagcttgagagaaattacttaaggccaattttcttatcttt

SEQ ID NO: 820252 - DNA, 597 bp, Homo sapiens
agatgcatctgcctgcttctcccagggaatacaactatagtttctcttgtgttcttttcactgaaagagaatactcaatggcagtgggaaggtaactaattagggagatacctgaagactggggaacaacatagtggaagagcatctcatgatctcccattcaacagaaggcatgccaggcctggcatttcccaacatctaatttagcaatagaagacagccaaggtcaggtaggctcattcctcccctggatcaaatagaagtcctgctgaatatcagcaaaggagatttatcaaaatcactatttactgtaagtcagaatggtgcctgaagaggaaaacctctgctttcccatccactcggaggctgcctcctcaacccacagacatgacatagcaagaaacaccagctacagggacccacaataatcaccgagctggaaaaacctctttgtccaatgaaatgtcagacatcgttctccaatgtggagacattgtgtggccagggacaccaataaagggggtcaaggtccatgaaactctccttgaggcctgagacccctcccactcttycacccttgcattgacagactgtgaa

SEQ ID NO: 820253 - DNA, 645 bp, Homo sapiens
atatcacgggagtttgttgtayagattatttcatcacataggtattaagcccactacccaatagttatcctttctgctcctctccctcctcccaccctccttcctcaagcagaccctagtgtctgtatttcccttgtgttcatgagttttcatcaattagctcccacttgtaagtgagaacatgtggtattaggttttctgttcctgtgttagtttagagaggggtcttactatgctgtggaggctgatctggagctcctggcctcaacttatcctctcaccttggccttgcaaagcactgggattgcaggcatgagccaatcatctctggctctataaattctgattctatcttcaaattattccttccccagtgtctttcttctcaataaatgtgtcattttttttcttggttgcataagtcaaatcctctggtgattatttctcttacgctacacactgaatcccttagaaactgtatcaccacccccttccaataagacagatgcaaccatttcttactacgtcttcatttttcttacccaagtcaggacaacagcctcctaactacgctaacagctttcttagttttctacaggctattctccagaaagattcctttaaaatgtgaattatattaaatca

SEQ ID NO: 820254 - DNA, 461 bp, Homo sapiens
tgcattccatgagggagattgcatccaatccttttattttaaattctactcttactccaagttattttccattttctacctttcttttgaggttcatatttatattttycagtactcaccagaaaattgtacctgtgtgttctgaataaccgtaattgaactatcttatttactctttgtcatgtgcctgtttctttatatttcctatactattgaatgctccattatctgcctaactctccaaagtagaaatctaagataatttatcagcttttatccccaccaacttctacatctaaacatttcacagcactgtccactttgtatcactgaaatagctgttttagtccagttaagctctatctcctcctctggtgtgaagaggaggaggatggtcccaggctttgatggaccaagatctattgcctcaaggacagggcagtagtaaattttttaagaga

SEQ ID NO: 820255 - DNA, 740 bp, Homo sapiens
tatctaattataattctatgtaggcgaggcaaacctatgatgagctcacaataaaaaagtgttcattttaagcaaacaaatgaactctaattgctgcaacgtgtccctggtttatgaatgtcattgacaacaggataggccaaaattatacaatttatatatttgtgtgccctcattaaaatcatgagaaacattaatgtgtataaatggtagagatttccaaatctaaaattatgctaaatatccaatgtggtctaaattgtgcagattggaactatgacatatacttttacgactctggaggtctaatttatgaacattgttacaaggtttttaatggagtgaaaatgaagtcaaattgaacttcttcctgatgacattaaagctccaatcacaacacatagactaataaatgttactttttaggtagtgactgtcccatcaaagcctctttaatttgagtgaaattgtaatagggaatgttttggacactaaagaaaatcacagtataccagcactatatagaacacgcattttgttcaacatttaaatttttagcttctagtttatgcaaggcgctgtattcattgctgggcaatatacacaatgtaatgaggcaaagtttgaaatttaagggattcgcaaactactaaggtgccatcagttgtgagaggcaccattatttcatgtaacacagagtagaagaaaaacaaaacaaaaygctgccaagtaattataag

SEQ ID NO: 820256 - DNA, 611 bp, Homo sapiens
gcacatctacatgtaagggacccaaactragacaatgatttggggcagaggtcgaggtcaaatttcaaagtaggaggaccaaatgaaagacacaggcaggttttagagttcaagtgaggtaggggtctacaaattctattcaagatgtcctcagtatttagccatttgtggaaggatttgtagctctaatagagtcaaagacaaagctaaaccggtgaaattaccagtcatattgtaccttatgtacagaaagtcagcagagtatcatgtgtggaagaaagaaattttcaaatgtataaaatgaaaatagccgggcgcggtggctcacgcctgtaatccagcactttgggaggcagaggcaggcggatcatctgaggtcgggagttcgagaccagcctgaccaacatggtgaaaccccgtctctgctaaaaatacagaattagctgggtgtggtggtgcatgcctgtaatcccaactattcgggaggctgaggcaggagaatggcttgaacccagaaggcagaggttgtggtgagccgagatcgtgccattgcactccattctgggcaacaagagcgaaacgatgtctcaaaaaagaaaaaagaaaaagtg

SEQ ID NO: 820257 - DNA, 540 bp, Homo sapiens
atactcataaaaaaacctgtctaaagttaagtcaagatgaagggaagtcaagrtcatcttggtcaatatacaatcaatcacatatctatccacaaaattcactttttacaggtctttgctcaaaggtcacatgactagggagttttcttgacctccctttataaaatagcaatctccctcacatttttccactacacatgcatacctgtccatcttatcaccctcaaactgtggcatttatttatttagttcattttttctactttataaatttttattttattttagattgagggagtatatgtgcagatttgttacatggatgttttgcataatgggggtttggagttctgttgtactcatcacccaaatagttaccattgtacccaacagacaatttttcaaccctcatgtctatcccaccttgcctgcttttggagtccccagcatgtattgtttccatcattacgttcatgtgcacctagttgttagctcccacttataagttagaatgagcgatatttgattttctgttttgga

SEQ ID NO: 820258 - DNA, 498 bp, Homo sapiens
ctatttaccaaagagaaattaaaacttatgtctatacaaaaacttgcacatgagtgttcatagtttcatttgtaattgcaaatatgtcattattatcatttctattttaccatagaggaaacttgaattcatatggattaagtaaagtgctcagaattcaaaacaacccaaatgtcccccaacagggtaatatattcatacaatacaaacgagccacaaagggatatactgctgatgcacagaatgacatggataaatctcaaaatgattatgttgtgtcaaagaacccagataaaaaaagagtacatgctgtgtgtgattccatttatataaaactctagaaaatgcaagctaatctacagtaacagaaggtagatcagcagtttctgggacagggctgaagacagtaggagagtttgggagaaaakgtatgaggaggaagtacaaaaggggataaggtaatatttgggtgtgattgacatgatcatcatcttgatt

SEQ ID NO: 820259 - DNA, 577 bp, Homo sapiens
tcaagcaattctctcatctcagcctcccgagtagctgggactacaggcctgcaccaccacacccagctaatttttgtattttttggtagagatagggtttcaccatgttggccaggctggagtttttgtatttttggtagagacagggtttcaccaggttggccagggtggtctcgaactcctgagctcaagcaatcctcctgccttggcctcccaaagtgctgggattacagccgtgagccactgtgcctggacagttgactactgtttttttaaactgtgatctgtggtgctaatgccatgacaaaattaaatgcaaacatgggcaatgacatcatagtgatagtactctattataaattattcattcagatgaaccatcatatgcatctgttaatttctgaggtcattaaaaaaattaaatcataaagttaaaaattatcaaaaagaactcttagatactccaaaacatatctgtggaatctggcttagaaacactatgcagatcaagagaacgaagttatcatggtatctctggatttaaaccaargtatttggtaaggtccctcctgagttt

SEQ ID NO: 820260 - DNA, 570 bp, Homo sapiens
ctatggtatcctatatgggatagcctattgctcctaacctacaaacctgtatggcatattactgtactgattactgtaggcggttgtaacacagtgctaagtatttgtgtatctaaacatatctaaacatagaaaaggtacagtaaaaatatatatatagatatatataagatataaaatggtacacctatttaggacatttaccatgaacaagttggcaggactggaagctggctctgggtgagtcagtaagtggttagtgaatgtgaaggccatgatattactgtgcactactgtagacttttataaacactatatacttaggctacataaagtaatttcactatgatgttaccatggctgtgtccccaggcaataggaatttttcagctccattgtaatcttacgggatcatcatcgtatatttggccattgttgaccaaaagttatgcagcacrtcattataattttgatgtgtcacaaaacattactcatttgatttcccccacccccgccaaccatttaaaaaagtttgccggctaggtgcggtggctcatgcctgtaatccta

SEQ ID NO: 820261 - DNA, 612 bp, Homo sapiens
ttaaaaggaaagtaaaagacaagaaaaaaacacagtctaaagagataaagcaagcattagaatctgattcagacaggrcacagattttgaaattatcaggcagggaatttaaaatgattataagtaatgtgtaaaaggctctaatggaaaaatgtagacaatatgcaaaaacagaggagtaatgtaagcaaagacaaagaaactctaggaaaacataaaagaaataccagaactcaaaaatactgttgcagaatgatgaatgtctttgatgggctcatcatgggccactggacatggtcatggaaaggctcactgagcctaaagatatgtcagtggaaacttatcaagctgaaatgcagagaaaaaaaagtgtgaacaaaacaggacaagaaatccaaggacaatttcaaaaggtgtaacagaggtgtaattggaatatcgaaaagagaaggaagagagaatggagaagacaaaatattcaaaataataatggctaagaatttaactaaactcatgacagacagcaaacaacagatccagaacgcacacagaactctaagcagactaaacataaacaaaaagcaaaacctgtatctatgcatatcatattca

SEQ ID NO: 820262 - DNA, 624 bp, Homo sapiens
aaaagaaaatcccattttctgaggagaaattcaagctggctgcagaaatttgcataagaaatgaggatcaaaattataattcccaagayaatagggaaaatgtcttcagagcatgtcataggccttcatggcagttcctcccattacaggcccagaggcctaggaataaaaagtggtttctagggccggacccttgtgctgtgtccccatgctgtgtgcagcctagggacctggtgccctgcatcccagctgctccagccatggctgaaaggggtcaatatagagatcgagccatggcttcagagggtgcaagtcccaagccttggcagcttccatgtggtgttgaacctgtgagtgaacagaagtcaagaactggggtttggaaacctctgcctaaatttcagaagacgtatggagatgtctggattcccaggcagaagttttctgtgggggcagggccctcatggagaacctctgttagggcagtgcagaagggaaatgttgggtcagagctcccacacatagtctctactggggtactgcctagtggagctgcgagaagagggccacagtcctccagaccccaaaatggtagatccactgacagcttgcagcgtgcacctg

SEQ ID NO: 820263 - DNA, 624 bp, Homo sapiens
atcactattaaaaagttggtgttttggggaagaatacttgatttttttttttattttgacaaaggaatacaaagataacttgacctggccwtccttagcttaacctgcagtacctaagaatgtgactgtatttgaaaatacagccttttaagagatgattaagttaaaatgaggccactaaggtgatgtctttataacaagagggaatttgaacagagcaagaatacacatgcatagatgaaagactatgtgagggtagagagagagaatgcccatctacaagccaaggagagagccctcagaagaaagcgaacctgttgatgccttgatcttggacttctagcctccagaactgtaagcaaataaatctctgttgtttaagacatccagtctgtagtattttgttatggcagccctagcaaactaatacacacatattgacatttgtcataatttttaaaaatttactttttgaggtgaaattgacataacataaaattcaccattttaaagtaaacaattcagtggcatttagttcattcacaatgttgtgcaatcactgccagtagttccaaaacatttccatcattccaaaataaaactcttacacattaaacagttttt

SEQ ID NO: 820264 - DNA, 500 bp, Homo sapiens
caggaaattgcctgggaggctggaaatagtgtctctttctgtaacagatagtagatttatttcctaaccagtatcattatatatagagaatgcctgctttccacccttgattatattcccaggttataaaaatatttatctttggaggagaggatgggcatgtttgatagaagacctcttattagattggaaagtttctaacctcagtgattgtcaacaataaagcagaccctcatgtgtacaaataaaactaagattgcctcagtattggccccaggagacctgggaaaggtatagaacagatgcagacataaagctcacactactttgcattgagtaacaaactgtctaaatccactggagctaattattttcttaccaactgaaactatgggagtgtggtgagtgtcttagggagtacttgactgcttgawgctaaccaagccaaaagaccaaacctgaaaatatacaagctgtaaatttatctacaaatgccagta

SEQ ID NO: 820265 - DNA, 561 bp, Homo sapiens
tatttgggtgtgtcacaagacatcgatttctctctcttgttggaggaggactcaattccaaagtttcaccttagcgtttggcttataataaagagtccatgcaaccaccgccgccccctccccmctccccacaagacacatttttgtcgcaaactcacttccaagcttcaggtcaaagcccttggaaggaaaagtggatctgagggatccagaggcagataataacggaagttaaaaggcactacgaaggtgagcgtggctgattcctgctgatcaagccaatcccaagcttcctgtttcatgaataaaggccacgttagtatccatggcataaatgaggtctagttaatccaaggctactgacagcaggggaaacagggcatacgtgggtaagagcaaatgattcccaccccctaggccctcctgcttcatgggtgaatgaatatgatatatttaataatatcactaggaattatgggtggcttacattgtatccaatattgtactatatactttgaaaatattatctaatttcattttcacaataacctcataaagtat

SEQ ID NO: 820266 - DNA, 555 bp, Homo sapiens
gctcatatttggaatccatggagacataaaatttaattttctgtgggttcatttcttttcttctcactctctgttttttcccccatgtyttggttgctatgtatgacagattctatttttcaaaaatagtcacagtatctaccatcccatatgcactcccagaaaacttgccatttaccaacaaaaggtggagtgcatatgtgtgtatatgtatgtgtgtaatcaaacatgtttcacttgctaaaataataatgttgaatcaataatatatattatatataaaactatatattgattatatattatagataagtatggtgtttccatcaacagatgcttttttcttcttttaaaaattgtgtgtgtgtatgtatgtgtgtatatgtacctgcgtaatcaaacatgtttcacttggtaaaataataatgttgaatcaatattaagtgtgttctcctaaaacagttcatactgttctgcatttgtagtgccaaatcactacagattaaaaagtcctgcatcgtggcaccaactgagattatctatctatacatatat

SEQ ID NO: 820267 - DNA, 643 bp, Homo sapiens
cattgaggcctctggtgaaaaaggatatatcttcagataaatctagaaagaaactttctgagaaactgctttgtgatgtatgcattcatctcactgaagtaaacctttctatggattcagcagtttggaaacactgttttggtaaatttgcaaaggtatatttgggagcacattgagtcctatggtgcaaaaagaaataacttcagataaaaactagaataaatctttctgagaaactgctttgtgataggtgcattcatctcacagagttaaacctttctttcaattcagcagtttggaaacactgtttttgtgcattctgcgagtggacatttggcagctcattgaggccaatggtgaaaaagtgaatatcccaagaaaatactagatagaagttatctgagaaactgctttgtgatgtgtccattcatctcaaagagataaaggtttcttttcattcagcagtttggcaacaatgttttgctagaatctttgaagggatatttgggagcacattgagacsttttttgaaaaaggaatacgagaaggaagctttctgagaaactgctttttgttgtgtgaattcaactcacagaaataaaactttattttcattcagtaatttggaaatacttgttttcta

SEQ ID NO: 820268 - DNA, 632 bp, Homo sapiens
ctcacgtgcctcaggctgcttcaaaagctgatcatcttgtctttggacatatggacattattccttttgtgtattttgaagtccgttgctgttttttttccttttttttttttaataatgtggacccttgcagtaacagtgacagtcacttttcaatatctttgtgaatttaactctggcaacaatttgatgaagttgacacgtggttctcattttataggtgaggaaactgacacttggagaggtagagtagctttatttacttcacacaagcttttgatgaaatcaagtctcaacctagaagtcttcctctaaggtatgactgtggcatattctttgtgtttctctgccagtgtcccaaaggggtccacatcccatctggactccgttttcttcttaatgacaggaaacttgcagaaagaggccttcggttggggagagcacttgctggcacttggccttccctgtcctccaccttccccttggcagggcttaggtgatttgagggagctggatcagcagtagstcctgaccagcactcacctggaatgcttgttgttatgtgaagataacacccactcactttttgcagtgtgatttttttgttctaattattccctgggatttctctt

SEQ ID NO: 820269 - DNA, 642 bp, Homo sapiens
tgagaaaatgctttgtgatgtgtgcattcatttcacagatttaaacatttctttgggttcagcagtttggaaacactgttgtagtagaatctgtgaagggatatttcaaagctcattgaggccaaagacaaaaaagcgaatatccagggaaaaaaactagacagaagttatctgagaaagtgcttcatgatatttacattcacctcggacagataaaccttacttttcattccacggtttttttaaacactgcttttgtacaatctgtgaagttatatttgggagcacattgtggtctgtggtgaaaaactaaacatctttacatgaaaactggaaagaaggtttctgaaaaactgctttgtgatgtgggcattcacttcacaaagtttaacatttatgtggattcatcagtttgcaaactctgtttttgtccattctgcaaatggacatttggagctcattgagcccaattccaaaaaagcgactatgccaggataaaaactagaaggaaggtatttgagaaaccactttgtgatttgtgcattcatctcagagtattaaacctttcctttcattcrgcagtttggaaacactgttttgtcagaatccacaaagaaatatttgggaatgcattgaggccta

SEQ ID NO: 820270 - DNA, 639 bp, Homo sapiens
ctatctttatgtaaaggataaaatttgttatcctaagatatagtaagtgggtttagccaatgtgaatcttgtgtcttargctcacccaaaagtcctataaatgaatccaacctaaccttagaatgcccataactacatgcacactgaatttctgtctgaccacctggacttcagcccaaactgtcatgctctccttagcttccaggttccacatctcagctcctgacattgctttaagttcttctgagtttggtgcccttgtctcagcccttcattcccaccatgctctcaagacttcagtattcagtctctcacaccagatctccaggtgagagtcacccacatagcaacttgacccaggttggtgaaaccaatcaaacatttgcttactcccatcaagattcctacagggaaagggttacattcagtaattctatttgccatctttgttgcaagcattctcttctttttctagaaaatgtctcctagaaactaaatcaaatgcaggagatggcttggcagttaccaagagaagtcattgaaataactcctgcaaagtcataaactgttgaggaagcagaaactaaggactggccatttgctttttttaaacaccaagctgaacaaattttctagctg

SEQ ID NO: 820271 - DNA, 560 bp, Homo sapiens
caagaccagcccggttaacatagcaagatgccatctctatctaaaacagataaacacaaaatttaaccccttttcagctacctactgtgtacataataaaatccaaacaccttaagaaagtatacagaatgagagaccccaatttgctgttcagatcacctctctctccactttctctcacctttttctgtgtgcctcagaagaaaatgctttagtgtttgcaatgttcatgatgttctatttgattgaggtctctacgcctgcattgtttatccagtgattaacatggaacctgacacatactagatagcaatcagcagattccagattcaagatggttggttaaaacatttaaccagtactgtcccttccaaatcacaggaaaaaaaaatgaaggtaaaaatatgttcacagcaacacttaggaatctgtgacccaatatatactcaagagaacgctcttgtaaatwttgctgattttcagtttttaagaaaaatctgtttgtttttttttttgcatgaacacaataatgaacagattagcaacctcaaagatcaagc

SEQ ID NO: 820272 - DNA, 618 bp, Homo sapiens
agaaacagaaaaaataaagtatagatttaaaagtttcaatttctatttaacagagattcaataaagacagaattaataaggaataagtttggaataatgaaagaataataataaaaaattccctgagctggaaaaaacagatgcaaacctttaatctgacaggaacatcaactcccaagcagaaatgttcataacctggtgaaaatgtagaacttcaaaaataaagaaaaaatcacaaaaccttcacaaaattatgaaaagagttattttcagcttcaaaagcatgaaattagaatgagaatacaaaagtatcaactgcaatctggatcctagaagacaatgaaaaaatgtcttcttgggttctgagattacattattttgaaccaagaattctatgtccagcaaaattatcaatcatgtgtaagagtaaaggaaaacactcatgggcataaaaagactctgacagcttaaaatccacaaactttttatgcmagaattactcaattcagtactcaaatgaagcaatatatatacatatatatatatatatatatacatatacgtacacatgcaataaagaaaaaagcataagattaaaaaagtagaaaaaagaaagcc

SEQ ID NO: 820273 - DNA, 266 bp, Homo sapiens
ctgtgtgtttcgatgtggctgtgtgactaatttttctgaatagaatggcaatggaagttatgtgtgtcaatgatgtagttaaggatggatgtgcctccttcactttctcttttamcttctgtaggaccttgtattgaagacagcgtaacccccaagaggaaaggagcttggagccctgaatcagagtagaagacaggctgaatgaataccagccttggactgttgtgtgaatgaaaaacaagttttgagatttgtgtggtttattt

SEQ ID NO: 820274 - DNA, 678 bp, Homo sapiens
atgatggtgtgtttgttactgaaatattgtcataatgtttaagtattttaggcttatactctactcttaagtattcaaacagtaacaaaagaataatgtgtgcgcagtgtaggcgaaaccttgtattttctgaaatttgtgttgataatttctagcctttaaattcatatggaaatgtttcccatttttattcttttacacattaaaaaataaggcaggagagtgtgctattcataataacctgagaagaaaaacacaaaaccatagctatgtgaaagtgtggaaagagatacaaagcttacctaatttaaccatgactttattaagtattcaaaagtaataattttccatgttacaaacataattcaaaccaagagtttcaggtgacaatccattaagttaagtatacttgttattattatattaattactattattatacaaataaaaagagcaatttccctgtgaagtcagaggtgtgttagaatttctataataaaagggttggattttagtggggtgtatgtatgcacacatgtacatgcatgtatgtctctgtttgtaggttgagtcttctttggactaaacctttgagaataaactcttcaggaactccatcagactaagatttggattttccaaggatcckatctctcactagggaattctcagggctgg

SEQ ID NO: 820275 - DNA, 604 bp, Homo sapiens
accttaaatcccacatagtgggtggtcaataattatttattgaatgtttctagtcaaggagcaaagtgcaaagagagcgctaagaagaataaatggaagcaatatcaatacaggagaaaggtytaatgaaattaagaggtttccattggatttgacacagtccctgtcctcaaacagctttggctgatggcactaagcatagctcctggaaatatacaaagcatttcaaagcagcatactgcaatatgatgaaaatgttacacaagtgtggaggtagcaaatgagtgacattataaatactttttaatttactcccagcgtaatagcccagagatttactctgctctggtcttaagccacccactcattgctgtgggagtgaggaaaatggcactattactgaaccgtgtttgaagccatgccattggtgcctgttggcttgcaaatatttcagtcatgtctttgtttttaagaggctgaagtgcaactgtttcagattttattactctaaagtttgtgttggctattgatcatatttgtcagttgtaaaattttgatcagcttcatttttgaaagagatcactcacagaaatttgtgatcatc

SEQ ID NO: 820276 - DNA, 355 bp, Homo sapiens
aagctaatttttgggaagggatccattttggttctttaggtgttgaaatcttacttcctcactgagatctggatgggtgtagtattgacaaagagaggtaaccattttagcggtaatcaattgttacaaaattgtattagctgggcagggttcagtagtaaagacaaatttcagtgctaaaaatattcttcagagcccaaagaaggcaggaaataatagacagtgctctaatgaacacaataaagggggaaggaaaatccacaacaccagactgctctaccttactttgttcacacattctgaattttctgccaaagtatcaaaatatttgtyagaaatgaaaggtccactacac

SEQ ID NO: 820277 - DNA, 629 bp, Homo sapiens
aaaagtcatttagacaaagcaagcaatcccaaaacaacataagctgtgtggtctgggaggcctttctctgaatactcaccaacacagccagttttttgtttgttttgtgtgtgtgtgcgtatgtgtttttgtattgctttttggtttttttcctggcaagaacaagaggcaaacctaaattagagggcccaacattcaaacccaatgaaccggaagcccaggagctcatggcagtgctgactcactggctctggatacacttgcagacccaacaggtacaagcacaagttgctgctcccgagccaactgtgccaaaaatcgggccgcagtttacatatacggagtttaaatctcaggaggaccataacaatcatctacagagagacttcacataaagacagcatctaatctgggctattttattttacagctgagaaatctgagagcaagagaggtaaagtaacttttgcctaaaataaccaggattgacagcasagcaaggattggggttgaagtttcccaatcctgatattccactatgccacacatacaaacaagcatttgggagctgatttctgttaaaatggtatctgaggttacctactgattaaatctttttctcaattaaa

SEQ ID NO: 820278 - DNA, 542 bp, Homo sapiens
ggtacacattggttcagtccagaagggtgggacatctttatsgggggtggcagggagggcttacaggtcataggtgaatttaaagattttctgattgacaattggttgaaagagttgaggttttcctaaagagttgaagtagacagaaagaaatgcttaagataaggggggttgggcagagtgcagtagctcacgcctgtaatcccagcactttgtggggctggggcagggtcgcaggtggggatcacttaaggtcaggagttcgagactagcctggccaacatggtgaaacctcgtctctactaaaaatacaaaaatcagctgggtttggtggtgtgtgcccctaatcctagctacttgggagactgaggcacgagaatcacttgaacccacgaggctgaggttgcagtgagccaaaattgcaccactgcactccaacctgggtgacagagcgagacttcatctcgaaataaaaataaaaataagggtattggaagccaataacaagttcttgttatgtttttatcatatagatgaagtcc

SEQ ID NO: 820279 - DNA, 542 bp, Homo sapiens
ggtacacattggttcagtccagaagggtgggacatctttatcgggggtggcagggagggcttacaggtcataggtgaatttaaagattttctgattgacaattggttgaaagagttgaggttttcctaaagagttgaagtagacagaaagaaatgcttaagataaggggggttgggcagagtgcagtagctcacgcctgtaatcccagcactttgtggggctggggcagggtcgcaggtggggatcacttaaggtcaggagttcgagactagcctggccaacatggtgaaacctcgtctctactaaaaatacaaaaatcagctgggtttggtggtgtgtgcccctaatcctagctacttgggagactgaggcacgagaatcacttgaacccacgaggctgaggttgcagtgagccaaaattgcaccactgcactccaacctgggtgacagagcgagacttcatctcraaataaaaataaaaataagggtattggaagccaataacaagttcttgttatgtttttatcatatagatgaagtcc

SEQ ID NO: 820280 - DNA, 665 bp, Homo sapiens
aactatacaataaattgttgttgactatagtcaccgtattatattactgaacactagatcttattctttctatttaactgtacttttttttttttttttttttctgagacagagtctcgctctgtcacccaggctggagtgcggtggcgcgatctcggctcactgcaagctccgcctcccgggttcacgccattctcctgcttcagcctcccgagtagctgggactacaggcgcctgccaccacgcctggctaatgttttgtatttttagtagtagagacggggtttcaccatgttagccaggatggtcttgattcctgaccttgtgatccgcccaccttggcctcccaaagtgctgggattacaggcgtgagccaccgtgcccagcttttaactgtacttttgtacccattaaccaacctctcttaatccccacctctccttcccagcctctggcaaccactaatcaagtctctacttccatgagattcacccttttagctcccacatgtgagagagaacatacggtatttgtctttccgtgcttgggttatttcacttaatataatgacttccagttccatccatgttgctgcaaatgwcaggatttcattttttataaccaaataatattccattgtgtatatgcagttcattttctttatt

SEQ ID NO: 820281 - DNA, 610 bp, Homo sapiens
acacatttgaaatatttctgaggctgggcatatgttcctgtttatccaacacaaagctgagtcctctttgaactttcatctcctgataatgtgtctcattttttaacatcttaacactctaagattggaactgtttggagacttttgtgctttccaaaggatttgctccttttcttctcctcagtttatttcccccttcattttaaacaactgcctaagggctgcaatagaagaatatattggtggccaatactaataaacctttgttaggtgccctctatttctcagtgggaacttttctaaaatctttaccttacacgtcttaaaaatcctacaaaagtttctcatgagttctaatacaccattttggttccagaacctcaacctatgcatttccagccccttctcagttctatttctggctggtggtgtttctcatgggtcatgagaggctaacaccaacacagcctcatctctgtkaggaactggaatgatgtaggtacaggttggatattctaaaatattaaaactcatctggaatcctgtcaggttcaacgtgtatgtgtgtgtatgtgtgtgtgtgtgttttccttatctggcttaagaaacc

SEQ ID NO: 820282 - DNA, 581 bp, Homo sapiens
gcaccgtaccttaaaaacactcagagttttaaatgttctatcacaaatgttaaggattccttccctgaatcataaatgtgctttgctttcattatacaatcttttctaaggcaggtattaatgatttatattagttaatgatttaaaaggaacacaaaaataagattgtgcaacatggagttaggaatctcttacaactttatcagttcaagtctggtccttgttgtgagtcaaccacatttttaaactacctaatagcctatggtcaagtcatttttacatatgcctaacaaaagagatataggtgacaagtgctgtaaaactattttttttttttttgagacaggacttcactctgttgcccaggctggagtgcagtggcacaatttcggctcactgcaacctctgcctcctgagttcaagagattctcccacctcagcctcccaagtagctgggactacaggcacayaacaccacacctggctaatttttgtattttttgtagaaattgggtttcaccatgttggccaggctggttggtctcgaactcctaacctcaagggatccacctgccttggcc

SEQ ID NO: 820283 - DNA, 482 bp, Homo sapiens
aatatcaaatttaccattttaaccgttttcaaattacagctcagtggcattaagtacattcactttgttatgcaaccatcagcactgttcatgtccagaaytttttcatcatcccacacaaaaactatacccattaaacaatgactctaccctctcttcccagccctagtaaccaccatcctactttctgtctccacgaatttgacattctgagtacctcatacaagtggaatcatagagtatttgtctttttcagtctggcttattcatgtgccataatgtcttcaagtttcatccatgttgtagcatgtgtcagaatttcctttctttttaaggctgaataatatttcccaatctcatttatatgagaagtagatataaaaaacagagaagttttgaactggaacagatcatagaaatcatccaatccaacctctctgcccctgcttttcttttccttttttatgtttacaaaatgggga

SEQ ID NO: 820284 - DNA, 542 bp, Homo sapiens
aaagattatccagtactacgttactctgtttatttccctttcgtcatccctgagtcttgggtcaagtccatcccagctctgtcctccaggaatcaagggaaatacgcaaacccgcggtgggttcgcagccgcaggaaggacaaatcttgcccccgccgcggcggccgccccgcgttagctgcctaagagaatctccgtggccggccagtacccgccttggtgaggattctccctcccgcgagaacttctggaatgccgccgggccagattttgcagctgaggcctccgacgccactaatattgggccaagcagggagtgctgctcttccttataaggttttagcgaaagttaagtaagccaattaaagtgcaaaacacacagtctggaacaatacagcgctctataaatggtctccattattatcattatccgttagttataactggggatraaaaaaaaaaaaaaacgacaaaaacctggagaaccggaaaggtctgcaaaaggggcggaacgcgggaacttcgatttggggaaggggtgg

SEQ ID NO: 820285 - DNA, 620 bp, Homo sapiens
tttgaatacattattggtatctaataagaacctatggttggcccttttgtatagtaaatatacactgatgactattcatttgtattaaaattttcccgartagcttctgcttgactaaagtatttcctcctttctattttaggatttagccttcatataattaatatctattaatatatgtgtttgctttagggaagtgttgggattggcttccctggaaagcagaccctgtgatgtatcaagaaatgtgaaaggtttatttactgggaggtgaaatgaaagaaaagaaggcaggattgggcagagatagccatcaaacctgttgcaggctgacaaggtctaggccgaagcggggctgtagagcaagatttgcttggtaatgttatcaagagcttggtggaaaaggctaagtccttgctaccactgccttgctcaatttttggccagagctatcctgagaagtataaaaccttggccgccaacaccttgcttattccagagttcccccagatgggttttccttttacttgagaactaagatggactgtgaaggtgatcatagctgatggccttcagctaatggagttcatcatagcagcaagtcccttcttgaagggaca

SEQ ID NO: 820286 - DNA, 425 bp, Homo sapiens
ctccatgcttctggtgtacatgtttgccgaggctgtgggatgggccattctaacgctcctcttcttcaaggacagttgcactgggcagttccagccttcagcttctggctctgctttctcaccttaagaaatccattccacctcaccttagatggttgagctgcttcatccttactgtggttaccgagatacctctaataaatatagatcaactttactcctgtaaaatgcttcattgaaaaataataatgtgataagatatgtttggaaacggttgcatattagagcctcatttatggatattcacaytctaaggtagagtattaaaggcttcaagaggtcttatttaacccaatttcctgaatattatttgatcacttaaattttttcatgtaattttatttgatatcctgcataattattgt

SEQ ID NO: 820287 - DNA, 631 bp, Homo sapiens
tttaagccttctctggccatgttccaccaccatccctggcaccccaacccaaaattcaagaatctytttcttttttataaggaatgtatgtttatgttatcattcctattaggatttaggttcttcaggaacattttgtcttattcaccattgtttaccctccaataaacatctgttgaataacgaatcaatggatggatggatagatggccagatagatggggaggccattaggacaatcctccaggtaagtataaattttgctctgacttggcacttgcttaactataaatcaaggctcaacatgccattttctctccattcctgcatttttctggttttaatcacacagttgctgaatcatcaaatgctacagcagaaacatatccaaactggtaaaattctcagtaactatttttgatcttgaagccagttagaaacatactattaagggaaaagtgataacttgttaatattatggtttgatgaaggggaaatattgaacagagttttctaatatatttaactggtttataatttgcagagtaaaacttcaacaagtgcatgcccttgaaatccattaatctctctgtattgttttatgtctgaatcagtacagagagaataaaca

SEQ ID NO: 820288 - DNA, 532 bp, Homo sapiens
tggcacccagaaagcagaggctagagacactgctaaaatgtgcaggatagcccccacaacaaaaaattagcgggtgccaaaatctcaatagcaycaaggttaagaaaccctaatacatatcatacataaacaagtttacggaaacatcccccattattgaacactgaggtttgtttccactacatataatgctaagataaaagttttcataattaaaaccttttttttataagttaaactattagaaattactaattaaaaaatacatgcatttttgccagttctgaaatggtggcatagaagcaagttggcttcactcactcccacaaaaaataaataaatatacagcacagagattatcaccagcaatacccaagaactcaaatatgaggatgagactattccaggagccagagacatgaaaaatttctgagcagagggaagaaaaccagacttcaatatctgtgaaaccccaacccccaatctgcccagcagaaagtaaccggaaaatttcctctgactcataatttct

SEQ ID NO: 820289 - DNA, 672 bp, Homo sapiens
catctttctaagatggttgactttacaagttatctcaataaaagtggccagatgcctaactcagaaccagagcattttgaaccacaaaatgraattgaaattttggcccagaacaagctggttctgttatcaggcccctgggtggggcagggggcagccagccaggtcctagacataacttttgggggatatggggcttgtgtcccctcagtgtcacaacatgcctcacagtggacttcgcatgcgttgatatttgaagcacgatcatcaaaactttgtgataattgatcgtagtgtttagtaacaatgtaaacacttaaaaaaattcaagatagaaaataaaaatgaaggcaagttgggactgccagagaagacccgtcactcctcatccaagttatctgcgactcccatatgttttgtgtcaaagactcacctttattgtgctgtccaatcccttccccagtgcagaaacaagtctcccatggagggggctggggcagacacagtttgctgaaaggagcaattttgagtggttgtggcattctgtgtccatttctggctccacagctttcttcatttgtaggaacaagtccttgtcctgttgttagtggctgatggaagttgtcacccaccaggcaccaaggcaggagtgaccctatactgtctttcttg

SEQ ID NO: 820290 - DNA, 578 bp, Homo sapiens
ctacctgtgaggggtagctgcagtttcttcawctgcaaaatgaagatactgcctggccccgagtgttgctaatggcactgctttgtgtatgagtgctgtgggaatggaggcagtagaagtgtccccatttcacagccaaagaaaatgacgagctagtgtgtttgactctgcccgacatggctgccaggccatgtttgactctgcctaactcccctcagggctcctcatgccgtagcacccgggttcttgattcacttgcaagctctaggagccctgctgccttgcacggcttcccgttggcgccttcccctctggttccctgtttagatcaaagtctgtttcaaagcctgctgctcagccagtgggagctggcagaagggataggcagtagagctgccatgtcctcacccctctgctcccctccactcctgcatgccagtcatgccactgatgccgtgcaggaggctgtgtcagagcaggaggggccagagtggagtctcctcacagccctgcctccctgcttttctttcctccctgttttcctccaagccttcgcctgtgcctggcagatctctttg

SEQ ID NO: 820291 - DNA, 633 bp, Homo sapiens
ttctgaatacttgcttttccttttaaaaattccacagataattctcccatttctcctgtcaccccaatcctcttccattaaactttcttctccctgcacctgtccccaccttctcyctctgtgttgttacccagaggaagacattagggttttatgccaccaactctgcaaactctcactcaccacctttagacgggacgccgggcatactttcggcgatgctgctcgtccactcgctccaggtaccaagtacctgggaaaaggctgtttgtgtcaccaggtggggagaaattcactgtggaatgaggagaagaggcagtactcacaaagaattatatgagtttttggaagagaaaatagtaatgaagatgtctgccccttcacagtgaagctctcttggctgggctgtaaggggctgcaaggtcacccttagtccaccaaatagaacactggacccacagaacaagaggggcagccatcttgaatctagcacttaaggccttaataaaaggctattaagacttttattataagagtacaacattttcctacagtaaacatagccttcctccattgaaatcttcatcccatccttttgccaatagttcctactttgagacgtaattcccagct

SEQ ID NO: 820292 - DNA, 612 bp, Homo sapiens
gctacatcctgagaaatgggttgttaggyaatatcatcatgtgaatatgataagagtatacttatatgaacatagatgatgtagtctactacccagctaggctgtatgttgtagcctattgctcctaggcagcaaacctgtacagcatgtgagtgcactgaatactgcaggcaattggaacataatggtatttgtgtatctaaatatatctacatatagaaaaggtacagtacaaatgtggtattataatcttatggaaccactgtgatatgtgcagtctgtcattgactgacatgtggttatatggcacagaactgtattccaaaatgctagagccaggtcacagattgcatcattaagtacttcaatgtgtgctgatctctatcatggcatctaatactttatgtttttttcaaaaggattattcaatcatttcccagataattgatagaactggcatagaacagtatccagtctgtacttggattgtttgctttcctgttttcccatgcagacaactggccgtacatagcactgaatggaaggttaaaggcagagaaaagtaagatgtaggtgttaattatatgttgtgggatgagtgacagaattaaa

SEQ ID NO: 820293 - DNA, 612 bp, Homo sapiens
gctacatcctgagaaatgggttgttaggtaatatcatcatgtgaatatgataagagtatacttatatgaacatagatgatgtagtctactacccagctaggctgtatgktgtagcctattgctcctaggcagcaaacctgtacagcatgtgagtgcactgaatactgcaggcaattggaacataatggtatttgtgtatctaaatatatctacatatagaaaaggtacagtacaaatgtggtattataatcttatggaaccactgtgatatgtgcagtctgtcattgactgacatgtggttatatggcacagaactgtattccaaaatgctagagccaggtcacagattgcatcattaagtacttcaatgtgtgctgatctctatcatggcatctaatactttatgtttttttcaaaaggattattcaatcatttcccagataattgatagaactggcatagaacagtatccagtctgtacttggattgtttgctttcctgttttcccatgcagacaactggccgtacatagcactgaatggaaggttaaaggcagagaaaagtaagatgtaggtgttaattatatgttgtgggatgagtgacagaattaaa

SEQ ID NO: 820294 - DNA, 519 bp, Homo sapiens
catgtcacatgtcctccaaataggatcctcttccagtatttactagccggtgtgtgactatccacccagctgaccaggctaaaactgtggcaattctttcttattgttctttctcctttctttttttttttttttttttttaacatcaaatcaaataagcaagtcccctagagtctacctgagaaatacatctatatgtctctgtccctacggctacctccatcactggccacaatttttacaaaagctgcctcacagttcctgacatcactctggtctagcccttcagttcactctacacactgtggttagaggaatcttttaattttctaaacactgtaaactttatcaagctattctcttgaatggctacccactatctttaggagcagagtcaagccatatcgagtcatttatgagaggccacctgcctctccaatgcctccaggttcctcatcccaccctcgcaarccgagaggatttccaccatctaaatggtgtttttcaaattttgttttg

SEQ ID NO: 820295 - DNA, 529 bp, Homo sapiens
agatgtttcacccagccctgcaggaagggaagatattggggatggcactgcttttgggagccccttaaatcaggccatttgaagtggccagtccgtctcccaaaggtggccctgctcccattcctwgccctttcctcacattcaatagctctcgcgctgctatcccagatgtaatgcgtgggtaccaagaggtgggattgggtaggctttattagtcagaatccatttaactaattcaaactgtttggggaatcatagaaccatacctttatgaaatatgtagcacattagtccccactgtgaatatgttattgaaccaactatgtgctgagaagtgcacataatcttcccaactaggacctaagcagaaggtgccatcacccccatttcacagcttaggaaatggaggccccaagtaggtaaggcagaattaggcattcctccattgcatttcgggtgcctgtattgtggtttcagagctttgtcaatcaccccctattcagagggctgaaggaaaacttcactctct

SEQ ID NO: 820296 - DNA, 512 bp, Homo sapiens
taaaatctgcattacaaacaagtttctctgctgatcctggggcaggtgccacagggcttgcattttgaaaattagaattagctagcatagcctaatgggcagactctttcctgatttaacatgaacttcattcatatagttgcatgccagctatatgccacatgccatgcccaaatctgggatatgtctgttactactttttcatttgtgtccatgtgtgcttcctcctagatgcaacccagtagcttatcttaagcttttctgtgcttaagagtttttttttcttgtttttaagaatccttactctcaatgttaactgaagaaggtgtaaaatgaacaccctttatcacttgatttttattgatgtttcattttcctctaatttgttktgcaaagtgctagcttcctgctttccctattaaggctagaaattccttcggcttgaccctacagttgtctctctaaactgagtgtgtattctatcctgtctcaattttcctggatcactggat

SEQ ID NO: 820297 - DNA, 629 bp, Homo sapiens
atgctaatgaagaaaatacaggaaaaaacaattattttcatttgataaaagagccatcctgctgtcaattaacaaaatctgagatatggaaatctacagataaaaagagttaagaaggaattacgtgtgcctgagtacagctaacatctctaaaagagccagacaacgacatcaaaagaagacaatatgattaaggctgggacaatattaggttaattctaggccctgttctgctcccagtaggatttggtaagaaagacaattctatctcagaaccaggatctgtttaaccccaaggatgattctaaaggaggacttattttcttcagctctttcagaatcatccttgaggttaaatagatgctggtttgggaccatgcttgggaccataattacatggaatcatttatttgtttgtaatatcttggttgtcatgatcacttgtgaccttatcgtataaatcttgtttattaggaagtttaaatttcagcaatagctttagctgtgcaagctatgawcttaggcagtgaataatacattttaataaaattcacataaataaagtttaacaccaaggacacctggtgttctttgtgtagtttcataggaaagtgtcaaatacaagaaaa

SEQ ID NO: 820298 - DNA, 615 bp, Homo sapiens
tgtaagttatgcattggttatactgccagctgtcacttactatgaatagccacagggcaattataccttctttctaattcttattttatatatttgtaaaattataatasttaacaaatatccatggtgggctgttacatgcagtaaatgttacagtacaaataaaatactatgttgttcagtaaaggtttacttatgctactattcatattttaaattttagtatctctttgtcccaggacattttttaaagagagcatggttggttgaacctgaaaacaataggatatctgattaaggcaggggccagctcttagtgtgtcaggaacatcaacgtccatcagtctttcctattgctgatcagtggtggcccacgaccactccacatttttaataagtttgaggtgtcagtcgttcatccccagaaggcagccagatgctcctctaactttcagtgccatagatgtctttacattttaaatacagggtgttatgtctcattaattatgggtttaataatcacttcctattgaagtcatagacaactaattctgctaataagtttaaattggataagtgtttagtgaacctcagcattttacagttggcatggtt

SEQ ID NO: 820299 - DNA, 589 bp, Homo sapiens
caagctggcagcaaagcaaaggggggatggagtcagctgaaacccactgggatggygccagcgaggggccttgaaagttgaggaggtttcaggtaagcagaaaacaggggtaatggcagccaggagccgaaacatgagcaaggctgtccccaagagcaaggccaagaagagttccttctgctgggacgagggatccaggagcttgaggcattgggagcaggcagcagagggcaggtgggcacagtgggcgtgcctttacagggctcccttctcccgccaggcatgggctgcaacgagtgtacgcacccctcctgccagcactcgctgagcatgctgggcatcggccagtgcgtggaatgtgagagcggggtgctggtgctggaccccacctcgggccccaagtggaaggtggcctgcaacaagtgcaacgtggtagcgcactgcttcgagaacgcccaccgcgtgcgggtgtccgccgacacctgcagtgtctgtgaggccgccttgcttgatgtggacttcaacaaggccaagtccccactcccgggcgatgagacgcagcacatgggctgcgtcttttgtgaccccg

SEQ ID NO: 820300 - DNA, 592 bp, Homo sapiens
agcaaggccacacctgttaggtccccagtgcrgggctgtgactctgctcttccacccacagggcccagtggacctggagccttctccgcagaaggtttcaagacctccaggacccttaggttatagggctcattcaggcttggaggagcagagacggttcctaggtcttaaacccagaccacccagtccttccttactatgcttctgcactgcgctttcagccacaggcagggctaatcacaaagtgttcctttattttcctctgcagttgtcccttgtgtgtgaccctccttcaaggcccttggcttccgcagcttgattctgcactccgagtccattcaccttctcccatccaatagcatccaaccccgctgctactgctgccaacctggccttgggagcaatgaggacgaggaagggacaagaccccttttaggccagaactgccttcagatcagccacgctccatgggactgtacctctgccctggaggctggagaggtcagtggctgcagactgtctcaaggagcccctggccctgcccacctagccaggggtgcagccttgccagagaagcagagaagcgtctgtg

SEQ ID NO: 820301 - DNA, 644 bp, Homo sapiens
acaagttaccttatgtggtctatatttttaaaaagaattcctgaaaagctaataaataatccactccttatttagcatatgatcaaggactatctatacaaatagccgaccagcagtgtttggtgctgccctgtctatggagtagccattcctttattcatttactgtcttaataaacttgtttccactttatagactcctcccaaattatttcttgcatgagatccaagaaccctctcttgggatctgaatcaggacccctttccagtaacacctgcaggaagcacatcctggccccttccctgctccactgactggaggcacaggccaaggtaatttcactgtttgacttgaatgaccaataactcatctttgggttctcacctctgattagaatcttctgaccctcaccctccacccatcgccctcctgctcattccgaaagtcccacatgaaacccacttctgtggcttaggcctctttggcaacttgccacccgctctcactgccacaccctcatagaaatccttccccatrtggatcttgtgttcttctctctctcttccctctcagctcctgctcagtggctgaagcagatttggagccacgaacacgagtctggcagagctttgcttttgttttta

SEQ ID NO: 820302 - DNA, 414 bp, Homo sapiens
catctgcgcatcttctttggtgaggtgtttgtaaagctctttggcccatttttcaatcaggttgtttgtgttcttactgttgaattttaagagttctttgtatattttggataacagttctttatcagatagtgttttgcaaatatcttattccagtctgtggcatatgttctcattcacttgactttctctttcacagagcggaaagatttaattttaataaagtccaacttatcaattctttcttttgtggattgtgcctttgctgccgcatgtaaaaaatcatcaccaaatccagatcatccagattttctcctatgttatcttctaggggttttgtagtttagtgtttwacatttaaggctgtgatccattttgagttaatttttgtgaagggtgaaatgtctgtctaga

SEQ ID NO: 820303 - DNA, 641 bp, Homo sapiens
tacctgtttacagttccagcagcaaagataaactgcgcatttycccccacccccccgccccaaccacctttacaaatacagtgtgggaacaaactttatttgtactattccttgccaatctgataagcaaacaaaattgtatttcagtgttgttttagtttgcgttcttattgtaaggagtttgagcaccaaggaactggttatgtatgtgtgtacagttttcaggtacttttttaattaagttactgtcctttttaaatattgatttttaggaatcaatatttaaaacacacaacacaattaactgttttggccgttttcctttgatgtgaagtacatgaatttttcctaatttattatcatttaattttgtttctggtgatgtttgccattcaggaatatcttagtttgaggggtggggagttgatcaaatttctcaatcttttcttttctggcttaaagattttgtgtcagaattaaaaaggtcctttctgaatcagagattatttaataattctcccagttttttctgttacttttaaggtttcatttttttcatgtgtaaattttccatccatacgaaatttactttgtaaatgtgagtggttggaatccagctttctctttcagatgataataca

SEQ ID NO: 820304 - DNA, 641 bp, Homo sapiens
tacctgtttacagttccagcagcaaagataaactgcgcattttcccccacccccccgccccaaccayctttacaaatacagtgtgggaacaaactttatttgtactattccttgccaatctgataagcaaacaaaattgtatttcagtgttgttttagtttgcgttcttattgtaaggagtttgagcaccaaggaactggttatgtatgtgtgtacagttttcaggtacttttttaattaagttactgtcctttttaaatattgatttttaggaatcaatatttaaaacacacaacacaattaactgttttggccgttttcctttgatgtgaagtacatgaatttttcctaatttattatcatttaattttgtttctggtgatgtttgccattcaggaatatcttagtttgaggggtggggagttgatcaaatttctcaatcttttcttttctggcttaaagattttgtgtcagaattaaaaaggtcctttctgaatcagagattatttaataattctcccagttttttctgttacttttaaggtttcatttttttcatgtgtaaattttccatccatacgaaatttactttgtaaatgtgagtggttggaatccagctttctctttcagatgataataca

SEQ ID NO: 820305 - DNA, 634 bp, Homo sapiens
ccaggagtggaggcccagacttgttaatgtctgaaaatacttcagaaatgctagagcactgtacagataacaatttgagtaatatttttggtcaaattattctagtttaacacatgtattcttaaaaaatggacttgtgattccttacagctaaagagaatcaagtccacccttagcatgttagcggtcactgccaggttcctgctgcacgaggaggaagtcctccatggctgcttttctataaacaattccatttctcgttgtagaacacagaagtaaatacatcgaatttttatttttagtagcaatcagagcctactaaacttccttttgactcacctcttgattgaattcagagtaggcagaaaatctcattcaatctcttcactgtgtgggtgaggaaaccgaggcccaagggtgatgaagccacttcctcaaaggcactccgtgagttggtggtggggctgccggcaggatgaagtgctgttactccaggccagagccactcccccgcttcatcagccatgctgtttcatgggtgcacctgttctcatttatgtggmcgttaggaaccgtgggtctctcgtgttaagccataggcctttaataaagacgtgtagagtaaagcctgaat

SEQ ID NO: 820306 - DNA, 546 bp, Homo sapiens
tggtgaaggcttgcagtggactgtgccaacccacccaccagcaatgcgtctggcccttcatagaatcgaagactcccattcagctaagagagatcaasattgtcccccaaactagaaagctgctctcaacacagagttttcatttcgtacctgtcaaaagagcagtttttacttatttagacataggtttttattgatatcactcctttgtatacttaactaggaaaataaggcaaaaacaattggtctcgattcctctgtgcttcttcagggtacgtctgtcttcccagtcaccgctccaagcaggactgcacggttggcctccttgtgccacatcctttcctgtggcctcaggggcctgaattgggggcgttgtgagggtccccaccaacgtctgccagcggcttctgtcccacaagtttctatgcagacaaggagacaatgcagccaggcgtgtcctgaatccagaggtggtaaaatggggacaaacaggcctcttagagctgggaacacgtggtgtgtggcatctgtaaatacatgggtatg

SEQ ID NO: 820307 - DNA, 587 bp, Homo sapiens
ggatttgttggatgatattgaagctgggagaaaatggacactctctgtgtagcatcttggggacactaagtgtcacttggtggaccctagtttcctccacggggtggatggggtctcaagccccctccagctacgccattttctgcatttgcagagtcagattttctctcctgagaatccgttcggacagcatgtgttttagggttcttttactccacttggggtttttgcaacacaacaaaacatacaaatgagcttcttgttcattttgttgtcaccagaacctaagtattgaatggcagccttaattggaaaagggcacgattagaagaaagggagagagtgtgtgtttgtgcatgtgttcttgtcctgtgtgtgtgtttgtgagtgtgtgtgtgaatgaaggtgaaaaaggggaggggacccaaccaacccctagtttttctgaaagcctgttgatttattttcttcctyccctgtggatatatttctcccccaaaggaattatgtagctcatgatttcagattttggctcagtggtgctttctggagataaaacgcagccgttgctttattcatcacagatt

SEQ ID NO: 820308 - DNA, 533 bp, Homo sapiens
gatccgtgcatgggcttcaggttgtggcagagttttgtgcatctgtctgagttgcatgttttggagagagagtccacagctttcagtargaatcataaagaggtcttgagcaaatggagcaagaagacctggcaacagagcccgggcttctgaagctttcaagattcagggtcagcagaaccttctaccagctctctggggctcaggaactgggatgggcccatgagagctgggacctgccagctcccctagactttggaggaccctttttccattattgtgagtgctgtccttcaaaggtcttcctgtctctttgtggatttttttaattagctttttttttctgaccataaaattacaaatttagaaaatatggaaaaatgtgaagaaaataaaatcaatcataatcctactaatccaaccactcctactaatcagagtaaacctcctagggtttttctttttcttttgtcatttcagagagggttgagatcatatatgtctatgaatagagcccttttcatttaacatta

SEQ ID NO: 820309 - DNA, 616 bp, Homo sapiens
gtctaattaagtctgaagaacttcttattgataccctttgaaggtctaagcttttggctaaygtcttcccctctccacccctcacaattccccaggattgtattttgagcattatcatgcttgtttattttgcattctggattagggctggcagtggtcacagatgtgttcgtttaacatttttcttttcctacaaagagcggatatcacctaaatctgaggagttggcagtgcctgcttccttcccgacccccatctgcttcagggtggggtatgttgcttttggccagtggaggtcaggccaaataagatttagtcttatgtgatgactgtgatgtgtgtataaattacacagagaccaaaatgcctctctgagccctttaggagactaagtggttctgggtctggggaaaacaaaggatcaaaggaaaggagagtggcagggaatgagaaagggatttatttcatggaagccaagagtcagggaagaagaaaaacaactcagctggacctggagaaacagccaactggagggcaagaaaaaaaaaaaaagaatgacacagatttgttagcaagtcagataaaacagacgctaggcaaaaagacttgggagtca

SEQ ID NO: 820310 - DNA, 697 bp, Homo sapiens
tatttcaaggtccccaaaagcaggatcctgactgccatctgcttagtatacgctattggtcatattaatggcacttaagaaaagktttttatttttttctattataaaaactataaaataaaataataaaagaagaataattagagaaaaatgatccacaccccttccctacacacccaaaacaatgattgcatggaattctttgcagctccatagataaagagattttgatgaaagctccagaagatgtaaaatgaacatgacatgatatacaaaaatgcaactccaccctgagactcacatgtggattccccagggatctgagacacacacatcccttcaggctatttattaggttgctgcaaatgtaattgtggttttaccactgaaagtaattgtggtgccctctttttaatggtaaaactgcaattacttttgcaccaacctaatatatatgatatggctccacattatacagtaaggccctcaaggataagggctgggttgtttaatgcttaagtctccattaatacccacagcaccctgtggtgcatccagtgtgcagcaggaacccagcaaaccttgttgcctgccccacctttgtgcccacagtcttttgcaacattcatgctttacagatgggtctcggcaacatcttaacacacgatatcttcgaaagtcgaacgagacttctagg

SEQ ID NO: 820311 - DNA, 550 bp, Homo sapiens
taaaatgtgctgtggggctcaaactagagaagaaggcccaggaaagcttttggtaaagttggttgaatgtgaaataaaccagagaagagagataggattttgacaggtggagaggggatggtattccaagatgagaaagccatcaaatgaagctgtatgctctgacattcagaaaatgttcaggaaactgttaattattctgttttattaaagcgctatacatttctgggggatgaagtcatgatttgactttttgtgagtgtcaatatgaggaatctctcaattatgaaaggtaacatttgaagtttttgagcaggggaatggtttgaggagtggcagccatattaggatacactaaaccaaaaagaagtaaggggcaggaagctagttttgagattgttttattggtataaataagaaataacaagggcctgaaataactgaaatctccagctactccctaaaatcaaaagatcaaatgtaatgtccagtctcttasaacactatgtaagtgtcctaaaaccaaaatggtgactgacttggagggatg

SEQ ID NO: 820312 - DNA, 554 bp, Homo sapiens
aggctgagcaggcaatgactaccttctctctagcaaggtgtgttggaagagtagggcaggagaggagagtgagccagggrcagtcatacaataattgggtttctagcacacacctttggaagaaagtctgtcaccaaagaataaaattaaatgtatgagaacctggatttttagcttaaccatttgtgtttgggatcaatttatttgtgaaattaaagccagtggaataatgtagattccttttttttttttttttttttttaaaagacagagttttgctcttgttgcccaggctggagtgcaatggcccaatctcggctcaccacaacttccacctcccgggttcaagtgattctcctgcctcggcctcccgagtagctgggattatgggcacccgccaccatgcctggctactttttgtatttttagtagagacagggtttcatcatgttggccaggctggtgtcaaactcctgacctcaggtgatccgcctgcctcggcctcccagagtgctgggattacaggcatgagccactgtgcccagcccatttca

SEQ ID NO: 820313 - DNA, 579 bp, Homo sapiens
ctatgtatgatttggtttgtataaagttcaaaaatagacaaagcaaatccacagtggtagaattcargctggtggtcacctccagggcagggagcggtgtcaaagacggggcatgaacaggtcttctcaggtgggaagatgagtgtgagtggtggctacacagctatgttcactttgtgaaacttcattaagctatgggattttcatcaatgatgcttctgtatgtctattatacttcaatttttaaaagaatacttgcaaatcactaaattttttaaaagcccaagagcctaaaagataaggcaagaaagcaacatgaacatgcaattttagaaaaggaatttaaaataactgataaacataaggtagcaaaactgaaaaaacgagaagaaaatgaagatccgtcccatttctaccttttacaatggcagatataaaaggattttgctcacgcctgtaatctcattttgggagcctgaggtgggtggatcacaaggtcaggagttcgagaccagcccagccaatatggtgaaaccccgtctctactaaaaaacacgaaaattagccaggtgtggtagc

SEQ ID NO: 820314 - DNA, 562 bp, Homo sapiens
ctatgagctccaagaacattctttatttcccctacaatagcattkatcttattgcactgtaattacctttctgcttgtctatacatcttgggagagcagagaccacatccacctcatccaccatgagaatcccacatttttgttattatcatctttttcatcatcatccgtcccatccttctcctcatttagcaaacaaccactaaggagcttacatgaatattttatttgacattctaactaccacattttacatataagtaaattgaggttcagagggatcaagtaatttgtccaagaaggtcagcccaaggagaaagtgggatttgaaccaagggtatctaactctggagttcactttccatttcctccttctcccaaaaacagtgtaaaagcacctgattttcctctataaaactactaccccctccacccgttctcaccttccctttcctgttttcacacctcatatcaccccagctccaataacttcatgtccacgcattcagaggcctgtgggcaaaggcttaattgcagcttgccagagaggtacaaagcctgt

SEQ ID NO: 820315 - DNA, 645 bp, Homo sapiens
ttagggtattatctgagcaaatttattagcataaatagcaccaagtgctgtaaaaaaaatctcagwagcttaacatggtaatcaaagattacttttttgtccgtatcacagtcaagtattggtcaggaagaaagttccacttatgtggtcatttagagaccttgactccttccatactgtggctccaccatcttcaatatatgtctttaaaattatcctggtaagagagaagaacaaagattaccctggcatcatccccctgctagacaagaggaagaatactagtcacatagccccatccatgtacgaaggcctgagaaatgtactgttaagctgcgtgtccaggaggagaaaagagctctgatgagctcctagccagcctctgccagaggcagttgttcaacctctggacctgtttcctatcatgacaacaaggggatagatgaggaagtcctgagcatccttgacccagcaagtggtttgaaggtcaaatgctagccctaggacaggagctgttgtttgtttgtttgttttgagacaagatctggctcccttgcccaggctggagtgcagtggtactatctcggctgactgcaacttctacctcccaggctcaagggatcctcccacctaagcctcctgagt

SEQ ID NO: 820316 - DNA, 528 bp, Homo sapiens
aggctcatgatatacatcttaataaaaacatgacagatttaagttacagatcaagtgtgtgactccagaacatggaaccatttatttytaaattagaaattaacattatttgatagtgaaaccatgggtttctttaatatataattctatgcattcaaaaagactctttatgtggacttctattaggccattctggggaaaaactgaacagctgataataaaaatatacaactatgtttaaatggaatatgtatgtgtgtgtatacacatatatattctgcatttaggttctttttttttttttttttttttttggagacggaatctcactctgtcacccaagctggagtgcagtggtgcgatctcagctcaactgcaacctccgcctccctggttcaagcgattcccctgcctcagcctcccgagtagctgggactacatgcgcgcaccaccacacgtggctactttttatatttttagtagagacaaaggtttcaccatgttgaccaggctgggctcaaacccagc

SEQ ID NO: 820317 - DNA, 658 bp, Homo sapiens
tcataaaaggcttgatgctgtcttggtggcaatgagtgagttttcactctattagtgcctataagaactgattgttaaaacgaacctggcacctacccctaccctcaccatgtgatctgtgtacacaggggctccccttcaccttccatcatgagtggaagcttcctgaggcctcaccagaagcagacgccaggaccatgattcttgtacagcctgcagacctgcaagccaaataaaattcttttctttataaattcccagcctcaggtattctaaaggactgaaagagaaccgaatccccacattaacagacagctacataatactgggattaaacatggtccaatttggagcctaagtgagcatcaaagccttcctttacctcaaaaatctaaaggaagctacaggttaaaataaaaacacacgagtatgcacacttgtgcatacatacaattttgggacactggatttacgaagatctagtctgacccttcactccagccaaacccttgccatggctgaatccttgatgatgaatgatcacgarctatacattctgtaagcaatcttaatgccttgcttacgtttcacatttatttttaattataataacaaaacagcaatataacagatactcagaacccatttaactctctat

SEQ ID NO: 820318 - DNA, 612 bp, Homo sapiens
aacctccctgctcaggagatcctctcacttcagcctcctaagtagctgggaccatgattgagtaccattaattaatttttttttttttgagatggagtctcactctgttgccaggctggagtgcagtggtacaatctcagctcactgcaccctccacctctcgggttcaagtgattctcctgcctcaccctcctgagtagctgggactacaggtgccagccaccacgcccagctaatttttatatttttagtagagacgaggtttcaccatgttggccaggatggtctcgatctcttgaccttgtgatccacccgccttggcctcccaaagggctgggattacaggcatgagccactgcacctagcctaattaaattttttaattaaaaatttttaatttttaaaaaattatttttgtagagacagggtcttgccatgttgcccaggctgatattgaacgcctaggctcaagtgatcctgctacctcagcctcccaaagtgctgggattataggtgggagccactacacccagccagtacaggtcttttcttgttcattgrgctacatatccttcaaactgggtccttaaattttatcgttcattgaaaatg

SEQ ID NO: 820319 - DNA, 608 bp, Homo sapiens
caacagttacatggttctgttacagtaccctactaatctcatcctggactgggcagaagacactgtgtcagtaattaaatttatatcacrgactaaacagagtttctttttgtttttactttgttctggttttagaaagaagcacacagtgcagacatttcagcaggtactaaaagtgtactctcagacactgtcttctcttctgtagggtcattcatatgggaatttaaccattaattctaaaaagcagagaaagtaggagagtagggcaagctagaggtaaggaaggcaaacacccagaacaggggtgccaccccacggaaataaggaagtgcagttggccccatggtccctggtctgacttccccataaagtgacaatacatagagctagtctgtaaaacactgccaactggtgtgtttcacagaacctgtcgctttctccagctaccaagaaagctttggatcggggctcagtcacgtgcggatcccaacagtgtccaagatagagacaaggaagaaagggagtaaggataaaatgacagctcattctctctctaaggctatcacacattatgacagacagcggtcacccaatctatctttaga

SEQ ID NO: 820320 - DNA, 549 bp, Homo sapiens
  misc_feature 541, 542, 543, 544, 545, 546, 547, 548, 549: n = A,T,C or G
ccttctggggtttctgttcctatcacaggcattacytggtgctctgtctaaccactcaggttcctcttgggccaggagtcaccacttcttgagaagacccttttattaaaaaacaaaaccaaaacatcttttttttttttaaacacgagtaataaatgctcgtcttccagaaatgaaaaagtggataagaaagaaggaaaaaataatcacctgcaaccctttatccacagctaatcttctttctgcatatatacgtggtggttttttagttttctatcttctcatagcaccttattagttaacttaaactttcaaaatcacctctacatgttctctagcaagatttaaataaaaaaaaattaaattttattttattgagatggagtctcactatgttggccagggtggtggtcttgaactcctggccttcagtgatcagcctgccttggccttccagagttgctgggattacaggcatgagccaccacgcctggccaacattggaattctttttcctcgaaaatacaagaagtgtgaagannnnnnnnn

SEQ ID NO: 820321 - DNA, 511 bp, Homo sapiens
attttgaagacttttgtctttcagaaatcttgggccaatttaatacttctaatacttcatgagagtcctcattttgccaaatcctagtcaatagagcataccctttttaaaaagaaaagtttgtggggaaaargaattccttggtttaaagttagcatttcttcgtttactatagagtggaaaaatttgctccgtgggccattttcatttattttctgagctgtttgttagcgtcttttgtctaattttggagatacttactcttttattagggccctttatgtgaaaggtgttgattcactaacatggacaaattttttttctgttttttttttatggtttattttaatttctacaacattttaaaatcagataattaagtctaccaactctgtttttcttcctttgccttctccatgctaagaataaatttttcctcagctttgttatggacccgtttttacatctgactagaatctgtctgaagtttttgaatgatgagaggaaatgc

SEQ ID NO: 820322 - DNA, 610 bp, Homo sapiens
cttgaattttctcctcttcttttccctctagtttctgcttttctccctagaatcctcttcattccttgccttaggggagtttcccaagacaacaccttgagatgcaagagtttaggagttttaaatttcaaaagcccaaacattgggtagaggcttaaagtttaagacacagataatagaatggttagaatatgcagagtccatctctgtattctctaatcaagcaaacatctcagattgcaagagggagaagatattctcagagaatgaggttagatactgctgtttcccatgaggcatcctcagctttcaatcaagttggggagtgaaagtcagtaaaccagtggctgagcaaacctccgccccgacctttctcacagggccacagatgaatgggagagccagccgagaaatctaaagtgcctcgcatccccagcagtttgctaaaggaggtagtggctggacaggttaagacaccctcccagccccccagcctcctgcagtactcagggaaccatyaggcaccttattctgcagccaccagtggggcagtgttgccaagagggtaccaggaggagaatcctgcagccttgagctgtgcaactgataa

SEQ ID NO: 820323 - DNA, 633 bp, Homo sapiens
aggcatatttcaaatcaggtgaatgatccaagaaactttaagccaaggaacttcaaatcytactgatcacttaacgcagcgatgctcagtatttaacgtgcctaagaattacctatggatcttgttaaaattcacattcttgttaaaatacagggatagaacttgaggtgccatgtttcctaaaaaaacttctctgccagtctgagaaccatactttgggtagcaagctcttagtgcatctaaatacttgacaagagcaaagtaaacctttagagaaaggcacctttaggcctcggaaaatgctacacataatctaaggacaatgaacagaatatacataacactcaagtaaacaaggcatcatgaataaaaacctgcaaaaagacacaaaacatttcagataggagaattatcagatcttaaaatgctcacaatgtgtagatgcataaaggacaaacatgagaaagataaatgaaacagaaaaactattaaatgttacatagatttggaaaacaaccaaacagaatttctaacatgaaaaataaaataataaagctcagacaggtctggctgcctattagacaaagacagcaaagtggaagacagaaggaattatataaaatatatacagaa

SEQ ID NO: 820324 - DNA, 554 bp, Homo sapiens
ggactcccttggagccaggcactggcttaatcctatctccatttccccygtgcccagcacatagttagtgctccagatgatgggagactcaatggagagacacgtgagtggatggatgttttgctgaaggcatccaatgtggcagaaccggcagcagcaaactgattctgtctggaatttggaagccagggaggaacagcctcgaatggacagggtaggcccccaggttgtctggaacactgcgccctacttcaatctggcctccccaagtggacctttgtgagcccaggttcttctcccaggcacacagatgcctggacaaggcaggtcctggggctcatgaaattcccaggaaattaacccaggcagcaggagctaaaggacaccaaaccagctgccaagcctgggtttcctcacctgtgaagtggggtctcagtcgtcattgtaaggtctagatgaattaatatacattaagagctagcacagtgcctggcaaggggaaacagtgaacaaatattagccattattatgattattattattttgctgaactg

SEQ ID NO: 820325 - DNA, 424 bp, Homo sapiens
cctcacctcaccagggcacgtgggaacctgcatcctcattgatcatggagaatgagcagcacctcctcagggccagtgtctagacattctctttgctgatgccgcactattgctttcggccatatattggaagttgaaccaaatgcaatgtgcagcttctcctagaggcttggagtctcctctggctctgtatgagcaagcagctcgtaagcctaatgctctctagttttctcaaaattatttacatacttttacctcaaggtcatgggcacgtcctgtcctacctccttcttcctcctcttaragagccaggtgggttttatcttactccccttcctgtctagcaagaacttctaggtcaagccctcttcttcttctcctattccctaaggctctaaagcagaatggctcacaggcaacaaca

SEQ ID NO: 820326 - DNA, 629 bp, Homo sapiens
tatggttgactgcatgcaacagaaatattactggaggaccttaactaaatttttgtttcttcatataacaggaagtctagaaatgggaagacctggctgccatagcagctcagtggtgctyccagaggctcgggctccctgtgtctttctgttccatcatctgcagtacatggcacccattaacacggttgcttcctcgttacaagatgcatgtttcaccccaagttttctatttgagttctaggaaaaggaagaagaaagcaatagtaaaaacgatgtaaaagcttttctaaaaatccctggcaagctctacttacatgtaatcttagatttaagatcaaccaccaccctcactgagagggaaggcttatgtcctctccctttgaatgcgggtagggtctttgactgctctaccattagaatatagcagaagtgatgctatgctagtttctaggtccaggctttgagaaaatggcagcttccagttcttcttagaacccttgctcttgaaacctagccaccatactgtcaggcagtccaagttacccagtggagaaccccatgtagagaggtaccgaaacccccaactacagtttctaccctacagccagccacgggagtgaaccacc

SEQ ID NO: 820327 - DNA, 565 bp, Homo sapiens
aggcgccctcaccccctgggtcccccagcctctgtgaggagctctcactcttcccatctgtattaktttgttttcacactgctaataaggacagacccgagactgggtaatttacaaaggaaagaggtttaatggactcatagctccacgtggctgggaaggcagaaggtgaaaggcacatcttacatggagatagaccagagagagaatgagaaccaagcaaaaggggaaaccccttataaaaccatcagatctcatgagacttattcactaccacgagaacactatgggggaaaccgccccatgattcaattatctgccacagggtccctcccacaacatgtgggaaagatgggagctacaatttaagatgagatttgggtggggacacagccaaactatatcaccgtcagatgctctcaaatgcccaccagacatagtatgctcctgggcaccagggttgaccctcataataaatacagcatgactcaatttcctagctcctgctacttatctgatacaaatgaatataagcagagacttgagggcttccccacgccccagt

SEQ ID NO: 820328 - DNA, 488 bp, Homo sapiens
gtgtttctttgtgtgtgtctgtgtgtttcttgtgcaaataggcacctcggggatggggcaggtggagggaccagcagtgcgaagaccttgggatggggacaccacgtggagtgtgcaaagtggtggaagggccagggtggctgatggaggccagagcaagaggacaccagaggggaccagcgtggctggggggggccagagcgagaggacaccagaggggaccagggtggctggggggggcagacgagaggactccagaggggaccagggtggctgggggggggagggtgccagagtgagaggactccagaggggaccagggtggctggcagaggccagagtgagaggacaccagaggggagcagggtggctggggggggggccagagcgagaggacaccagaggggascagggtggctgaggggggcagcagagtgagaggactccagaggggaccagggtggctggcagaggccagagtgagagga

SEQ ID NO: 820329 - DNA, 504 bp, Homo sapiens
gtggaactttcattatttccacaattcaggttcttccactcgggaaatgcaacaattactgcattgggaaaaggaagaatgcctttctgaagagaagctgccatctgcagctcggctaggatttgtcttggatgctactaccatttgtagacttgtaatatctttctaattgcagttgctgttgacttacagcaaaacagcagaatacttgctggccatggtctataaatgaaagcaaaaaaaaaaaaaagacaggaaaaatcaactagtggttagtacaacagaaactgaaacatagtattataaactttatctttttgtataaatttttaattgtctgtatcaatggaaaacaggtctgccaatcaactgatccactatttttccccaaatttaatttagtcagccatttgaactattctaccaaagctgctaaaaatccaaaggaagggayttaaacgttcttaccttgctctagtctagatttactagccagcattttac

SEQ ID NO: 820330 - DNA, 558 bp, Homo sapiens
tgaatggaggcaaaaaaatggaaataaagaaattatatcttttctctaatatgcattaattcaatgtctgcaagcaaatggggacattttttgaatggtgttttagttacttcctaggtaaaatatgttttctcaggtagttaactgacattgtctcttagacacagagctcaacattttaaaccttgtctgacacatctttcagattgtggacatctctagagagcaaatactgtaccctctctttgctctttttcgtaaaatgcccattattgtataatgcaaaatattacagtatatggtcagtataaagcttaattgatgtttaatagtcatatgaagtatttactttgaagaaagaaatgcaacttatttagataagtagcaaaatgggttttctgctaagctaagttggtaaaatgctttgtcataatatcatattcaacaagaaatagttattgtgatctcacaagagactttctgggataatgagaatgtaaagtattttgttatggaaaatgcccataygaagtctttagtttttacgttctgtggttt

SEQ ID NO: 820331 - DNA, 635 bp, Homo sapiens
tgatcaaataaaatttcttggttaaaaaaaagaaactgcttgagaatattttagtattattcaattttgtatatcaaaccagcactgtgtccaatatgaaaggctgaatttccctcattcaattcaggaaccagaactgtgacactgctaacattaccagaacttaacatttctctaaaatgctagccaatgcaatcgaataagaaaattaaacaagaaaaataagcattggaaaagaggaggcaaatttaccatttcaggaggtgctatgattttcttgattaaaaacctaaggaaataaactgaaactgaaagttcatggaggagtttagtaagactgttcgaaagcactagcttttcttcacacaaacaacacatcggaaatacaaagaaaaataaaaccataactcctggtatcaacaagacaaaaggaaaaatatgccaagacaaatataataacaatattcctaggcctataagaaaaaacaaactaaaaaccttcttgaggaaaagaaaaaaaaagtagaatgaacaaaaaacaagcataagattgtgrttaagaagagggactgttaagacaaactgcctggtttcaaatcccagttctaccacctatgaattggttggatgtaggc

SEQ ID NO: 820332 - DNA, 555 bp, Homo sapiens
tcaatagaaaaactaaaataccagtggtttgaactgcatgayattttatttatctctcatgaaaaataattcagcaaatagacaggcgggactagactggtggttccatggctgtctgggatccaggatatttctgtcttctctagcattggcttctgctctcactgtcccttagagctgctggagctctagccatcacgtctgtactccaggccaggggaaagaggaagggggaatgaatgaatagaccacagttttcagatgagtgtgtagcatttttaaaacagctttattggtatataattcaaatactgtataattcacatatatgagtgaccatcaccacaattaattttagaaccacttcatcacctcaaaaggaattcccctaccctttagctccccagacctaaccaaccactaagctacgtcctgtctctatggatttcccttctttgtatattttatggaatcctacactatgtgacctcttgtgactggcttcttttgcttgcattatgttttcaagggtcgctatggtggattttgcccccc

SEQ ID NO: 820333 - DNA, 555 bp, Homo sapiens
tcaatagaaaaactaaaataccagtggtttgaactgcatgacattttatttatctctcatgaaaaataattcagcaaatagacaggcgggactagactggtggttccatggctgtctgggayccaggatatttctgtcttctctagcattggcttctgctctcactgtcccttagagctgctggagctctagccatcacgtctgtactccaggccaggggaaagaggaagggggaatgaatgaatagaccacagttttcagatgagtgtgtagcatttttaaaacagctttattggtatataattcaaatactgtataattcacatatatgagtgaccatcaccacaattaattttagaaccacttcatcacctcaaaaggaattcccctaccctttagctccccagacctaaccaaccactaagctacgtcctgtctctatggatttcccttctttgtatattttatggaatcctacactatgtgacctcttgtgactggcttcttttgcttgcattatgttttcaagggtcgctatggtggattttgcccccc

SEQ ID NO: 820334 - DNA, 510 bp, Homo sapiens
tttggaaaatgggtggaatccaaagtaaactcctcttttgagagatttttaagggctgaaatcagtggacataccacatataacttttcatcttgaatacttgatgggtgtgtgcttttgctcatctaygaaagccaagattggctattaatatcaccatgccatcgaaaagcaagattactttgatttgggggattccgttttagccagttctggaagaatattgataggccctccaaaatataaccttgaactttagaaatgtacagaggggagaacgaaggtggggtgatcttgggcaaagttggatattagaaatgggacgatacttgagagtttggaacgtgggtactgaggaaaatgtgcaataagaagaacttgagaaaaagcattctggaatagaagggatgggttgagtgatgttttaaaccaagttccgaaacttccactattgcagctattgatgagtgttggctacgcttggggtgaaagtaagatgtgcttgattta

SEQ ID NO: 820335 - DNA, 547 bp, Homo sapiens
ttgaaccaatcagaggctggcaactaaacagtgttgatcatgtgacaggccctaggaagataggcttgagataaaaagaagagaaatttgagcatgacatcgcacacagcacacttgaagggaaatagcttttctgaaccaccacagccaaataattaacatataaagcagcaaacaacatcaataagcttggaagaggggatcagtatctagagttactacaatgtattttcctttagaagttttcaacaaaaaattaccagacatacaaagaagaaaactcagtcatacacaagaaggaaaaaagctgccagtaggctctacctttcaggaggcccagatgttggtcttatcaggcaaagacatcaaagtaactatcataaatatattcaaagaattaaagaaaattatccttaaagttatgatracaatgtctcattagataaagaagatcaataaagagatataaattataatagaccaaaatggaaattctggagttaataatagcccaaatacaaattttaatacagaggctcaacaacag

SEQ ID NO: 820336 - DNA, 618 bp, Homo sapiens
cagttcacctgatcatgaaacatttaacatcagccttcctctagtttgactttcttcagacctgtcttctactgaagaaccctctgtggttccctactgcctggggatggccaccatgaaatactgtttagccttaaaaaggaaggctaaacacacgctacaacatggaagaactttgaagatgttatgctaagtaaaaaagacgatattgtttgattccacttatattaggtacctggaataagaccagtcatagagacagaaagaataggtgtttccagtggcttgcggaagggagaaacaggaaggtaggaattaatgggtgtacagtttcacctggggaagataaaaagttcttaaaatggatggtggtaatggttgcacaatgaatgagaattaatttaatgccacaaaacagtatacctaaaaatggttacaatggcaaattttatgctatgtttattttaccacaataaaaagatgtttaaaatgctgaattttatgtcrtgtgtattttacgtctcccaccaaaaaaaccaaaagtgacatgaaacatcattgagcaatgcttgtctttgaaaagcagtggctcagagagcaagaagcacctggggatgt

SEQ ID NO: 820337 - DNA, 634 bp, Homo sapiens
tctcttttatttcttttcttttctttttttttttgagacggaatcttgctctttcatccaggctagtgtgcagtggcatgatctcggctcactacaacctccacctccygggttcaaacgattctcctgtctcagcctcctgagtagctggactacaggcgcctgccaccatgcccggctagtttttgtatttttagtagagacgggatttcaccatgtttgtcaggctggtctcgaactcctgaccttgtgatctgcccgcctgggtgtcccaaagtgctgggattacaggcatgagccaccgtgcccagcccatctctttattttcttgaccacagtggcatatcacagaagagagaggacgtgttcctattcctctggatttcttttatcttagcagtaaaacatattggtaacatgtttgacaagaagcagacttccacagcggctgtgcagggagacaagagacctgggttctcaccatgccatgtcatgcttttcccatgtgaccatggctccttctcaaaagtcaggctgcatcttctccatctatgagcgttggtttgtaacagtacctacagcactccttttcctgccacattgcttttaggaaatgctaataggagtgccagaa

SEQ ID NO: 820338 - DNA, 602 bp, Homo sapiens
ttgcaattttatgtcaaaagctagacatgatrtattaggttacaggaactgaggttaaaggccttttgtgtgagaacttatgtgaatccagctgaagttgggcatgtctaatgtgggctgtttgtaggtgccaaggctgcagattccttcggtgtcttggtttacatctcttcttggctcgggggcttccttttgcactgctcctcagagagactgtgttttgactctttcagccacaggccggtctttatactggaagcttgtttttgtggtggtgaggtgcagggccttcctcatgctgtggtcttcacaaaagtctcggttcctccatttccgatccatatccttggattcatgttccctattgaccacattctttaatgttttcctttaggtgagacagaaaagctggaggggtctggggaaaggcagtattccccaaccccttgctgaggtgaggttactgtgttgccctctggggatgtcctgcccctggagagtgggcttctgttagggagaagggcctgggagggtcataccagggccattcgtctcctgcccctgccaaggccatcagggcatctttctgagagcctcaccat

SEQ ID NO: 820339 - DNA, 602 bp, Homo sapiens
ttgcaattttatgtcaaaagctagacatgatgtattaggttacaggaactgaggttaaaggccttttgtgtgagaacttatgtgaatccagctgaagttgggcatgtctaatgtgggctgtttgtaggtgccaaggctgcagattccttcggtgtcttggtttacatctcttcttggctcgggggcttccttttgcactgctcctcagagagactgtgttttgactctttcagccacaggccggtctttatactggaagcttgtttttgtggtggtgaggtgcagggccttcctcatgctgtggtcttcacaaaagtctcggttcctccatttccgatccatatccttggattcatgttccctattgaccacattctttaatgttttcctttaggtgagacagaaaagctggaggggtctggggaaaggcagtattccccaaccccttgctgaggtgaggttactgtgttgccctctggggatgtcctgcccctggagagtgggcttctgttagggagaagggcctgggagggtcataccagggccattygtctcctgcccctgccaaggccatcagggcatctttctgagagcctcaccat

SEQ ID NO: 820340 - DNA, 461 bp, Homo sapiens
aacactttctgttcacttgattccctgttgtattgtacacttcatcttcaaatggcagcagcctcttagtcttcctcactcttcaagtctctctgtgaacgtacaagatacaattttgctaagcttcctgccactgtattataaggatcccatttcttctggtttccaataccaagtcactcacttccctctgagccctggctagtagtatccttcaagtacagatgtctactaacagtctgtttactgcaatttaggctttttctaaggtgatttctaagatttttctaaaattctccttattttcctcaacagtgtccctatttaatagtctgttcaaaggcacctaggagttttctagcatgctttccaaaattcttccagcctccactcactgcccaattccaaagccatttccatcattttcaggcatagagaagyagagggaatgccaagtactg

SEQ ID NO: 820341 - DNA, 635 bp, Homo sapiens
tattccaagtgtctttaaaacayagtaatttgactacacctccctagtagtgtacactctatgaacaaaaaaaaaaattgcaggactatcttaagtgggtttcagtaattatacttttgattggcagcattggtgttgttactctattgtgtctacataatgcaggataaagcaaatgagtaatgatgttgttatagttaggaatcaggactttaagggtaggagaaaagagacaatgtgaaaagcttaggcctgcacttgaattggaagtatcagcataatcctatgatacattttttctttaaaaacaaaacaaaaaaacccaacatattttctagctctgttctttgaaaaacctaagtaacaaggtacacataggggaagttttagcaatgatgttgcttagttctcaaattgaggtctctaataccactatccagtaaaaggaaccaggaccctctgatgatgagcttgattccatatctcaagcatgaaatgttcaagatgaacctggaatatcttgccattccagaaagcagggaagctatcagacagctgagtgaatgtcaaaagaactcagaagtcaagatgaaggggctcccattggtctaaaaatccaaaatgtgacaatttga

SEQ ID NO: 820342 - DNA, 344 bp, Homo sapiens
tgaatcaaaacaaaacaaaaaaagtcgtgtatgcatttatgttgtttcttactatttacctttcaatcctttgcactgacgccaatgaattgacatcagaaatctgtgctggagtcaacaatgaaaggtgatgwcataatatatattggagatgggaggaattcaggtttttgaaattcagtctcagaattattcatgggaaaatagttttctggacactgattctaaaattctttctaaaaagttaggtcttaagtaagctaattcatatttaccatattttttagatcaaggaattttgttgttcacataaattggtcatatcattgctccatgtggcaaat

SEQ ID NO: 820343 - DNA, 622 bp, Homo sapiens
ctgactctttccagcatctaactccacgtgttgcaggccttacctagctgtaaaacaggcaagctgtatagttaagagtcacagtggcattctatgaagcatttagcataatcacctttaamttgtacgacatttctgggatacatttcttttaataaattctttcataacttacacagacaatgtatgacatgtttagactttctgacttgctctaaacatccctcttcttaaacaatcagtcattttactttaggacaagaatttaccatacaacatcctttcttatatagtatctcttttctttataaccttctttgtatagctagggccatggctaattccatatatccccaggacttatttagaatttaatgtctccaaaataaattgaacaattttcaaaagttgaagcagtttatgaccttagagcatttagcaaacctcatatctgacctgcataatttagataaaaatgtctttattttatcaataatctttaaatctgtttttatttccccaaaattactaaagttacatgaactaaaaggcattacagttttattttgcttgcaagatattttatttaagtgcttatttttgtttaagtcaattcattaat

SEQ ID NO: 820344 - DNA, 634 bp, Homo sapiens
taaggccctaaagtgacagcacctcattgttcaaccaatgataaatgctattattgttattcttctgagtcaatgataggacttttgtcacatttatacataaaaggggaaagatcatttgatgtaaaacttaagactttggtaactgtattgacaaagcaaattctgggcagataaatgtttaaaagacttatgagggagatgaacatttttagcatagagaactggctttggttaacagtggatggcaaattagtcacttgcacataccctagttgatacttcccatttcttctccttactgcaggtgaacgccccttccactgtaaccagtgtggagcttcttttactcagaagggcaaccttctgagacacataaagttacactctggagagaagccgttcaaatgtcctttctgtagctacgcctgtagaagaagggacgccctcacaggacacctcaggacccattctggtaagtgtcaccaactccttgagaagaaaagtaaaacaggaaaacttagaagagtactattgaatgatagtaacatggctttgttatgtagtcrgtaatgaccaagacaatcttgttattggtgtacattaaataattgataaatcttgcaggatgcat

SEQ ID NO: 820345 - DNA, 610 bp, Homo sapiens
ttcttagatcttttgggtttcctctcagatctctgcggggctccattgagwcaggctgtttcaaaaatactgctgtccctcatgaatcaacttaagaaggctgtcttgcttatgaatccactgacattctaaagcaggtagaaggatggtggccatattctcgagggtcaggagagaagtctggccaggtgacagggacagtgccgaatggatgaccttagtgagctccactttcaagagactggctattagccttcaactcaagtttacagatgcagtactgtactgttcttagaaaggaaaaccatgcatttctaaactcataagaaataggtggaaaaaaaccagaaatatcatttgtttttaaataaaaatataatgatcatgtatattcccttcacataggaaaatcacatggagagtgaaaatatcagaaagtcgctaatgttgggcttagaactgatcaaagagttttgtgtacgatagactgcctaatggtaccaggcctgacagcctgcagtgtccccctcacatcaagaatgacctctgaaggcaatatttccaaagacttgcgggtaaggtactcctctgtcttccatattacgttgtg

SEQ ID NO: 820346 - DNA, 660 bp, Homo sapiens
tctgcacagctgggcacagtggctcatgcctgtaatcccagcactttgggaggccgaggcaggaggatcacctgaggtaaggagtttgagaccagcctggccaacatggcgaaaccccctctcttcwaaaatacagaaattagctgggcatggttgtgcatgcctgcaatcccagctactcaggaggctgaggcaggagaatcacttgaacccgggaggtggaggttgcagtgagctgagatagtgccattgcactccagtctgggcaacaagtctctcaaaaaacaattaaaaaaaaaaaaagcgtctacactttaactctatccctccttacattttgactttatgttctctcaatttacatattttaatatagcctatttttttaacaggttgctgtaggcattactacttttgtttttcatagatttgctttttggattttatgctagagctatgattgtattgcacaccacaattttagtgttagagttttctgggtttttccttatacttaattttgcttgttggttttgggccttcacacatattttctttttgcatattagtgtttttttctttcagattaaagaactccctttatcatttattataagctggatttggtggtggtggattctttgagcttttgtttgtctg

SEQ ID NO: 820347 - DNA, 586 bp, Homo sapiens
aataataatgtcctgaggaccaatggcagttctgatatttttggttttcagttatttgtttgaaatgatgtagcgactgttattagtcagttaatccaggtaagtatcatcttccacatcagtaacatttcttcggtgcctctttcttagtttcagtcatgatgataactggatgtgcaatgacctttataaaatgcagagttttaaatatatttaaagcattattactagtagtattagtattattgccaagaaaatttttaaaaaagcagaaactacttatctcatcccactgtactttcagaattctgggacagcagggattatgaaacgattgcacctccatgccttcactcacctcctatcccccaggtgagagttaaggtggtttagagaatggaattagaaggggtgacatcgattctctgtgctatctgttaattgtagaatgacccaaacaacaccacccagcaactgtaaaccttagtttgcttatatataatatgaggaaattagtgattgccattcctaccttaatyaaaaggactaagtttggaaatgagatgatgtgtgggcaaatgctgtg

SEQ ID NO: 820348 - DNA, 586 bp, Homo sapiens
aataataatgtcctgaggaccaatggcagttctgatatttttggttttcagttatttgtttgaaatgatgtagcgactgttattagtcagttaatccaggtaagtatcatcttccacatcagtaacatttcttcggtgcctctttcttagtttcagtcatgatgataactggatgtgcaatgacctttataaaatgcagagttttaaatatatttaaagcattattactagtagtattagtattattgccaagaaaatttttaaaaaagcagaaactacttatctcatcccactgtactttcagaattctgggacagcagggattatgaaacgattgcacctccatgccttcactcacctcctatcccccaggtgagagttaaggtggtttagagaatggaattagaaggggtgacatcgattctctgtgctatctgttaattgtagaatgacccaaacaacaccacccagcaactgtaaaccttagtttgcttatatataatatgaggaaattagtgattgccattcctaccttaattaaaaggactaagwttggaaatgagatgatgtgtgggcaaatgctgtg

SEQ ID NO: 820349 - DNA, 618 bp, Homo sapiens
gattacataattgttttgagttaattattcttggctacaaggatcactcacaagggggatgccagtctcgcgttggacaggcagttactgggcagatgtcctcgcaaaagtgtaagattgcgatggtctttgtgcaaggttatggtttttatagtcttttgttatggtttttgttatcaagcatttatgcacgagaatcctcttcatggtgttctctggctctatttgtcaggattgtttttggtattttttttgagatggagtctcgctctgttgcccaggctagagtgcagtgacgccatcttggctcactgtaacctctgcctcctgggttcaagtgattctcttgcctcagcctcatgactagctgggattacaggcacctgccaccacactcaggtaatttttgtattttgttggccaagctggtctcaaactcctgagctcaagtgatccgtgctcttcagcctcccaaagtgctgggattataggcatgagccactgcacctggcctgtttttaatacaagtgactccattttaattctgacaactttcacagtagcttatctccaaaggcggtgcacctcctaggatccsagcactttgggaggctgagg

SEQ ID NO: 820350 - DNA, 622 bp, Homo sapiens
cagaaagtctgacacagaaatgaagatgtgcgtttatacattttctgtctatcttgttactcattcagaggtgggttttctgggaagcgaatgacacctcaacttcagaatcctttatttgcacggccctgtccaaggccctagatgccctgtacctggttccctctttgttttcccaaagtctccacaagttgtacaagtttcaggtccctcagatatctctacttcacattagaagactcggctgggtgcggtggctcacgcctgtaatcccagcactttgggaagctgaggtgggtggatcacgaggtcaggagttttgagaccagcctggccaacatggtgaaaccctgtctttactaaaaatacaaaaattagccgggcatggtggtgggcacctgtaatcccagctactcgggaagctgagacagaattgtttgaacctgggaggtggaggttgcagtgagctgagatcgcgccattgcactccagcctgggtgacagagcgagactctgtctcaaaaaaataaataaggccgggcgtggtggctcacgyttgtaatcccagcactttgggaggacgaggcaggtggatcatgaagtcaggagatggagaccatcc

SEQ ID NO: 820351 - DNA, 601 bp, Homo sapiens
ttctctttcccttgatgactccagacacaggctgctccagcaacctcgtctcagcatggagaagacatgaagcagagccatggaagatccttgatggtcatggagtgtgagtggcaaataaatgtttgctgtcatcaaccactgagagtgtagggccatttgtttctgcagctaacctagcctattctgctgatgtagtgtgtagtgttttcacaaacacagaactgagcaccaaactatttaataactactatagcatgaatatttacccattggaacaaatgccagcggaggccctgctataccacgagttatcctttagttattggatcttggggatgaggtcccagggaaggggctgcagtcaccaggattgagaggaagagggacccaagaagctcagagcagccactgtttcatggggtacagaggtatttcagcacaactgtgcctccgcttcccagctcaatagcagatctaaatataggcacttcttagctaatctctttagcttttctcagcacaggactctcactttagatatgtgtcagycagagtttcttttcctttacaacattaaattcctcagccatgagtgttt

SEQ ID NO: 820352 - DNA, 667 bp, Homo sapiens
tggttctcaatcacaaaatacattaataacaataaaactatggaataaagggtcttaataactcttatcagtcctctttgtttgcttcaaaatattttatgcatcatattgttagctattagtatcaactaatcaaacatcttgcgaaaagtttattttcctttttttctgtgagtgggtgtgtgcacatgcatgcagcacacagaactgaatttttgatcaaccatttaatgttataatacatgaatgaagacagctattgttcttttttaacctttatcctccattcccagtcctctttccttctattccataccatctactatatttaatgtgtatctacacaattccatctccataccttcaattatgcttaatattaataagcaatatataccattgtttttatatactatttagattttatagaagtgttactatactatatacctcagtcctcaatttgcattttttcactgaacatgatgttgatatctattattgttgattaacacagttcttaataagtcctgttaattgctgccactcaacgaatataccacattttacttgttcagtatgactttgatggacatttcggtttttaactatttcaaaccaaaatttaatgaatattctttctkctaagtttttccacaatttggtt

SEQ ID NO: 820353 - DNA, 614 bp, Homo sapiens
aataagaacagcttgaaaaagataaacttcttgattgctgtataattagcaacaagtaaaagaatattatttcaaagtagcaggaggaaagagagcctcattatcttaagtaggtgacaattttcttcygacacatgatgtgattttcaaaaaatctgatgacaacctgattttctccaaataattgacttgctctttttgcatgaatgtgggcaaagaatttttcttttaatttaaagtcttttaagacatgttttatgaaaaacacggtagttgttctgggtttagttattcagatttgtggcataatctttcaatttagagtgctttcattattctttttaaatctcaggaatattttcttgaagtagaatgttttgtgtttgttttcttccattgccttggttttcttctttggggtgtgcaattatagatatgtaagaatttttctacctttgatttatattgttgtcctacagttttcttaattttagcttattttgtaacactgtcttattttcatgttttttttttatgggtgttcttcctgacatgctttcactgcctaaaggaactttattctgctccttattgtctgtcctctattgacctcc

SEQ ID NO: 820354 - DNA, 645 bp, Homo sapiens
gaaggaatattttcattaataaatggtgctgggaaaactggacatccaaaagcaaaagaatgaaataagacccttatctcacaccatttacaaagatcaactcaaaatgaattaaatacaaatgtaatacctgaagctgtaaaactactaagtgaaaacataggaagaaagctctataacaccggtctgggaaataattttttggatatgacctcaaaggtacagctaacaaaagcaaaaatagataactgaaattatatcaaactagaaagcttctgcacagccaaggagacaatcagcagaataaaacagacaacctacagaatgggagaaaatatgtttaaaccatacatctgataaggggttaatatgcaaaatatataaggaactcaaacacatcaatagtaaaaaactaagtaactcaattaaaacatgggcaaagcatacggcttaaagcaatctatagagtcaacactattcctatcaaactactaacatcatttttcacagaattacaagaaactattctaaaattcatatgcattcaaaaaagagcctgaatagccaaagcaaaaaagaataaagccggaggcatcacattactggacttcaaaataygctacaaggatacagtaaccaaaacag

SEQ ID NO: 820355 - DNA, 510 bp, Homo sapiens
catttgatgggtcctttatgaaaatgacaaactgggtaggatgaagatgagaggtcaggaaaagattcgttcttcccaaaagcattaatttcaaaatttgggcatacatgtttcattttacatgctcaaagttccttttgttaaaaaaattatacaaatattttctctctcctaatttatgtacagagaaaaacaaggcaatgggtattaatgaaccaaaaggggaaacccagaagtgacaatggaaataattacaatggcatacatttatctatttaaaactaggaaaggcacacaaggaaaagaagtaggaagtaggaagaagggtgccgggtgaggcttggaggcagcttagagaagaacgtggggaggatggyagagaaactcaatccactggtctgattagaaaccagcactgagaaatgcaacagtaaatctacacccatgataaaggctttggtccaagcttatgagaatttattctttttgggggatgtggagtcgtcattc

SEQ ID NO: 820356 - DNA, 607 bp, Homo sapiens
gtaagttagaatcactagattttggcaggctttctgggtgctctacgcttagcctaggcaagctaaataaaaaagcatcatatctaaggtagtagtaagtggattctcyaccaaaagacatatagaacactgcaactttgaattacctaacaattactataacaaactgtgaataagtaatccactctaatactaataaccactgaaagttcctttagtatcagtctatattcatatccattgcataaaattacagtcacatcctcatactctttgaaacaactttgcccaaatatttttacaatgtcttaactgagggctttcaatcctttccttctacagtcttcagtgctgaccctctttctccattgtcctactcccccaggccccttccccgaccatttcaaaagcataacatcagaaaagtaatgctgaaacacaaaccaaatgccttatggtcaatacaagttcattgcgtaaactagggtgttggttaatgtgcaataattaagtgcaaagcctcagaatgtctcctgataatcctgagactcgagaaatcatctgaacaaaagagactaacaagtgaagagtccagtgtctcacccag

SEQ ID NO: 820357 - DNA, 613 bp, Homo sapiens
atattgtttttgatttacagtttttctaggtaaaggcagctctaatggtttccatttggccttttccaccayaatagccctcaccctaccactcagggagccaatgtggtggttctgccagctgctaagtatgtctatgccaattgtgcattctggcactggggaaatgaccacacaatgagtccggggatccactggacccattgtaagttggacctgagctaaaactccattaatttcttggcctccctaagcccctactgtaaatggaggaccacaatgatgttttgagtcccctggaatcaacatcagctcagagccagtgtccagtagtccccaaatgcctgattatttatctttctccaatacacagtcaccctggtaaaaagccacagttctctttggggaaggatgggagaaagtttcactgcataaattgtcccataatgtagtggggtccttactgaaagggacctggccttcccttcattcaagaggttctgggtctctaaactggctgaagtctggaaattaactgaggggctgtgattctctgcttttttaattcaaatttgtcttttgtccatttgacatagaagttttctgcttgtat

SEQ ID NO: 820358 - DNA, 613 bp, Homo sapiens
atattgtttttgatttacagtttttctaggtaaaggcagctctaatggtttccatttggccttttccaccacaatagccctcaccctaccactcagggagccaatgtggtggttctgccarctgctaagtatgtctatgccaattgtgcattctggcactggggaaatgaccacacaatgagtccggggatccactggacccattgtaagttggacctgagctaaaactccattaatttcttggcctccctaagcccctactgtaaatggaggaccacaatgatgttttgagtcccctggaatcaacatcagctcagagccagtgtccagtagtccccaaatgcctgattatttatctttctccaatacacagtcaccctggtaaaaagccacagttctctttggggaaggatgggagaaagtttcactgcataaattgtcccataatgtagtggggtccttactgaaagggacctggccttcccttcattcaagaggttctgggtctctaaactggctgaagtctggaaattaactgaggggctgtgattctctgcttttttaattcaaatttgtcttttgtccatttgacatagaagttttctgcttgtat

SEQ ID NO: 820359 - DNA, 613 bp, Homo sapiens
atattgtttttgatttacagtttttctaggtaaaggcagctctaatggtttccatttggccttttccaccacaatagccctcaccctaccactcagggagccaatgtggtggttctgccagctgctaagtatgtctatgccaattgtgcattctggcactggggaaatgaccacacaatgagtccggggatccactggacccattgtaagttggacctgagctaaaactccattaatttcttggcctccctaagcccctactgtaaatggaggaccacaatgatgttttgagtcccctggaatcaacatcagctcagagccagtgtccagtagtccccaaatgcctgattatttatctttctccaatacacagtcaccctggtaaaaagccacagttctctttggggaaggatgggagaaagtttcactgcataaattgtcccataatgtagtggggtccttactgaaagggacctggccttcccttcattcaagaggttctgggtctctaaactggctgaagtctggaaattaactgaggggctgtgattctctgcttttktaattcaaatttgtcttttgtccatttgacatagaagttttctgcttgtat

SEQ ID NO: 820360 - DNA, 592 bp, Homo sapiens
ttgattttgctgaggattttaatcataaagggatgctggattttgtcaaatactttttctgcatctattgaaatgattatttgatttttatttttaattttgtttatgtggtgtaccacatttattgacttgcagatattaaaccaaccctgcatctctggtatgaaacctacttgatcatggtggattatctttttggtatactgtaggatgttgttagctagtattttgttaaggatttttgcatctataatcatcggggtactgatctgtagttttcttttcttgttatttcctttcctggttttggtattagggtgatactggcttcatggaattaggaaggattctctttctctatcttgtggaatggtgttaataagattggtaccaattcttcttcagatggctgatagaattcagctgtgaatccatctggtcctggtcttttttttgttggcaatttttttaattaccatttcaatcttgctgcttgtttttggtccattcagagtttctatttcttcctkgtttattctagcagagttgtatatttccaggaatttatacatctcctctaggttttctagtt

SEQ ID NO: 820361 - DNA, 593 bp, Homo sapiens
aatagatgttacacaatttagtttttctgcttgaaagggaactaatccatcaacaatttcaaggaaatctgagtttataaggaaatacagcaatgaaaatacaacgttaactacatgtggaaacataaatatttttgtcaacctgtgcattacaagttagcttgtgtaaagccatatgaggctgattccacacgtgtaactaaacatctacttagataggtataactaacacaagttttataaaaatctaggttgattatacttgaaaacattttaagagaaggtttatcatgatatactttgaaataaaaggccagaagaagttagtctttccatagttgtgatttatgctggaaggagtaataaatagaaaatattttatcaacaacaaaaacaagtaattatactagtatatagaaatgcaaaaattgctaacatttaactttgccacacagactagatttactaatgaaagacagacttaggttatttatataacktaaaggaaaggtcaatataaccttcagaaataaaattagaaaagtacttttgaatttgactgaaatactacagcaattgcaaacagaatgatg

SEQ ID NO: 820362 - DNA, 636 bp, Homo sapiens
gctttgtaaatctcttcaattttatggagtatagaaagaaaactaattgctaagtgaggtcacagcatttctctctctgaagcactaaacattcataagcttagtatatttttttcaagakaaaagtaaactacatttgtaaatgagatattattatgatgtaattattattctagctttttataagacatgtttactgggcaactatcaaacaaatttcattactgtccttttcagccaaataaaatggatttattaaaaaattacaatgatcaaccattttagtaatgcaatgtaaattagtttttatataaatgaggactttcacaaggccagaattaaactctttataaaatttatgtaaagtgatttggtaatgtaaaaattgtatcatcttaattttttaaaatgtggaattaatttgaattttacaaattatatttcttttggaagataatttttctatttactagttttatcagtacatgcagatatactttacaatgaagtaaataacatcgcatacagtttttgacataaggaaataaaaagctgtttccattgctccctaattattattgttgtgattctaactccaagtatggtcaacaagaacattgtcataatattttagga

SEQ ID NO: 820363 - DNA, 524 bp, Homo sapiens
ttttagtaacttctttatattgacaaaattatatatatttaccakgtaaaacacattttgaaatatgtgtattttgcagaatggctaagttaacatatgcactttccatatccttatcatttttgtggtgaaaacacttaaaatgtactatattcaagattttctagaacacagcacactgtcattaactagttatcatgttgtaaaataggtctttcaaatgtattccttccatctaagtgaaattttgtattctttgataaacatcgccacaacactttctccacccctacctgccagtccgtggtaaccactattctactttgtgtttctttgagttcaaattttttaagttctgcatacaagtgagatcactcagtatttgtctttctgtgcgtatcttatttcacttaacatgctgtcgtccaggttcatctatgttgttgcaaatggcaggagtttcttctttttttaaggctaaatagtattccatcatataccacatttttttacccattcatttg

SEQ ID NO: 820364 - DNA, 524 bp, Homo sapiens
ttttagtaacttctttatattgacaaaattatatatatttaccaggtaaaacacattttgaaataygtgtattttgcagaatggctaagttaacatatgcactttccatatccttatcatttttgtggtgaaaacacttaaaatgtactatattcaagattttctagaacacagcacactgtcattaactagttatcatgttgtaaaataggtctttcaaatgtattccttccatctaagtgaaattttgtattctttgataaacatcgccacaacactttctccacccctacctgccagtccgtggtaaccactattctactttgtgtttctttgagttcaaattttttaagttctgcatacaagtgagatcactcagtatttgtctttctgtgcgtatcttatttcacttaacatgctgtcgtccaggttcatctatgttgttgcaaatggcaggagtttcttctttttttaaggctaaatagtattccatcatataccacatttttttacccattcatttg

SEQ ID NO: 820365 - DNA, 528 bp, Homo sapiens
ggcatgttatggggtacagtwtgatgagatcttattgtttattattatttttctacctgcttaaaaaaattcacacatttctaccttcttatggtggatatttagatcactgcttttctacccaggcattttcctttctactacaggcacttaaatctaaaaattttactctaaacaccattttagcagaacactaaaaagatcttctaatttttctttagatttcttcattgagccatggattattacagatactcagagtatatgtcttttctactgatttctaaatcaatgttgttgtgctcagagaatatactctgtattattttgattctttgatcttatgttttatgacaaagcattttgtctattttggtgaatgtttaatgcacactcgaaaataatatatattcttcaactgttagatgtagtgttctatcaatgtcaattaagatttatagctgttcaaaaatatcatgtctgcattgatttttatgagtcctatccatttttgagagggtagtgtta

SEQ ID NO: 820366 - DNA, 678 bp, Homo sapiens
gcataaaaaaattatgggagaaatgtcaacacttattcctgsaggttatgtagagtggtaagctatttttttctgaaaggagaagatttagggaaatttagccaagcatgaaaggtgatttgttccaaatcctttcatacatgtacctgagtaaacccaaacaatgtaagtgtcttctggctggttccaaaaggaactaaaatttatctgaaactgagaccataactcccaaacctggtattcttttagtacttcttatcagtataatgtcacggccatttatccaatttatgtgtaagacagaaaccgaggggttatctttaataacttcttggtcttcatttccttcaaatccagtgagtcactgagttgcatccatttcatcttccacatgtctcttaaatctctctgcttattcccaattcttctgtgatttcctctgtccaggctatcatcacactggattactactctaacccactaactgttcttccctgcatgcagtcttgatccactccaagccgtttcagaccattttctactccaaagcccatcttgctttgttgttgtcattaatgcagatctgtttatgttattttttcctttctcaatctccttaaaaatctccaaagtatgttggatatctgatcatgtctgtccagaaaatttctatcctcc

SEQ ID NO: 820367 - DNA, 610 bp, Homo sapiens
aatcattagagaaatgcaaatcaaaactacagtgaaatactgtctcacgccagttataatgstgattattaaaaagtcaagaaacaacagatgctggtgaggctgtggagaaataggaacacttttacactgttggtaggaatgtaaattagttcaaccattgtggaagacaatgtggtgattcctcagagacctagaaccagaaatatcatttgacccagcaatcccattactgggtatatacccaaaggaatataaatcattctattataaacatacacgcatgtgtatgttcactgtagcactattcacaatagcaaagacatgggatcgacccaaatgctcatcaatgatagactagataaagaaaatgtgctatatatataccatggtatactatacagccacaaaaaggaatgggatcatgttctttgcaggaacatggatagagctggaagccattatcctcagcaaactaatgcaggaatagaaaaccaaacatagtatgttctcacttataagtgggaggtgaataatgagaacacatggacagagggaggggaacaacacgactggggccagtcgggggtaggggagcggggggagggag

SEQ ID NO: 820368 - DNA, 635 bp, Homo sapiens
cctaggctataaacctgtatagtatgttactatactgaatactatatgcagctggaatataatggtaattatttgtgtwtctaaacatagaaaaggtaatgcattgtgcaaagacattagaacagttacatcactagatgatagaaaattgtcagctccattatcatcttatgggactaccatcatatatgcaacccaccattgaccaaaatgtcactatgtggtgcatcactgtatttatagtagagaaccattagaaattatataaagccccttcccccgaacagtggacttattaaataaataatagtataggcttacgatgcagccattaaaaataacatttttggctgggcatggtggctcacacctgtaatcccagccctttgggaggccgaagtgggaggataacttgagcctagcaagttgaagctgcagtgagccatgatggcacgactgcactccagcctgggggacagagtgagaccctgtctcaaaaacaaacaaacaaaataaacttttgctgggttccctgtcacatcagaaggtaagtataaaagacttctaagtcatgtcaaaagagactcaggaataaacctgaagatgcttccatcgatcaaagaggtgaggaagag

SEQ ID NO: 820369 - DNA, 623 bp, Homo sapiens
ggggagtggggagggatagcattaggagatatacctaatgtaaatgaygagttaatgggtgcagcacaccaacatagcacatgtatacatatgtaacaaacctgcacgttgtgcacatgtaccctagaacttaaagtataataaaaaaaaaaaagaaagttctgctttaataaagacatcaaaaaaaaaaaaaaacattagctgggcgtggtggcacatgcctgtaatcctggctatttaggaggctgaggcaggagacttgcttgaactcaggaggcagagattgcagtgagtcgagatcgtgtcattgcactctaatttgggcaaaagagtgagactctgtctcaagagaaacaaacaaacaaacaagaaaaaacaaaaaaaatacaggtgtaagaaacattatttacattttacatgcctgtttggcagattaacactaaggcaaggatggcaaaacaaatcagagaacttttgattcaacaaatgaatgcaatgaagctacatttctaagaaaactgtattatttggctaaaagggaaattaagcactggactaagagtatagagaagggctggcaaaggaaaccaggaaggggaaaaaccaaagggtaaatttcagag

SEQ ID NO: 820370 - DNA, 595 bp, Homo sapiens
gacaatcctatctgtaatggagacagagaaatgtggtttttagctgggcatgttgctatcttttatattaatgctatataggtcagttacatagaaaatgggtagaatgaatattaggcaagcaattagtggtctcttgtcagacatctttaatgatcctactattcacctagtcatcaagccagagacttggggattatctgagactcttctctctccctcactgcccatatccaaggttagtttattatactttctaaatatctttcgcatttggaactccacttttttctctgatgctctatgcctagaatagtacatgacacagattgttgacatttataaatgtttgtaaaattctgattcaatagctacttttcctacatctgggggaagttatctcagtgaactttacatcagagtcttcaaacaatattcaaagaacattcctattatattataaagtgtaatttctgaagttctttaagttacaaagcaatttcctrttctccgatactagtgggaattgaattagttattcagtttcaacaatatgaaacgtactcccctctctgatatttaatgtttcttaatt

SEQ ID NO: 820371 - DNA, 563 bp, Homo sapiens
ctattcaacaaatggtgttggaacagtggctcatcatacacacacacacaaaaaaacttcaatccatacgtcacaccatattacaaaattaactcaaaatggatcacagacctacatgtgaaagaaaatcttaaaagttctaaaagtaaggccgtgtgcagtggctggcacccgtaatcccagcactttggaagcccatggtgggagaatcctctgagcccaggagttcaagaccagtctgggcaacatggcaagaccccatctctacaataaataagaaaataaaaattagccaggctcattcctgtagtcccagctactcaggaagctgaggtgggaggattgcttgagcctggatggtcgaggctgcagtgagacatgatcatgccattgcactccagcctgagcaacagagcaaaacctggtctcaaaaaaacgttctacaagtagacataagaaaaaacatttgtgaccarttaaggaaagatttcttagatacaacaccaaaagcacaatccataaaagaataacctgataaactgaacttcaccaaaattagaaac

SEQ ID NO: 820372 - DNA, 589 bp, Homo sapiens
gcgggacggagttggggccggtggggaggggcatgaggcgctcgcaggcasctcgagaagcaggccccgaccgctcgccgacgaagcctcgtccgggcctcctgggagcggggtggcaggtaccgtggcgcctcctcgcgttggtcttgctggttctcggcccccgaagcggagcgacggagacacagctgtggaagcatctggatccgctgcccaggtccccgagcttcccggaacccgaggccgcaggacactgaaggctgccattcccgagtaggtcacgctggacgccaccctaagctgggcccagaggctcccgtccaggagggctgcagtcggcgcagacaccgcgcgtgtggagacgggagacccatcctcctcggccgttccgagagtaggcgcggccggtcagattcgatgcagagccgaatgcgggagaaagggcaaaacgtacctcaaaccagacaaagccttgtgagcttcaggttctcaaataccccactcacccagaccccacatctccagtcagcccctcgcacccaaatcccattcggagcaaccgaactgcacgtgggactagttcttggga

SEQ ID NO: 820373 - DNA, 589 bp, Homo sapiens
gcgggacggagttggggccggtggggaggggcatgaggcgctcgcaggcacctcgagaagcaggccccgaccgctcgccgacgaagcctcgtccgggcctcctgggagcggggtgkcaggtaccgtggcgcctcctcgcgttggtcttgctggttctcggcccccgaagcggagcgacggagacacagctgtggaagcatctggatccgctgcccaggtccccgagcttcccggaacccgaggccgcaggacactgaaggctgccattcccgagtaggtcacgctggacgccaccctaagctgggcccagaggctcccgtccaggagggctgcagtcggcgcagacaccgcgcgtgtggagacgggagacccatcctcctcggccgttccgagagtaggcgcggccggtcagattcgatgcagagccgaatgcgggagaaagggcaaaacgtacctcaaaccagacaaagccttgtgagcttcaggttctcaaataccccactcacccagaccccacatctccagtcagcccctcgcacccaaatcccattcggagcaaccgaactgcacgtgggactagttcttggga

SEQ ID NO: 820374 - DNA, 495 bp, Homo sapiens
ataagacagcacagaaagacaaacatcacatattttcacttacgtgtgggacctaaaaataaaaataattgaactcatggagttagagaatacaagaatggttaccagagggtgggaagggtagtgaggtgcggtggggaggtgggtatggttaatgggtacaaaaaaaatagttagaatgaataagacctaatatttgatagaacaacatagggactataatcaaaacaatttaattgtacatttaaaaataactaagagtattattggattgtttgaaacacaaaggataaatacttaagggatggataccccattttccatgatgtgtaatacattgcatgcctgtatcaaaacatctcatgtagcacataaatatatacacctgccacatatccaccaaaattttttaaaaaataaaaattttaaaaagataactgtgaaataatgcatatgttaataagcttgatttagtyactccacaatgtatacatg

SEQ ID NO: 820375 - DNA, 582 bp, Homo sapiens
tgtaatagatctgattatatgaggtgtgaaagtcaatatgggtaatttttctttaaatgcattttaagaacaaacagcacttaaatgaatggtggcacaacagggaaaaggactattttaatgtaaaacaatattaaatcagcgtatgatgaggttgagtgctgaaactgtgaaaactgataatttagaaattgtaaatgcttttattcaaaactgtaaaaaggcaccaattaccctagtttgctggaatcacagttcttatgaataatagcatctactgatgaacatgatcatgaattaaatgttttaaattttaaaacaattttaaaatagaataattctgataaaatcagaatataaaataatgaagaccaaatccaattgacagtgattacctgttatttggctgaagaaaaccaggaatgctcataaccagcagttcccaagcaccttgtgcaggtgactcaggggctgctgwggagctggttaaggagaaggaggatatgcccagtgactgggaccctgccacagcatcaaacagataagctcacttctgtctgttttactgtacattgagaatat

SEQ ID NO: 820376 - DNA, 582 bp, Homo sapiens
tgtaatagatctgattatatgaggtgtgaaagtcaatatgggtaatttttctttaaatgcattttaagaacaaacagcacttaaatgaatggtggcacaacagggaaaaggactattttaatgtaaaacaatattaaatcagcgtatgatgaggttgagtgctgaaactgtgaaaactgataatttagaaattgtaaatgcttttattcaaaactgtaaaaaggcaccaattaccctagtttgctggaatcacagttcttatgaataatagcatctactgatgaacatgatcatgaattaaatgttttaaattttaaaacaattttaaaatagaataattctgataaaatcagaatataaaataatgaagaccaaatccaattgacagtgattacctgttatttggctgaagaaaaccaggaatgctcataaccagcagttcccaagcaccttgtgcaggtgactcaggggctgctgtgragctggttaaggagaaggaggatatgcccagtgactgggaccctgccacagcatcaaacagataagctcacttctgtctgttttactgtacattgagaatat

SEQ ID NO: 820377 - DNA, 709 bp, Homo sapiens
gtttatttaattacagaacttcttggatcctataatatgctaatacacattgtacacctaaaaagagggggatattatgcacagcatttccttagatcagaaaccatattaaamcatctaagtgtagaaaatatcttaacatggagatacgatgaataaaaagaggtagctactttgggagatataacatcaacaataacaactacatacaaatgcctcctaggagcctcgcagtctaaagtgtagtaccttattttctaaggtgtagtactttatttcatcttcgcgacaaacctatgacttaattctgatccccattttactttgaggaaaatgaggtatacaaagattaaatacattgccaaaggactatcgttagaaagcagtcaagccagaattcagacgcaggcaatctggctccagtgtccatgctcttaaccactatgctacataacttaaagaaattctcactcattcatttcaaaataaattattatttggatattaagcaagaatgaaaaataaacacgatgattaatttaaacagaaggctaggaattttaaaagtcttgctcaattaaacttgggatgggatcaggcagtaaaaactacataattgcaattatgaagtatacaatcatgataacccatagttcactaaaattaagaagcatttcaagcaaagaatatgcatcccaatttcctaatc

SEQ ID NO: 820378 - DNA, 625 bp, Homo sapiens
tagcccaatctatacttctcaactcccaactcatattcacacctacttaacacctgcacttggatatttaacaaccatctcaacatatgctgagatgtgtggtatatcttgtatatattgtacatgttgagatgcattgtgtattccataagacggaattcctgatccttcctcccagcagatgttccattcacagattgctctcatctcagttgatggcaactcaatcttttcggtagttcaagccaaaaaccttgtggccatcattgactactgtttctcatactccatatccagttctgtcagtaaatcttgttgcttcatctttaaaatatacccaagatccaactactttctgacgcctctgccgctatcaccttgatccaagtcacaattatctcttgcctagaataatgcagtaccttcccaactggtccccctaatttaattattgccccctcctgaagttgattctctacacattattgcaatgaatccagctgccaatattttayactttaatatgtatatccttaaataatacacaatattgtacatgtgtacttatacatttgttagtatttataccgcacataatgtctacgatatgcttcacatgtagaca

SEQ ID NO: 820379 - DNA, 625 bp, Homo sapiens
tagcccaatctatacttctcaactcccaactcatattcacacctacttaacacctgcacttggatatttaacaaccatctcaacatatgctgagatgtgtggtatatcttgtatatattgtacatgttgagatgcattgtgtattccataagacggaattcctgatccttcctcccagcagatgttccattcacagattgctctcatctcagttgatggcaactcaatcttttcggtagttcaagccaaaaaccttgtggccatcattgactactgtttctcatactccatatccagttctgtcagtaaatcttgttgcttcatctttaaaatatacccaagatccaactactttctgacgcctctgccgctatcaccttgatccaagtcacaattatctcttgcctagaataatgcagtaccttcccaactggtccccctaatttaattattgccccctcctgaagttgattctctacacattattgcaatgaatccagctgccaatattttacactttaatatgtatatccttaaataatacacaatattgtacatgtgtacttatacatttgttagtatttataccgcacataatgtctaygatatgcttcacatgtagaca

SEQ ID NO: 820380 - DNA, 586 bp, Homo sapiens
aaggcaacctatgaattggaaaaaatatttgcaaaccacatatctaatgaggggttaatatccaaaatttatgaagaacacttataactcaatagcagaaaaacaaataactcaattaaaaaatagacaaaggaggatcatggtggatgggaggcaggactagatttcagctcccactcagatggacagagtagcatgtggagtctcgcatcatgaatttttgctccagaactactgcaggaacaattcaggaaagccaagagaacccacagacgagatcgctcctgcaggacctgggagacacaccaaatactgtgagtgcccaaactgtggaagtgggaaagggggactgtctgcccccaaacacacaccctcacttgggaacttgaaggtctagatcatgggagaagattctgaccttacctggagctgagtcaatttagagagctgagtgaaatacaggaatagaggaagtggtgggaaaagccctttgggatctctgggttcccrgggaagccatttctgacttgtctcatagggctacctggagagggctgtcagtggaactgggaaaagggcaaagaga

SEQ ID NO: 820381 - DNA, 367 bp, Homo sapiens
cctgtctttctgtctctctgtctctcttccttgctccctttctttccctatttctctttccttctgttgctacctccatccctcccagactcccagaacaggcacagagaagactcaatccataatgagaaaaataacatttctctgaagaaagcataacttgcagagatccaacgttgtctacaccaaggcaattttatatgttatacccagagcagtttagctctttgtagctgctagcctcaaatagttctacttcagaagagggtctttatatttaaaaactgaaagggctattasgttgattttcccagaacacaagcaaaaccctgctctcgaaacagcattcaaagtgtattaaatgttg

SEQ ID NO: 820382 - DNA, 442 bp, Homo sapiens
tctcttatagtttatgcacttttctatgtgtgttaactataattaaaaatataatgttttctcaaaaacaccatgttttccattgcaaattacaataaactaatttcatccaagtcattcctttttcctccaatagcttctgcctcaaaataaggaggaaaaaaaatgtacctgtctaaggtaagcataatcagtattatgcaacccactttctgtgtaagaaaatttacatttcttttaaaaagcctaaaataaaagaagacacatttaatctcatgtcctttagatccatttgggcttcttgcaccaactcttgccaagagtcaaacatatctatgatggctgtgttacatgtatgtctstgtgtgtgtgtgtgtttatgtgggtgtttagttttatgttatcttttattaatgattcttcccagcagctcagttaagaa

SEQ ID NO: 820383 - DNA, 625 bp, Homo sapiens
aacctttttggcaccagggaccagttttgtggaagacaattcttccacagaccgggatcagtggatggtttcaggataattcaagtgcattgcatttattgtgcactttatttctattattattgcattgtaatatataatgaaatattaataattatacaactcactataatgcattatagaatcagtgagagtcctgagcttgttttcctgcaactacatggtcccatctggggtgatgggagacagcaacagatcatcaggcattagattctcataaggagcacgagacctagatccctcacatgcgcagttcgcaatagggtttgtgctctcgtgagactctaaggctgctgctgatctgacaggaggaagagctcaggcggtaatgctcactgcctgaccactcagcataccctgttcagcctggttcctaacaggtcacagaccactactggtctatgatccagggtttagggacccctgctataatggaggtcacagaaaaaatggagacttgcttccctttctttcccaggttacagaatcttcacaagtgctagtagaagcaagcataggattcagtaascaaatttctaaaagaatatgaaatgtaaaaagggtg

SEQ ID NO: 820384 - DNA, 595 bp, Homo sapiens
aaggcagccagaaagagtcctcaccagaacccaactgcaccagcaccctgatctcagactgccagccactggaagtgtgagaaaataaatttcccttgttgataagccacccagtctgtggcaatttctttttatggcagcccaaacagactaatgcagcctgttgaccaagcacttacagcctgacttatttttcccctgtaatactgtgatgcctcacaatgcgaactgttcatcagttgtctttataactccagtttctatcagagtaactggaatatagtagaaatctaacggattggcattgagtgttagatgactgaataattaaatgattgaagaaagatagaaaaataaacatttaaaactgaatttttacaattcagacatacacaagtttacagatttttaatttggggcaaacgatttctgatatccatctatatctatatctacatccatatatcaaatctgtgcaactttccaagttgcagagaacttacctgtgtgatctggatggtgtatagaatawcacgagcatttgtgaagtgattttgctaaaaaagatgagtttttccttgagagtcaatcagtt

SEQ ID NO: 820385 - DNA, 303 bp, Homo sapiens
aactgctagaatatttctgcatggtaataacgcaatgaagtattatatttttaagtattaaaggttcgtaccctttggaccagaatttctatttcattttaagaaaaccgtgatacaaagcaggcaaagatacacattcaagaaatcatcctgacattgcttacaagaacactaactgtgaatgcaacatgtgtgcccaataatcagggtattgttaaatcattgccttgcayccatgcattggtaaattatgcaaccattaaaatagttctaagagcaatgtctattgatgtgggaaaatat

SEQ ID NO: 820386 - DNA, 615 bp, Homo sapiens
atgtatatattcaggtatttggagatttttccttctggttaggatataaaacatcatagagagagacatacacagcctaacagtgaggaacaktcagatcgtctctaatatcataggctcctacagcctgtgggaacactgaggacccagaagaacctaaatgagccagagtctagaaggtaaggagcctgcccccaaaggaagagacgcaagctgcatcccatgcctggtggggtgagtaggaggtgaggaggtgagaagccccagcagggtttcttacaagccctggtggccggtggccaccttgatggactggaatcccaggggatgccggcatatccactagccagggtttcaccacaagccggggtgtcacctgcagagggacgagcacacttcatgcacacaatggcctggggaccctcaagacatcctgctgtgcaaaaaaaagtcgacgtaaagaacaccaagagtggctgctttgaggtcgactgcgaaggggcccagagaaccttgtgctgtggtttgcagggatgcccacgcccagggtggccacatggtgttgtgtgtaatgaacaccttagcaagaataaagcatttgggcaacctgcccga

SEQ ID NO: 820387 - DNA, 738 bp, Homo sapiens
aacatggatagacttaatgataagtgaaaaatcagacccaagatattatgtattctatgattttccaactctgtcaaaatacctgtgtatttgaaaaaaaaaacagaaagaaaatacatgaaaatgatagttgtatgcaaggtggtgagattatagatattatttcctatattttgcacattttggcaatattgtatgcttttacaccttgtggcaaatgtctgggtttggtaagatataatgtcaaattagcattaatactttatttttctaatcataacgcgagtgatttttttaagcaaacatcacaagtattatatacattcaaaatgactgctgaccctttgaaaggagttgcctggtgtagtattgccattgcttagcatattttctcaactgcactcttgaagagtttaaattgagtggttctggcaacaaagatgggaactttggggctggggacttcattcaagaggagaataagattttcctgcatcaggtggggtgctcatgagacatccaggtattgatatcttcagatgcagaatttaactaaggttaactcttgaggtttcttggacatgttgttttcaaaaataatgataaaggcattctctttctactatttmtttttcttaccccctgcatccccctatttaggttttcactggaattttcacagcggaaatgttcctgaagctcatagccatggatccctactattatttccaagaaggt

SEQ ID NO: 820388 - DNA, 359 bp, Homo sapiens
tgtacgtaaatccctgagcacagtgcccattagacagtaagtagcaattaaccaaaggtcagaagtgtcaaaaaacaaaattaccacaaatttttaaatattttaattggctttatttgcaattttagaatcaggcaacacttcattccataaaatagaataattgttctgctgagctgagcagaggagattggtttatagacaaagaaaggctgaggaaagcagaaacaaaacaaaaagcmaattggtcatttcaaagcgactttccttgtaaaaaaaaaatgttaaagcagaggggacttccttatgctggctgggactggtctgtttggggatttggccattctctctctctctcc

SEQ ID NO: 820389 - DNA, 545 bp, Homo sapiens
agtcttacctaatttttaccggtctctaagatcaattttgtaagagtattttttagggtgtgattcatgtgttctacccatccagagctctggggtcgataggcacaackgagcttccattgaatgtttaatgccttactgactgactgagctatggacgaggtgaaggccgatctattatcagaccccatggcagcaggcagcccatgttgagggatgatttcattgagtgaaaacttaactaccgtggtggcagtctcgtttttggtggcaaatgcctcagtctatccagaaaaggtgtctactagtacctgaaggtatttgtaccctgcccagtgtggttttatttctgtaatttcccacctttctcctggtgagtctccctggaggcggtcgcctgagctgggtttaggaccttgcttagtgtttacctgggcacaagccgtacaccagagagctgcttggttaactaagtcctgaaggttggggatcttgaaacggctccttagaagctgggccagttttactcctccttcctgattttt

SEQ ID NO: 820390 - DNA, 545 bp, Homo sapiens
agtcttacctaatttttaccggtctctaagatcaattttgtaagagtattttttagggtgtgattcatgtgttctacccatccagagctctggggtcgataggcacaactgagcttccattgaatgtttaatgccttactgactgactgagctatggacgaggtgaaggccgatctattatcagaccccatggcagcaggcagcccatgttgagggatgatttcattgagtgaaaacttaactaccgtggtggcagtctcgtttttggtggcaaatgcctcagtctatccagaaaaggtgtctactagtacctgaaggtatttgtaccctgcccagtgtggttttatttctgtaatttcccacctttctcctggtgagtctccctggaggcggtcgcctgagctgggtttaggaccttgcttagtgtttacctgggcacaarccgtacaccagagagctgcttggttaactaagtcctgaaggttggggatcttgaaacggctccttagaagctgggccagttttactcctccttcctgattttt

SEQ ID NO: 820391 - DNA, 238 bp, Homo sapiens
ataaatctttattgtgtaagccactaaggttacttttttaatggcaactagcattgattattgtaatttatcagcaaaaatamatttgtaattcctagactagtttatttgtaattttattttaggcagaaaaaaagagagtatgtagactagattcatattacttttttctgagttctcctgtcagatttttttaagcataagcctgtgttataaatctgtgtggtcttggatatta

SEQ ID NO: 820392 - DNA, 552 bp, Homo sapiens
ttaatattttgagatacgttccaccgagacctagtttattgagactttttagcataaagggctgttgaattttgttgaaggtcttttctgcatgtgttgaaataatcatgtggtttttgtcatttcttctgcytatgtgatagattacgtttattgatttgtgtatgttgaacaagccttgcatcccagggatgaagcctacttggtcgtggtggataagctttttgatgtgctgctggattcagtttgccaatattttattgaggattttcacatcaatgttcatcgggaatattggcctgaaattttttgttgttgttgtgtctcttccaggttttggtatcaggatgatgctggcctcataaaatgagttagggagaattctcactttttctgttgattggaatagtttcagaaggaatggtaacagctcctccttgtacctctggtagaattcagctgtgagtccatctggtcctggactttttttggttggtaagctattaattactgcctcaatttcagaacttcttattggtctattcagggaat

SEQ ID NO: 820393 - DNA, 573 bp, Homo sapiens
agggactggagtggacatctagcaaactccaacctacctgcagctcagggacctgcctgtagaaagaaaactaacaaacagaaaggaatagcatcaacatcaacaaaaacgtcatccacaccaaaatcccatctgtaagtcaccaacatcaaagaccaaaggtagataaagcgacaaagatgaggagaagccagcacaaaaaagctgaaaattctaaaaatcagagcacctcttctcctccaaaggatcacagctcctcgtcagcaacagaacaaagctggacagagaatgaccttgacaagttggcagaagtaggcttcagaaggttggttataaactactccgagctaaaggaacatgttctaatccctcacaaggaagctaaaccttgaaaaaagtttagacaaatggctaacaagaataaagtgtagagaaaaccttaaatgacctgatggagctgaaaaccatggcacgagaacttcgtgatgcacgcacaagcttcaatggccaattcgatcaagtggaagaaaggaaatcagtgattsaagatgaacttaatgaaataaagcaaga

SEQ ID NO: 820394 - DNA, 624 bp, Homo sapiens
ttaacaaaaacttacaaaacatgctaaaaaaaacaagtgaaaatcacagtctgaaaacgtagagcaaacatcaaaaccagattcatatatggtgcaaatgctgtaattcaggaatttaaggtaaacctgattaatatgttaaaggctttaatggaaaaggtagacaacatgcaagaatacatgggtaatataaagagagagatgcaagaatcaaaaggaaatgcaaaaacagtaaaaaaaaatgtctttgatatgttcattaacttactagaaactgatgaagaaataattactaagcttgaacataggttgacagaaatttaccaaactgaaatctaaaagacaaaagaatgaccaaaataaaaactgtaatagaacttcaggaaaatttcaaaatgtgtaatagatacataattgtaatactagagaagaagaaagatgtggtagaaatatttgaattagtaatagccagtaaatttccaaattaataaaggacaagaaggtactgtaagttcagagaacactgtacaaaataattgcccawaaagccacatgttggcatgtcatatttaaattactgaataccaaagacaggaaagtattttaaaaaataataaagaaaaa

SEQ ID NO: 820395 - DNA, 316 bp, Homo sapiens
ttaaatgtgatatcaatcaaaatccatgcaatctactttgcagatawtggcaaaaattgattctaaagtttatgctcaaaggcaaaagacttagaagagcactcacaatattagagataaagttggaggactcaacttttttaaagttagatgttaccttttagagaagttttagtttaacagcaaaattgagaggaatgcaaagagattccccatataccctctccctccacacatgaatagccttctccactgtcactacctacctcccaccagaattgtatatttgtcacaattgacaagccttcattgaatg

SEQ ID NO: 820396 - DNA, 526 bp, Homo sapiens
ccagactctatatggaacttaaacaatttataagagaaaacaacctcattaaaaagtagacaaagacctgtaattccagcactytgggaggccgaagcgggcggatcatgaggtcaggagatcaagaccatcctagctaacatggtgaaaccccgtctctactcaaaatacaaaaaattaactgggcgtggtggcaggcgcctgtagtcccagctactagggaggctgaggcaggagaatggcgtgaacccaggaggcagagcttgcagtgagccgagattgcgccactgcactccagcctgggtgacagagcgagactccgtctcaaagaaaaaaaaaaggttgggggggggaacaaagaacatgaacagatacttttaaaaacaaaacatatatgcagtcaacaagcatatgaaaacaaaagctaaatattactgatcattagagaaatgtaagtcaaaaccacaatgagatatcatctcacaccagtcagaatggctgttaataaaaagtaaacaataacaga

SEQ ID NO: 820397 - DNA, 577 bp, Homo sapiens
gggtgatgaagtcatctgtacagcaaasccccatgacaagagtttacctatataataaaccttcacatgtacctccaaacctaaaacaaaagttgaaagaaaagaaaaaaacaattcaatattgtcacacttctgacaatgttttagaaattgcatattcattattttatgtttaagatgtaatgttgaatatcaaatggtcaaaaaacgattatctattattaataaaagcaaacattttatgtatagtctttcatattcatacttacctttaagagtgataggtaagtattttcaaaacaaggatcaaacaagtttttgaatttattacttcattatatttattggctaatctccatgaaagagattggcagcataattttaaatgaatatgctagaattttaataaatatgctaaaatttaacccagccttgaaaattgacatgtggatgttgtttccaatattcagatattataaacaacatcattatgaccatcttgtagcacaaattgtggttcatttgtccaattatttctatattacttttcaggaaggaaattcctgtgttaaatgta

SEQ ID NO: 820398 - DNA, 648 bp, Homo sapiens
ctttttctctatatacctagagctaattacattcatgattatattaatatgtaatgcagagttgttctaagaggagtgctgaagtacaattcaattaacctcatgaaagctcagcaacaggaaaatttcttatgctcactgacagtgtggtctgttactaacattgatggatatgaaactacagatacatggcagacaaaccctacagtaatcctcaatgatgtctgcctactggtgttcatgcttttgtataatcccttctgtttgggtgtgattggagcctgtgacttgttcctagccaatagaaaatggcaatgatgtaggaatatctctcccatacctaggttacattttataacaaaggtgatgagatatcactcctatgatgctattatgttctgtaaatctctgtcactagagttgctcttgctccttgctggctctgaagaagcaagtcattgtgttatgaattacctacagagaagcttccaaggcaaaaaactacaggttacctgtaagagctgaaggtctcaatcttacagtcacaatrtaataaattctgctaacaacctgaatggacttggaaagggatttgtttttccagtggatccttcagttgagaatgtagcctgggtaacagtgatcgtg

SEQ ID NO: 820399 - DNA, 613 bp, Homo sapiens
atattatatattcagcaaatatttttaaaaaaggatttcagagcttataaatatagacattactacttgggattacaaaagaaayattaaaatagaatatataagctaaaatataagaaaatatttagaaaatattaaaattatagaatttgagttgctttcttcactttatatctgttttatattaacaacatgtgttctcacatgtttagcatacaggagatctttcccgttctttgtcttttttttttttttttttgagacagagtcttgctttgtcgcccaggttggagtgcagtggctccatcttggctcactgcaagctccttctcccgggttcacgccattctcctgcttcagcctccagagtagctgggactatcggcgtctgccaccgcactttgctaatttttttatatttttagtagagattgggtttcactgtgttagccaggatggtcttgatctcttgacctcatgatctgcccaccttgacttcccaaagtgctgggattacaggcgtgagccaccgcgccaggcctcttttcttaaccgtaaagtttaaatatgaatggttttatatgaaaatgtagtcctgtattcccaggtatgt

SEQ ID NO: 820400 - DNA, 599 bp, Homo sapiens
tttacactttctgagttccatatttctctctttttaaaataattttctattgcaaatatattcttgtttgttccattatctgttcaatatctttctctctccctagttctaatatggcagaaagcatgtctgtttctgatccacattgaatcccagcagtcagtacctgcctggcatatagcaactactcaataattgactgactgactgactgactgactgactgaacaaatggttaaatggatttgcttgggaaatttcttacaaataaaacttgggccagaagcattacattatcagcactcacgcatactatgattatttcagaagaaatacttacacacgtataatggatattttattaaaatcatttgaaagcaaaactggaggtgtgtcatacaaataatcaataagtttttacagagtgtatcactggtaactctgaaataaaatgttttttctaaaagacatttkgtcaataaaaatttgtgattccaatttaaaaaatccactgtaagtcgtaatctcccgctcagtggttctttgttatgagccatcctccctacagtctaacctatagcatacacatttttattgca

SEQ ID NO: 820401 - DNA, 639 bp, Homo sapiens
tatttttgttttgagcaatccataaattagcatttattagtcttagttattaaatatataatagtttatagggatgttaaagtctgacaagaatggagacaatttataaaaatgtttaaaatagttttatatatttgcaacattataagaaaatatatggaaaatctgatcatttaaggcattgatttgtagctaaaatatgtttacatgtattctatccatatgagcaaaatacagtaattgcataggcttcaaaggtaatagaccagaggattttctataggaaatgaattaatgggtccattgcacatgaaatcccattttgttaaatgaaacaagcccagcggtctttattgatctcattgtttttagattggttatgcctcctagtttcctttaattaaatcaaagctactatgtggatgtgggaaaatagtcttgaaaatgtgtcataatcaactgccataaaattaacctcaaattcatactgcccccaaatattctatcayaaacacatcctgaattaatataattctgaaatacttagtttcataataatgaaggataaagaaattaacatggcatttgtttacataaaagaaataaattgtcttgaattgtacagggttaaattttcat

SEQ ID NO: 820402 - DNA, 492 bp, Homo sapiens
ctctcagtatcaacttttaacaattcatagcagatcatgtttcaactctacctcatagttagtccgtcctctacttcatttctattccrtactcattggacagttttaatgaaaagccaataataatataattccatccacaaatgtcatataaactttataattcaacctgtaagatagtgggattttacatttggggtactttaatatgtctaaatatggatactcaatattcccaattaataatggataaaatcagaaatagagaaataaattatactcattctatttcttcctattacactgtagtgttttcataatgaagcatattctgatttctgatcatgaaatatttaaactggagagatacaacaaacaacattaatattcacttgtcttttatttctcttttattgttaatggatttggagtcccaatgtctggaatagctaagcaatgccaaattcttagatgacatttaaatttttaaga

SEQ ID NO: 820403 - DNA, 530 bp, Homo sapiens
ttatttctagttcatagatagtatcttctaggtgtgtcctcatggtagaaaggactagctggctctttggagtctctgttataagggcatgaatgccaagcatgagggcttcacctttatgacctaatcacctctcaaaatttccacctgccaatttcaacaccttagaggttaggatttcaacttctggatttgaagggaacacaaacatttagatcacagcaattttgaccacttggttatgggggtatcttccaagtctctcccctataaagtcttttaaaccttttctaaactctgttacttggaagttctatgagtagtccatgctcagcgggagaagaattaaattctaccccctgaaaggagaaatatcaccatatattatttaaattcttctgtaagaaagtttttccttctcccccattatttatttattcattcacttatttatatcagtttggactcatgaatatttgtttaatttgttaggtygtaatctaatactattgtgttatttttttgctcaa

SEQ ID NO: 820404 - DNA, 651 bp, Homo sapiens
acatctgcagcctttcccaaaatgactatggcatataaggaggcctggcactgggcagagggtccccagtccagccaggagaagcaagwccacattacattttggactcactcatgtaactattttgagctttgagtcagggctcagaaacatctctggtcttcagggtctccagcatcacggaggcacaggtgggaaaaaggaaggaaaaaaaaaagggaaagagatgatcaaactagaagaaaatagggagcacaaagagacaaagaaaagcaaaaatgatataacccacagaaaagccagcagaactccaaagaagcatgaagtgggtcacacagatgtggtaggtgcaggaagttgaaataagagacaagcctggagagagatttcagagcagttggtgaaaggattctaggcagcatttagcccaggatgcttctctttctttctggggggctaaatccaagaaggtgtattaaggtctgtcataaagagagagctgcacctctaatgtatctatgatgggacaattagcaatacagaatagaaattgctagggcaatagaatcacaacagtctatgtggttgagaagtctggccagcagcatttttggtcagagttgtgcccagtgtgacacaaaccagcaatgg

SEQ ID NO: 820405 - DNA, 651 bp, Homo sapiens
acatctgcagcctttcccaaaatgactatggcatataaggaggcctggcactgggcagagggtccccagtccagccaggagaagcaagaccacattacattttggactcactcatgtamctattttgagctttgagtcagggctcagaaacatctctggtcttcagggtctccagcatcacggaggcacaggtgggaaaaaggaaggaaaaaaaaaagggaaagagatgatcaaactagaagaaaatagggagcacaaagagacaaagaaaagcaaaaatgatataacccacagaaaagccagcagaactccaaagaagcatgaagtgggtcacacagatgtggtaggtgcaggaagttgaaataagagacaagcctggagagagatttcagagcagttggtgaaaggattctaggcagcatttagcccaggatgcttctctttctttctggggggctaaatccaagaaggtgtattaaggtctgtcataaagagagagctgcacctctaatgtatctatgatgggacaattagcaatacagaatagaaattgctagggcaatagaatcacaacagtctatgtggttgagaagtctggccagcagcatttttggtcagagttgtgcccagtgtgacacaaaccagcaatgg

SEQ ID NO: 820406 - DNA, 592 bp, Homo sapiens
ttaattaatgagttaaataaaatctttgacgcatgttcattttgtctttgaaaaggagtcatgatttcgctttttgttcttaatattctttaacattttccactgctgcctgagacactatcagcctgggttactctattctagaaacacagtatgctcattccttcccttttcaggtctcccctgcccagggatcacaaacacacacacgcgtacacacatgcacaccaggagcagtgagcaggcttctagggaaagttgagaaggtgagaaagcaaaaagggaatataacagccaattagaccaaggttggcaaactatggcccttgggcccaatctggtttactactttgtttttttaaatttttattgcaatgcagccatatccattcatttatgtactatctatggctgcttttgtgtgaccacagcagagttgggtagttgtgacacagactggcctacagtctaaaataktcaatagctggccctttacagaagaagtttgctgacttctgaattagacacactctgtaccctttacagcaagcttgtccacctgccgcccgcaggccacatgcagcccaggatg

SEQ ID NO: 820407 - DNA, 592 bp, Homo sapiens
ttaattaatgagttaaataaaatctttgacgcatgttcattttgtctttgaaaaggagtcatgatttcgctttttgttcttaatattctttaacattttccactgctgcctgagacactatcagcctgggttactctattctagaaacacagtatgctcattccttcccttttcaggtctcccctgcccagggatcacaaacacacacacgcgtacacacatgcacaccaggagcagtgagcaggcttctagggaaagttgagaaggtgagaaagcaaaaagggaatataacagccaattagaccaaggttggcaaactatggcccttgggcccaatctggtttactactttgtttttttaaatttttattgcaatgcagccatatccattcatttatgtactatctatggctgcttttgtgtgaccacagcagagttgggtagttgtgacacagactggcctacagtctaaaatagtcamtagctggccctttacagaagaagtttgctgacttctgaattagacacactctgtaccctttacagcaagcttgtccacctgccgcccgcaggccacatgcagcccaggatg

SEQ ID NO: 820408 - DNA, 575 bp, Homo sapiens
tcaaagcaaataataatggtaacaggtcaaaacccattgagtagaagggaaatccatgtgtccatgctgacacmaataaatggctgaataaaggagcaaatggacaagctgtatcacctaacaggatacaataagaataccccatcacttctgttattttcctgccaaaaattcatcgactgaatctaatcatgaggaaacactgcacaaacccaaactgagggccatgctacctaataatggtctatattcttcaaacatgtcaagatcatgtcacgaaagtcaacaagagaataagaaatacttccaggctgaaggagaccagagatgcgacaactaaatacagcgtgtgattctgaatcagatacttccactctaaggacattattgggacactcaggacaactggtgaaacttgaatgtttggggactgggtggtagcaatatatcaatatgaatgtcctgattctgatggttgctttgtggttatgtatgagaatttttttgtttacaggaaacctgggggagtggcaatgtatcacattggcaacttactctcaagtaagtccgaaaac

SEQ ID NO: 820409 - DNA, 543 bp, Homo sapiens
gggttccaggactaacataaggatgtacaattataaagaaagactgatgaggacctgcccaaagcatgtggagaaggccaagagggggttaggggaggtgctgcaaatrccatgacaatagagaccactgggaacctcagagaaaagggaaaaggggcatatattttcaataaaatactgacacatgtaagagaaaatggaaatgtgaattagacataaatttatagaaaaataaagctaacattatctgcctttaatgcagacatttaaatttccagcagatggagatgttaccacgtgaaagagaagtttgacaggtggactcagcttcgctttctaaaacatgatggtttgtttcttaggagtgagacaaagagaagacccctaaaataggtagactcctgagctttaaataaataatactttttaaaagaaactttaagtgttacctgagttcctaattcagagggttagctttttaaatgatgaaagcattcgccagttgtttccttgttttagaagaatttggcaaaaatcatttgt

SEQ ID NO: 820410 - DNA, 551 bp, Homo sapiens
tttaatttggatcaatcttatgaagttcattcaaattgcatatcttaacaattttagtattggctgacttaatataaaaacctgccaaagcatttccttggtgttaatatttaattaagttttgctytggcttgatgttgggctagcagttttataaagacagtcagtttcttcctaagcattctgggaattattacccttccattggaattatcttaaggttgtcagaaacctgtacttgtcagagtcctttccatcctttccatgaacctccttggacacaaagcacttttggattatcgatagttgactgtggatgacaaaagacttaacatgtccagttaaaaatctaatgagaattcattataatcagcaattgaaaagaaaatttggttatttctgtagcatagaacattttaacataactgaaattatgactgctgccgtattagatttttagtaatcccacacaatttttggaacagtcatcttaatatcatatccataaaagtaatttaaatgttaaacattatttcttatttgacaatgct

SEQ ID NO: 820411 - DNA, 638 bp, Homo sapiens
acaaaaatattaacaagtcaggtgggtttctatttcatcctggctggatatttttaagtgcttgctgcttgttagtcagggaagaaatggatcgtaggtcattaactttaaaaaaaaaaaaagaatatttattcttttgaatttttcccgaatgctttgaatggatttctgttgcattattggctgagtatattcttgtcaggataatccacttttagaggcttcatttacattagctatcactccagagagccatagtaacaggctgctgaattacccaagagaaattactcttgaaagcaatcattgtgaatgaattttcatcacttggtctcatcatttcatgctgttttgtctctttcctttttgcccctgataaaagatagtcataaagagggcttttgttatgatctcattttctttagaaaacttggtcttattaatcatagcagccagcttatggaggcaaccaaagcgtatctctctgtctctctctcacacacactctgtcacacacacacatacamacacagagtttttgaaatgcatttcaatttgtggggaacataaagactaatttacttccatctacgatatctcacacaaatttgcttttcatgtaacttcattggtacgag

SEQ ID NO: 820412 - DNA, 511 bp, Homo sapiens
gcctgggttcaaggtcctagcagtccacacattgtgaggactcctctagatcagaccaagcaaggctctgaggtcattgctgctgarctggccttggtgatggtgataagcattagtgccacgccagcactccagagctaatacactattataatatattgattgggctataatgtacagttttaaaattctgtctaattttttttaaatctataaattaaaaaaaatcttcttctttatgttgatttcctgaatactaaaaatagtataagggcaacaattattcttggtactacttatgtaatttaatcattaaaagctacatgtagatctagtatcatgacaccagaaattttccgaagaattttttttttttttagtttgagacagggtctcactctgttgcccaggctggagtgtgcaatagcacaatcatggctcactgcagtcttgaatccttgggctcacgtaatcctcccatctcagcctcccaagtagctaggactataag

SEQ ID NO: 820413 - DNA, 576 bp, Homo sapiens
tctaaccacagattagaaagagcagctgatcttcagcctgggtgacagagcaagaccccatctctataatatatatatatatatataatatatatattttatatatwatatatatatataatatatatattttatatataaaatatatatattatatatataatatataaaatatatatatttatatatatattttatatatataatatatatatatatatatatcagattaggaaggcatggtggtgtgcacctgtagtcccagctactcaggaggctgaggaggtccaggagttcgaggctgcagcaagctacgactgtgccattgcactccagtctgggtgacagggagagatcctgtctctgaaaaaaaaggaggagaagaaagagcagccgatcctatcttcacatggcaggaaacaaggtcatgagcagtggccacacaggactgttttattttgatataatggaagtggcatgggaaaatgcgaaaagaaaggtcaccctgaatagctctagggaagaaaaagaatgttgggcatttcaacaaacagcattacagaaaagaagaagcag

SEQ ID NO: 820414 - DNA, 600 bp, Homo sapiens
accctcagaggctgcagacttagctgccaaactgccaaaggtttacacagatgtaaatttcaggctacatgaatcccataactttttgtgcctacttttcactaattcacctgactttgacatctcatgcttctataaatgtcttttaactcagtggttaataagaagctaaaatggtattttggtataattacaaagtaatcagcataaagttttgggcaacaattgaattagtggctcctcgaacaaaaggacagaacatgttacattttaacatggtgcgtaaaaaaaatgcttacaggatcaaggccattaatccctttagttcacttggactgagggtggggaaatcccaagaaacagcaattcaatcaccttcttgaacagcccacatgctcagatgatttctgagaaatgaacttaacttttagaggtttcatgatcagctgctggatgacatccggcaccaacytaaccactaatctcagatctcatagcaacacagatcgcctggaactcaaaatagtcctgcctcaagctcttttcacttcttatcacttcagcaagagcatgtgaaggaaaggtgtctatcagccaaca

SEQ ID NO: 820415 - DNA, 512 bp, Homo sapiens
ttcctagtacctctaaaaatatttcattttcctcctggggatttttttttttattawacagcatacttttcccatctctaacccaacacacagattttaacatttttgaaattagattgtttcacaattagaacacaaattaaatttaatcattttttctcttttttcccttcttctcctcctcttcccctttctcttcctccccttctttctcctcctccttttttatcctgcaaagttgtcattaaattgataatgtatctcagaattaaagaaaaacacaaaactcaaacataaacaacacaaccactaccaccacaaacaataactaacctgtcccaaaggcttggttgatatgtaaatagatttgcatactgaaattggagaaagagaattttcaagtgttattactacttaatttcttttgagttcaggccctcttccaaggaataaatcataatttatctgtagcagctatgatccctgggtttccctggccaagggtgacagca

SEQ ID NO: 820416 - DNA, 613 bp, Homo sapiens
acatttcttcttccttgatgttaaccttggccatgggacactcttgggccagtgggatgttagtggacaagatgtgagtgaagactcagcatgtgcgtgagggtcaggtttgccatctcacacaactgttttwctcagtgagaagaactttcctcagacagatgctggtttagggaggatgagagacacatggaacagatttggaaacaaccaatagctgaaagccaagttcaggctagataaactgaactaaactttatctccatgtgggtgagtgagaagaagatgcttattttctgccactgagatttggggggtgagggggacatcatgacacaatattgctatggcaataccagctgaagcacacctacatcggaatcacctagagtgcttgttgtaaatgaggtttctgagccccaatctagacctagtaagtgatcatctctggagtgtttttagaactttgtattttagcaagaccctcagaaaatttttacactcactactgggctacagacaatatttatcagcatgctactttcagtggcaaggaaagagcagtaggttagcacccagagagctactacatttacctacataaaacttctga

SEQ ID NO: 820417 - DNA, 668 bp, Homo sapiens
tataggacttttatatatatacctatgtgtgtgtgtatatatatatacacacacrtgtgtatatatgaaaattaaacctgaattacacacacataggtgtatatatatacacacatacacacacatatatatatatatacatatatatgtataaatatatgttgcaggatatgattttggctaatgaaagtcaattgctttcctatacaccagcagtgaacaattgtaattataaatttgaaacacaatgtaattttcattaacacaaaatgaaatatttaggtcaaaatctaaaaaaatgcatacaagatctatatgagaaaagctacaaaactctgaggacaaatgtcaaagctctaaataaagagagatattctatattcatatatggaagcctcaaataatgttaagatgcgagttctcccaaacttgatctgtaaattaaatgagatcctgatcataaatcaagcatattgttttgtggaaattgacaaatttattctaaagtttatatggaactgcaaaatacacagaagattcaatgcaacggttaagaaaaaggtaaagtcggaggattgacactacacaacttccagacttactaaaatctatggtaatcaagagagtgtagtactggtgaaataacaaacatatggatcaatggaaag

SEQ ID NO: 820418 - DNA, 527 bp, Homo sapiens
tcaaatttttatttccaaggtcttcaactttttttaatttkatttaccaataagctctctctgcttttactttcagctacctccttaagcccaaagaaacttccatcagtagtcatggaagacaggaaatcagctggccaacagcatgatattgtgatgccctttgtgtattacatttttctagttacccgtaaatgaaaaagtctcaaaacacattttaaaattaggaaataacataccgtagatataaatataataatagagacaaaagaattgtcactttaataaaccaatgaaaatgctaatgcaatctgatgaattgttctacctttctaaaagttttcataccgatttttttgattaaaggctcgtaacaacattattttaaaatttagaaactggatcagatatatattttactatatcatgaatgaggataaaaaacaaaggaaagcctttacatgaactatatctattattaaaatagaatgttgtgtctcaagaaacagttttgacaaactgatagg

SEQ ID NO: 820419 - DNA, 539 bp, Homo sapiens
ttctgaccctggtcctaggcccattttcaattccactccaagaagtactttttaaagtgtttctttatcctctcaaccccaagagtccagaagctaattatttttatcttatacaaatggaatttkatgaaaaccaacagaaatagatttttttattctccaacaagaggaacttgtgatatcaagatatttgagccctcagtcataggttgggattgtctgaatgcctctggggttctgattcccaaagctggggatattcccatgataatttatgcagacaagaaagggttatccacatcttactgttcctatgtccctctggcaatgtctgtgattaagaaggagaggcgaaatgtacattcaataaatatttattgagcatttactatatgaaggcatgttctaggttttgggaatgcaaacatgagctaaacaaagtacttgtcctcatagagcttacattttaatagggcatattggcaatcaacaggaacaaatacgtaatataaggtgaagtagtgataagttctataaat

SEQ ID NO: 820420 - DNA, 626 bp, Homo sapiens
aaatacaggaagttatacatgtgggaagggcagggggtacatgggaaatctctgtacctttcactcaatttttctatgaacctaaaactaccctaaaaaattaaatctactttaaaatatgtatatatatataagttttttaaaaatcaaattaggctgagcacagtggctcaagcctacaagcccagcactttaggaggctgaggcaggaggatcacttgagtctaggagttcaagaccagcctgggcaacccaggaagactctgtttctaccaaaaacaaaaaaaaatttttttaattagctaggcatggtgactgatttggtcctagctattcgggtggctgaagtgggaggattgcttgggcctgggaggtcaaggctgcagtgagccacgattaggccactgcaatccagcctgggcaacagagagcaaccctgtctcaaaataatgataataataaattagtgaagacctcagaatactgatgataaatggggaataaatctagctcatgaacagagtaaaagsctaaataaaaatacagcaaaaaatgataatgatattttcaaaggaacaaatgtagctgatccaaaccttgcagttttaaagcattacatttgtact

SEQ ID NO: 820421 - DNA, 614 bp, Homo sapiens
actatagtatgaactgctgttcattgctggctccagtccatctcacatactggtctcctatcaacctttctaaaatacagctctaaactttgaatgactgacagtatcacatgaataaaagtcacaatcttatacctgcctgtttacataaaatggccccagtcttcctttacagccttatctcacaccatttctgtttcatactcagggaactccttgtttctcatgtaccaatgctgtgctcatttacttttcctcatgccgttcactagccaaaatgccctcttctggtctgtccttgtgacacggttctttaaggtttgtcttaagttacaaatagtactttttcatgtaattcttcaactataaaattatttctactccctctgaacacctgaacacttactgccactcatttaattcaccattttaccaacaccatcttatcaacatggaaaatccatttcatgtttgacagaaaaatagtayctttatcagcttctgttcagaaacgaagatgtcagtaaaaagcatttagcactaatatttgtttgcaaagctcgtaagctgaggcagtacttcctataaaaatggtgtacaataaacatttctgc

SEQ ID NO: 820422 - DNA, 614 bp, Homo sapiens
actatagtatgaactgctgttcattgctggctccagtccatctcacatactggtctcctatcaacctttctaaaatacagctctaaactttgaatgactgacagtatcacatgaataaaagtcacaatcttatacctgcctgtttacataaaatggccccagtcttcctttacagccttatctcacaccatttctgtttcatactcagggaactccttgtttctcatgtaccaatgctgtgctcatttacttttcctcatgccgttcactagccaaaatgccctcttctggtctgtccttgtgacacggttctttaaggtttgtcttaagttacaaatagtactttttcatgtaattcttcaactataaaattatttctactccctctgaacacctgaacacttactgccactcatttaattcaccattttaccaacaccatcttatcaacatggaaaatccatttcatgtttgacagaaaaatagtacctttatcagcttctgttcagaaacgaagatgtcagtaaaaagcatttagcaytaatatttgtttgcaaagctcgtaagctgaggcagtacttcctataaaaatggtgtacaataaacatttctgc

SEQ ID NO: 820423 - DNA, 553 bp, Homo sapiens
ggctggcgggaggaaagaagggtcattcactacttaacaggaaactagggtccccagcaaagmgaagatatttatttcaaggaacctggaaaatggttccagaagtatggctaatccttcaggtgaaagagggcctgacctagaagtactggtggagccataagcaaatgagtagatctaagagctttgtcatctggggcacaaaattgcctctgggtaaagtgagggtgctcgacttttcttctagctctaagattggaagatttaagggattgtatttcatgtagggtttgagactaaaaaaagtcttaaaaaaagtctgagtattctcagaacgtactcaattttaacacctgtttttgttaagtttggacaaattatcttcttcagagggatgcagaaatatctcagaaaaatggctctgactgaacttctggtctttttagatccttgaattatgtaaatttaatttagtaattctaacaaatggctaatggaagtgatatcaacacgtcaacataaaagattaaacatctagaatgccctgctaaga

SEQ ID NO: 820424 - DNA, 473 bp, Homo sapiens
gttttttaaatatctcttaaaatttttttttttttttagaaatgaggtctcaccrtattgcccaggctggagtgcagtggctattcacaggcacgagcacagcatgctacagtctcaagcctcccgagtagctaggactacaggcaagtgccagcgtgcctggcaaagtggcatatgtttcaccttaagaggccttttcaggtatctggaagagttctgttcctaatcaccgcctgtccaattttatgagtctcctggctgaggttttctatgaccatggtgatattgacaagctctcctgctattattgaaccatagtacgtaggattttctcattctttaagcctttggtaaagtgtagaatgaagaggcatgggaggaggagaagacagcccacaattcctcttccgtagttaaagtttttgaacttagatcaaggtctaacttttctcatcttgaatcacattatctaa

SEQ ID NO: 820425 - DNA, 473 bp, Homo sapiens
gttttttaaatatctcttaaaatttttttttttttttagaaatgaggtctcaccatattgcccaggctggagtgcagtggctattcacaggcacgagcacagcaygctacagtctcaagcctcccgagtagctaggactacaggcaagtgccagcgtgcctggcaaagtggcatatgtttcaccttaagaggccttttcaggtatctggaagagttctgttcctaatcaccgcctgtccaattttatgagtctcctggctgaggttttctatgaccatggtgatattgacaagctctcctgctattattgaaccatagtacgtaggattttctcattctttaagcctttggtaaagtgtagaatgaagaggcatgggaggaggagaagacagcccacaattcctcttccgtagttaaagtttttgaacttagatcaaggtctaacttttctcatcttgaatcacattatctaa

SEQ ID NO: 820426 - DNA, 673 bp, Homo sapiens
tctctccatctgcctgctgtcagcctagataaggayatgttacttctggacaagaatacagaagtaacctcctcactggtttttctggctacaatctcttctctcagaccatccttcccttgttcagaattaaagcatagctcagagtataccgtcctcctgctcaacacccttccacttacagaataatgtccaaattccttagcatggcattcatgaccctccataatccagctcccatccatccatcatccagctttgtcttcccacaatgtatatttcacctttgcaagattttagctacatcagagtactcaaggctcccattccctctgactttgtacaacctctttacctcttgggatgccttcccaccattttatctacctaaaccctacctgtccttcagagtataattcatcacatgtcttccatgattctttcaccactctctcaactggaagaaaactcttcccttcctgtgtattcacggtgctttggacctattatatactgtaatataaaactgaagctcttaggttggtgtatgactacctccctccttgtggctgagataatgtcttgctcatatttatataatttgtacattcttatacacttacagaatacctactatctttaaggtgttacaagttataaaaatatatttgaa

SEQ ID NO: 820427 - DNA, 642 bp, Homo sapiens
cacatttgcggcaatggtggcgacgattaacaggtgtgaattttgctttctgacaacgcatacatacagttgcctcagagtcaggaacccagacagcagcatgttcattactgggtgtcttcccacttttggagagtaaatcagtaacacatttatttatatgattcatccattctgatttctccgtagcagtggcagcataaactgcaaaagatttagttggtgtcttgattagccatccattccttaagtctccctcatctttgatggaatcaatagtgacattttccaggggaataatatgttgtttgttatattttttcttctggatgacaatattgccatatacaagaatatcattaaacaagaaaaactgccttgctttgggctttttcctgcacaacttagtcaatactccttctccaataagaactcgtccaggtatagttaaaggttgaccagctgctccaaaacagttttccactatacttatacgtctagtatttgcttcactgtttgccaagcgatccaccatctttcactaatagccttttaaaaaaaagaaaaagaaattagcacatataaattataaattcctayaagttaattatatataaattaagctaacaaatcattgctttt

SEQ ID NO: 820428 - DNA, 529 bp, Homo sapiens
aaacctgtgacagaaagattgagttcttcactgagaaaccttgtttctgttggtcatttcatctttttgtgttgagaaataagactccagccagcacaatatgtcataagagatgtaagtggaaaagggaaagagatgctggtcataagctaaatctcaggaaatgagacacagagaagaaaagtgagagactcaggaagaatactggcgcctgcctgtgcatgcctcccatcaccatcacacacattcatagacacatacatgacacacacacacacgcacaaaggcaaagatggctatttgcttagcaacaactccccaggtgaaacacaagtaggtgaaaccatcattttgccatttatttttcaggtaaaacattctgcctcatcagtttccttagaggtcacctgtaacgttggtaaatgtttttcagtatatttcagggcagtgtgatgaactgccaaccctactctatgaaagtctctgatccatgaaatctaayatgatatgaggctaaatagataaaaac

SEQ ID NO: 820429 - DNA, 579 bp, Homo sapiens
ataagctggggacgatcctccttgttttgtagaagagaaaattgaagcttaaatctattaggwaacttgtcaatgaatcaaataataataaagaaacaaatgctaaaagaccaggcagcatactgagataacgaaaaaggtcagtgagattattttaacttggtcttcattgttgcttcctcatttccttaggatgggcttttcaagttggcattataattaatattaaataaatattccaaagtttatttgtttctagacagcctggccagaaacctcaaataatttcacttaattgcaagttttacattcagatgggactgactgaaagtttctcctataacacaggtgagaaagtggggcatatgggaaactgcttgactcatgactgagaggaaccccaagaagcagaggaggtgttagcctagaaagcaagtaaaagtagatttactatgggactcgctgaaagtaaggaatgaaggtgtggaaattgatgtaggtgtgaaattttaaaaatgcctcctcaggcagataaaatgcaaaaagtcacccaatttgcagaagcataaattgcaatat

SEQ ID NO: 820430 - DNA, 579 bp, Homo sapiens
ataagctggggacgatcctccttgttttgtagaagagaaaattgaagcttaaatctattaggtaacttgtcaatgaatcaaataataataaagaaacaaatrctaaaagaccaggcagcatactgagataacgaaaaaggtcagtgagattattttaacttggtcttcattgttgcttcctcatttccttaggatgggcttttcaagttggcattataattaatattaaataaatattccaaagtttatttgtttctagacagcctggccagaaacctcaaataatttcacttaattgcaagttttacattcagatgggactgactgaaagtttctcctataacacaggtgagaaagtggggcatatgggaaactgcttgactcatgactgagaggaaccccaagaagcagaggaggtgttagcctagaaagcaagtaaaagtagatttactatgggactcgctgaaagtaaggaatgaaggtgtggaaattgatgtaggtgtgaaattttaaaaatgcctcctcaggcagataaaatgcaaaaagtcacccaatttgcagaagcataaattgcaatat

SEQ ID NO: 820431 - DNA, 579 bp, Homo sapiens
ataagctggggacgatcctccttgttttgtagaagagaaaattgaagcttaaatctattaggtaacttgtcaatgaatcaaataataataaagaaacaaatgctaaaagascaggcagcatactgagataacgaaaaaggtcagtgagattattttaacttggtcttcattgttgcttcctcatttccttaggatgggcttttcaagttggcattataattaatattaaataaatattccaaagtttatttgtttctagacagcctggccagaaacctcaaataatttcacttaattgcaagttttacattcagatgggactgactgaaagtttctcctataacacaggtgagaaagtggggcatatgggaaactgcttgactcatgactgagaggaaccccaagaagcagaggaggtgttagcctagaaagcaagtaaaagtagatttactatgggactcgctgaaagtaaggaatgaaggtgtggaaattgatgtaggtgtgaaattttaaaaatgcctcctcaggcagataaaatgcaaaaagtcacccaatttgcagaagcataaattgcaatat

SEQ ID NO: 820432 - DNA, 608 bp, Homo sapiens
tctcaccgctgctattcaacatagtattggaagtcctagccagagaaatcragcaagagaaaaaaataaagaggcatccaaatagaaaaagaagaagtcaaactatctttcttcgctaatgatatgattctatacctggaaaaccaggaagattcccccaaaaggcacttagaactgatgaattacttcagtgcagcttcaggatacaagataaatgcataaaattcagtggaacataacagtcaagccgagagacaaattaagaatgcaaaccaatttataatagcaatgaaaaaaaaatgcccaggaatactgctaatcaaggagataaaaaaaactctacaagtagaattacaaaacactgctgaataaaatcagagatgatacaaataaatggaaaaacattccattctcatggatagaaaaatcaatattaaaatgcccatacttcccaaagcaatttaaagattcaatggtattcctaccaaactatcaacatcatttttcacagaatttgaaaaaaaaagctattataaaattcatatggaaccaaaataaaaacctgaatggcaaaaggtattcttaagcaaacaaacaaacaaacgaaa

SEQ ID NO: 820433 - DNA, 538 bp, Homo sapiens
gggggcagatttcccccttactgttctcatgatagtgagtgagttctcatgagacctggctgtttaaaagtgtgtggcaccttccccttcattctcttcctccatgtccagccatgtaagawgtgtctgcttccccttcaccttccaccatgattataggtttcctgaggcctccccagccatgcttcctgtacagcctgtggaattgtgagtcaattaaacctcttttctttataaatgatacagtatcaggtagttctttatagcaatgtgagaatggactaatgcagaaaattggtactgggaagtggggtgttgctataaagatacctgaaaatgtgtaaacaactttggaactgggtaatggacagaggttgaaacagtttggagagctcaaaagaagacaggaagataaggaaacatttggaatttcctagaggctctttaaattgttatgaccaaaatgctggtagtgatacggtcaatgaaatccaggctgaggaggtctcagatggagatgaggaacttattgagaact

SEQ ID NO: 820434 - DNA, 592 bp, Homo sapiens
catgtcaaactgtaatccttagtgttggaggaggggcctagtgggaagtgattgggtcacgggggcagatttcccccttactgttctcatgatagtgagtgagttctcatgagacctggctgtttaaaagtgtgtggcaccttccccttcattctcttcctccatgtccagccatgtaagatgtgtctgcttccccttcaccttccaccatgattataggtttcctgaggcctccccagccatgcttcctgtacagcctgtggaattgtgagtcaattaaacctcttttctttataaatgatacagtatcaggtagttctttatagcaatgtgagaatggactaatgcagaaaattggtactgggaagtggggtgttgctataaagatacctgaaaatgtgtaaacaactttggaactgggtaatggacagaggttgaaacagtttggagagctcaaaagaagacaggaagataaggaaacatttggaayttcctagaggctctttaaattgttatgaccaaaatgctggtagtgatacggtcaatgaaatccaggctgaggaggtctcagatggagatgaggaacttattg

SEQ ID NO: 820435 - DNA, 686 bp, Homo sapiens
ataataatttttttaaataaaacaaactcttagcaaactaagaaaagaagaaaatttccacaacttaacaaacacyactaaatttttcagagtacaaaatgtttaatggtatgaacttagaatttatttttcaattatttttcaaatcaggagcaatacaagaacatttgttttcagtaattatatttacatttttcccagaggttgtagctaatgtaatatttttttaaattaacaactaaggcatacacataaagcaagacttaatatttttaaaaaatacaaaaacataacaagcatactcttggaccaaagtagaataaaaatagcaataaatgctgagaaaatctctcaaaaccacacaattacatgaaaattaaataatttatttctgaatgacttcttggtaaacaactaaattaggcagacatcaaaaaaatctttgaaataaatgaaactagagaaacaacatacaaaaatcccagagctatagcaaaagcagggttaagagggaagtttacagcacttgacgtagtaaatgcctacatcaagttagaaagatctcaaattaaccatccaacattgcacctagaggaactagaaaaacaagaatgaactaaccctaagggtaacagaagaaaagaaataactaaaatgagagcagaactgaacaaaatttagtccca

SEQ ID NO: 820436 - DNA, 349 bp, Homo sapiens
acacctggctggcaaaaagggattttaaaattaatttaaaacattaaaacaaaaatggttttatcactatggtaatattaatggtgttgcaccggtaggttgctcacggtttatgtttttgatgtgatatttgtcctttatgtgttaggaatacccaagccaagatgtgtgactgccaatttttgatcctaatagcttttctgactaaacctgttttatagctacyatgatcaacatcttctggataccaagtgtttatatgggtagcttgacttgagagattgaaatgtttaatgagtggacattaaccttactaatttgtatctgttaagtgaagctaatttgtagc

SEQ ID NO: 820437 - DNA, 604 bp, Homo sapiens
tcaggagagaaaccaaaaatttatrttaccactatatccataagaatttggctgaattttgttgtattgtaggttataatttgttagccatatgaaataatgcaatagagcctgttttccagagtctccctctgtcacccaggctgcagtagtggtgcaaacagggctcactgcagccttgacctcctgggcttaagcgatcctcctgcctcagcctcctgagtagctgggagccagctactcttttatttattttttttatttatttgtagagacagggtcttgctctgttgcccaggccagtctgaaactcctgggctcaagtaatctttccacctcagcctcccaaactgctgggattacaggtgtgtgccatagcacccagcccatgtctgctttcttcaagatatttaatcatgagtttttcttagtaaattgacctgaatcccaaagaatagaaagattatcacaaacagagaagataggcataaagaagaccaaaccacttttaatgaatggtgattcaaggaaaggataactaaacatgaatcacttggaaacatgaataaatacaaacagtgagtttttgttcattcacttctct

SEQ ID NO: 820438 - DNA, 592 bp, Homo sapiens
ctggaaaggtctaatggagcattgttttattaggtactgaagttgctaagataggaaaagggtaaaaataaaagatgaagttgtccatagggagttagcaagatgggaagcataggttaatttytatggtccaaaggaagagaaagggttacatggtcattgattatggagagtagaacctggagtcagtcatgattagtgaaaaggaaaaaaaatatgaaatctcctcttcattttgttgcaagctataaattagtttcagtctggcttccatgaattcaaaatttcctgagtctatctcaaaagatgtcctgtggtagatgtaggggaagaaaaatcatttcttctattctcttagcttctgtggctgagatctgtgaattaaactgacaaaagaaaggttaataagagaaaaagcatatgaattttctttgatgttaatctttgcatgtacaaggagccattcattgaaaaaaaaaagtaaagacctgaagtaaagacccgaagaagaggttagacccggaagagtgatatgcccttttaacaaagcatgagaaattgtggagaccttactagacaaaggaaaggggtt

SEQ ID NO: 820439 - DNA, 614 bp, Homo sapiens
tttttgtcaatatcttttccaactttctttgtgctttgggctcatgactttaaacaaaaattattttaatgtaacttcagtaaaattttagttaagtttcaggaagcaatggatataaatgcaaacattaattttaagtccctttggatacattaacataaattggatgcgtagtgtcttcttgtttctatgttatgcattcttacatttaaacatctaccagtgtcacgtggtattgttaattcccattgggaaacattcttagagaagtttgccaaaatctgtgctacttctcaagttttgagtccagacccaaatttagagaaaatattttaacattaagtatactgtattttatttcgaaggataatttatgttaagatattgtactgtctctacaagattcaatgcaggcaaaatattttaattttgtgattgctaaatactatttatgaaaactatagtaatatgaattaatatgtgtgygattatcactatgtgagtgaaatattgtataagacatggacgattcgaaacaatctaaacaatttttaggacaaaaattccttaatctttaaactccagttcctaaatttattttattataatgttac

SEQ ID NO: 820440 - DNA, 647 bp, Homo sapiens
aaaataaggaattttttttttaacttacagccctagtactgagaaactgctcatacactaatttcattaccaatttctctcttcctttataggaaaacctacaggattcacatattatcctttttggctataataaaaacatgcatcttgtgtgtttatcatatgccatgcattctactaaaagcttcacatagcatttaatcttcacagtaactctatgtggtatattttctactatccttgttttacagagagaaaagtgaagtttcaacagatgaagtagcttatagtctcaaaataggaaatgataacactataactcaaaacagacgcttaagccttatttaatagaattaatttgatatttatagaaaaattgagaagatggtactgagaggcttcatatatctcatactcagtttcccctattgctaatatattactgtcatgtgtttgttacaattgatggactgatattgttacatttttattgacaaaagttcatagttttctttgatttctttaatttttacataatgtacttttctgttgtttttgttgtttcaggattccrtccaggatacaacattacatttagttgtcgtgtctctcaggattcctcctggcatggcagtttctcagaattt

SEQ ID NO: 820441 - DNA, 585 bp, Homo sapiens
agcctcatccagtggactaggaagcagtattttcttcactattttctggaagacgttgtataaaattggtatcatttgttctctaatgtttgayagaattcaccagtgatactccttggatctggtgctttctttctcagaaaattattgttgattctatttctttaataggttattcatatttccctacatgagtttggtagtgtgtatcttttaggaaattggttcatttcaacttagttatcaaaatttatgggactaaatatttgtgttcataatattcattattattctttcaatgtccttggcaacagcaaggacttgatttctaatatcaagtaatttgtgtcttcttgtctctttaaaaaaatgaatccactgtaagtttatccattttatttatcttttcagttaagtatcttttgattttgttgatttactctattgttttcctgtttttaatttcaatgacttctgcttcaatttttatttcttcccttctgctttccttaggattaaattgctcttccttctctgattttctgcagtagagcctgagattattgatttttgagctttcttgtt

SEQ ID NO: 820442 - DNA, 529 bp, Homo sapiens
aatcaggaaaatacaaaataaaatagcttctttttatttccccataagaagaatgaacaaaacgaaagattaatgtcaagtgtgggtaatattgtggaaaaactgacaattggattgtaacaagttaattttttgatgacagtttagcagtatgtattgaaattctcaatttgtgtactgttggactaagcaatactacttcaaagaaattgtcttacataaatacgtccatatatctttgtaatagtagaatttggacacaatctaaaaaagaaatcaaaagcaaatttcttcggcaataataatacatcagtatcatggaatacactgtagcaactaaaaagcatgaggcatttatgaacatttttaatgtcaaaataagccaaggcatattttaaaataagacaagcatgtctaagagaagatggtatagtagcatcycatttaagtaaaactaaacactaaactaaactaacttcttgtcatctgccatcctgccacccccaaatattgctgcctatatgtacat

SEQ ID NO: 820443 - DNA, 506 bp, Homo sapiens
ctatccatctgacaaaagtctaaaatccaaagtttacaaagaacttaaacaaatttacaagaaaaaaacaaacgaccccgttaaaaagtgggcaaaggagatgaacagacacttctccaaagaagacattcatgcagccaacaaagatatgaaaaaagctcaacattactactcattagagaaatccaaatcaaaaccacaatgagataccaccacatgccagtcagaatggcaattattaaaaagtcaataaacaacagatgctggtgagattgtggagaaaaaggaacacttttacactgttggtgggaatgtaaattagttcaaacattgtggaagacagtgtggtgattccttaaagaactagaagcagaaataccatttgacccagcaattccattcctggrtatctacccaaaggaatataaatcatttcattataaagatacatgtacgcgtatgttcattacagcaccaatcacaatagcaaagacatggaatcaatc

SEQ ID NO: 820444 - DNA, 608 bp, Homo sapiens
tatgatttcctggaagaaataaatctagaattttctttttgaaatctaaaaacacaggttataaaaggggagggacactgttctagttatctcttactgctgaacaagtcatcttgaagcttagtggcattacataattgttatttcttattatctctcatgattctgttggtcaacagagcttggctgggtggtttttgcctggggtctctcaggtggttgcagttagaaggcagctagggctgaggtgtgtgaggtggcttcttcccttacacgtctgacacccttatgtccctctctccagcagagtagcctagactttattcatgctggctcagggctccaagaggcaggaagtgaaaacctccagtcctcttcaaggtgaagtgtgcaactgacatagtccttttctatggaattctactggttaaagtagtcataggccagactagattcaagaggcagaggaatagactccatccctcagtgggggaagtggcatggtcacagctggcttcacaacttgagaggcccactgcaaaataaaaatgaagggtcccaygataaaaacaaaaccaaaactaaacaagaataaatgccattcaagt

SEQ ID NO: 820445 - DNA, 515 bp, Homo sapiens
aataagtctcatgggatctgatggttttaaaaactggagtttccctgcacaagttctctctcctgccgctgccatgtaagacatgcctttcacctcccaccaccactgtgagccacatggaactgtaagtccattaaacttctttcttttgtaaattgcacagtcttgggtatgtctttatcagcagcatgaaaatggactaatacagcaccagacagccatgggttaaaatttctggcccaccccttactttatgtatgaccttagagaaactacttaactgctttggatttcagttttatgaccaataaaaatcacaataacattatttagcttttattatttttatacaattatataagcagaacgaagtgttagacatttaatagcataacagttcagcccattttctccctcttttcttcccttccctctctatwcccccttcttttttttttttttgacatttcaactatatttgaaataacataaactagtaccctctccatctattt

SEQ ID NO: 820446 - DNA, 567 bp, Homo sapiens
aatcattttccccttctgtgcataatacttggcaatgtccgtgaaaagcctatgatgctatagtaggtgaagcttcagctrgtgagaaccagggtaaataattctcatttgctctcaaactctgaaacttaacgtttaggtgtttctttctaggaaccatgtagcaccagccccagtttcacatgcatcctgtgagagctgttctgcagtaagataaggaggatttagagacatttgtcagggacagcattgtgttactgatttctcagaaaacaatcagggaagatgcgcattaaaattacatcatttcactgaaattgctctggctttggtaactcctatataggctgcaatttgaaatgaactgtctgagacgaagctccatagaatcccttattatcccagtctcttttctttgctatctataatataacagagtaaagataaaaagaacaggcttgggtgtaattcactttaggaaacacatttttttatctattatttatcattattgcctggttagaaaattaagcatgattctcaaagacattctcaagcaactttcta

SEQ ID NO: 820447 - DNA, 630 bp, Homo sapiens
ttcagtttgtcaacctaagaaaagttatcatctgaayttaaatatgcatcacataaaagcttatatattttaaattaaaacgtgtacacaatatttgtattatgtttagtggtccttcattttaactaactttacctgttaactgactcattactcttcctaatcacattggataaaaaggctcctttcgtccatctaataaagagtacactaaaggatagaagttcactattatacttaaaacaaatagctcactgctaaactgtaaaaatcagaaaagagaaaaataaacttgatattatttggtttataatgcattgatttatttcctaacttctcacatagataaaatcgatacatttgaactcactaatgtattaaaaaaataccatttgtgtgaatttattctgtctaaagacaaccataagagaattatttgaattttatagactgtgctttccttttggaaatgttttattgccaaagaaatcagagataacaatttatatctcaatatagaagaaatcataaaatagatccatggttaatagaactatatacatctagtattttaaaaaggagtttaaagatcagcacgtccttcttttactagtaggatccagcaaaacg

SEQ ID NO: 820448 - DNA, 716 bp, Homo sapiens
tctgcacccccagaggacggcggatccttccstcttaagacaattcaggtggtcctggcgctcacgcccaggcggaaaggtcagtgagagcagtgacctgcagcagcagcagccaggctcctccgcctggattttcttttctactttggagaggccgctcccatgcagcccctgcagaaggtgcctggggaagcgcagggaatgggcgtgggctgctttgaaaaggaaaggccaatattgtgtgtgtgtgaatgtgtgtgtgtgtatgtgtgtgtttcacaaccaaatcctcagattttgaaaagccacacattttagcaaatgaccttgtttggaaatacaaactaaatagtctaaaaatatttagtgaccttcactgtgtggagggaaaattggaaagtgggatgtcatccgtagcatggagaggattttataaatgttttaactgtaaaagttcctctcaaataacttctttccccaatagtgcctgatctttcctcagttcctgatgaagtacgattcaagttaatgttctccagtatcttcctctctcccgcctaattcacactggctttaccctcggagctatatgaataaacaattaaataaaaactgatgatttaaacattttttattatgtcttctttcttttgattacatagaaacagactcaataatcattgctcatcttttccagccaaattaataaaaccatc

SEQ ID NO: 820449 - DNA, 582 bp, Homo sapiens
ttatatacatatatgagtatataaatattayatatacatatatgtacaaatacacatacatttcatacatattatatatcaatgaagacatgtaatgtactatgcatataaaatattgacaaatattacaataattatataattggtcatttaactcaaataactaaaaaactgacaaattattcccaactctttgtgttgctgttgtcttacatataaaacggagattatttatcttaatgtgttttgtcagtgctttaaacacttataaaagtgaagtgcttagatcagtgcctggtatcttaaaacgcttaataaaaactcggtatcattttgtcatcattattatgttttacacgtttgttttctggccttggtacaaggctaggctaacgtaataaaatggcatgaacttcattttgtatgattttaaaaaatatctactctatcttacaatctatttcataatacaagtattatgtgaacatgattttttttccttacaaccatttaggttgtttgtacattttatgagtctttaactaaaatgctttttatacatgctctctctcttttatattt

SEQ ID NO: 820450 - DNA, 575 bp, Homo sapiens
aagagaatcatttaaaatagaaacaatattcatagaaacaccagatctgtacatttttgcttacgagatttggcaaaacctcaagtaagagatgmgaatgatactgtagttggacatgcattttaggtttaaaattattcctacagtatatatcacactacacaatgctttccagattttatagttgctgaaaaactagttattgtcattttgaaagtcttatgtcttttatttgtttgtgttaaagctttcctcttggtgtcttctgtttttgaggtgtagactttttaaaaattgtttttctaagtgtttatgtgctttcaaattggagatttatgtattcctttaattctagcattttttaaatgtagactctcttaaaaaaatcttctttctcatttaaaaatatttactacttctactttttgtcttttttattatagtcttcaatctctcaatctttatttcctatactctatttatttctttttctgggctaccttgtgagtaattttcttccctgtctttcagtttagtaattcttacttatctatatctaattgcctatttaattc

SEQ ID NO: 820451 - DNA, 618 bp, Homo sapiens
aactgtcgatggcactgtcaagaagggagcaatggccaagacccttccagggaaattattgatttctgcccgttcgggattctgaagtaaycagcggcactgcaagcttaaccttgttaacgtggaacccaagtgaaatctctcaccgcttccagcgtgaggcgggaccagcagtgcaagttcggctctctcagttaggactcacccttgtcctgggaatctgccggaatgtgacaggcggccaagccacgtgctgtgcctctgagacgatgccggtgaactaaggagtgacacacctttgcaagtcagggctttcggcagcctcccctagctgatcatcatgtatttctgtttctctgataggaccccgccaacacgcatattgacccaaggaatcttcgggatggactctgcttctgatcacatcttcacctgctcgaggatcacctgtggcacgtcgggctctgaatgcaagccccaggacaccccatttcatgcgtctgcattcttaacctcactgcccattaacatgcatctcaatgcatccaaaataccgcacccccatcacatcagagagcattaaaaataagccagctcaatgcacaaaaatgagggcga

SEQ ID NO: 820452 - DNA, 618 bp, Homo sapiens
aactgtcgatggcactgtcaagaagggagcaatggccaagacccttccagggaaattattgatttctgcccgttcgggattctgaagtaatcagcggcactgcaagcttaaccttgttaacgtggaacccaagtgaaatctctcaccgcttccagcgtgaggcgggaccagcagtgcaagttcggctctctcagttaggactcacccttgtcctgggaatctgccggaatgtgacaggcggccaagccacgtgctgtgcctctgagacgatgccggtgaactaaggagtgacacacctttgcaagtcagggctttcggcagcctcccctagctgatcatcatgtatttctgtttctctgataggaccccgccaacacgcatattgacccaaggaatcttcgggatggactctgcttctgatcacatcttcacctgctcgaggatcacctgtggcacgtcgggctctgaatgcaagccccaggacaccccatttcatgcgtctgcattcttaacctcactgcscattaacatgcatctcaatgcatccaaaataccgcacccccatcacatcagagagcattaaaaataagccagctcaatgcacaaaaatgagggcga

SEQ ID NO: 820453 - DNA, 512 bp, Homo sapiens
ccaattgtggattcattagagaaagaataaccctactgatatgatttgactatgtcctcacccagatctcatcttgaattgtatttcccatcatccccacatgtcgtgggagggaccaggtgggaggtaattgaatcatgggggcagttacctccacgctgttctgatgatagtgagtgagttctcaggagatcttatggttttataagaggtttccccaccccctctgctctgcgcttctccttgttgctgccatatgaagaaggacatgtttgtttcctcttctgtcgtgattgtaagttttctgaggcctccccagtcatgctgaactgtgagtcaattagacctctttctttataaattacccagtctcaggtatgtctattagcagtgtgagaatggattaacacacccactgtggtamattcattattcaataacaaggaaaaggctgctgaacacacaacagcattgatggatctcacagacatgttaacctaaagagaatgggc

SEQ ID NO: 820454 - DNA, 577 bp, Homo sapiens
tttcttcccaaaactaataaaacaagaaaaaaagcgtatatacattagttatataataccgttagtargcctgatttactaaatatatagagaactattgcatatcaaagtttgattgatcttttcacacgtatttggaatattaatacaaactaccttacattacataacaaataagtgacatgaaatacattctctgaccacaatgcaaaatcactggaaattaagaatatatagctaacatatttgtctaataagaagttctaaaaatataatttaaataattactgaacctagaagtcacagatgacaacaaagtttccaaataacagcattacatttaaagtgactgtaaaatacagctacaatgttacattaaatagtgtgcagacttatatatgtttatttaaaaaagaaaagtaaatattaacaaattttaagttctaaaatcaaataaaaagaatgaggataataagatcaaataaaatagaaaaaagcaaagataaaatataacttacagaaaaaaaaaacaaaaaatagatgccagaatattaataagatcaatgatgacaggaaa

SEQ ID NO: 820455 - DNA, 624 bp, Homo sapiens
tccattaagaaattccaactactcattagtacctgttttatttttcccactatagcctccaggcctaccactgtgcctggcacaaagcaggtgttctaataaatgtctagttaatgttgaatcagcaggtaatcaaaatagtccttcagttaaatgatagtaaaatcccgaatgtattcctgtgagagacttgccttatttcaggctggtgttgagcattgtcttttgacctctgcctactgttttatttatttatttatttgcttttcctttaacttctgtggtctggtgaggttgtgcacagaatctggaacctaagactgtattaggccagtcagtcatgaaattatagtttgttggctgacaacaaagcacagggtgctcaggagatgaagcgtggtataatagtactgagggcttctaacatcagtttaatcaaccgtgattccaagtcacttattattgtgtttacaatgtcacgatgcaaaaagttctcrtgttgtgttctcagtgcttttgagatttctcctatgcattagtctttgacttggttgctttttttatgtcagttaataccttttggaagccataattgtacatagcacaccccatcattcgggcagc

SEQ ID NO: 820456 - DNA, 497 bp, Homo sapiens
ggaagcaggtgcataggttagaaaataytgatatcattgaagcagatcttaatgctcagttatatttcaaaaataacatttcaatttggtgggtaattaaaatataattcagtggatgatgttggtacaactggccatttgttaagataataaagttaaatctccgtaccacacttgcacaaaggtaaattacagatgttttaaagatttaactgtcaaaaatgccaaagcaaataaatccataatacaaagtatttaggcaaaaaaagttaaactgatcaattttctaaaattctaaacaaaatcatagacctgaacattgtttatacttattaatacatgtatatctatagctatttgtatatataaaacagaagagtcaatattattcatctctaaaagtcttacaaataaattagtaaaggagaagcacgctaacagaaaaaatgggcaaaagatctgaacagggaaaaatcacaaaagaagaaatgcaaatg

SEQ ID NO: 820457 - DNA, 497 bp, Homo sapiens
ggaagcaggtgcataggttagaaaatattgatatcattgaagcagatcttaatgctcagttatatttcaaaaataacatttcaatttggtgggtaattaaaatataattcagtggatgatgttggtacaactggccatttgttaagataataaagttaaatctccgtaccacacttgcacaaaggtaaattacagatgttttaaagatttaactgtcaaaaatgccaaagcaaataaatccataatacaaagtatttaggcaaaaaaagttaaactgatcaattttctaaaattctaaacaaaatcatagacctgaacattgtttatacttattaatacatgtatatctatagctatttgtatatataaaacagaagagtcaatattattcatctctaaaagycttacaaataaattagtaaaggagaagcacgctaacagaaaaaatgggcaaaagatctgaacagggaaaaatcacaaaagaagaaatgcaaatg

SEQ ID NO: 820458 - DNA, 522 bp, Homo sapiens
atgcatagaattttcacaagctgaacatgtcatataaccagcacatgagtcaaaaagctgtagccttaccaggatctcagaagctcccttcatggcccctttcagtcacagccccwcaggaacactcaccatcctgacctctaaccgctatggctgcaggttgaccttttgcttgaccatgtggttaaaaaagaatatcactctccagctccactaaagtttctgtattacccagaaaccaagcttcttgaaatttcttaatttttctagttttttttattactagtagagaaacaagtaaagacaacgaggaattaaatgaaacaatgatcacactgattttgatccttagtaaattctgttttagtttaattttattttctttgaataaatcttatacatttttgtgtgtccataagaatttataaaattagttatacatatttccacaaaagacgtcttattacatttaaagttagagattttatgaggcaagttgtatggtcataatccaatacaatt

SEQ ID NO: 820459 - DNA, 480 bp, Homo sapiens
agggagcccatgtggatccattttgaaagctctcaggggccttgacgactccagcctctgtctaccttactgagaccatctagttactactgttagagaatgtgatagcccaactccagttctaaggatgttttcaaaaacattccaactatacttttcagggaataccgttgactaatcttcaggtccatccgatgctactccattgcttcctttttcctgctgcatatacttgtggtattggtggtttgtctctgcccacttgtaattttagatttgctgtaaatgtgtctctgggtttttggttgtgatatttaattgttctgcctgtttctatgtagggatttggagggattgaaagatatgcttgtgatgtcagygccatcttctaggaagcgcattttatctgatcttctatctgtgttgaatagtagagtgtctagcatatccccaaggaataggagacacatgatctaggta

SEQ ID NO: 820460 - DNA, 480 bp, Homo sapiens
agggagcccatgtggatccattttgaaagctctcaggggccttgacgactccagcctctgtctaccttactgagaccatctagttactactgttagagaatgtgatagcccaactccagttctaaggatgttttcaaaaacattccaactatacttttcagggaataccgttgactaatcttcaggtccatccgatgctactccattgcttcctttttcctgctgcatatacttgtggtattggtggtttgtctctgcccacttgtaattttagatttgctgtaaatgtgtctctgggtttttggttgtgatatttaattgttctgcctgtttctatgtagggatttggagggattgaaagatatgcttgtgatgtcagcgccatcttctaggaagcgcattttatctgatcttctatctgtgttgawtagtagagtgtctagcatatccccaaggaataggagacacatgatctaggta

SEQ ID NO: 820461 - DNA, 617 bp, Homo sapiens
aatgtgatatatatatcacatttatatataggatttcagccataaaaacagaataaaatcatgtcatttgcagcaacatggatgaamctggaggacagtttgttaagtgaaataagccaggcacagaaagataaataatacatgttttcactcatatgtggaagctaaaaaaagtggatctcatagaagtatagaatataatagagtttaccacaggctgaaaagggcaggggagagggagtatagagagaggttgtttagtggagacaacgttatagctggatgggaagagtaagttctaatgctctgtagcaatgtaggataactgtggctaacaataatttattgtatatttttaaatacataaaagaagagatttttgaatattcccaacacaaaggaatgataaaggtgtgaggtgatggatatgctaattaccctacaaattcctagaaaaaacataaactgtcaatattgatgcaagtgaaaagagaacatatgaacagatctataatacgcctattggctgaatcaataaccaaaaacctccctacaaagaaaagtccaggaccagatggcttcactgatgacttctaccaaacattcagaaaatatta

SEQ ID NO: 820462 - DNA, 609 bp, Homo sapiens
tattgatgcaagtgaaaagagaacatatgaacagatctataatacgcctattggctgaatcaataaccaaaaacctccctacaaagaaaagtccaggaccagatggcttcactgatgacttctaccaaacattcagaaaatattaaataccaatccttctcaaactcttccaaaagttgaagaggagagaacacttcctaactaaatctataaggccatcattactctgatgccaaagccaggctaatgactccacaagcacatgaaattggagaccatatcccttatgaatatagatgcaaaaattctcaacaaaatattaatctaaattcagaagcctattaatatttaaatcttattaccaagaggaatttatctcaggaatgcaagggtgacaaaacataagagaataactcaatgaaatatgccacattaatagaatgaaagaacaaaattatcattttatttgatgcagaaaaagcattaaaaaatctaatactttttgttatagaaagccaacaaattaagaatggttggaaatttcctcaatgtgatggagmgcatttatgaaaaacccacagctaacattatagtcaataatgaaagact

SEQ ID NO: 820463 - DNA, 562 bp, Homo sapiens
agaggtagccccctggagtagggaaactttccccttttttatggcacagactctctggtctcacctacagccctctgcttccctgagggccgccatggaagtagtcaccttatgtatgcagcaccccacatagagtgaggacagtggccagggaaccaaaggcactcaggggcacagagcccaacacaaagtccctcatgtgggaggtaaagtgttcatcatttggcccttgggtagtcagatggaacagcctgccacacacccatctcccaaattacatgcactaaatctagatacgactgccatttactcacagtttctggtatttctttggcatctttccatatcgttcaaatggccaccatcagccattcaattagggtgtggtcgccttgccctgtgctaaccacctgctcacctgcaatcactgayggagggagggatgagtcataatggaagccaacttctccatttcagaggcagagcagacgatgctgttggctccctcatcccaaagatgaggcatcgaggcaggtaggggttcccccaagcactgctgaca

SEQ ID NO: 820464 - DNA, 546 bp, Homo sapiens
tacaaccaacatcaatgagcttttcataagttaaaaagaaaaactcatgtcggccccagccctgaggctacctgacctgacaaaactctttacactctatgtgtcagaaaaataaaaaatggcaattggagttttaacccagactgtaaggccctggacaaggccagtggcctatctctcaaaacaactagaccaagtttccagagggtagcccccacggtctaagagccctagcagccatggccctgttagcacaagaagcaaataaactaacccttaggcaaaacctgaatataaaggccccctatgctgtagtaactttaatgactaccaaaggacatcattagttaacaaatgctagattaaccaagtaccaaagcttgctatgtgaaaatcccccataaccattaaagtttccaacaccctaaaccctgccaccttgcccccggtrtcagattgcccagttgaacataactgtgtagaggtgttggactcagtttattctagcaggcccaacctccaagaccatccttaaacagaagtaga

SEQ ID NO: 820465 - DNA, 508 bp, Homo sapiens
agtgacaactccttaatgactggatattaactgctatatttagtgagagaaaagcagtccccactagtgcaattgtagcactggcaatgttcattccaaaactgttctgtatctaaaaaagaataagaattttcaattaatatatgcagcacgtacttcattcctttggcaacaattcattgaaacaaacattgattgaatattgtttacacacccactgatatcctagatgcgaggctaacatcaatgaccaaagaaagatttctgtcccccaccctccatggagcttatattctagcaataaaaacaaagaaaaaagtaaacatactataggtaaattacataatatttttgaaagtgattaagtactaggggctaacagaatgggataaggagaatctgggaatccaaagagaggagtgggggttcatgatattaaatagaaatgacactggggagaggcakgaaagagctgtgggtgccagccaggaggatatctgggggaata

SEQ ID NO: 820466 - DNA, 505 bp, Homo sapiens
ttatcatgaaaggatgttgaattttatcaaattcttttactgtatttgttaaaataatcatatttttgtccttcattttgttgatgtgatgtattactyttattggtttgtgtgttttaaaccatcctggcatccctgggataaaccccacttgataatgtttgactcctgtatcagtgagtttcatactttctgtgttttcattatggcaaatatcatcctttcatttccagatataatacctctgtaagcatttcatgcagggccagtctagtgatgatgaattctctcagtctttgtttatgtggaaaagatttcattgcagtttttaaggataactttcctgggtaaaagttttcttggctggcagcattttttttgtcagcaatttgaatataccatcctattctctcctgacttgtaagttttctattgagaaaccagctgttagtctgatgggaatctccatatatgtgactggactcttttctcttgttgtttttag

SEQ ID NO: 820467 - DNA, 587 bp, Homo sapiens
ccctgtgaggtcagtataacaatattcacttcaaagatgtagaaagaaaaacccacagaggtgaaataactttcccaaagtctcataagtaattacaggcaaaaccaggactcagggttagagctttggctttaagtcttatgctgtttccagtagtaacagcagtaaactaaactggaaaaggttttggcatatatatcaacttttcttaggaatataactatgttatgggcccagactcattaatctctcaatatttcagagaagtcgataagaaattgttgtattcccattttgcagcagttgtttttctgtttcccttcaaacagactccaaacaatatttgctattccttaaataatgcagtctacagaaccaattaaatggagcaatccttttgctcactgctgtggattaagctgaaagcctctgagtgcctgaaacaagcagtgtccacattgctgccttacattgaagttatcaacatttacctactgaagggatgcagctctgkcctgctttaattgctttaagtcaaatcctgcctctgttgtcatagttctccgggagaatacagatccctaggc

SEQ ID NO: 820468 - DNA, 601 bp, Homo sapiens
ttatgatgggcagggcccgggctgtgggagtgaggtatttaaagaggtgcatgggccaggcacgttggctcacacctgtaatcccagtaatttgggaggccaaggagggcagataggttgagcttagaagtttcaaactagcctgggcaacatgataaaacaccgcctctacaaaaaaatacaaaaactcagccaggcatggtggcgtgggcctgtagtcccagctacttgggaggctgaagtggacggatcgcttgagtcggggaagtcaaggctgcagtgagtcgtgactgggccactcaactccagtctgggtgacaaagtaagacttagtctcaaaaaaaaaaaaaaaaaaaaaagagtagtgcattagtgcttggctttcagaatgattggaattatttaaaaggtatagtcaaaagaaatgagatgttgtatgtggtaggaaaaagaataagaaaaagaaatgcrcagcatattggctggggaaaccacatgtaaaatggtgctgttactgagaaaggaaatgcagaagaatgagctagtctcagcattattattttccccatagctgctgtcctatggggaaagcttgattaat

SEQ ID NO: 820469 - DNA, 632 bp, Homo sapiens
agccaagttctatcagatgtacaaagaagagctggtaccaatactactgaaacttttccaaaaatttgaggagraggcgctccttggtaactcattctatgaagccagcatcaccctgatacccaaatctggcaaagacacaacaagggaaagaaaactacagaccaatatccctaatgaacatagatgcaaaaatcctcaataaaatactagcaaaccgaattcaacagcacatcaaaaaattaatttgctgtgatcaagtaggtttcattcctgggaggcaaggttggttcaacatatgcaaatcaataaatttgactcactacataaacaaaactaaaaatgaaagcaatatgatcacttcaatagatgcagaaaaagcttttgatgaaatccaacatctcttcttgttaaaactgttgacggttaatattaagtgtcagcttaattggattgaaggatgcaaagtattatttctgggtgtgtctatgagggtattgccagagaagattagtatttgagtcagaggactgggagaggcagatccaccctcagtctgggtgggcaccatccaatcggctgccagggtggctagaaaaagcacgcagaagaaggtgagatgagctgaattg

SEQ ID NO: 820470 - DNA, 575 bp, Homo sapiens
accatccccagctaatttttgtatttttcggaagagatgggtttcaccatattggccaggctggtctcgaattcctgacctcaggtgatcctcccacctcagcctcttaaagtgctgggaatacaggcatragccaccatgcccggcctgtttttgggatattttaatggaaagtgatggagtatgaatccggcctgctcaggtagctctaggtcagccatgaaatctacgtcctgataaggagcctggagaggcttcctcaaatccccaggccatggcattgccagcgcaacacttgcatctcctgacttagcccagcactgccaagcagacctcatgggtgtccttctgccaccttcgtgcttcctccatcctggtctccctgtctgtttacatcagtgtttctcttggcccagggcagggtctctttatctcacggcctctgtggtccagttagttaggagagagttttgagcaggtgcaattagtgtggagtctctggggcctgcactcacacacgcgggatcctgacaagccctgagtcctggaacagccgcaccctgcagtaacaccca

SEQ ID NO: 820471 - DNA, 589 bp, Homo sapiens
taaagtcttatctgctcttcataggatccatggggaaggtaatgygtgcacagttcacacacattcagctcactctccaccataagtgttaagatttcaagggaggtgtggccattcccagttcacactgaggcccagaagactgaatggctcctgtagtttagaactaatcagagtgactctttggtttctgccaatgaagacccaacccaagtagctccagcaaaggggcaggtgtttcctgtgacccccctcagggaggaaagcccagctggccttggcaatggtggaatttgggctctgtccttcttcctagtcagtgcccctcggagtgggctgctctctctcctcccagccccacagggcaggagacctggctgctcacatcagcccatcttggccactcgagaagaactgactggcttcccttgattcctggtagaaaatcctgggaaaagatggcttgaatcatggtgtgtaggttcttacatttggatcagtcacctgtgagcagagattggagccctgtgatcagccaggtgggcatttcagccctagaccaccactgtggccagggagtcaggttctg

SEQ ID NO: 820472 - DNA, 684 bp, Homo sapiens
gctcttcataggatccatggggaaggtaatgtgtgcacagttcacayacattcagctcactctccaccataagtgttaagatttcaagggaggtgtggccattcccagttcacactgaggcccagaagactgaatggctcctgtagtttagaactaatcagagtgactctttggtttctgccaatgaagacccaacccaagtagctccagcaaaggggcaggtgtttcctgtgacccccctcagggaggaaagcccagctggccttggcaatggtggaatttgggctctgtccttcttcctagtcagtgcccctcggagtgggctgctctctctcctcccagccccacagggcaggagacctggctgctcacatcagcccatcttggccactcgagaagaactgactggcttcccttgattcctggtagaaaatcctgggaaaagatggcttgaatcatggtgtgtaggttcttacatttggatcagtcacctgtgagcagagattggagccctgtgatcagccaggtgggcatttcagccctagaccaccactgtggccagggagtcaggttctggaggaagacagcagctcccagtggaaccacgtgattggaaggagtttcccaaaggggcagacaaatggatggcgcctgctaggagcagagctggaagtggtagctgat

SEQ ID NO: 820473 - DNA, 684 bp, Homo sapiens
gctcttcataggatccatggggaaggtaatgtgtgcacagttcacacrcattcagctcactctccaccataagtgttaagatttcaagggaggtgtggccattcccagttcacactgaggcccagaagactgaatggctcctgtagtttagaactaatcagagtgactctttggtttctgccaatgaagacccaacccaagtagctccagcaaaggggcaggtgtttcctgtgacccccctcagggaggaaagcccagctggccttggcaatggtggaatttgggctctgtccttcttcctagtcagtgcccctcggagtgggctgctctctctcctcccagccccacagggcaggagacctggctgctcacatcagcccatcttggccactcgagaagaactgactggcttcccttgattcctggtagaaaatcctgggaaaagatggcttgaatcatggtgtgtaggttcttacatttggatcagtcacctgtgagcagagattggagccctgtgatcagccaggtgggcatttcagccctagaccaccactgtggccagggagtcaggttctggaggaagacagcagctcccagtggaaccacgtgattggaaggagtttcccaaaggggcagacaaatggatggcgcctgctaggagcagagctggaagtggtagctgat

SEQ ID NO: 820474 - DNA, 631 bp, Homo sapiens
aactactgcaatggacatgaggagatgttactttgggagcacattgggaaggacgtaatcatagctaccttcacctgagcgagcactcattaggtgaaggggtttacatagattatctcatttcatcctctcaatagcccagtgatgcaggcactgttatcctcctcttcattttacaggggaggccactgggacacagagggttggaatatcttacccaagatctgacagctaggaagtgcaggagcctcctctcgggtcctacattccatctgaggactggatcctgctggaagaaggaaggaggtttatccagggagggtgtgcaggtaggaggctgtcgtgattcatcacgggaagtcaataaagggtgaataagggcagtgggaggggccaaggacagcagtggggatggtcagaggggccagcacatcacatgagatgaccgactggctgtagggtgtgaggggaggagggaggccagtagagcgcccttgtttccagctgggggctgccatcaaagygggcactgttcactcaatcaggaaggagtgcagcaggtggaggaggctgggtgggaagcaggtgggttcagctgtaaaataaaccttattcagttgatgaccatgca

SEQ ID NO: 820475 - DNA, 627 bp, Homo sapiens
aactactgcaatggacatgaggagatgttactttgggagcacattgggaaggacgtaatcatagctaccttcacctgagcgagcactcattaggtgaaggggtttacatagattatctcatttcatcctctcaatagcccagtgatgcaggcactgttatcctcctcttcattttacaggggaggccactgggacacagagggttggaatatcttacccaagatctgacagctaggaagtgcaggagcctcctctcgggtcctacattccatctgaggactggatcctgctggaagaaggaaggaggtttatccagggagggtgtgcaggtaggaggctgtcgtgattcatcacgggaagtcaataaagggtgaataagggcagtgggaggggccaaggacagcagtggggatggtcagaggggccagcacatcacatgagatgaccgactggctgtagggtgtgaggggaggagggaggccagtagagcgcccttgtttccagctgggggctgccatcaaagcgggcactgttcactcaatcaggaaggagtgcagcaggtggaggaggctgggtgggaagcaggwgggttcagctgtaaaataaaccttattcagttgatgacca

SEQ ID NO: 820476 - DNA, 614 bp, Homo sapiens
tttttattataggggatcctctcctytttcattctagcacatgtcaattcattaattagactcaaggcagaattttcttagttttttctgtttattttattttattattattatttttttgagacggagtctaactgttgcccaggctggagtgtagtggcacaatctctgcttgctgcaacctccccctcctgggttcaagcaattctccttcctcagtctcccaagtagctgggattacaggcacccaccaccacaccaggctaatttttctgtatttttagtagagatagggtttcaccatgttggccaggctggttttgaactcctggcctcaactgatccacccacctcagcctcccaaagggctaggattacaggagtgtgccaccacccccagcctcaaggcagaattttctgacaccttatctttcgtctaaaggaatgcatttcatctactcttgatactggtcagaggtctcagaataaaaacgaagtccgtcttctaatgcagtaatttattgcagttcttttgttgcatctaattttttttttattatactttaagttctagggtacatgtgcgttgcatgcaggtttgttacatatgtata

SEQ ID NO: 820477 - DNA, 622 bp, Homo sapiens
atggggatccaccgaagggtttcagagacactgcatggtcagggagggacaggagagatgtgacttcctggaggggacaggcagcctcataataagtatggaggagagggagcaagtgagagcattggaagggttaaatcaatggctactgtatgagagaagcctgacttggggaagtgaattgggttggaaaggacaggtgtgcagagagttgattaaactatgatagtttggtttggaatatactgtgttgaaggcatctgcgtgtccttcgtatgcataagagcacacagattgagcatcaacaaccttcccagggtgccgctttccattactcttttaggtctcatttgccaggaactgaaaagatgtggaattccagctgaactgcgtttctggagaactcacagtgagccaggcatgaggtttagatgcaggggatacaatgctgaaaaggccaagttttaaatagggtagaaaacttcccagattggaaaaaataattactagcattgaaatctaatttttraagcaatgttttctccagctcacagctcgtggaatccatttccttttgtgaagctcagatgcgtagcatgggcaggaattgtaccattgggca

SEQ ID NO: 820478 - DNA, 620 bp, Homo sapiens
cttgctcctgctctcaccatgtgacatgcctgcttctgcttcgccttctgtcatgagtaaaagctccctgaggcctcaccagaagccgagcagatgcaggtaccatgcttgttcagcctgcagaactgtgagccaattaaatctcttttctttataaattgcctggcctcagatatttctttatggcagcacgagaacagaccaacacacctgggcagtcctggattctccaggcgcatcacaaacaaaaccagttagacattcattcaatcccagagcgacttcctttctcattacttttttaaaaaataaatttttaataatctcaagccttcctggctctccatagaattcttcctagcacaacatttctattttaatcatataacctccaggattcagatgcaccaaatgcaacaattgatgaacgtctgaatctccactggtttcactttccagatccaggttgatctatgattcttctacagaatcataatctccatatatttatccccaagagagsttaaatcaggtgcttcattatctggagttctcaggaagtaaaccgtcagccagatgctgcttagatttatgcttctctggcatgtggtgcaaccggc

SEQ ID NO: 820479 - DNA, 556 bp, Homo sapiens
gggtcactttctgtcttccccgcccttgtggccaagacctatttagttgtgagcaacagactcctgggacaaggccaatgggggcatcagckggaaggagctagcctcatccaatcagctgtgaccttgcagatgaggccacgtgtcatggacatggctgccttgaccctcccagtgaggaggaacatttctcagaaaagaagtgtatatgggctaggcaggaaccccatgcatgcctaccatgcccaccaagggccaggagagatccccattgtttgtagttgaggagagggacctgaagccaggctacttatattcacatctcagctctgctgtacatgaccttgtggaatttgggggagccctttaacccctcagtggctcatctgtaaaacaggaatatggcagtgtgtggtgctcacaattgtaatcccagcactttgggaggctgaggcaggaggattgcttgagtccaggagtttgagaccagcctgggcagcatagcgagactcatgtctctacaaaaaaaaaaaaaaggaaaagaaaaattcactgg

SEQ ID NO: 820480 - DNA, 609 bp, Homo sapiens
tgtctctaaggcacccctgggatccccactgagctggcctacttcagasagccagggcccacccctctggcccccttagtgtccagctcgtggccccttggcatttccacaagacgccaagatggagattcccatggggacccagggctgcttctcaaagagcctcctgctctcaggtaaggaggaaatagaccctaaaggccaaggggagaaatggggactcagcccagagattgaagtttcctcttagaagtagggaaagattacctgagaggatgaaattagaataagatgggggaggggcaacagaatcacagcctcattgccattttatctatggaattttctataatgttaggaccatgaaggcaggaatttatgtatgtttggttccctgctatatctccagtgtctagaaattgaaggaagtttagatgtattacatatagttggtattatagcttatatattacatatgcctataagtattggttgaataaatgaatgaatgaatgaattcagagagtccatgtgtttagaagcaggccacacagcatctcaaggtagaaaaacctctggatcaacaggatggcaaatctgtggtaacca

SEQ ID NO: 820481 - DNA, 599 bp, Homo sapiens
aaagggatccaaaaccttgaacttgcacaggaggaacaaggcccagagagggacaggggattgcctggggccacacagccagtcaggtccccagtgaaaccccaccgcagagctcagtccctctccatcccctcctgtcagctgtctgtccctgtagttctgtctctctctctcagtggcctacatatgtctgtatgtctgtcttcccctttcttggactctctctctctctctctctctctctcagtttctcttgctgtgtcctttttaatctgtctttctgtttccagtttgttcatgctgccttgtctaagatgcatctctttacatgtcttcgtttctctgcatctctgtctctctctctctccattctctgtctctcctgcctctttgtctctgtcactgtgtccacctcatttcttggctcttccaggacctcttgtctctgcatctcactctctttccaccttgctcttccattctctctgcgggtttctctccatctcacgctgtctctyatcctctgtccctctctgtctccccaagactctccccctccacccagtcataattctgttctctcttccccccaagcagga

SEQ ID NO: 820482 - DNA, 541 bp, Homo sapiens
tttaagccagagcctggtggacgtgggtctgattggtatgcctgttattaaaagtataggctctggccgggcgtggtggctcayggccggacgcagtggctcatgcctgtagtcctagcactttgggaggccgaggtgggtggatcaactgaggtcaggagttcaagaccagcctggccagcatggtgaaaccctgtctctactaaaaatacaaaaattagctgggtgtggtcgcgggcacctgtaatcccagctacttgggaggctgaagcaggagaattgcttgaaccctgggcaaaagagtgaaactccatctcaaaaaaaaaaaagtataggctctggacatagttccactgtttcctacctccaggaccctgggcaatttatggactctgccaagcctcagtttccttatttgtaaaatagggaaaacaatagtactcacatcacagggctgttgaaaggattaagtagatacacatgtgaagtacagtacttaccacgactggcgcagagtaaatgctcagtaaatcactcattc

SEQ ID NO: 820483 - DNA, 560 bp, Homo sapiens
ataataataatagtaataataataataakaagaagaagaagaagaagaagaagggaagaaggagaaggagaagaagaagaagaaagtcccgtccttctctcctactcagtcaaatgcaggtgtgtaagcaaacatttcaacaaacctaggggatatgctttttctgctctatgtcttaacgcttgagatggacacttacacaaatgtaaggctaggattctgggtaaggatgtagtaacctctcaagtagcatgttcttccaataaatataattaactttgatgtaggaaagaattctaaaagttatgtgatggtttaataacgaaacgattattgtactccaccaccaaacaaatgttgctgtatttttaaagatgtcgcataggtgaaaagttaaactcacgcatatatgagtgaaccagggtcttgagaagtttttgaactttcaacatattcgatcagaattatcctttcactcctctgctaagccacataactcatttattattctttgaaacagacagtcaacgtgtgctattggacattcaggcaaggccgtg

SEQ ID NO: 820484 - DNA, 578 bp, Homo sapiens
tatcttcaggcaataattcaaaaaaatggatataagaacaaatacatctataatattacaatgagaagaatattgaaawcacttaaaaagtccaacaatagtgaaattatcaagcacattatatcagcttggtggaatagaaagccaacattgaaattctagacaagaaattttgtaacaatatggagtgtttatgaaacactggaaggtttcaaaagaagaatgcagcgttgtctatttattatgattacagtgacaaattttctaagtatataaataatgtttggaagaagatgaagggaaaggaaaatagttgtactaaaggttaacaatattgtcttttaaaaaatgtcctttaatggggttataacattattttaatacatttcttaaaactaagttaaaagtgagccctattttaaaaacagattacatacctgacattcatctataagtcagatgtctagtacaccaaaatattatgcagggtggttgtgcgatttcaaaatattctactggagttaaccaaattataactgcaacactgtgagttttcagtataaaagtagtataaaact

SEQ ID NO: 820485 - DNA, 632 bp, Homo sapiens
ggcaggaccgacaaccaacacacctgagttccaaccctggctctgcgtctcaagcagctctggaaccttgggcaagtcacttaacctttctggctctcagaaaagtcatttggaaaatggtggttcctcaataggcagcggtaagaatcaaatgaaatgtcaaagtgctttgtaaacttagaaacactgtacaaatataaaaggaaggccctgtcactggagcattcattatgcaagggcctgaaatatggtatggcacaagatggtgaaggtttcatatcgcaaaaatactcacacattggtccctactccaaacctcctttcaattaacacaagcactccttcttgccagaagcacaggtctgtaccttcctgatggtctgatacccacaatatctgaccttatttgcaaatgctgtgcaaatatatggcaaaatgaaattgcaaatctggtaattaatgagggatttcatgaggtcagtgaaagtgatgttggaggctgcattaattcaggcagctaagccactgaccaagaagtatgggcagargtagccaattcccaaataatgaaagaaaaaaagtaaggttagtgatgcttcaaaaaaaaatgattttaatgtcaaagacttaaa

SEQ ID NO: 820486 - DNA, 574 bp, Homo sapiens
ttttaaatgtactcatcacaaagaaaggtaaatatttgaggtaatggatatgctaattagcctgatttgatcattccacaatgatgtatcaaaacttcacgttgtacttcataaatatatacaattattatttatcaattaaaaataaaataaaacctaaaaataacgtaaagactacaaaagagtttcatttattaggtatcaaagttagtcattttcactctggtatacacgtatccaaaatttactggtttaaccagaaattatattatcataggccttggtatatacagacgatagcagaggaacaaagaaacactggctttgcttacaaaagatatgatctattagatataaataaaataagttaaattatatttgatatattaattattctaaatttattttaactgaatatccatggtgataatatacaatgtttttcattttataaaatgttttggcatacctcgactcatttgggcatcacracaaacctataaactaaattattgttttcatttagccttagagatctctgagattcagagaagttaattgatacactaatgaa

SEQ ID NO: 820487 - DNA, 614 bp, Homo sapiens
ctatgatatgttacaaagttatgcccagttgttaagctaatagctcatcactctttgagtctctaaatccccagaccaatgtcagatctgcacacaggattcttagtagtaaatgtagaaaacataaaaagtrgttaagatcaaggactcaggcaccagattatctgtttgaatcctcaccttccattgatggttgcttgaccttgaacaaatgacttagattctctatgtctgtttctccatttataaaactgagataatggtaacaactacctcatggaattgctgggaggatatacataatgtgcttagagcagcggctggcacacagtaagcattcaatagtgttaattaaccaattatgacctttctaaatacagaggagcatgcaattacatcttgcttttaaaacacctattttttttaaaaaaaaatatggatttacaaggggtcattttttacttaacttttaggaaatgtctcataaatgtggtactgcttcatagcattataaaattaagtaaatcttttccatttcaaaaataaacttaccttgagtaagcatgctaaattctctcaggacacttaccttgagaataaaacatgtttatcac

SEQ ID NO: 820488 - DNA, 617 bp, Homo sapiens
aataaaaaaccctgaagcaccaaggcattgaaaaaagaaggaaattctgtaacacgtgacaacatggatgaaccttgtgggcattatgctaagtgaaataagccagtcacagaaagacaagtactgcataattccacttatataaggtatctaaaacagtcaaattggtagaatcaaagagtggaatggtggtttttagggactgaaggaaatgagaaaagacgatttaataatcaaggggcattaagctttagtcaagacgaataagttctagagatctgccatacaacattgtgtttacagccaataataatattgtgtacttaaaaatttgtcagaaaggtagatatcatgttaattgttcttaccacaataaaataaaataataaaacattttttggaaattgaacaagatcttgaggtatcatatggaacacctgccaatttagtacaaatttctatgtaaattacttcagtaattgagtgcattagttaacattcagatatcttagatattgtttaataacaarttacttagactataaagacctaaaacacactttaattatttaacagtttatgaagtcaggaagttgagtatgaaataactggatcct

SEQ ID NO: 820489 - DNA, 493 bp, Homo sapiens
tcagcagcagtcaaataccacctcccagaacccaaccacccaaaaaaagatactgggaataagaatgtcctcagaaagctcaactgtaaaactaaaacataaaccagaacatagattaggaagtcaagcacggaggatcaagtaaaagataggactaaatttaagatactaacatgcaatgaaaagaaatatatctaccagaaatatggaggtgagtagtttggtcagcaatgaaagcagtgaaaaaggaaaggtacaaaacactatcacataagcattaaccaggagaaaggatatcctataaggcagattgatgtaagtaactgcttgacgagtatatcatggagctgagattatcactttatcagmgtcgatgccatttaaaacttctagtcatttataatcaactcccttgttgttatctcatgatcttgttcagtaggcaactattgaaatttggttttccattcagcattctacagtgaaagaatac

SEQ ID NO: 820490 - DNA, 493 bp, Homo sapiens
tcagcagcagtcaaataccacctcccagaacccaaccacccaaaaaaagatactgggaataagaatgtcctcagaaagctcaactgtaaaactaaaacataaaccagaacatagattaggaagtcaagcacggaggatcaagtaaaagataggactaaatttaagatactaacatgcaatgaaaagaaatatatctaccagaaatatggaggtgagtagtttggtcagcaatgaaagcagtgaaaaaggaaaggtacaaaacactatcacataagcattaaccaggagaaaggatatcctataaggcagattgatgtaagtaactgcttgacgagtatatcatggagctgagattatcactttatcagagycgatgccatttaaaacttctagtcatttataatcaactcccttgttgttatctcatgatcttgttcagtaggcaactattgaaatttggttttccattcagcattctacagtgaaagaatac

SEQ ID NO: 820491 - DNA, 585 bp, Homo sapiens
agggacttaagcaattgaagaagcaaaaaactaataaccccctttaaaaatgggcaaaagacatgaacagacaattctcagaagagaaaagacatgcaagtggccaagaaacatatgaaaaatgctccacatcactaatcatccgagaagtagaaatcaaaactacatgagataccatctcacacaagttagaaaggtgattattaaaaagtcagacaaacagacagacaagtggatgttggcaaggctgtgaagaaaagggaatgcttatacacggttgatgggaatgtaaattagttcagtcactatgaaaagcagtttggaggtttctcaaagaactaagaagtaccatttgacctatcaatcccattactgagtgtgtgtgtatatccaaatctttctaccacaaagacacatgcacttgcatgttcatcaaagcagtattcacaattggaaagagatggaatcaacctaggtgccaatcaatggtgaattakattaagaaaatgtggtacatacacactgtcgaatactatccagtcataaaaaaagaatgaaatcatgtcctttgcagcaacatggatg

SEQ ID NO: 820492 - DNA, 224 bp, Homo sapiens
tgtgtattcctcatttcaactccaactgcaaattctagacagtggaacttctggcagtcactttctcactctaggaaaaattttgagaagtacagttttctaactgcatactctgctgaccatacttgaaaatctaactgctgtgakactcactgaagttttcctacttccaaataaaatctctcagaggagtattccaccgaccaacaagatagacctgggct

SEQ ID NO: 820493 - DNA, 489 bp, Homo sapiens
ccttaggtaaatattatatatccacaaaaaaaaactttattggaaggtctctgcaatttatccctaaagctcttctatctcaaaaaaatgagtctgaatgtgtttcccagtaccaggatccactgcatttccaaagatgctcaaacctatacctctgtcatttctccactgtttaaataattatctattgagtaatcaccatccacaaacaactttttaaaagaaaaattgtgttatccataatatgagtaattgaaattttaggacgcatcaaaattttcaatttctagatttcccttatcttggaatgttttcttagcataaaatccccagatatgtactacagtgtcaaataatatcagcctcatgcccaatgttgcmttttacttttaatgaatgtctccaaaagtttgattaacaccagcaatatatgcttcttgaaatcctattaatattgggtatttttaaagttcctagcttgatttgtat

SEQ ID NO: 820494 - DNA, 474 bp, Homo sapiens
cctgaagcttatacaattcaggggtccctctttaaagagagaaaaaaaaaacaaaaaattaggcacaaaagtaaatatttgaggaggagaaaaagaatcacactaaacctgaattttaaaaagccaacamgaggctggccatggtggctcatgcctataatcccagcacttttggaggctgagatgggaagattgcttgagcccaggagtatgagaccagactgggcaacaacataatgagatcctgcctctacaaaaaaaaatttgttttaattagccaggtgtggttttgtgcacctatagtcccaattacgcaggaggctgaggctggaggatcacatgagcccaggaggtcaaggctgcagtgaaccattatcataccactgcagcccagcctggatgacaaagtgagaccctgtctcaaaaaaataaaataaaaatataaagccaataagaactgcgaatatcacaaca

SEQ ID NO: 820495 - DNA, 611 bp, Homo sapiens
ctcaggggcccttccatttggttttctgcagctgtggattcccaaccaacagtcattgtgatcttccaagccagaatgtgctctgggctggagtggcagcccsttattctggcattcaagagcgtgggcaccctttggctatttctagcatttgtctggttagcctttgggaaacgactataagataataataatgggtactaatttattgggcacatttaatactcaaagcactgttctaagcactttacacattaaatcatttaacgctgtaaacagccatgtgatggaggacatcattttacagataaggaaactgaggcatagaaccaagatttcataacaagtgattgctaacatatagatgcaagcccagtctgactccagagctttgctcttaactactttgttacactgtgctgtagactggtttctaacattgtgctaatcaaattaatgttctccccttaagtgaagccagatttaagaccatacttatgctaataattctgacatagatttaaatatttttagaaatcctcttttggattacctgggtcatttcacttaatttctctggacattatctgtaaaatgaggggacaaacctt

SEQ ID NO: 820496 - DNA, 611 bp, Homo sapiens
ctcaggggcccttccatttggttttctgcagctgtggattcccaaccaacagtcattgtgatcttccaagccagaatgtgctctgggctggagtggcagccccttattctggcrttcaagagcgtgggcaccctttggctatttctagcatttgtctggttagcctttgggaaacgactataagataataataatgggtactaatttattgggcacatttaatactcaaagcactgttctaagcactttacacattaaatcatttaacgctgtaaacagccatgtgatggaggacatcattttacagataaggaaactgaggcatagaaccaagatttcataacaagtgattgctaacatatagatgcaagcccagtctgactccagagctttgctcttaactactttgttacactgtgctgtagactggtttctaacattgtgctaatcaaattaatgttctccccttaagtgaagccagatttaagaccatacttatgctaataattctgacatagatttaaatatttttagaaatcctcttttggattacctgggtcatttcacttaatttctctggacattatctgtaaaatgaggggacaaacctt

SEQ ID NO: 820497 - DNA, 509 bp, Homo sapiens
taattaaatactttaacataaaagaggaaaactcaaatttctttcccygacagcttctgctgcctagaaaaaagtgttggcaagaatgtcagaaaagaaccatcagcaaaaatgacagcctcacacagaggctgaaagcgagactcccaacgtgtagggatcaggcgtgaactttagagacagacagcctgggtttgaataccatctgctccactggcttgtctcctgaacttaacataacctctctgatgctcagctgccataccgtcagatgacaacaggaatccctgcctcacacagttaatgagaaaatgagattatgtatgagtgattatgcaggcaatcattccacacagtggctgtcacataaaaagaactaaattgaggcctgtaatcccaacactttgggaggccgaggcaggtggatcacctgaggtcaggagttcgagaccagcctggacaacatggtgaaacccccgtctctactaaataaaaaaaattcattgggc

SEQ ID NO: 820498 - DNA, 539 bp, Homo sapiens
ttcaactgaactctaatcaggcgtgagaatcctcttgtcattcaagtttaattggcttaatctcccaaatgatactgaaggcagtagtagttcttatgctcctagggtgcagtattatattatttataaatgcagacacttcaaaagcaataaaacacttggcccttgctctcaataaacttgccctctaactgggaggacagcatccaaatggaaaaaaaaaaaaatgaagaacagttcaaagcaacatataagaagtatgtaataatcccccaagagaaacaaagactgcattgcatactttcccagtagaagtacaaattggcacagcaccccatggagggaagtgggccacagagatcagaattacaaatgagtatctcctttgacctggtaatttaacttctgggaatttatccttcagccgtacttaggaaataacatatactctaagttactcactgtagcattgytcaaaataacaaaagattggaaagaaggcaaatatccttgagtagaagactgatgaaatacattgt

SEQ ID NO: 820499 - DNA, 576 bp, Homo sapiens
aattcatcaaatgaaataaattcttgtaacagcttaatctgatgttaaaagaaataagtaaaagaattaataaaarggaagataatatcaggtataatttggtgattaatgtccaacaatgtgttaaaatagagagtgaaagaaaacttatgcaaaaagggaaaaaagcagagaagagaaaaatgaacaaaatcttaaagatatataaggagaaactgaaaaaaggaataaaaaatgacaataagaagtaatttttttaaagagattggaaatttcttactatcgtaaagcaaagcattattattttagtaacaatatcaaaaatgttaaatcacagggtggttagtaaacaaatacaaaattttttttaaagttgttacataccactgtattgctttttatttaattaattactgccattttaataaaaatatctatatcctcttatatcataggatggattatttcatatagataagctcatatgaaaacaaagtaatcacaatgtctcaaatgcagaggactcatgtgtgtacgttaatcagaatattcaattctacttgaataagcacaatt

SEQ ID NO: 820500 - DNA, 628 bp, Homo sapiens
tcaagagcttcatcttttctattatgaattatgtgcagctctcaaaacctctaagaggtaagattttactgttaccctccccactagtacctataatgaaatttggaaaatacccactcagcatgattcagtagcaatgcttaaaatgagaacttgaagaaaccattgctatttttttgcatcatgaagaggatgcttgtccttaatctagcccagactgaaaaactaatttccaatctaaaaacctgcctgcaaggaacttttttttaaaactcttccagtccctttcctggaaacaagaagcacaaaaatgtatatctgtaatactagcaattgctggtttgggcattctattttcacttaatgctagagttagaagatatattattttctattgataataaaaatattggatatcactgattatagtatgtattctgcatacttccaaatagatctgaggaacttcttattagaaataacagaaggtggtaagagactctcttgccagggttctggtttaccacagtcaagcattaaatttagctctgggcttcccagagccaagacaagaaygacatacaattaatgatatagttctcatggtctggtaaaggaatcatagttg

SEQ ID NO: 820501 - DNA, 651 bp, Homo sapiens
tgatgggccttggggtagtggggatccctggggcttctccactcagcagaacctggaccctagcagggamacatccaaatgccagcacctgtgcctcccttcctgcccggaaaatcctccatccccaaacctctctctttaattcgccaaacacctgctctgtgatgttgagtgtggtgggcttgttaagaagcctaagacataactatttcctgtgtgcccactgtgagcatgctttgtagctgctttgcacagagctcattcaaatgccaatccttacagcaaccctgtgagacaggtcttacaatacgaatttggggagaaaatggaagtactgagaattgttaaacaaggtacccagtgacattcaggggcaagtggaaagaggagcttccaacccagggctgtctgattctcattaataataacagccagcatttgttacatgccaagcactattaataagcactctacatgcatctattcagcccaacaaggtaggaacaatcatcactttcctcctttcactgatgaggaaactgaggcacaaagagattaggtgccttgtctgcggtccaagtagtccatagtatggatggatttgaacccatagaagtggtctagatgtttctccacagtgagtccggttca

SEQ ID NO: 820502 - DNA, 620 bp, Homo sapiens
cccaggatcaagcatagtgcctggttcacagtaggcactcactgagcatttgatttttttaaaaatggatgtatttcattacctactgcctgagagtactgcatagctttctttttctttcttttytttttttttttgagttggagtctcactctctcgcccgggctagagtgcagtggcgcaatctcagctcactgcaacctccatctcccgggttcaagcaattctcctgcctcagccgcctgagtagctgggactacaggcgcatgccaccacgcccagctaattttttgtattttagtagaaacggggtttcaccgtgttgcccaggctggtcttgaactcctgagctcaggcaatcctcccgccccagcctcccaaagtgctaggattacaggcttgagccactatcttggcagctttttttttttttttaatgaaagtaaggaagtagccaaaaagaaaacccctagcaccaccaatctccccacataatatgcagtttggcaaatagagaagaaccttggatcccagtgaagagatatgaggaggtgatcactgggaatgtggaggcttggaaatgggccagaaaagtccgggcagttccagagttctgcctg

SEQ ID NO: 820503 - DNA, 632 bp, Homo sapiens
tgtaaataatcccatgtgactgatgtcaagctaccaacctaaagtaactgagtgcggagctggaagagatgtgtgtagtyggttgtggcaagcctgtacaaatctgttccagcaccactgttgctaaacttggtatttatcattccaagaaaaaaatgcgcatgcacacacacacacacacacacacacacacacacacacacacacacagtgataggctgaacaatgaacctgagatgcctacattctaatccctggaacctggaaatgttacagtgaatggcaaagacttggcagatatgattcagttaaggctcttgagctggggagatgatcctggattatccagttgggccctaaatacaatcacaagtgtcctaatgaattgaggcagagggaggatcgactacagaagagaaggccatgtgaccacaaagcagacactggagggatatggccaaggaatgctggcagccacaagaaactggaagaggcaaggaacacattcttccccagggcctctggaggaagcacagtgctgccaaggccttgatttttagcccagtgaaatggatttcagacttctggcctacagaactgtgagagcataatataataatctgttgctttaa

SEQ ID NO: 820504 - DNA, 597 bp, Homo sapiens
gttattacggtttagttaaacattactagtttctatcaacgcagttcatatttcagttaccatggtatattaactgtaattgcataaagcaccaacttcaccgctagctctttttttttttttttttttttttaagatagagtctcgctctgtcacccaggctggagtgcagtggcgcgatctccgctcactgcaagctccgcctcccaggttcatgccatcctcctgcctcagcctcctgagtagctgggactactggcgcccgccaccacgcccggctaattttttgtattttttttttttagtagagacggggtttcaccgtgttagtcaggatggtctcggtctcctgacctcgtgatccgcccgcctcggcatcccaaagtgtgggattacaggcgtgagccaccgcgcccggccaccactagctctttagtctacatatcactaccgaaataacagatgtgcatcatgatcaatgacaaaacacaccactttcaaagtctgttggtgatcggttgtggcacatcycttatttggttcatgttcagatagcaaggcaagtagtttcatttcttccttgtttttcagtgaaaa

SEQ ID NO: 820505 - DNA, 545 bp, Homo sapiens
atgctttccaaacagttccctgaagtcttaactgattccagcataatctcaaaaatccaagtccaaagtctcatctgagactaagcaagtcccttccacctacgagcrtgtaaaatcaaaagcaagttagttacatccaatataaagtgggggtacaggcattgggtaaatgttctcattccaaatgggagaaattggccaaaataaagaggctacaggccccttgcaagtctgatattccgatacccagctgggcagtcattaaatcttaaagctccaaaatctcctttgaatatagagatggaaaatacaaaacataaatacaaaatataaaacatgatgcaaggcagtgtacagcttctgtggctgctttcacaaactggtgttgagtgcctgcagcttttccaggagcacagtgcaagctgtcagtggatctacctttctggtgtctggtggatggtgaccctcttctcacagcatcactaggcagtgccccagtggggaatctgtgtgggggctccaactccatatttcccttctgcatt

SEQ ID NO: 820506 - DNA, 487 bp, Homo sapiens
taaactattttttgtgaggatttctagttttatttacttaaaatatttcaatattacttagaatattagatgaaaatgttagaataaataaatacttagaatatttgatgaaaagggcatgttgatagtgctggataattttttggttgtcacagtatttctggaaagatgtttggcagaatgtttgaacaaaagcgatacagaatgttagaggctatttgagccgatgaaattgcacgccaaaaaaatttggtaaactcaagcactatacaagaattgttatttagttcagatgaatgttatgacattttatttctcattgtctgtgtcaacgcccatctgtttcatctatttgagggtctatttcacagaaaccaattatctccatgtttactttctactcccttcctcaatcttaataattgcaatcatttattgttttatctctgtgtttattaattmtccatattctgagaataccatagta

SEQ ID NO: 820507 - DNA, 537 bp, Homo sapiens
tcatgtcatttttatagaaacctagaatcatgtcatttttatagaaacccagaacctagctgaaaaattraccttttttgcccatatatatctgttactatatagtagacaggattatttcaccagtggagaaagtgtgatgttggctaattaggatggtatctttacttgggaaagaatagaacgaaagagaggatagcggattaattcctgaatcaagagatagtgacaggtccggttataaacactcataacattgactgacccatgccgaaaggtatattggtctttgtgatagctaactctgtgtttcaacttgagtgagctaagggatgcccagatagctggtaaacaaattatttttggatgtgcctgtgaaggtgtttccagaagagaatagtatttgaatcggtagactgagtaaagatgatctacctttgccaatgtggctggaatcatccaagccactgagggatggaatagaaaaaagaggtaaagaaaggacacattctctctctccttgggctgggacgttca

SEQ ID NO: 820508 - DNA, 599 bp, Homo sapiens
atacaggcaggtggaaaaaataggactttcaaatgataatcaaagctatgtcaataagaaatrtttttaaaacacaggctagcttgggagtagaaaactaatgagtaaactttttttttaagagagagaaaagaaggtatttttctggaaagaaagggcattagtttttttccattctacttctgtgtggtgtatagttaatttgtgtgctatctgttggtttcagaaatcttatcagacctgacagaggtaacaaagaagcctgtaggtttaaaaaaaaatgcaaaaagttgagccattaaaatcagtgctccgccaggcatggtggctcaagcccgtaatcccaacacttccggaggctgaggcaggcgaatcacttgaggtcaggagttcgagaccatcctggtcaacaggatgaaaccctttctctactaaaaatatgaaaattagctgggtgtggtggtgcatgcctgtaatcccagctactcgagaggctgaggagagaaaatcgcttgagtgcaggggtgcggaggttgcagtgagctgagattgcacccaccgcactccagcctgggcgatagagcgatagagtgagactc

SEQ ID NO: 820509 - DNA, 464 bp, Homo sapiens
gagaagtgggggagagagagaaatatgagagagaaattgctttagattttctagtatcggcctttacttatcacagcataccttcagatactgttgtaatgcttaaatcttaaaaaacctttaaaataaaaatttttacacctacttttctagacattgtgttattatttttatacatttgtttttacatatggtataagcaccacaacatattggtgttatgttttaaataaatttaaaattatagaaaaattatatttattcacttatacaacatttcaaatgtactttacttccttttagacatacagatttcaatctcatatcattttattcttccrgaaagacttttcctaacatatttttagtgtagacctattgatgataaatacttgtggtttctctgtgtctgggataatctttattttcacttttgtttttgaaagattgttggcaatttctta

SEQ ID NO: 820510 - DNA, 549 bp, Homo sapiens
ggccctagcacccagcaccatgaagatcaaggtactgttcagtgacagacccagtggcaatgccgccagcagtgtcagccctataaccacagataaraactcttcagagactgtattttggtgacatgcaattgtgggttttaggggtaggtaatggacacaaatctcatattttacaggatgtaagtcaatctagttcataagaaaaattgagttactttatataaaatttgatctctatttatccttgtctgtcagctactttcagtagctgcagtcaaagtcaacagagctccccacatgctcatctctctttaaaatatgcattttgttgtttttctcgacacaaaaatagtgcatcatgcatgtaacacattttttaaaaatactgatgacctagacttatttctgaagaacttcaaacactgtagatttaggaggagcttatactcttcctccactactaacctcaatcctgtggccaagaattcaaattttatcctcattcctctgtctagcacatcttttggtacaggtgctcaaaagcac

SEQ ID NO: 820511 - DNA, 395 bp, Homo sapiens
ttacaaagtgattttgagaaacactagtcttacgagatgctcgagagaaaaaaaaatccatggtttaaagagamtggggccaggcacagtggctcatgcctgtaattctagcactttgggaggctgaggaagttggacggcttgagctcaggagttcgagaccagcctgggtaacatggtgaaaccctgcctctactaaagtacaaaaaaattagccaggcatagtggtgcatgcctgtagtcccagctacttgggagactgaggaacgagaattgcttgaacctgggaggcagaggttgcagtgagccaagatagcaactgcagtccagcctgggtgacaaagaaagaaaaaaacaaacaaaaaaaaaaaaaacagagagagagactgggaacc

SEQ ID NO: 820512 - DNA, 626 bp, Homo sapiens
atctttctctcttgctgcactataagctctgtgagggcagggaccatgcctgcttggctaatacctagccagtgcctggcatattgatagcattcaataatgtttattgaaataaatgagtgagtgagattgagtgagcctgggagggtcataaatgccttagtggtataggcaaagtgttgttcatctgcatttgtgttttatttgggatgaaagtctccatagctttcttgcagtctcaaagggttctctgactccagaaaggatgaagactactgatgtattaaaagcaatttgttgaaaatttgaaagcactgactttgaactcagataaacctggcttttctgattcctagctgcttgaccccagggcagtcacctctgaatctaaactccttaattttatcctaggtgaaaaatcccagcctggctgcatttgtctatggtagggtcccagcatggtggtgagagttggctaactatccctttcctctccctttgtgccttagcttctgtgcagttatttgtaggatcaatctagctctagggaagcrttttcttgcagaaggcagagagactggaggaggttaaatatgagcttgacactcactagtctacagcacgcc

SEQ ID NO: 820513 - DNA, 577 bp, Homo sapiens
ttacatatactatcccatttatatattttaattctcacaacagccctttaaaacatwaactgtcattcattttcttttaccaaggaaaactctagctcagcagggtgacaacagctaagtgacacaaagtcacaacagctggggtagagaagcaattatatcaagttggggatgatttgggttttttgttgatgttgttgttctactattctaatgtaaacaaaacacagttataacaaagattatgcaaaaacattggggggaactcaacaattccattggttaacaaattaattaaaatcttagagctagaagggattttggtgacataccaacacccttatttaaattaacagatagggaaattgaggctcagaagtatggtgatcacctgaggtcacacagctagttaaaatgcagagctgtgattcagacacaagcctgacttcaaggccggtgatcttctcactagagtacattgccagacccagagctggctcactaacttcagccttagcttgggtcccgtgaatattaatgatattgacaagataaagccataggtctggagtctaag

SEQ ID NO: 820514 - DNA, 642 bp, Homo sapiens
cctgggggttcacagtcttgctttcacatttctaactatttttaacaaaatgttaaaaatactcatgttaaaagacaacctttaaacatgttaccaggcaktacttttggaaaacatgttcaagattgagttacttctccgttagctcccctctgcggtgtaactctgctgctaggggcagggagaaggatcaatgagcccactcaacaaaatataaaagggctgaaactcatagagatttcctgtcttatattgaggcaatcagtaaaattaatattaactgtagctgcagttttacaggcacatattccaggacagatgttctgctacttgatttgcatacattatgccctttggtctctataaatcctaacaatgagaggtaggtttcactattgctttttaaagatgagtaaatggaagctcatggagggaaaatcagggatccaagaacatctggattgccattgtgaccttccttatttctaagcactcttccacaatattaggctgcctcccactctgctacattgctagagattcaagttcaggcagttataaattctggaaattgaatattcaatttctgttgcttctgcccattacatcacagtaatcagcaataaatctcttaccatagcg

SEQ ID NO: 820515 - DNA, 588 bp, Homo sapiens
ttatagtggtagaaatcaaaatagtggttaactcttggtgagaaaggatacaggtttgactagaatgaagcagaagagaaattcctggaatgtgaaaatgttctrttctgattggggtgttagctatatggatgcatacctttatcaaagatcataaaactatatatacatataatatatgtgcatgtgatatgtatatgtatgcatatgtataatatatgtatacacaaaactgtatacccatgtaatacaggtatacattacagaatacacacacacacactcacacacacacacacgaaaaacaacacgacagcatttatcaaaatgactgattccaggtttgggttaggaaatgtacaagatgagccaagagtatcttgtcatgaaatgaaagcaaggatgctatctaagactactagggtttttgtgaagtgaactgtgtccccctaaaattccatgttaaagacctaacccccaaggtaactgtctttggagataaggccttttaggagacaatttaggttaaatgaggtaataagggtaggccttaacctgatgggacaggtgtccttgtaagtagaggaa

SEQ ID NO: 820516 - DNA, 438 bp, Homo sapiens
ttgtagatcatttttatttatttcatcagattgtttacatagatgatcatgtatggaaacaaagacagttatacctcttcctttccaatatggatgccttttattwttttatcttgtcttgttgcaccgaatggaacctccagtatagtattgaataggtctggtaaggcaactatcttagcttttttcctgatcttaggaaaataatttaatcttttaccattaaatatagttttatatgtaggttttttgtggatggccttcatcaggttgaggacatatccttctattcctaattttctgagagtttttttttatcatgaataaatatcaaattttgacaaatccatctttatcttcattttttatggttgcaaaataatcataactgacatatatgtgttgttcactaatttgctattacaagcaaaattgtaa

SEQ ID NO: 820517 - DNA, 271 bp, Homo sapiens
gcatccattaagttggacagcttaagcattattcccaaacatgaaatcttcttttcggccaactagcctattccagattctccacatccccttaccatgaacgkcctgcctttcacctgaatgttctccagccaaccagattctacccagtatgtgaggcataactgaaggcacatcttctccctcaggcttcagcccaaggccagattcttgcttttcctaagctcaaaaagatgttagttttccaccactcatttggcctgagcatcac

SEQ ID NO: 820518 - DNA, 640 bp, Homo sapiens
acctcatacccctaacacaggtataaaaatcatctactcggggtgactcttgattacctacccacttttcaccactgcccatcatccccagccccgtgcgaaaatttaagtcagtttcttattttgactttagaagttcacagcctagttcctaaagcacatgactctcacctgacctgggtagtcatcctcttgatctgtcatgagcagggaccagagcaaacctcagtggaataacagagctgagttggactggggaaatacctccagatcccaatgtgccccgatgaagcattagggacatatgagcatatcttggctctgttactgtctgaactccctggtgatcttccccatgagtatattaattctgcctttccacccggatcatgcatcctgacccagtgaatcccctgactaaggcccttcgagatcaaatccaaatgccgccctaggcagaaaggcccattgcattctggcacatgcttatctctcaagtccctcaccactcctaaaactcccactatgctggacttctcagagttccaaagtccaggtcctggcttctgcaagcattttctcacctcctgccttcttcamcaccacccatcacagtcccaaaatggccagattatggtta

SEQ ID NO: 820519 - DNA, 640 bp, Homo sapiens
acctcatacccctaacacaggtataaaaatcatctactcggggtgactcttgattacctacccacttttcaccactgcccatcatccccagccccgtgcgaaaatttaagtcagtttcttattttgactttagaagttcacagcctagttcctaaagcacatgactctcacctgacctgggtagtcatcctcttgatctgtcatgagcagggaccagagcaaacctcagtggaataacagagctgagttggactggggaaatacctccagatcccaatgtgccccgatgaagcattagggacatatgagcatatcttggctctgttactgtctgaactccctggtgatcttccccatgagtatattaattctgcctttccacccggatcatgcatcctgacccagtgaatcccctgactaaggcccttcgagatcaaatccaaatgccgccctaggcagaaaggcccattgcattctggcacatgcttatctctcaagtccctcaccactcctaaaactcccactatgctggacttctcagagttccaaagtccaggtcctggcttctgcaagcattttctcacctcctgccttcttcaccaccacccatcrcagtcccaaaatggccagattatggtta

SEQ ID NO: 820520 - DNA, 594 bp, Homo sapiens
acctgtcactcctaggctctccctgatggagttaaaggagcttgccctgtgggtaaaacatcagccaagggcagcctgaggcacagccacaaagcagttaggtttggtacactcaagaagacaggaygtttagtacacccaggaagacagggcagatgtctgtgtgggaaaactcagtgactcgagggaagtttacttttattgtcagtatttattttattttaaagaaaggtggttggaatggctgtaggtgggtgtctccctttgatagggaaagaactgaggctcagaggggtgtgacgcttgacaaagctggcaccagaaccctgcttcctccttttcttgggatgtgctgttggaacctgtctgtaattcagggttgcggttcttagccctgggtacgcttcagaatctctagggaagcttattaaaactgctagttccgaaaccccacctgactcactaaactgaatcgggagccctagggaggatcctaggagggtttcctgtagagggtgaaggcagccaggggactggggacaggcaccctgcagggcagatgcctgctggccatgtacacttgacagacccaac

SEQ ID NO: 820521 - DNA, 522 bp, Homo sapiens
cttttaagtaagagaaaaaaaataaaaaaaacaagagaggcaagggaggggcagggattggagacrggatggggcacgagagaccacctgagtgtaaagttgcaatacgagttctctcctatttctctcttcaatagttactttacagtagacgataaaagccctaaaaaggctgggcgcagtggctcacacgtgtaataccaacacaaggccaaggtgggaagattgcctgagtccaggagttcgagaccagccctggcaacacagacccggtctctacaaaaaaaattttttttaattagctgggcatggtggtgcacacctgtagtcccagctactcaggatgctgacgtaagagggtcaactgagcccaggaagtcgaggctgcagggagtcatgatcatgccaccacactccagcctgggcaacagagcaaagctgtcacacacacacaaaaaaaaaaagccctgtaaatgttactttagcctcagtaattccacttctgataatccatccccaaat

SEQ ID NO: 820522 - DNA, 522 bp, Homo sapiens
cttttaagtaagagaaaaaaaataaaaaaaacaagagaggcaagggaggggcagggattggagacaggatggggcasgagagaccacctgagtgtaaagttgcaatacgagttctctcctatttctctcttcaatagttactttacagtagacgataaaagccctaaaaaggctgggcgcagtggctcacacgtgtaataccaacacaaggccaaggtgggaagattgcctgagtccaggagttcgagaccagccctggcaacacagacccggtctctacaaaaaaaattttttttaattagctgggcatggtggtgcacacctgtagtcccagctactcaggatgctgacgtaagagggtcaactgagcccaggaagtcgaggctgcagggagtcatgatcatgccaccacactccagcctgggcaacagagcaaagctgtcacacacacacaaaaaaaaaaagccctgtaaatgttactttagcctcagtaattccacttctgataatccatccccaaat

SEQ ID NO: 820523 - DNA, 675 bp, Homo sapiens
ctcctgtcctgtgccctctctcacacctggcaccaaatctctttcccctgggtctctctttctctagtgcctgagacacaagtgcagtgtctagtagttttcttcatgttgtaggaagtggtgctttgttccccagcaaaactgccttgtgagctctccaggtgtcaaaagcaggaaagagcacaccagctgggtggccgggacctccctattcctctctctgctcctaagcaaccactcaatctcgggcacatcatcttactcctgtgcttggttttctaactgatatgatcaggaaccataccccataagctcctttcagatttcccattccttgaatccacaaaaaaccacacattgtcattttcaaagggtatatgtggggaagggcatggggaggatggcaggggcagggtgtgcaggggtcatcccagaacagctgccatcacagcctgagcccagaagccagaagttttctccaaagtttcacattctcttggcagctccaacctgctgtcctgagacccccagccacccagcttccagcagggagattgcattcaaacccttccaattctcccacttgatcaaatagcccagggccstggagcctttttcttctgtttgaaaaagcatccccaaatctgctcccataccctctttgaaaaaacattc

SEQ ID NO: 820524 - DNA, 583 bp, Homo sapiens
gatttctatgaccacagactaggtttgctgtttcagaatttcataaagatgaaatcatgaccgtctgtacactcttgggtgttgtattagtctgttcttatgctgctaataaagacatacccaagactgggtaattataaaggaaagaggtttaatggactcacagttccacatggctgaagaagcctcacaatcatggcagaagagcaagggacgtcttacacggtggcaggcaagagagaccttgtgcagggaaactcccttttataaaaccatcagatcttgtgagactattcactatcacaagaacagcacaggaaagacttacccccatgattgaattacctcccaccaggttcctcccacaacacgtgagaattatggaagctatgattcaagatgagatttgggtggtgacacagggaaaccatatcaggtgtggcttattcaactcagctattacttttgagattcatccatttcattgttttgtgtatcagtcgtttgctcctttctactgcaaaagaatattcccttrttcatatatcacaatttgtttgtctattcatccactgacaggagt

SEQ ID NO: 820525 - DNA, 450 bp, Homo sapiens
atgttgttatgaggtacatatgatattttgaattatgcatgcaatgtgtaaggatcacatcagggtaattaggakgctcatcacctcaaacatttgctatttctttgtgttagaacatttcaaatcctctcttctagttattttgaaatacacaataaattattattaactatcgtcaccctactgtgttgtcgaacactaggacttatttcttctattaactatatgtttgtacctccccttcctccatcctttttcttcttttgtcttttgtttctcttgccaagtgtttcctaaacattaggctggttaaataagaatgaccagggattgggttcacatttagattggtggctactgctcccagaggctcagatttggaaggtctatggtattcacacaaatgctgttctcagacacgacacgacagaagtgggcacctgttgtcag

SEQ ID NO: 820526 - DNA, 450 bp, Homo sapiens
atgttgttatgaggtacatatgatattttgaattatgcatgcaatgtgtaaggatcacatcagggtaattaggaggctcatcacctcaaacatttgctatttctttgtgttaraacatttcaaatcctctcttctagttattttgaaatacacaataaattattattaactatcgtcaccctactgtgttgtcgaacactaggacttatttcttctattaactatatgtttgtacctccccttcctccatcctttttcttcttttgtcttttgtttctcttgccaagtgtttcctaaacattaggctggttaaataagaatgaccagggattgggttcacatttagattggtggctactgctcccagaggctcagatttggaaggtctatggtattcacacaaatgctgttctcagacacgacacgacagaagtgggcacctgttgtcag

SEQ ID NO: 820527 - DNA, 427 bp, Homo sapiens
gtaagcagtattccagcaagctgtttaccatttgaaagagatatttacaggtctcagtaggtgaggcttctttttggctctgtggtgttttgtgcagcttgaatgaatgggtctggatttcaaggcaccaaccaagtggtatttataacaaagctaatatacaatgtttgagagattttcaagcacagtctccattttaaagaaaagcagaaaatacagagtgattcttcccattctacagatgaaaaggagatgtattgcatgaagcaatggctgcccatctgcaggagcatggagagtggaaagtgcaaattttgagtcagagagaygtgaattcagtgttcggttctgcactcgctagtcactggtcatgcatttgagcaaattgttaacccctgtgggccttagtttctttatctgaaaaata

SEQ ID NO: 820528 - DNA, 610 bp, Homo sapiens
ggggatatgaggtacatctytgtaccttctacccaatttggctgtgaacctaaaactgctccaaaaataagtctattttttaaaaaaggaaaagatacaaaacttatcctgcctttctagttggaaatgtatttcaaggtaactaaacaaccctagctagtgatggcaaacttttctttgtagaaaaatgccagtaataactgtagaaataacagaactataagaaagttactactgtacaactctaataaaataagtgattcaggcaaggattgaaaaactgaagctacagcacttaggtggacgactgatggagaactgggcactcacatgctgccacggtatctccccatggattatgtgtcagttgtgagggaaagttactctacaatgaagatttttgactttcatctctttgatctagtgaccaaacttaagacagcaggagaaccacaaatactttccaatttgacaccctatacaacatacaacatgacctttattcttgcaaaaatgttcaacttgagtctaatcaagcccttgattcaaaatttcaggttataggaaatgcaggatagacgaataagttaatcattattaggaggaaaca

SEQ ID NO: 820529 - DNA, 604 bp, Homo sapiens
ttattatcttaagcattgtaaaagtcttaataaaaccacaaccttctrttacaagcagtactgagagaaatgttatcacctcatataactaaaaattcccagtattcatgcttctgggcttttgatctctctgtagttttcaaatccccatgtccaactttaagttctgattacctcaactttcagcttttcaacgctggatatgaatccctggactcgtgagccctgttctcagaacccacacctttagcctataatatgtcttgatataggaagagttttgaggaaaaaaaaaggaatgagtatacatatccactctaaaaataacaaaattctatactaacatctgcagttagtagaggttacattgtcttagcactgaggtaggtaattgctatcaaagtcctcgtatattcccacagttcaccaacatctgcccttgctaagtagggccttccgagaggcccttgcccatttcttcttaaaggtaaacatcagaattcacaagaactgcctgtttatgtacctctacctctaatttagcttcagcaagtgaaattagtccatcattgtcaattctgcctaaaaggttttaacagtaaaa

SEQ ID NO: 820530 - DNA, 564 bp, Homo sapiens
tttaagttctgattacctcaactttcagcttttcaacgctggatatgaatccctggactcgtgagccctgttctcagaacccacacctttagcctataatatgtcttgatataggaagagttttgaggaaaaaaaaaggaatgagtatacatatccactctaaaaataacaaaattctatactaacatctgcagttagtagaggttacattgtcttagcactgaggtaggtaattgctatcaaagtcctcgtatattcccacagttcaccaacatctgcccttgctaagtagggccttccgagaggcccttgcccatttcttcttaaaggtaaacatcagaattcacaagaactgcctgtttatgtacctctacctctaatttagcttcagcaagtgaaattagtccatcattgtcaattctgcctaaaaggttttaacagtaaaacgcaatagcttgaagaaagtttctgttatgggggtttcttttgtttttgctttgcactttttcttcaacataaacactaataccaccacayagacatatctgttcaacaaagagttac

SEQ ID NO: 820531 - DNA, 617 bp, Homo sapiens
tcaaaatcttaccctgccatatttagttgccgctttagctagtgaaattacacctagcagatagtgtggcctcacaaaggaccccttcatcagtagaacacactcttgcactgtctgcccaatggagaagttggaaccaggtagatccacaatctcctccccattaccccatgagtagcccaactggccagtgttgggtccccagattgtgaccacagaaaaccaaataattgactggtcagaaatgccaaccccgttaaggcagtgttctgaataactactaattgtctttatctcattgttatgttgttaaaatgtcacagtgactcaatgatttaaaatttctaaccgttcattataaaagatagccctatagttgaaaatacagtattgccatattttccatattaagaagcaaatttcttaaaagctggtaaatttcttattgtgtagagttggcaaggttttagcataggtcagctccagctttttctcctstttaatcagaagtgaaagtttgtgtttcttatgtttcttaatgataatctttttcttttgaaaagcaaaatacatgaatattagatatggacatgaaaataccctttccctaaaagcag

SEQ ID NO: 820532 - DNA, 617 bp, Homo sapiens
tcaaaatcttaccctgccatatttagttgccgctttagctagtgaaattacacctagcagatagtgtggcctcacaaaggaccccttcatcagtagaacacactcttgcactgtctgcccaatggagaagttggaaccaggtagatccacaatctcctccccattaccccatgagtagcccaactggccagtgttgggtccccagattgtgaccacagaaaaccaaataattgactggtcagaaatgccaaccccgttaaggcagtgttctgaataactactaattgtctttatctcattgttatgttgttaaaatgtcacagtgactcaatgatttaaaatttctaaccgttcattataaaagatagccctatagttgaaaatacagtattgccatattttccatattaagaagcaaatttcttaaaagctggtaaatttcttattgtgtagagttggcaaggttttagcataggtcagctccagctttttctcctctttaatcagaagtgaaagtttgtgtttcttatgtttcttaatkataatctttttcttttgaaaagcaaaatacatgaatattagatatggacatgaaaataccctttccctaaaagcag

SEQ ID NO: 820533 - DNA, 528 bp, Homo sapiens
atatatatatataaattttatctctaaagttttgtggatctggtttactttgttgtttctgctcaatctgacacgtagttgcttattaytctctctgtgtgtatgtgtgtgtgtgtgtgtgtgtgtgtgtgtgaataaggtcatatttgttagaactctatctgtaggattctttgaggcctgagttaaagaggacttgttcaaggggggatctgtgtcaacttcttccaggagcctagaatttattttttcatatatagttaacctttatttttggtgaagttattttcataattaggtaaattatttatttattgttttctctcaattacattttatgtatgaggatagaaataagatcagatttcttaaaaaggcatatatgttccatctgtgggtaaaacagatgtttgtttgtcaagatgctctacatgccatctcacacagccttttgattccactttttaatgtttccattgcaatacaatacacatgcagcaaaatgcacatatcctaagtgtacagctt

SEQ ID NO: 820534 - DNA, 635 bp, Homo sapiens
tttgggaggccatggtgagaggatcacttgagcccaggagttcaaggctgcagtgagctataatcacaccactgcactccagcctgggggarcgcaaggtcaaacaaacaaacaaaaaccataattgactataagtgatatgctaagaaaggagataaaattgaatctcatacaatgctcaattaaaaccacaaaaggcagaaaaagtgtggaaggcaaactaggaagaaagaacaaaaacacaaataaaaatgttaatgaatatgatatatattaatcaaactatatcaataatcattttaaatgttaatgatagaaatataccaattaaaagacagagatttttagagtggatcaaaaacaagaccaaactatatgccgtctagaagaaacccactttaaatataaagacacatggagattaaaagtgatgagggaaaatataatatgctaacactaatttaaaaaaagaggaagtaactatactaatttcagacagagcagactttagagcaaggaatgttatcaagaatggatagagttattacataatgataaaggaggtaaatacttcatggaaacataataatcctcaatatgtatgcacttaacaacacagtatcaaaatatgtgag

SEQ ID NO: 820535 - DNA, 532 bp, Homo sapiens
atggaccatatctcaattagagctatttaagacaaacccacaggcaacatcgtactgaatggacaaaagctggaagcattccctttgaaaactggcacaagaaaaggatgccctctctcaccactcctattcagcatagtattggaagttctggtcagggcaatcaggcaaaagaaagaaataaagggtattcaattaggaagagaggaagtcaaattgtctctgtttgcagatgacatgattgtatatttagaaaaccccatagtctcagcccaaaatctccttaagctgataagcaacttgagtaaagtctcaggatacacaatcaattgcaaaaatcacaagtattcctatacaccaataatagacaaacaaccaagtcatgagtgaactcccattcacaatgactataaagagaataaaatactcaggaataaaacttagaagagattggaaggacctcttcaaggagaactataaaccactsctcaaggaaatgagaggacacaataaatggaaaaacattccatac

SEQ ID NO: 820536 - DNA, 398 bp, Homo sapiens
gaggatcctctctggaacaagggatttgactttcttctgtcttagctggtgtagtagatgctcattgtaagattcaaaaacattccagcttacaaaacatatccagcttaaattttaactcatggkctttagcaagtatagattcctcaagtgaaagggcatagaggcagagaagaatcaacgattttcatcaaaactttttaaaactgcctgaaggattcttaaaatttttattggattcctattgaattcatattagaaaactgtaaattttgcaatagttatttttaaacaaattatttcccacattcatttcatcacctggttttctcacttcactaaagacaaactttttcttttctttttttttttttttttttttttttgagacagagtct

SEQ ID NO: 820537 - DNA, 547 bp, Homo sapiens
atccaaggtaatggaattttttctagcatcacttagaaacccaggttcaggctggttggggtaacccaaagttggaagttttcaggaaggagtacataaggaggaggtataaaagaaaaaatgttgaagttgctggtaagaagaatctagactgagagaggaagaaatagaaccaggaggagactgatagacagggagaaatggaggagtcaagaagctgatgtcatgaagaaggtgaaggactgatggtccaaagtgagcatgttgtgttcagacactgagatgcatgggtttgagaatttagaggtggagcatttcacactgggagatgataaagtctccagtgtggcctcataactgggtggctaaagaggagtgtaatgtgagaccaacaatttacccacagatcattctttgggaaactgggggttctacccagatcccacttagtgtggggagtatagtggtcttacctcttactcttctcttgtgatcataattaaaattcaaatttctatcattratgttgtcatgggggtcctatgac

SEQ ID NO: 820538 - DNA, 452 bp, Homo sapiens
ttattttaaaagtaatttcttcaggatctggaattcatttttctgcttgttccaatctactgttgaagcttttgaatgcattttccatttcattcaatgaatgtttaatttccagaatttgtttttttaaaaatctcttttaaatttctcattcatatcctctattttatttcttagcattttttatattctattatatctcactaagatccttcaatctcatcatcttgaattctttatctgggatttcatacatttctttttcactggaatcagttgctggagagttaattgtgggttttttgcaggtgtggtactttcttrcttttccatttttcatttgtcttttatattgatatctgtgcatctgttataaaaatcacttcaattttttgaaattgctatcgtgatggaggactttttcctgaggatgtacccatggtgttggttgg

SEQ ID NO: 820539 - DNA, 452 bp, Homo sapiens
ttattttaaaagtaatttcttcaggatctggaattcatttttctgcttgttccaatctactgttgaagcttttgaatgcattttccatttcattcaatgaatgtttaatttccagaatttgtttttttaaaaatctcttttaaatttctcattcatatcctctattttatttcttagcattttttatattctattatatctcactaagatccttcaatctcatcatcttgaattctttatctgggatttcatacatttctttttcactggaatcagttgctggagagttaattgtgggttttttgcaggtgtggtactttcttgcttttccatttttcatttgtcttttatattgatatctgtgcatctgttataaaaatcacttcaattttttgaaattgctatcrtgatggaggactttttcctgaggatgtacccatggtgttggttgg

SEQ ID NO: 820540 - DNA, 636 bp, Homo sapiens
tttttatttttgttttgttttggaagttagtactagaaagcaacatttggaccctagctgtatttgttgatactggggtgtcatcaattctaggctttcttagctgacagaataagaaaatagatatttgtatactaacccatgtgtttacatatgtctattagtctgcacacaaatgcacacacacacacatatacaccacacatatatatccatccatatcaatattatctatattaagctaaacataagtttacactaatatctccaactctaaatcattaccccagggatcattatggcgttcttgcttatttataaatccccaccccaacagggataaacacagctcccaccagctgtcatttactcacttaattgttcaattccagtatatacatatcacagaatgataataaataattcacctataatcccacgggaaattacttattcatccacactacagtatttgtgtactgctacatttttgggggtgttttggctttgcttgtggtttttatttatttattttttgccttttgtcttakgcactccattcatttctaaatttactgagatcagcatcttcctcacacctgcctgtcttcatccgggttttttaatacacttgta

SEQ ID NO: 820541 - DNA, 629 bp, Homo sapiens
atagtgcttgttcaataatatttattgcataaattaattaatatgttatggcattttcagaatttagttttgaatgacttggttccatttgtgaacttataagataaaataaatgaaatatttcaacttcaaaatttctatttatttacaaagtgtgaatttaatgaagtaacagaaaataatggatctattaaagatatatcttctgatatatatatattttgagatatatatatatctaaattaaggagataatattttactatctcaataactctttactactcaaaaacagtaatgtgggcatggtatgattcctacatgatgaagtaggaatattcaactccctgtcagttctttcatagaattagagagaaaacagttaatataaaaagagagagataagaggggatttattatgggaattaggaattgttccacatgattatggcgttaagaagtctcacgataatgctgtctgcaagctggaggcccaggaaaactggtggtgtaattcaatatgagtccamaggcttgagaaccaggagagctgatggtgtaactcctagtctgaggcccaagaccggaggactggatgggcttctggtgcaagttccagagttcaaaga

SEQ ID NO: 820542 - DNA, 534 bp, Homo sapiens
tgcctgtaatcccagctactcagggggctgaggcaggagaatgacttgaacctgggaggtggaggttgcagtgagccactgcactccagcttgggtgacagagcaagactccatctcaaaacaaacaaacaaacaaacaaacaaaaacagtttgggctaactagagtccctaaactttctcattttctcatttgagaattgctttgtctttcctcatttcccttgggttctttatcctctctagttcttcctggcttttaatcctgattcaggctgtgttctcccacagacttcattttctaacttgagaaaaattatagatgtattatttcattcattcaaccaatatgccctgaatgcctactactacatatggagtactcttgcaggtgtttggggacaaaggcctcrgttctcacgaagtttacattccgatgaggggagacagataataaataacaaatgtgaaaaagaagtaaattgtataacatgttggaaggcaataaaagtcatgaaagtaaaaaggaaaaagtc

SEQ ID NO: 820543 - DNA, 642 bp, Homo sapiens
tttcacgtgtgctttcctcttytttctagtcaaggcactaagattcctgggggcatctcttagtccgaagctcttcgccacatgcccaaggtggagggatcggacgtggaagatgtgcttcagctccctggggtaggtggcgtaggcttggatgaaggactgcagagctgaaagaaaagagagcggggagggaagctgtcaggaccggggtctccaagctccaaagtgcccggcctaatggttatcttctgtactttatcttgccaggcaacgaaacatgagcaggacaattacaacatatacaaacaactaaaatctagacttctgtgtatttcttcaattcctaaacaacaaaaagaaaaaaactacagggggccacaattattacttgaatatgcccgataaaatatcagatttgaccacacagctcctaacaatcccacagggtggggcccagcacagcacctggtaccagcaggcactcggtagatgtctgttgtgtaaatgagtgaaaagagagaataggtgaagaaactaagaaatgatcaacacaggacattgttttcttatgaaaatgagaaaatcattagacatttatattaacacatttttcctaattaaattttacttacttttgaatag

SEQ ID NO: 820544 - DNA, 642 bp, Homo sapiens
tttcacgtgtgctttcctcttctttctagtcaaggcactaagattcctgggggcatctcttagtccgaagctcttcgccacatgcccaaggtggagggatcggacgtggaagatgtgcttcagctccctggggtaggtggcgtaggcttggatgaaggactgcagagctgaaagaaaagagagcggggagggaagctgtcaggaccggggtctccaagctccaaagtgcccggcctaatggttatcttctgtactttatcttgccaggcaacgaaacatgagcaggacaattacaacatatacaaacaactaaaatctagacttctgtgtatttcttcaattcctaaacaacaaaaagaaaaaaactacagggggccacaattattacttgaatatgcccgataaaatatcagatttgaccacacagctcctaacaatcccacagggtggggcccagcacagcacctggtaccagcaggcactcggtagatgtctgttgtgtaaatgagtgaaaagagagaataggtgaagaaactaagaaatgatcaacacaggacatygttttcttatgaaaatgagaaaatcattagacatttatattaacacatttttcctaattaaattttacttacttttgaatag

SEQ ID NO: 820545 - DNA, 591 bp, Homo sapiens
ttgtaggtccctcctccctgagaaaaaggccagactcattcccaggagggtggagctttggtctacttaactaggcattcccttgaggaaagattctcgtagattgaatatctggaagtaacaatgaaaatcaagtgtccacccgcttctcactccaacaaggaaggagggggacatcctgcaaacactccccgccatccctgtcactgctctcttcacctccaatcctgctcttctgccagctgagccagagcccagccgatggtgtctgatggaggcaagcactgaatgccagccttcgcttcctcactctccttgttgagccactggactggcaagtttgcccacagcttaaacataatatcccagcagcacctggagattggcgtttatgaacagtaataaaaagtgtcattttagcagatcagctcctggaaggatcctggggaatccatcaaagctctatttactgagtaaagtgaactccttttcccaatcgatgagcaataataaccaaggcaactcctctgtacccyactcttaaatctgtgcttactcccctttttaataactagggactttttcaaagaa

SEQ ID NO: 820546 - DNA, 618 bp, Homo sapiens
gccagatggctcccatactcattctcttagrccaagttctgcaagaaacagactgtgtgagagagatttgcacccaggtttactggggagtgtttttggggaatgaggccaacaggactggacagattactggggagtgctcttggggaatgtgctgaacaggactggacataggaaaaagctaaactgtaatatagttacagctgtaaaccttagccaattcctcaaggacctcctcactagcgtgggcggcccttaaagttgtctcaatttaagcagggctgctccctgaataggggagtaaccctgggcaagaaggcagcttccctcctctgaaagcaattcccagcgaaagattcagctgtgacctatgagcagccaacactctaagcaattagagaatgagtgcctcagtcctacaaaggtaactgtgcagcacaccacagcatcactatacccactcatttggcttcatttcttcacacctgaccctgccctgctggagtgctgtttttcctgttctactgtttatcttacatttcctgcccagatcgggaatcactcattcctccaaaatgccctacttccttttagtcatactcagagactactttgggg

SEQ ID NO: 820547 - DNA, 614 bp, Homo sapiens
gccaagaagggcccaacttgttgataggggaaggttctgcacaaactggcaaatcggcttgcaggctgaacttcytacacagctcactactgtgctgattcacagaactgcagaactcactaagcattccggcccctgtgcactatcttggtacccatcataaaggcagctggagacaaatacaggaaggatcctcaacctaaattcccatcactccttccacagcactctttgctcgcaagctcttggtgtaggatgcgtctctactcttctccatatgttcatatcctacctttcctttaacgttaatttcccaaagaggacttttgtgtgccccctgctcctaaaaccaaaaccttctctgaatcctggaagcactctgaccaaatgggctctgagaaacagcactgtgacccacatttttctgtacctgttgtttcttgactcatgattaaggtggtaattccctttaggacaaacttcattttttgagtttgttgtgttcctgcacacaaaaagcactcagtagatatttatggatgttgaacagcaaagtaaaacatactgcttcatattcaaagggctgagagatgtttaatagctaaacataaaaa

SEQ ID NO: 820548 - DNA, 609 bp, Homo sapiens
attatagacactctgatgatgactttaaatatgtctaggatccttatgagaagaattataagtaaaagtgacaggaattatgagacaaaataatgcataaattaaaatcacagtcagctattgaaatatatttaattttcaagatttctgattctgttcattatctttttatattttttctattttaagcattttaaagatgctttggccagtatcaaattgatactcctaagggtgtatcaatttgacttgactaaaagtcccagaaatattaaagatgacaagatagaaaaatatgcctcaaagaatgtagaaattacataaagaactaaattgtctaattttatgtttaacagtttcccaaatgtgacaacaactctattgtcccaaatgtgacatttatggaaataaagtgtacaactgaaaaacaatttccaaaactattgatgacaaaaagcaaatttggatcaaccacactagaagattgattgatttactatttaattctctctayaaacaatgacattgccaaattattgacatgtgagaaggcaatccaaagaagcagccaaaaatgtactgagaggagctaatccaggaaactctatt

SEQ ID NO: 820549 - DNA, 663 bp, Homo sapiens
atgactttaaatatgtctaggatccttatgagaagaattataagtaaaagtgacaggaattatgagacaaaataatgcataaattaaaatcacagtcagctattgaaatatatttaattttcaagatttctgattctgttcattatctttttatattttttctattttaagcattttaaagatgctttggccagtatcaaattgatactcctaagggtgtatcaatttgacttgactaaaagtcccagaaatattaaagatgacaagatagaaaaatatgcctcaaagaatgtagaaattacataaagaactaaattgtctaattttatgtttaacagtttcccaaatgtgacaacaactctattgtcccaaatgtgacatttatggaaataaagtgtacaactgaaaaacaatttccaaaactattgatgacaaaaagcaaatttggatcaaccacactagaagattgattgatttactatttaattctctctataaacaatgacattgccaaattattgacatgtgagaaggcaatccaaagaagcagccaaaaatgtactgagagkagctaatccaggaaactctatttattagatgatgctgaaggccagtgtcataactccacatcccagcactagctgcatctccagcccctcagca

SEQ ID NO: 820550 - DNA, 539 bp, Homo sapiens
agcaaacaggctctttggtatttatccaaaagagctgaaaacttatgtctacacaaaaacctgcacacaaatgtttatagcagctttattcataattgccaaactttggaagmaaccaagatgtccttcagtagctgaaaaaaataaactgtggtacacccagacaatggaatattattcagcactgaaaaagaagagctctcaagccatgaaaagacatggaggatagtcaaatgagcattactaagtgaaagaagccaatctgagaagtctacctactgattccagcaacctgatgttctggaaaagtgaaaacaatggagacagtaaaaagatcattggttcccaggagatgggaggtcaggggagggataagtgggtgaagcacagaaaatttttagggcagtggaaatagtctgtataatactgtagtgacggatcatgtcataatacatttgtccaaacccatagaatgtacatcaccaagagtgaaccttaatgtagactatggactttgggtaattatgatgaatctaaat

SEQ ID NO: 820551 - DNA, 497 bp, Homo sapiens
ttatcatgaaaggatgttgaattttatcaaattcttttactgtatttgttaaaataatcatatttttgtccttcattttgttgatgtgatgtattactyttattggtttgtgtgttttaaaccatcctggcatccctgggataaaccccacttgataatgtttgactcctgtatcagtgagtttcatactttctgtgttttcattatggcaaatatcatcctttcatttccagatataatacctctgtaagcatttcatgcagggccagtctagtgatgatgaattctctcagtctttgtttatgtggaaaagatttcattgcagtttttaaggataactttcctgggtaaaagttttcttggctggcagcattttttttgtcagcaatttgaatataccatcctattctctcctgacctgtaagttttctattgagaaaccagctgttagtctgatgggaatctccatatatgtgactggactcttttctcttgtt

SEQ ID NO: 820552 - DNA, 638 bp, Homo sapiens
ttaagttttaacttaatctcgaaaagaackaagaaagctacatgatctcacaaggagaaatacatggaaaattttccagctcattgcccctgactttttatacaattatgcgtttgtaaatcctaattgtacctctgcgatctgtatcagcacactctattggaagtggctctcattatgatctcagacctagcacagagttcctgaagtacctacatttctagaagacatggaaactttctgagagtcagaaagttctgtgcaatttcagattggttcattagcataattgtttcaacattaaaaagaaagattcaggcaatttaagatgtttatgtagaaaaatatgtctataactgtctcctcgacaacgtaacatggaagaaccactgattcactgtccagaatcacctcatcaatagcaaaaagtgcttccacttctttaactgttgctcacaagtattggcatcctgcctataatttctttcttgaagaaattctgttccattaattctgaaattcaggcacttccatatactcacttaatcttacacatccatgctaataatgattatttacttaaaaatgagttgatggctctaaagaatgacagagggatccagccataccgtttgtag

SEQ ID NO: 820553 - DNA, 579 bp, Homo sapiens
atagaatggtcaacattgagtttttcagcaacttcttttatggttgtaagaggatcagcttctgtgattgatctcccaactggtcgttgtcaacttctgatggccggtcattgcactcytcatcttcaaggctctcgtctcctttgtaaaacttcttgaaccaccactgcactgtacgtttcattagcagctccttggccaaatgcgttgttgatgttgcgagttgtctccagtgctttacaatccattttgaccttgaataagaaaattgctcgaatttgctttttgtctaacatcattttcacagtctaaagtaaacataaacagcaaggaataagtcattagcaaaaaaatgtaaagtgagaaatgcccattaaaataatgtataacataaccacatttatttaagaatgtactcgaatatcaaatgacaaattccaacagtgtaaaaactgtgattccttttgcaccaacctcatactagccaggcatctttctactgaaactggctggagaccatgtctcagtggtggagccggtataggaggcttcacatttcttcccctaggacacgctgtc

SEQ ID NO: 820554 - DNA, 551 bp, Homo sapiens
ttagggtttttggggatccaataagaaaatacatttaaagcccctggkggtggaggcggtagggatggatgtggtttgacttgaaaaaggaccaaaactggccttcttgggcccttccccttgttattctctcatctgggcaaactgggagtgtatggtgcttttcagaattgcttaacttctacagaagatacaccatccatggaatcttcaaaaataacaaagccagcaggccctttaggcactcaatctgtgccctaggttttggaaacactatgcttcatgctgctgcccaagtgctgtctttagtacccttcctttacaattattaattaattaactagttaatttattttgagacagagtcttgctctgtaacccaggctggagtgcagtggcacgatcttggctcactgcaacctccacctcccaggttcaagcaagtctactgcctcagcctcccgactagccaggattacaggcacgcaccaccacacctggctgatttttgtatttttagtagagacggggtttcaccatgttgaccaagc

SEQ ID NO: 820555 - DNA, 685 bp, Homo sapiens
ggggaatcaggatccctttaatcatttttaaacgattagtagagggagacgcttgaatcagagcattttctctgttgcaatgttccccttttccctattacaatacctcctccctctcccatacaataatctttccaataaagtctctccttaccaggttagaaaacaaattaatagaggaagcagacaacaagatctttctttttcaaaactgctgaatgataaaaatgcctgacaattctgttgtaatcgattgctcaataaattattgctgactgattcatgtgctatgaatcagtactattctcagtggtgggaattcagagataaaaatcctagttcctgccttgggtgctcatgctctgactctggagtcagatgacccattttgattcccgcctctgcaacttactagttctctgtgcttccatttccttatctataaaatggggataaaaataggacctcctccacatggtttttacaaagattgagtcaatgagtcatgtataaagtgcttagactagtgcctagcacataattagtgatacttaagtgtttgctcttactattagttgrattaggctatttttgcattgctatgaagaaatacctgagactgggtaatttataaagaaaagaggtttaattggctcatggttctgcaggctgtacacacatggca

SEQ ID NO: 820556 - DNA, 613 bp, Homo sapiens
tttattaatttttgcaaaaccagttcctgggttcattgtttttttgaagggttttttgtgtctctgttgccttcagttctgctctgatcttggttatttcttgtcttctgctagctttggcgtttgtttgctcttggctctctagttctttcagtagtgacattaggatgttgatttgagatctttctacctttttgacgtgcgcatttagtgctataaatttccctcttgatgatgccttagctgtgttccagagatgctggtacactgtctctttgttcttattggtttcaaagaacttctgaattcctgccttaatttcattatttacccaggagtcattcaggagtaggttgttcagtttccatgtagttgtatggttttgacagagtttcttaaccttgagttctaatttgattgtgtaaactttttgaaatataataacacttagctttaaacacaatttaaacacaaatatatgatacagctgcacagaaatayatcctttatatccttattctataagcctttttaattttttatttacttatttatttttgagatggagtctcgctttgtcgcccaggctggagtgtgccgtggagtgatcttg

SEQ ID NO: 820557 - DNA, 613 bp, Homo sapiens
tttattaatttttgcaaaaccagttcctgggttcattgtttttttgaagggttttttgtgtctctgttgccttcagttctgctctgatcttggttatttcttgtcttctgctagctttggcgtttgtttgctcttggctctctagttctttcagtagtgacattaggatgttgatttgagatctttctacctttttgacgtgcgcatttagtgctataaatttccctcttgatgatgccttagctgtgttccagagatgctggtacactgtctctttgttcttattggtttcaaagaacttctgaattcctgccttaatttcattatttacccaggagtcattcaggagtaggttgttcagtttccatgtagttgtatggttttgacagagtttcttaaccttgagttctaatttgattgtgtaaactttttgaaatataataacacttagctttaaacacaatttaaacacaaatatatgatacagctgcacagaaatatatcctttatatcyttattctataagcctttttaattttttatttacttatttatttttgagatggagtctcgctttgtcgcccaggctggagtgtgccgtggagtgatcttg

SEQ ID NO: 820558 - DNA, 588 bp, Homo sapiens
agctggagttctcatctgtaccctgagaatcatatgcaactcaggaatgggtatgggatgagtatggaaagggattayaggggtaagacagggccaagcttatagtaaaggatcagcaaatattaatttcttaaattcaactgaaacagtacaaattttgaagcaatttatacattttaaagatattttaaaatattatatacaaatgtaaaatgttacataatgatattaaaatttatataaatatttttaaagcaattttttgggaaaaatatttacttgtaaatcaatttattttttccaacattcacattcatttaactttgaattggcatctacagaatattgtctctgccctgctaaaaggaacaaaaatatacaaacatagttggcaataaatttaatattcaaattgcctatgaattgttacataaatctgttagccatgtcagatgttttgaatatatttattacagagtatttgtttgtcaacaaggtaaaacacaggcctggaatataaccccaaggaatgactcaggaaaacatcacacgtgaacatttcagtctgctcaaacgttggcttcattt

SEQ ID NO: 820559 - DNA, 507 bp, Homo sapiens
gcaataaacatgggaatgcagctatctctttgatatatttattttctttctttggatatataccaaggagtgaaattgctggatcatatggttgttataatcctagttttttgaggaacygttttccttatgactatactaatttacattcccaccaacagtgtacaagtgattccctttctctgcatcctcggtagcatctgttattttttgtctttttcataaaacgattttaaatggggtggaatctacaaaaaataatcagaagcaagaagaatgagaataaaaataatgagaagcaaggggcacacaaattgataacaatgtgaaggcaaatttaatgaacattttttaaaaatcactattactaacacctacttctgtattaaatgaaaagtgaacttaattttggacaacgatatcaagggaaatagagaaggagtgttttctgagtagttactgaaagcatgaacaactcacagaacaccccatgtactaattaaaaag

SEQ ID NO: 820560 - DNA, 608 bp, Homo sapiens
tatgaagatagaaaataatgacacagtgaaattcartgatagattaaatcccgtggagaattccccatgtattttattctggggatccgaaaggacaggttttctttgcctgttgtttcataatcttttcctctagcaaatattgcctcttgaattctctcctacaggttttgcatgcctgaagaagaggctgagcccacagttacaggctgttgaatagccacagggttagatgttggcaagggtttcgtctcttttaggcttctcaaaaaatttaaaaaacaaacaaacaaacaaaaacacaattcttaaaaaccaccatagggagcataaagaaaatggaaaagagcagagataaagaaacagaggcattgttttctgcagactaagcctgctgagctacgtgcactgcacaatatttacttccctgctttcattgaaaacgccaaatgtgcctatattattctaaaaagtacagctgatccttctgtttgggccaacaggtctataggccagaacacattccaaagcttttcccttgaggctgtctgcccaaagccagataacatcttctatccatagggcttggtctgccttggtggatgtca

SEQ ID NO: 820561 - DNA, 568 bp, Homo sapiens
aataacaattattattctcttgttttcttacaaacaataaattatacagtaaaagattatatatttagaaattatttttgttttaatatgtttgttaccattttccataaatatckatctataaatatatttgtacagcatccaacccacaaggtcattagcataatagatattaaatataacaaggcattcaaacgtagagatttaaaaaaatgggaactgaatgtcagtggaatttttaaaaaacctgctttttattccatttgttctttaaaaattttatacacaagatttttcacgttccacattgcgtaagtttcacacattttcttaagtctttactttttcataatatgaataaaatcagaaatacctgaatatgctcaactaataataatagacaagtccactattgcatttagtagtaaaaaacaatatagcatttcagtataagttggaggtgcttagtatccacattataaattgagataaaatcagtatttatattcatatttcctcattcactctctcccctcccactctctatctcaggatgtgtaaataaaat

SEQ ID NO: 820562 - DNA, 646 bp, Homo sapiens
cataagcaaagacaatatactgtcttatactaacgcctttaaatgtgttaaatagtttcatcttaattctcccaataactctatgagatatgtataagcatgttatgcatatatgtatatayccatgtatatacacatacatccatgtatatacataaatatataaaatattatacccatttccagtaactttttaaaatttttcctacatgattatttattgtagctatatttttacttacacagctgataaagtacaatgatatttctctccttatgcacatattcaaagatacaagctgtccagaaacatatgcaatctcatctgcctggtttacaaatccagtgttgtcgaattcacatcaagatcttctattaagttcttcctggatggtgcatataagagtgagggtgacaggcatggtgctttatctctcacattcttttccctgaactttacaattgcagatattcctcaattcagtcattaatactgatttttttttaaccaagtcagcttcttttttcatcaatttataatttcatcgttctcccctctcctccaataattccctggcataagacaattactgttagaagctacagactaacattcgaattggtttctaattagaagttgaatcat

SEQ ID NO: 820563 - DNA, 616 bp, Homo sapiens
aacctcaaatctccatggacctcaaaacagtaaaatctacagagtagtccattacaaaatgagacagaaaggacataggatcacatccttatactgccacttactagtagtgtactttggcaaatcattcaatctcactaagcctcagcttcctcatatgtgaaatggaaataataattcccactttacaggtttgctgtgaggtaaaggggttaatttatgtgaagtaattagcacagcgcccaacatatagtaagtactgaatgaatagggaggtttattacacaaaattgctgagagctttgttaattgaaaacaaatgaaatcaaattctataactagctcttggtctcatcataaattcaaagcaaaatgacaacatgaaaaaaatcttcaggaaatttctatcctatgatttgttgaactttatcttttttctgtcttctacagtgtatatgtttatttgctggacaaacaagcattcagttcacgttgatctttttataaataatgaaatacatgaagaagtattgggcaagcaaacattagtkggctttgcaaagagatatctctgtcttcaaatgatcagttagtataacaagatagaaagagcata

SEQ ID NO: 820564 - DNA, 643 bp, Homo sapiens
cccaccaggccccacctcaaacacaaacactggggattacaatttatcatgagatttgagtgggaacacaaatccaaaccatatcataagcaaaatgtaaaattgttaaggatggggaaagatttataaatgtagggttcaagttagtgtaaaagcgatagcattgtccaccagtgactgttactgggcctgtatctttatcatagtggatcatagttccattattgtaattatgccatagttttgtaaaaacctttatctgttatttgagatataaaatgttgctatctggcaatttttaggttgtagtctcatcttttaggttagaaagtatccttattttataaaaaatctctctctatatatatttagattaatcttctattaaggactagatattcatgttcaaacattaggttttcctgataatccactttttagataatctcagtttttattttagatttaggggcacacattacaggtttgttacaggggtttactgcatgacaatgaagtttgggtatgaatgatcccattacycaggtagtgagcatagtacccaatacgtagtttttcagaccgtttcccttcctttttcccccgtctagtagcccccactgtccattgttcttatttttgt

SEQ ID NO: 820565 - DNA, 648 bp, Homo sapiens
caaaacctgctatagaaatatactacattgtcaatatgaataattaggtatagagaatggcacctgcttaaaatcctttaatctcactgatttggtgtgtgttgtttccccartgggttacatgttaccgataacctgtcagaatttgaatatcgcagaggattttcaaagtcagaagaactgagtaataaggagatgaaagactttttcagaagacttttttttaaatggaaacttatttttaaatatagaggaatgtaagaacttgcaagtaagagtgaattggtttgcaaagtagattctgttttcccttcatgtgagctttattggtttatattctcttcaaattttcttcatgtcatttggaaacaactgctgttcaaaaactatatcttcatatgcaagcatttactataaaacttttctttaatgtgtttaaagcatttctttttcacttaaacatttttcctttattttaagctagtgataagacagaatggtgatatgtccatttgcttcatttgatatgcacatttgttctatgggaaaatgtggtctactcctaatttcattttcgtttcctaaataagaagacccattaaaaagcagacatctggtgtacaaagcacttaaagctgtagctcccaa

SEQ ID NO: 820566 - DNA, 610 bp, Homo sapiens
gaagcatgccaccacgagctgaggctctattttaagtmcctgagatagttaataaaacagaacatcctgccttgaaggagtttctgttcacatggttgcatcaacacagaccatgacatttgcaaaggaacatctcttgggtcatcgggaaggcagctggtcctgtagctcatatgccttcaagttagtttaaaactatttcaatctattccaatttgtctagttgtttcatgatctaacaagaattattagaaccttcagcaatgcctggcttggaattccaactgtcctctttaagaacaagcaagcagctttttgtggcttcatttcctcaagcttgagctctgcaacagcatgggagtcaagagttcagggcggtcacaggagatctttggcctttgagggcagggcctagagaggctgagatggggaagtggcgcctgactcttcccacccacattcacaaatatgtaagtgttctactaagtactgtggcagtgacaatgatgactaagacatagctgtgtcttctggaaggaaattcacagaatactgggggtgatgaagtcatgtattaagtataacactagataagagggacatcctgcaa

SEQ ID NO: 820567 - DNA, 575 bp, Homo sapiens
gatttttttgtaagaaagtagaagtccagcaaaaaacaaaaaaacgaacaaaagaaacccctgttatccaagaatcacatatccagcaaaactatccttcaaaagtgagagagaaataaggacattcccagataaacaaaagctaagggagtttatcactgctagacttgctgttcaagatgtgctcaagagagtcttgcattttgaaatgaaagaaaactagatagtaactctaagtcatatgaagaaataaagatctcagtcaatgtaaatacatgggcaattattaaaactagtattattataatgatgatgtgtggcaccatatttttgtttgttgtctacataattaaagagactaacacattaaaaaactagtctaaaaggtaagtattgcatatttctctttcaatactatttacgattcatttacatttaaaaattaatagtttatgtttttggacacacartgtacaacaatgaagttttgtggcattaataacagaaagaaatgaggacagaactgttagaagagcagagttttgtactaaaaactataaaaagggcagagttat

SEQ ID NO: 820568 - DNA, 610 bp, Homo sapiens
caatttaataactcaaattctagaagtatggttttaaattagtaatgtcttctgtgctttattacttgactgccaagttaaaggtgattccgttagagttcctaaatacctggttcaatttgggagaaaaatgttcccttaaaataatgtattaatagtattagagtgctgctgaccccactgtcaccctatttaactagcaaaacacctcttgctctgaaataattgggaaaataataaaataaagagaaaactgtaagaaattgttatatgccaagattttttgttattctcagttgttctgcaatgctatataaaaaacatttaataaatcaaatattaatagttttttaattacttgactataatttttaaagtttaatggctcttgtgagagaaatattaacaaacttttaaactttacagcaccctattgaagtgtacattttttatatcagattaaataaccaatgaaatggatagtacctgccacatttttcagttgaataagattctccattgtctttaagaaatatgcagtacaaaatgtstaattataataacatttattacatctctgtttcttaaaatccctaaggtaaaataggtg

SEQ ID NO: 820569 - DNA, 581 bp, Homo sapiens
tataaacagtgttgtcccagatgctgagtgtcatcttcttatactagggtaaaatccatacttaaatgctccccactaattgtaaccccaaaatactaacctggtgactcacrttataaatctgaggttgaaaaccagcaactcatcatgacaacaattgatttggacacatcttaatatacaggctcatttctcagcctcagttttaatttggtgcttgagatgaaattctgtttatgaaaattaaatagaggttaactgaagattaggctgttctgctttttaaatgttctcggctttaatatgacaccatgtgacatccaggttttatttctgtttgtgtcggtgtcatcttcctgactcacttcctcaaaccagctaataaacacaaaaggtgaatacaaattagtatgcttgtcacagctgctatcactctggaattcccttttaaaaattcagaatatgaaagataagtaaaacaatgcctgcttattgcagcttaatttctaggaaagattggtgtccagaagccacatctcaggcagtactctgtcaatgttaaagagctttttagctagaaa

SEQ ID NO: 820570 - DNA, 696 bp, Homo sapiens
caatgttatgtcccctaaaaaaatgatttataaggaattatgcagacattttggcacttttttttccacagtttttattacacttgtgacttgtaattctataaacagtgttgtcccagatgctgagtgtcatcttcttatactagggtaaaatccatacttaaatgctccccactaattgtaaccccaaaatactaacctggtgactcacattataaatctgaggttgaaaaccagcaactcatcatgacaacaattgatttggacacatcttaatatacaggctcatttctcagcctcagttttaatttggtgcttgagatgaaattctgtttatgaaaattaaatagaggttaactgaagattaggctgttctgctttttaaatgttctcggctttaatatgacaccatgtgacatccaggttttatttctgtttgtgtcggtgtcatcttcctgactcacttcctcaaaccagctaataaacacaaaaggtgaatacaaattagtatgcttgtcacagctgctatcactctggaattcccttttaaaaattcagaatatgaaagataagtaaaacaatgcctgcttattgcagcttaatttctaggaaagattggtgtccagaagccacrtctcaggcagtactctgtcaatgttaaagagctttttagctagaaacaaaaaagaggttgta

SEQ ID NO: 820571 - DNA, 405 bp, Homo sapiens
atcttctttggtgaggtgtttgtaaagctctttggcccatttttcaatcaggttgtttgtgttcttactgttgaattttaagagttctttgtatattttggataacagttctttatcagatagtgttttgcaaatatcttattccagtctgtggcatatgttctcattcacttgactttctctttcacagagcggaaagatttaattttaataaagtccaacttatcaattctttcttttgtggattgtgcctttgctgccgcatgtaaaaaatcatcaccaaatccagatcatccagattttctcctatgttatcttctaggggttttgtagtttagtgtttwacatttaaggctgtgatccattttgagttaatttttgtgaagggtgaaatgtctgtctaga

SEQ ID NO: 820572 - DNA, 551 bp, Homo sapiens
ctgatttctaggaactacctgcactgacttatgccctagggccataaagatgagtgaaacccaacacaattctcagatgcctgaaattccatctaaaccattcttttagcttaaaatcatgatttctgcgaacacatctttgagaagacttaagcttttatcaagtattaaaacctttgtgtgaatggaatattcatggtagggatgttagctgtcctccaaagttcatgctctttctttattaggctagtgcaaaagtaattgcgggttttgccattattggcaaattgctgcaattacttatgcaccaaactattatattgcggagttgttgctgagaagtggctgtctaggtaggaactatatttcccagatcttcttgcatctgggaccatctgactgagttctgaccagtggagtgtggctggaagtgttgtaagctgcttccaaacccagcctatggcaaccttctgtgtaattatctgcttgccttgccctcttcttacacctgctrgctgactgtccacaccccgggtctctttggaagtcaa

SEQ ID NO: 820573 - DNA, 564 bp, Homo sapiens
aagggggaacacgtgggcttctttaaaaaatcagaggataggataggattactaaattcattttcattttgcttactgctgtcactctgacagcgtttcacacaaatgtgacattgtgtgtacttatgaccaakgagtcatttgttgggtatgatttcaaaagagtcaatttgtattatcctatgtttggaagctctgaattattgagctaaggcaaggtttatggcctttatgtttgctgtctagcaaagagtattgaataatgaactacatttttaatcaaagatttccttttactctaatcctttatttcccagtggccctaacctgatttattgtgttgagtgctctacgaggagtctatgtaaccttggtgttctcctgagagaagatgtatattgactcaggaagtagcaaagaaaataatagttttgactcctggaagtacttaagttttaggctatcagtccatttatctatccattcatctctccatcaaacatatcattcccccacatacaaaacattaaaggagctacaaagataaagatgatttagtcccca

SEQ ID NO: 820574 - DNA, 544 bp, Homo sapiens
aaacatgaggtacagagtgatgggtgatgaattctattagagaatctggagtcttggtccttcttcatttcatccagattttgctcaatgtgacattccttagaaatcttcccttctccmtatccctccctatcctgtggacagctcaaacatgtttttatctccttgcctagccatgtttttgtcacgatgtgcaaatataccatatatttgtttattaaaatttgtgtatttctgccattagaatgtgtgctcatgagtatagggattttgtccagcatgtgaccgtgtccccagagctgtagtgcccagaacatagcatatgctgcacccgatatttgtggaaaggatgaatgaatgatgggttctggaaatacagtttgctaccatggaaacctgaggactactttatactttaaagactatagtctatagactggaggggattggtggctgaccaaaaaattaaaaaaaattatttttctttttacatctttaaagattgcccttaagaaaaaattaatatcatgtaagacatgaggag

SEQ ID NO: 820575 - DNA, 478 bp, Homo sapiens
tgaacatttattgagcacttagaatgtatttctgatatatcagctcatttaatcttcacaactactatgaggtttatcattgcctctrttttacagatatggaaactcaagtaacttgccccaagtcatagcggaccctgcaatcaaatgcagccaattgggttccataacctatgcccttaacaatcccacactgccttttcaactataccattacaacaaaatgtggaaagcggtgacataaaataaaaacagggtgctatgcggggaaaaaacatgaacagcgtactcagtctagaagagcaaaaaagacttcccccgaggatgtcatttgagcttaaccctgagtgaagaataaggtggacaaaacaagagagttgcggtggaaactccaggattaggaaaagcctgtagagggcccaaagaaaaaaaaaaaaaaaaaaagcagctgctggagcaagaaagtgagtgcatggag

SEQ ID NO: 820576 - DNA, 557 bp, Homo sapiens
acttataatacctaatactatgtaaatgattgtcatattattcaaggaataatggcaaggaaaaaagtccacacatatttggtacagatgcatttttttttycaaatattttcaatccacaattggttcaatccatggatgcagaaaccacagacacactacagtaaccaaaacagaatggtactggtacaaaaacagacacatagaccaatggaacaggacagagaactcagaaataaagccacacacctacgaccacctgatggttgacaaagttgacaacaaaaattgaaaagtgagacctaattaaactacagagcttctgtacaacaaaagaaacaacagagtaaacagacaaccctacagaatgagagaaaatagtcacaaactttgcattcgataaaggtctaatattcataatctataagaaaattaattcaacaaacaaaaaaccaccccgttaaaaaacgggcaaagggctgggcacagtggctcacatctgtaatcctagcactttggaaggctgaggtgggactgaaaaaacaggcaggtgcatt

SEQ ID NO: 820577 - DNA, 615 bp, Homo sapiens
gccaattgtctcatcctgttcttcagcatctcccatcaagatctccagtggcctcacaaattacaaccagtctctaaaagctgaatgtcaacctgcccttcaaaggccctgtgtcccagtgccaaaaggcagtagtttaaagaaacagggaacagtcttgctggggcctacttctcgttggaaggagtgtacaaaatctgaccttgccagtgggtggcctctatccagccctcaaggcatcctccaggcagttctcttgtggagcactagtcagtggctctggaggcaggattcccagtggtgcagccacaaagcttcacctgggcctggcccctgaggacaatattaaaggatctgtgttgggagtgcaattagttctgtatggaaaagaaggctgattcttcactctctggcaaggtcaaggccaggagaacagacggaaggagagggcaactcttggtctctggagagacagacatccttgcagagatctytcatccatgggatcaccattggggacctagacaaacctcatttttacatcacaagaggttattgggtccctggtatgtattgagaactgaactcatacaaaaatgagtacagcacaggttc

SEQ ID NO: 820578 - DNA, 392 bp, Homo sapiens
tatcagtatgttcagctcccctgktctttgttcttcattttaaagtttaacttcctcattctttatgtctccttgcccctagtttcagtaaacaaccccctcctagcctctatcacctagctccatcctgagtcaccccaggtcacctgctccattctgagtcactcctaatcacctgctctgacctgagtcacctttagttacctgttctgtaactccttcccacgaaactactcaccctgccactccagctcatacccctgctctgtttaaaatagccaatcagaattagcttagactgtgtggtccaaccctagccaataggtgaaagacacagcagtagagattagctgcgttaggataagaaccccttcccctcccttgttcagttg

SEQ ID NO: 820579 - DNA, 556 bp, Homo sapiens
agaactacttttcccactgagaacatacacaaagggatttcaatgcctgtccttgaatcaggaatgaattgggaataatgactgaattttttcttcatgaaaagtgtaaacatctattaactcaygttatagactcaaataagtgttgaattaggcaatatatattgcctccatgttttcagactgtaattttttaagtatctaacttgataaagcagctgtgggttgtatttacgtggaatcactgatattcacaagaacagcctcaagtttactttttatggtagacaatagattttgaaattaagtaattattgttatattgccgaaaagtatgtccatttatatgaatcaactaatttcccaaagtagtgtccatttaaccaaaaaggaagtgatccacacctctaaaaatatcattagagggccagtgatgactttagacacagtgtgtgctcaaattcacagagctgacaatgtgctgataaagataagttaaattccagaaacagttgagaaataatttggtggttaagaacatcagaaaacaacagac

SEQ ID NO: 820580 - DNA, 540 bp, Homo sapiens
ttggcagaaaccctacaatccagaagagactggggccaatattaaacattcttaaagaaaagaattttcaaccagaatctcatatccagccaaactaagcttcataagtgaaggagaaataaaattctttacagacaagcaaatgctgagagattttgtcaccatcaggcctgccttacaagagctcctgaaggaagcactaaacatggaaaggaacaactggtaccagccactgcagaaatatgccaaatcgtgcagaccatagacactaagaagaaactgcatcaattaatgggcaaaataaccagctaacatcataataacaggatcaaattcaaacaaaacaatattaaccttaaatgtaaatgggctaaatgaccaaattaaaagacacagactggcaaattggataaacgrtcaagacccttcgatgtgctgtattcaggagacccatctcaagtgcaaagatgcacataggttcaaaataaagggatgtaggaagatctaccaagcaaatggaaggcaaaaaaaaggaagggc

SEQ ID NO: 820581 - DNA, 514 bp, Homo sapiens
caaaatacaaggttgataacaggtactttaggagaaataagtaatgcatgtggcatacatagaagaatgtataatccttagagcaatcatcaaattcaggatggtgaaagagaacaggaaatagcctgcagacatgtactgaggaacacataatgtattcctaatatttcattcttttaaaattaatcctaatcaattttgacaaaatcttaagatatgatgggggtggtcactgttaatcttactcttctgttacttctctgattttttgaactgattcatagaaaaaataaatggcctgaaaagatatccaaaatgcacgtataaataatttcaagaagtatttaattaatgaaaaattgcttttttgctgggaaatgtagtatagaataacaataaaacttcttataaaatctttgcaaaactatgaaagaacaaaattgatgttcaattatgawttattttacgattcacttaaaatagatggttgaggataaaaagtgagtaaagaaaa

SEQ ID NO: 820582 - DNA, 563 bp, Homo sapiens
aaagtcaagaggggctttattttttaaattggcttgatctgcctgaattttttttaaaaagtcacatgtttaaatgaagcccaaatctgtaacacctagagagctaaattcatttgtcaacgtgaaggcgtccagctgcccctcctacccatgccctagagtgaaatatggttaaaagttgctcttcctttttctgtgatttctgggtatccagcatgtattcagttggaaaagagaaacatgaaaattttctgcattatgaattaagagttaacaaattatccttaaaataggataacaaacaattaagataacaaactattccaaaatattttggtggggagggagacatttttatagaggctaatgatggtgctctccagcattattgctctccagcaaatattgccagtttccagcatagatgtaagaacagaycaaattttctcactttccttgaaattagagttgctaatgaaaattgctctgaccaatgatagggaagctaaacagacttaggccatttccagatggaaactggacgaataagtgtctgattcacc

SEQ ID NO: 820583 - DNA, 582 bp, Homo sapiens
ttatttttgttgccataatagcagcatggatgggtacarttagagaatgggaatggctacctatccaacagtgtggaattaagggtgttgtagtagatctgagaatgattctatgagaaatcaatactgtaggagagacttaaaggtcaagaaagagtgtgtttgttgtgttagtctgttcttacatggctataaagacatactcaagtctgggtaatttataaagaaaagatgtttaattcacttgcacttccatatggctggggaggcatcaggaaacttacaatcatggtggaaggggaagcaggcacatcttacatggcagtgggcaagagagagcatgtgtgagcacaggaaaaactgccacttatagatgcgaattcacttaccatcctgaaaacagcgtgggagaaatgttatgctttggctgtgtccccacccaaatctcatcctgaattcccacatgttgtgggagggtcccggtgggaggtaactgaatcatgggggcaagtctttcctgtgctgttctcatgatagtaaataagtctcatgaaatctggtggttttaaaaagaggagttcc

SEQ ID NO: 820584 - DNA, 554 bp, Homo sapiens
aaaaaaaaaaagaaaatatttgtttcttttttaccctgggcggagacaggcaagaagcatatgggcaggatgccctcttgattggaaggacatgcctgcttttaaccactggctgtgtttctttaggatgcaaccgagaaaataaatgagatgccagattttctcattctcatttctgaatcatgtgcataaatatgcacattcacaccccctcattcacctttgccaacttgttagagaaagatgagtcaccacacaggcacagttccaaatcattctagaggattgcaaatatctgaggaaataattctggttttggcattaaacaattttttctgggaaaatatctatctagttttacagttgctatgggccaaaatatcgatagcagagtaacttttaaaaatacttatgtcaagcagtcttartttagaacaatattttaaaacctatgtttgtttcaccacctgcagctgaaaaaccctgaggaattgttaaaaatgcagattctaggccaggcacaatggtatgtgcctgtaagttccagatacaga

SEQ ID NO: 820585 - DNA, 524 bp, Homo sapiens
tagaattctgctgtgaatccatctggtcctagactttttttttgttggctatttttaaattactatttgaatctcactgcttgttattggtctgttcagggtgtctaattttccctgatttgagctaggakggttctatttttccaggaagttatccatctcttctaagttttctagtttgtgtacacaaaggtgttcatagtagccttgattggtctttcgtattgcagtggtgtcagttgtaatatctcctgttacttttcttaatgaggttatttggattttctctcttcctttcttggttaatattgctaatggtctatcaattttatttctattttgaaagaaccagcttttcgtttcattcatcttttgtattttgtttgtttgtttcaatttcatttaattctgctttattcttggttatttcctttcttctgctgggtttgggtttggtttgctcttgtctctctcattccttgaggtgtgaatttagaatgtccatttgtactctttcagtcttt

SEQ ID NO: 820586 - DNA, 584 bp, Homo sapiens
ttgggaaatgcctgaagtgagactctgtaatctgacaatgtaaaccatattctttcttkcaaaaaaaatctagttgctctttttttttaaaccaatcaactttttatatattcttgactaatccatatacttacacatgtcatggttgattagcctattaaattgagtcatggaattactctcccaggatacttcagaagggtaattcatccctttacacattgggcatgtctgacggaagttacattggtaacagaaaaattacaattgatttatagtatatgaaccataactaatgattaaccaccaatcttggattagtaggctttttgttgtggctatcaatagactcaagggaactgttagtttattttaccatttctcccaaagacttttaactcagagatttttaactgaagttgaaagtccttggggtacagaaagagtgaaaaaatttcaaagatcattttgccaagaacaattgatgttattttactgtgcaaatgaagaccaaagctatcaactaaataaccaaccactagaaatttcatcacagatatatatttttttcacttgtatattgt

SEQ ID NO: 820587 - DNA, 655 bp, Homo sapiens
aaatttctcaaaattataatttcaacaataataaatagcataaaaatatttgaatttttatataatagcaatacatagccataacaagaaaataaaatgaaaaaggttataatttttaaayatcaaaaatgtatattatatatttgctatgagtttaacttggagtacatcagatctagtttttgaaacaaataaaaccttggtggaagggataatggaagaaatcattaatttcagtaaatatgacttaacatttattgttcacatactttgcaccagggactatacaagagattgagaaaaaccagagaaataaactatgtttcatattctctaggaaataacccttcactgaaggagagaaacatgcaaagtattgactaccacaatgaaaaatgaaataaatgccatgacagaactatggataaggtctttgaaaacagagaaaaggaataattcattctgactgaggaaaatggaaagatgagcacattctaattgtgaagatttaatataattaagctgctgtactttaaattagttaataattgcaaaaaaataccaattccagattccactgaatgttctaagaaatttaaaatctaaacacctttacctttacctccaatatattagtatatgaatgcatgagcag

SEQ ID NO: 820588 - DNA, 493 bp, Homo sapiens
aatttatgagtacactttgatgtcaaatttaatcagagacagatatatttaaaattttaaaagatatatatttaaaatgattatttaagtgataatcattatgataataagaaaagcataatccaaagtagaaaragcaagattgtgatagaaaataactaaaatgcaaaaattaattatgattaccaagttcaatcataaaatattggtgaatgtattttacggatcaagatatatacttaatattttcattctttaaattgcaaaaaaatctgtcaaatgagcaaaaagcttgatagcatagaattataaacatttttctcaaatattgtaatatgattcatgggatcctttattattaaaaatgtaggataacactttttaaatacataattatcagggaatgagttgttttacacaaactttaagagagatgtatggtaagattttaaagacttccatatgcattttggaaataatcactagcacagta

SEQ ID NO: 820589 - DNA, 300 bp, Homo sapiens
ttgtctgtgtacataaaaattctatgtaattctcaaagtttttaaagccgggtgtggtggcacactcctgtagtcccagctacttgggaggctgaggctggaggatcacttgagcccaggagttctaggctgcactgtgctctgattgcacctgtgaatagccaaggaatgtcagctttggcaacatatcaagaccttgtctctataaaaaggaaagaaaagaaaaagaaaaakaattcactattagtgaatttaggcaagttcacatgataaaggattaatattcatgtattaatcgta

SEQ ID NO: 820590 - DNA, 603 bp, Homo sapiens
ggcgctaaccctcaacccctgctagagctggaggatttccttgcttgctccgagtggagcgtaaaggtgaagagcgcaccccgtgttggcacattgtctctgcttcctccgctctttggaaacatagatttgcytttttcttcttccgcacctgtcgcaggatgacggcaaccctaaaggaaaacggaatgtcctgtgtgccacatggagcttggggaaaggaaatgattaaagccgtgaagtttcctggttcttcgcggtgtttacagtgggttttgattcgggggaagaagagccaaaagaggttaaggtgccaatctaccgcatcttgaatctgactgttgcagacgaactgtggggccggtgggcactcgcgcctgggtgtgcacgtacctgtgggtgcagggtcatgtctccctgtgtcgtgtgggtggcctgttcctaagtaaccaagtatatgcgtacttataaagaagaagaaatctctccagttgtaaaagggcggctttgaggttctcacagctgagggtaggaatctattctagaaggcacgcatttcagttttcaaattttgttatttaaatatttcctgtctttgaacta

SEQ ID NO: 820591 - DNA, 640 bp, Homo sapiens
tgcccagctgcctgacactgcaggcggctgaaccccctaaccagacgcacaccccaactgaccagatgcttcaacctgcaggacaccccagattatctgtcaccccagccgctctcagccacccaacatccccgccccaggttgtcaagtcccaggaagtgaaaggcgtactgggcagacgtttcttctgagcttccatgcttttctcttccaacacttatttctcttttaactttttcttctttgtttaaaaaaattttccaagcctctacttgcgggaccggctaaaaggcctctgttttaattgctcggataatgtggttgctgccattttgttaagagcaatcactcctgcagggaaatcacaagcgttctagacaggccggagccgacaaaaatgtaggatttgacgttaaaagctaaatgggaagctgcggcggcggaaggtaaattgatggtagatctggctgtcagggctctgccccagaccgctgtgcaggcccagcgtctgataaccctggagcaccggaggggcaaaggcttggccagttgtagacggtgtgtgtgtgtgtgtgtgtgtgtgtgtgygcgcgcgcgcaaaccccttctcagcttgggaagcaatttgaaaaactgcaga

SEQ ID NO: 820592 - DNA, 655 bp, Homo sapiens
ttgggaattttccctttgagtgcattgcttaggacaaatttatgtaccaaataaaaaagaaacttgttccatttggccacgagtgtaagctctctgaagttgcacaggatttttcttcttcttctttttaacctgtatccccaacttcagactggccattttgtacacaaatggtctttaaaccaaggggaaggggatttggttccaaatttgtgccaagtatcctttattgctggtaattatcctctctgtttgaaaggaagttttggagaaaaggaaatgacactcccttcatacctgggaagacgaaccacttgcccgatgtgcacaaaggtaaggtcgaagcacagaaagacaaatattgcatgtcctcattcatatgtggaagtgaaaaaagtggatctcatgaagacagagaatagattggtagttaccagaggccaagaagggggaagcggagggaggaaggagaaaaaagaatataaatttatttattaccattgaactgtacacttagaaatggtaaagatggtaaattttatctatatataaaatctatatatgtatgtatataatatgtatatatacaaaaaayatatatatgtaggtatataattacctcaataaaaaaaatcccctcacctaggccaaataa

SEQ ID NO: 820593 - DNA, 563 bp, Homo sapiens
agttgcagatgaattgcttgtgaactgatttatgatctttattgcaccagagaagtaattgtatgcatacaacttccttttacaattacctccacmtgatttcaaagcaattcactgcctatgggaggaggccatcaataagtgacacttgcatattcattcatttcaatatgagagtttttaaaggctcaggggaatagttcagtgctattgaaaattacttttcttccatcaggatttttctaattgtttttgtttttgttttttagagagaaaaaaacatgatgctatcaaaatctggttttatttaactttatttttactcttattttatttttaaatagattatatttaagagggttgaaatgagaggctgcatttatgaaatgccaactataagccaaaaactgtgctaacctgtgtatctatgttaattcttgtattcctgccaatgccataattactttgcctttatttatttatttatttcaataggtttttggggaacaagtagtgtttggttacatgaataagttcttttgtggtgatttctgagatttagg

SEQ ID NO: 820594 - DNA, 636 bp, Homo sapiens
cctaatttgttgcatttgctgacttctatggtgcatttatgctcagcatggccaattttaagctgccartgtgaagtcactgacaaggagttgggaagagatgcagaaaataatgatccaattcatgccagctatagcccagcactgctaccctttacctaggtttacctactgttggcattttatcctatttgatttattacttgtgcttcattcccctttacttttcttccttttccttttttcttctcttttcctttctcctttttctgcatagttttttggggggagggattttttaagcatacagattccaaaaccccagattagtaatctacagtgagattcaggatgtgttaaaaattttacaagtgctattgatgcatcaccaaactaaggaacactggcttagtcttgtagacctcatatggcattaccaagattttgaaattcagagcctcatagactccaccttgatctttatctaaggaagaaccacatgacctcccctggaatctttcatcagtgccatggcattcagccttctaatccacctggttttaatgtttggtttgcatgacctattcctcacctagccattttctgttaaatctgacttgcactttttcctcttca

SEQ ID NO: 820595 - DNA, 639 bp, Homo sapiens
ctcctgagttttttttctggtttctttgtttggttttccactttcttttggatctcactgaacttcctyaaaattcataactttaattctttatctctcacctcaaagttttcattttggttggcagctattgctagagagctcatgtggtcttttaggagtgtctcaaccatctgtttcatcatggtgctgaaattcttgtgctggtttcttcttaaatttaaatttaaattcttaaatttaaaaataaatttaatattttaaaatttattttaattcggtgggtttcttctttcctccttgagagtgtgactattgctcatgttgggtaggttcatttggctttgcttctgtgtgatttcaaggggccaagtctctgtgtaaatgtcttagttatagatagccttagcatagtggttttcccaaatgttagttgtttgtaggttgtggtagccttgtgtgtgtggtgaggctcactgtctcctacaaagatgaggaggtggaggtcttgggaaattatctcatttccttacttttgtcagcaggaattatattggattgtgtagttcatcctacaggccagtaggtggtgcttgcaggcaagagacacctgtgataatggcagtggaatttttactt

SEQ ID NO: 820596 - DNA, 639 bp, Homo sapiens
ctcctgagttttttttctggtttctttgtttggttttccactttcttttggatctcactgaacttccttaaaattcataactttaattctttatctctcacctcaaagttttcattttggttggcagctattgctagagagctcatgtggtcttttaggagtgtctcaaccatctgtttcatcatggtgctgaaattcttgtgctggtttcttcttaaatttaaatttaaattcttaaatttaaaaataaatttaatattttaaaatttattttaattcggtgggtttcttctttcctccttgagagtgtgactattgctcatgttgggtaggttcatttggctttgcttctgtgtgatttcaaggggccaagtctctgtgtaaatgtcttagttatagatagccttagcatagtggttttcccaaatgttagttgtttgtaggttgtggtagccttgtgtgtgtggtgaggctcactgtctcctacaaagatgaggaggtggaggtyttgggaaattatctcatttccttacttttgtcagcaggaattatattggattgtgtagttcatcctacaggccagtaggtggtgcttgcaggcaagagacacctgtgataatggcagtggaatttttactt

SEQ ID NO: 820597 - DNA, 600 bp, Homo sapiens
gatgaggaagtaagacgccaccaccagagcatacrcagtcatggccaacggcatgggcagccagggtggcttcttcagcttcaggttaggacattcgagcacaaagaacgggacatggtacaaagtctccatgttggtggcagcaagggctgttctccataggaattttatgttccaacaattctattgagttttaaaattttctgccatcaaatttgtaatattcatgatttttttctgttctttgcatttgtttttgtagtatctagttgttatttcataggttgcaatatctttttatttctgatactaataatttttcaaagttttattctttctgcatagtttgtatttcccccaaattgtctttccatgtttgttagttctatcttccacagtattccacactgttgaccattcactttttgaaactcaatgctacatcttctttgataataacttgctagtttttttcccattactttgttaattcctacattggctcctctttcatcacctgtttattcaaggatgttttcaatcaacaaacacttatagaacattgattattttacaggtatcgtgcttggtgagggacac

SEQ ID NO: 820598 - DNA, 646 bp, Homo sapiens
gacataccactgcctcactcatagactttttagcaatctcttctctggatcctttacaagtttctccttttaaaattgactacttaatgttggatttcctccagacttggtcctaggctccttcatcctcacactctaacctctctctcttggagagctcatcaaccttgtggctttagattccacctatgcacagatgaaccctggaatccaacttcgccttggtctccagttctttcactccttcatgctatttgttctgccagactaccaggtctctccttgaatagtctggtcagaggtcccacatccatcataccccacagcctcatacagatgtcttgagatcagaatggctgggaattccaaaaccagttcacctagcatccagcagttaataaaacctcatgctgctggagaacatcctgtaacagagctcattacatcaacctccctcagggccatggtttgaatgtgtccccaaagttcatgtgttggaacttaatcccaaacctaacagtgttgagaggaaagacttttaataagtgattaggttaygagggctcggtcctcatgaatggaaatgtcattactgagggattggcttccttattgaatgagtgtttttgttataaagtgagcttgg

SEQ ID NO: 820599 - DNA, 582 bp, Homo sapiens
gtagtttcctcatcagcatggccttcatcaacaccaaaactttaagaatgcccttacattggttcggtgctatgcaggttgcaaaacacytgggtggcctaacaccttaaaaaaacttaataaaaattattaaaatgatgttgaggaaaacaaaccagttactctgtagactgaagctcagtttggcttcttctgatgtttccctatgagtaaattcaggttgtgcatttttgcgggaattccaggaagtgatggtgtgttcagctcactgcattctatcaagaggcatctggtgttgatttgttccgttactcaggatattaagttttatcactgagttcaggtggtgcctaccaggtttcttcactgtaaagttcctctttcccccatacaattgaaggaatgtgtttggaggctatgtaaatatcttatttctcgtctttctttcagtcattattttaacatccattgatgaatcttatctgaaacaattactactaaagtaaagtggataggtagatagataagcaaaagacagagaatgataaagcaagtgtgataaagtgttaacattttggaaat

SEQ ID NO: 820600 - DNA, 706 bp, Homo sapiens
tcctacaccccagctctccttggatccagaggtgatccaagcacttctccttgtgctgtctactgacctgaaggttattcaaatattaaaatattggcacctgacttccattttgaattttcacttcaagtttacctcactgtggacctaaatgtccctgctcataaaacctctagcctcaaggttccttctccttgattatcacctctttcactcacactccactcctacaggctgctctgtggcccagccctggattttaagattgctgagcattctcccatttgtgatttcgtgaacccccagcccttaattcagtctcctgctctcacagcctcttttcccctcatgctcctacctcaccatgagggtgcaccccagggcaggggcttatagtcccagctcttgagattcagcacaccctgcttggaatctgggtccttgctcttttccctagtctagttcctcaccctgtgattcctcttacatactggtctcttctaaagcccactaaaattataatctgatgatgacactgctttgttaaaatctattcaatggttctccattctctatagagcaaaatgcaarccttgcagcaggacaagcgcttccagcaggacataggagattcttcatgacttgatatccacccactcctctggcctcacactttccatgccctccctccctctgtgtcccccaa

SEQ ID NO: 820601 - DNA, 538 bp, Homo sapiens
gggagatgtttgggtcatgggggcggatccctcatagcttggtgctggcctcaggatagggagcgagttctcagatctggttgtttyagtgtttagcacttccctcactcatgctcccattctgccatatgggatagctgctcccattttgactgtcaccttgagtaaaagctcctcgaggcctccccataagccaagcagatgccagtgccatgcctcttgtacaacctgcagaaccgtgggccaattaaacttctttttttaataaattacccagcctcaggtatgtctttatagcaatgcaagaatagcctaacacacacaaggatgaaggatttctacttctaagaatttatgctaataataatcaaggatttgtgcaaaaatggggcttactctctcccagtgctgtttataatactaaaaccaaacaagaaaaagaagaagaaagagaaaaaggaggagggagagagagaagaagatgaaaaccttaatgttaaacagccagaaattagaaaaccaatttatgttacggcta

SEQ ID NO: 820602 - DNA, 639 bp, Homo sapiens
tacttaacatagttatgctaaaaccctatgagatgatttaaacatctagaccatcttaaagtctagctctgttgatttattttttctttcttgacagtgggtcatatttctttgtttgctcatgtgtctgataactttttgctcaattccaaacattgtgtatagaagaacagtgattactaaagtaaatattaattgatgtctgggaaagtgcatgtcattactttagggactgagtcaatcagatttgtagttgagatgatctgagcattgttagattcagtttagcacaggcttcaagtaattcgaatgtatgatcagacctcctacatatctgagtgtctggaggttttcctgtcctgctatcagatttcggcagactcttctacgttggaccccacagagggctctttcagttcccctgcttctgcccagatacctgctgctgataatcagtctaaagcccagagtgctcgggctttttactcagttctccttctcttcccttagacttcaacaggtccaaagcacctgtccctcamggggaagcagatctctctcagcactcctgccactatctcatgtttgtagtatcggtgccgcagagggaagtcttttttggctcttttgttctgcccc

SEQ ID NO: 820603 - DNA, 639 bp, Homo sapiens
tacttaacatagttatgctaaaaccctatgagatgatttaaacatctagaccatcttaaagtctagctctgttgatttattttttctttcttgacagtgggtcatatttctttgtttgctcatgtgtctgataactttttgctcaattccaaacattgtgtatagaagaacagtgattactaaagtaaatattaattgatgtctgggaaagtgcatgtcattactttagggactgagtcaatcagatttgtagttgagatgatctgagcattgttagattcagtttagcacaggcttcaagtaattcgaatgtatgatcagacctcctacatatctgagtgtctggaggttttcctgtcctgctatcagatttcggcagactcttctacgttggaccccacagagggctctttcagttcccctgcttctgcccagatacctgctgctgataatcagtctaaagcccagagtgctcgggctttttactcagttctccttctcttcccttagacttcaacaggtccaaagcacctgtccctcaaggggaagcagatctctctcagcactcctgccactatctcatgtttgtrgtatcggtgccgcagagggaagtcttttttggctcttttgttctgcccc

SEQ ID NO: 820604 - DNA, 615 bp, Homo sapiens
ccgatctgtggaaaattgtcttccatgaaaccagtctctgctgccctaaaggttggggaccgctgccttacagcacgttttctacttatcaggggctaaaagttggttggatcaatatacctgctacattatagcaaaaagaaggagtgctgtgatcctggattggcaaggcaatttaaataaccacagcctagggcatctcttggtaacattctttcctagttttttgtttgtgtttgtttgagaggaacgggactttactggaaggcttggactccatatacacttacgagtgggataatcacatgggaaaacctcatgcaagaaagtgtcagcacattcaactctgcctcgatttcctctttctttctctctcttctcattttcctagcccagagttttcacttcactggggataggatcttcaggaaaggatatcagggagggatggtgagagagaggatgtgagtgcacagaagactatgtgtgtgttctagwgtaaataaagcagagaagagagtttatgaagctcagagcaattgcatattttaatcttgcagaagaaaatactaagccccatcagtctcagacggatctcactacgtgtctgagtcc

SEQ ID NO: 820605 - DNA, 664 bp, Homo sapiens
cttcagtcaagctcctaggcattaatgataaatcagatatttgctcacatacactggcatggttggctaatcagtgaaatgatgtgttttattaggatagcccagagacctgagacatcaggtcagaacayattcttgaaaagtctccatcatgaacatttcatattgcccaaaggagtctgtccattctttaaaatctttgtttcaacactgatattgaacttgtgcatttcctcattagcaaaacacatcattccttactgctcaaagcctgtagagagaagtctgtgttctcttggattctgaaagacagtgcaggtacaaacggacccacaggctcagggaccagacagatcaggatgaaaattccagctctgccactggtggctggaaaagtgacacagtctctctgagccttatttcacagctccccatttgcaaaatggagatacaccaatgactttgcagaggctttgtttttttgtttgtttctttcccccagagaagattgtaaagctttattgaaagaatttaagtcacattttcaatataacaccaacatgtgtggcttcagcttgtcttctttttaacttatggctgcccagcacctgcttctgtaatttgagcattccctagattaggtggagtctcccctttcacatta

SEQ ID NO: 820606 - DNA, 629 bp, Homo sapiens
tactagagaggtagaaattcagatataagaaattcagagaacacctgtgaaacactgtacaaaacaaatatcaccaagacatataaccactagactatccaargtcagcactatagaaaaaaacttaaaggcagctagaggaaaaggaaaaattacatacaaagggaaccccatcaagctaacagcagacttgtcagaaaaaggcttacaagccaagagagattgggagcctatctttaacagttaaagaaaagaaattccaatcaagagttttatatcctgccaagctgaactcataaatgaaggagaaataaaatattttacagacaagcaagcactaagggaatttgttaccactacacctgccttacaagagattcttaagggagttctacacatggaaacaaaagaatgataactgccgctacaaaaacacactgaagtatacagctcacagaccccataaagcaaaaatacaatagaaattacacagcgaacagctaacaacttcatgataagatcaaaacctctcatatcaatattaacctggaaggtaaatggtctaaatgatccacttaaaagtcacagagtagtaagttagataagaaaacaagacccattcatctgct

SEQ ID NO: 820607 - DNA, 596 bp, Homo sapiens
ttgtctgcaaacagagacaatttgactttctcttttcctatttgaataccctttatttctttctcttgcctgattgccctggccagaacttccaatactatgttgactatgagtggtgagagcgggcatccttgtattgtaccagttttcaaagccattgcttccagcttttccccattcaatatgatattggctgtgtgtttttcataaatagctcttattattttgagatatgttccatcaatacttggtttattgagagtttttaacatgaagggatgttgaattttatcaaaggtctcttctgcatctattgagataatcatgtcgtttttttctttggttctgtttatatgatggattatgttcattgatttgtgtatgttgaaccaggcttgcatcccagggatgaagccaacttgattgtggtggataagttttttgatttgctgctggatttggtttgccattattttattaaggcttttcacatcgattttcttacggaacattggcgtgaagttttcttttttttgttgtgtctctrccaggttttggtatcaggatgatgctagcttcataaaatgagttaggga

SEQ ID NO: 820608 - DNA, 595 bp, Homo sapiens
ctggtcgccccctgctggagactgggagcagtatcggatcctactcttcaatgaktctgtggtgctgctcaacatcactgtgggaaaggaagaaacacagtatgtcatggatgacacggggctcgtaccgggaagacagtatgaggtggaagtcattgttgagagtggaaatttgaagaattctgagcgttgccaaggcaggacaggtaggcaaatatgaagatgttaataccaatggaagagtaatttgttccctctcccaggtaacccaggtaactgccgtaactgctaatatcataccctggtgttttctgaatttgagatattaaggactttaaggctaacatggggtttctaacacctaatttgtcaaattagaacatttaaaatcacttccactagtaactccattatttcatgaaagaaagccatttcaaacaccaaaagagtaagatgcatacattctgaaaacaaacactgacccttcccacaaaagaagaaccttttgctagtgatcagcattagggaaccattgccttgacctcatgttgactaatgtggggatttcaggtaccaatgaagagtgattaaagtg

SEQ ID NO: 820609 - DNA, 647 bp, Homo sapiens
agggtctcactccggttgcccaggctggagtgcagtggcacgatcacgactcactgcagccttgacctcccrggctcaggtgattcttccacctcagccttccaagcagctgggactacaggtgtgcaccaccacgcctggctaattttttgtatttttagtagaaatggggtttagctatgttgcccaggctagtctcgaactcctgaactcaagcaatctacctgccttggccttccagggtgctgggattacaggcgtgagctactgtgcccagcctgcttgttaaaatttaaaattttattatcctttagcaagtataaaaatgtgttcaaatgatttggtttctgattccctttcatttgttttgcagatctctattaagagaaaaatacaaagaataaatgagtaaggctcttgaaaccattgaattgtacaaactttggtggttttaaatctggatttgtgaatagctgagcccgttcactgtcccattttggagaaccatgaggcattctacaatctagcccttctccaggtggatgcttacctgtccgcccaaccacatttatctgattcttcagggacccgctgactgaggcaatcatgatctggtactgctccccggcctccagtctgtggaacgt

SEQ ID NO: 820610 - DNA, 623 bp, Homo sapiens
tggaggattgcccatagaaaggtagatgtctagcttctcttgaaaaactggaagatttggtaatattgggccctcattggcaaaaatcaacagaactgagtgggggctgcccctggaatagggcacttgtctccagtttgccactgtccccctccagccaggttcactagtttatgtctggcccctatgtgcatgaaacatgctgtttctactgaaaactgatgtactgaaaccaattgctcgaatatcctcaagttactgcatgcttgtagaaaccaccgccaaatggggaatttagatggtacaaggcacaatgaagagacagaacctatttcaagccctcgagaaccatgtttcttcagttctaagctgctgttaaaagaaaaacttcagccaaatcaaatttaaaggagttcagttgagcaaagaacgatttatcaattgggcagcctccggagccagagtaggctcagactccagtgcatccatgtggtggaagatgatttatggacagaaaagggaaagtgatayacagaaaatggaagcaaggcacagaaatagccatattggttacagctctgcatttcccttatttaaacacagtttgaactcttggtcacctt

SEQ ID NO: 820611 - DNA, 607 bp, Homo sapiens
aagagatacctagcattgcaataacacaaccaggtagataaaaaaataaattggtctacraaagaatgttgtggtatagatgtttattgtaccaattttgattgaccttgcttctttattatattttaagctccccaaaagtaaaacctttacatttcccttggctagtgcacataatagcatttcaattgccttttgaatagatatttcccctttaaatattaaaacaaatcttaaaagtaattgtggaaatccttgtgaaaggacaaaagtagaaacaggagattgtgatttattccaacaagtcaaagaaaccatcttctaaagcaaacatacgtcatgggcatttggttttccccaagaaaaatagattgctctatacaaatacatggtaaagcctgaacaactaaagacaacgtattccaaaagtctaagtttgtcaatgcatctacagggaaaataatagaaataataattttctttgttataaagagctgtaatctttcctcttgcaaggttcctgaaatttttaattcatgtactgtgtgttaatcctcagctggtatgcagtacccaaaaatgctcctctcatgtttattcaattact

SEQ ID NO: 820612 - DNA, 607 bp, Homo sapiens
aagagatacctagcattgcaataacacaaccaggtagataaaaaaataaattggtctacaaaagaatgttgtggtatrgatgtttattgtaccaattttgattgaccttgcttctttattatattttaagctccccaaaagtaaaacctttacatttcccttggctagtgcacataatagcatttcaattgccttttgaatagatatttcccctttaaatattaaaacaaatcttaaaagtaattgtggaaatccttgtgaaaggacaaaagtagaaacaggagattgtgatttattccaacaagtcaaagaaaccatcttctaaagcaaacatacgtcatgggcatttggttttccccaagaaaaatagattgctctatacaaatacatggtaaagcctgaacaactaaagacaacgtattccaaaagtctaagtttgtcaatgcatctacagggaaaataatagaaataataattttctttgttataaagagctgtaatctttcctcttgcaaggttcctgaaatttttaattcatgtactgtgtgttaatcctcagctggtatgcagtacccaaaaatgctcctctcatgtttattcaattact

SEQ ID NO: 820613 - DNA, 671 bp, Homo sapiens
gtccccagagacagcatggccctgggacaccttaatttcagacttccagyccttacagctgtgaggagatacatttctgtggtttaagcacctagtgttaggtactttgttatggcagccctgtgagactaatacagtcactttccaagctcaaatcaacagcaagtggtagagctgatttttggacggaggcgtctattaagagctcaataaatattatctgctattattatttataactttatcagcaatgatatttaatgttattattaataataaaacctggggcgcttgtggtttcctttctcttaagcctgtgctattatatctgtctactatgctacaattgggtcttgcttgtcatagattcaaaggcccatcagtctccctctaaactgaatgtgaaatccgttatctgtgtatgagcggcttggcaaattcagacaacagatagtccccactaaaaggaaatatacccccaactgccagcgtgaggcatctgtgaaactttttgagagaacatatgcaaaataatcactaaatataggccctgcacacagtccacacccaaacctgaagcccgagtcctgagcaagtgaaaagagcagattgctgaagtcctgtgttttgaccaggatttttctggagaggattgttagaactctcttctc

SEQ ID NO: 820614 - DNA, 535 bp, Homo sapiens
catgcactgcataatgaagttttggtcaacaatggactgcatatctgactgtggtcccacaagattataataccrtatttttaccataccttttctatgattagatatattgagatatacaaatacttatgtgtaaaaattgcctaccgaattcagtatagtaatatgctgtacaggtttgtagcctaggaacaataggctgtaccatagagcttggatgtgtagtacgctataccatctagatttgtgtaaatacactctatcatgttcacacaacgaaatcacctaaggacacatttctcagaacatcttcctgaggttaagcgacacatgactgtactgctagcacaatttggtggcactgcactgattcatgctaaagtaccagcagttttaactaccattgcttttgcaccatgggtataaatgtcaacacaatttaaaaggtaaatgatacctttgtattactatgaaaatagttttgacaacataggaactggtattgggatccctcatgagtctataaaccacacac

SEQ ID NO: 820615 - DNA, 750 bp, Homo sapiens
aacagttttatttgttaagtagttggatccaaacaacttaatagtagtagttaatctgtgrccgatagctattactatatttccattaactatttgaaataccccataagtttactgcagagccctggggctccgcagcaactagtttggaatgcagctgtaaaccaaaatggtcctaatggttaagaaagagtgtctggaactcaggctgcctgtgttggaatgtgggctctcgtttgctaatgagtggtcctgtgcaaattgcttatctttcccatgactccgtttccccatctagcaaatgcagctaagagtacctgcctcttaggattcttgtgagacctgtgaaatgctgggtgctccactctcagcaagaaatatcagccactgttaactcttgcagaagactgtaggtgacttttatttttttccttatgctttgttgggtgttccaaatattacataataaacatgtgtttcttttgtaatgaatattttttaaatgtttaaattaaagaaagatagcattttagttcaccctgtcccgagcactgtacccagcagagccaaggacagaataggtcacacaccttgtcaatcattcaagaaagcccctcatatcctgcctcgggaaggcagggcttcctttgggcatcttattctttagaaacactggacagcttagctgcctattccccagctacaggcatcccagcctttgccatggctcccattgccacctctgctggg

SEQ ID NO: 820616 - DNA, 656 bp, Homo sapiens
ttctttctcatggtgcttttctcttagaacccagcccctatgttgaggagatgtccgagctgcccacaggggcacccaagtggagaagaatgaacagccagcactgactaaccagcaatatgagtgaggcagtttggaagtagatcttcctgcctcaatccagctgtcccagttgatgccatgtggagcaggcataagctgaccctgctgagccctgccaaatcacagacttgtgagcaaacaatcattgctattggtataagccactcagtttggagtggcttgttatgcagcaataggtgaatagagtcaccagctgcagttttcttttctgttgctcacaagcagaagagcagcagcacagagattaagcacttaagctctggactcaaatcctgctttgcaacttgctaggtgcgatttttgggccacctgtgacatctttatgtaattcagttttctcacttgtcaaataaaaagagaaatagaaaaacagtggtttttcatcagattgctgcgagaatgaagtgagattatgcatgtaaagtatttagtgtgggtcaccagcacagtgaacagtaagcactaaatctacaygttagttgcactccatcttactaatatagagatgagtttcaggaatgggctgcaaggta

SEQ ID NO: 820617 - DNA, 658 bp, Homo sapiens
ttaattgggttagactcctactgctaaaagggggaggactacagaagattagtttatttttagcttgttgctataaaactcttctgtgcttctttcagctcagagtcaaaagaagagtaaatgttttcraaagtaacagaacgttaaggttgcacattggcatctttgttctaatgaacagagtgtgatttgaagatggcaaacttgggttttgtaccataactagctccaaagcttctggcttatataggagcaagttttgcctttcccattggtaatgtgttgtggttgagctgttaacaatactaaagcatatactacatccttatatatatcaatttcaaactatttacctgctcactgtgtttttttcttccataaataatgcacaagagagtaaagtatatggaagccttttatttttccattaacataaacaaaaaggtgggtgaggtgggtgacccacctacctcagcctcccaaagtgctgagattacagacgtgagccaccacgcccagcccttttgtgttgttcttattgttctccttgtctctattctgtgtgataaggtcctccaaggtgctgtctatccttattccatccttgattactccccaggaccaaccttcaatgtcttccgcacagtatacattcaat

SEQ ID NO: 820618 - DNA, 637 bp, Homo sapiens
tattgaacccagaaatcacacagcagcatttcaggagacatggatgaaaatacagaacgaaggtcggaagtgctggatccctaaggacaggcagtcctctgtatcatataatttcaaaraaatgagtcccagatggggaaggaggggcccagccacacctcagttagcaatccatggcatctggcccgaagggaaggaggtatgttggggcttgcacggctgacgggagggtgtaccagacacgcggtggctccctgtgggctgtggaaccacaggagtgaggtggggcttctgggagtctcagcttcaggttacttggatcaactgccatcaagaaggcccctctggcagtgcaatggagccaaggaggggtcagagggagaataatggtcattgttcccctttgcatgagatcacaacttccaacaactaccagcgcttctaccagcagtgttcagcttatgatgtagtgaggccttccttggaaggtggcaggacaaagccaaagcaggcttggatttccttcccttgcgacaattgaagagtgactttcatggcctgcctgcctttctgactcctgctcagatccggttatcacccagcaggcccctagaacccccagaaccctagacctcag

SEQ ID NO: 820619 - DNA, 509 bp, Homo sapiens
cgggcggaaaggcaggttctttcggaacccaggagacccccgcgccacactggaaaccaatcaaaacggcagtttcctgcgcctgkctccgccctcatgccctcgctcgcgctacgtcatcactgcgcgacggatataagattgcgtgggttctgcctaaagctgaattcccagcgctttggcttctctgagttggggttgtgtataggggtcttcgaacagttccggaaccagccagcagcctttaattcttgggcggaccacggccggttctgatatcttagggtgaagagagggaggtgtcggccagccaagagagaaaattgcggatcttgggctcaggaagacgggagaaggggttcggggtcccggggtggaagaacggtcgtcgtggttgcgcttatagaagtaggagcaggtggtggatcttaggaaaacggttccccgttctccaagctgttctgaagacatttatgtttcttctcttgatctgatttctagctctgtgc

SEQ ID NO: 820620 - DNA, 509 bp, Homo sapiens
cgggcggaaaggcaggttctttcggaacccaggagacccccgcgccacactggaaaccaatcaaaacggcagtttcctgcgcctgtctccgccctcatgccmtcgctcgcgctacgtcatcactgcgcgacggatataagattgcgtgggttctgcctaaagctgaattcccagcgctttggcttctctgagttggggttgtgtataggggtcttcgaacagttccggaaccagccagcagcctttaattcttgggcggaccacggccggttctgatatcttagggtgaagagagggaggtgtcggccagccaagagagaaaattgcggatcttgggctcaggaagacgggagaaggggttcggggtcccggggtggaagaacggtcgtcgtggttgcgcttatagaagtaggagcaggtggtggatcttaggaaaacggttccccgttctccaagctgttctgaagacatttatgtttcttctcttgatctgatttctagctctgtgc

SEQ ID NO: 820621 - DNA, 509 bp, Homo sapiens
cgggcggaaaggcaggttctttcggaacccaggagacccccgcgccacactggaaaccaatcaaaacggcagtttcctgcgcctgtctccgccctcatgccckcgctcgcgctacgtcatcactgcgcgacggatataagattgcgtgggttctgcctaaagctgaattcccagcgctttggcttctctgagttggggttgtgtataggggtcttcgaacagttccggaaccagccagcagcctttaattcttgggcggaccacggccggttctgatatcttagggtgaagagagggaggtgtcggccagccaagagagaaaattgcggatcttgggctcaggaagacgggagaaggggttcggggtcccggggtggaagaacggtcgtcgtggttgcgcttatagaagtaggagcaggtggtggatcttaggaaaacggttccccgttctccaagctgttctgaagacatttatgtttcttctcttgatctgatttctagctctgtgc

SEQ ID NO: 820622 - DNA, 513 bp, Homo sapiens
gagcaactgcaccaggcagccatactggaggccgtgggcacccgcagtgccaacttccccgtgcgtgtgccctttgaggccttcctggccaggtggggcccatcacctcagggcaggactgacatggaggccccctgggagtgactggcagcccccgggggctccttctgattggagatggactcactctgcccaggactgggcctagcacccaaccctccctctctctcctcgtcctctcatcctctctctctctctctttctctctccatctcgctctcttctaccattcaccatccctccatgcattcgtcatttcttctcctctctgcaaacctctcctgtgctgatgcctgggcaccagagatgaggtgggagcagtacctgccctrggcggggctcacggtctagtgcccacagcagctgtccagggagtgcaggctgaagcagtgagatggcaggggggacggagtgagaaaagagcctctcagaagggcaggaggggcggggagg

SEQ ID NO: 820623 - DNA, 606 bp, Homo sapiens
ttcatattgatatcttcattcaaatcattcaaatttaatattagagatttttcttaatttatttggttttatttttgtagctccttcttctattattattttttagagatggagtcttgctgtggttcaggctggaatgcagtggtgaaatcttggctcacagcagccttcaactcctgggctcaagggatcctcccatctcagccacctgagcagctggaactacaggtgcatgcccccacgcctggcaattattattattatttaagataagagtctcgccctgttgcccagggtgcagtgcagtggcacgatcttggctcactgcaacctctgcctcccgggttcaagtgattctcttgcctcaacctcccaactagctgggactacaggtgcccaccaccattatcggctgatttttgtatttttagtagagatggggtttcaccacgttggccaggctggtctcgaactmctggcctcaagtgatctgcctgcctcctcccaaagtgttgggattacagacatgagccaccacgcccagccaattattttttatttgtatagtattttctcccttcttatacaagataatttattacatgt

SEQ ID NO: 820624 - DNA, 582 bp, Homo sapiens
aaagaatttgttccacctgattagaaaattgacaacatgcttgttatatatttcaaaagcagtttttcatatatatgtgaaccacagaattaaaaattatgactcagcaaattatmccagtggtgattttacaaaatgtgagaggatgttttgggactcaggagcagagaatatctctggccaaattcctgtcctccattgttttctccctcttgtattcttgtatttgctccactacctctgaggaggtggtgccatttcccaagacaatcaagtccaggtggactctgagattggagagtccatgggtaggcaggagggccagggttaaggggtctcttactggagtcaaccagacataagttcaagtaatgaatccatcattactggctataaaaatttagcttcaagtcatgaaacccagttcttcatttgtaaaatgtgggtaacggtagtgcctacatctcactgggttgtaaatagtcaattagctagtggatataaaacactcagcatagtgcttggcacttaataagtcctagcttttatttttagaaataactacaaactaagagtacaatt

SEQ ID NO: 820625 - DNA, 643 bp, Homo sapiens
ttccaaaggaatcacatgtttacctcaaatcagaggttcttgsccatagctacaagctttggctcttattctcaccttacatgaaatattttgggatgtttctcaccgtttcaaagatttgaaatttaatttcaagtagctgaatagaaatgacatttcctaaattaaaaaattagcactaactgtatgacacccttcatacaaatactttttaatcttaaaataaacaaagctcctctgactacaaatgaaatttaaatcagaaactggaacaccacctctagtaggccagtctttccttgccatccctgagtgagaggggtctctggtaaagggtatcaatcctacatatatgttattagcagcattgctttctgtttcttaagataggatgacaagaaatcttgctttctcaaccctgtttggaggtgagagtattcaattcagcacacatgtgttgagttcctgctttgtgcaaagacttggtctcaatactgcgagggcgtagagttcatactcaggaaagaagagacatattcatttaaaaaaaagatgttaggaagctcaatattatgagttactaactattgaaagcgtttagttccaaaattctaaatcattaaattataacatttagtcagca

SEQ ID NO: 820626 - DNA, 643 bp, Homo sapiens
ttccaaaggaatcacatgtttacctcaaatcagaggttcttggccatagctacaagctttggctcttattctcaccttacatgaaatattttgggatgtttctcaccrtttcaaagatttgaaatttaatttcaagtagctgaatagaaatgacatttcctaaattaaaaaattagcactaactgtatgacacccttcatacaaatactttttaatcttaaaataaacaaagctcctctgactacaaatgaaatttaaatcagaaactggaacaccacctctagtaggccagtctttccttgccatccctgagtgagaggggtctctggtaaagggtatcaatcctacatatatgttattagcagcattgctttctgtttcttaagataggatgacaagaaatcttgctttctcaaccctgtttggaggtgagagtattcaattcagcacacatgtgttgagttcctgctttgtgcaaagacttggtctcaatactgcgagggcgtagagttcatactcaggaaagaagagacatattcatttaaaaaaaagatgttaggaagctcaatattatgagttactaactattgaaagcgtttagttccaaaattctaaatcattaaattataacatttagtcagca

SEQ ID NO: 820627 - DNA, 543 bp, Homo sapiens
tccaacgattctcctgcctcaggctcccgagtagctgggattagaggtgctgccactacgcccagctaatttttgtatttttagtagagacagggtttcaccatgttggccaggctggtctcgaactcctgaccctgtgatccacccacctcggcctcccaaagtgctgggattacaggcgtgagccaccacacctggccggctaatttttcttaagtatatgtacggtccactttcatatttcaatgtgtaatattaaaagtgtttggagtctttatttagaagtttggtgatgtttctgtgaccagaaatatgtcataggaacttgactcttgtttatatcaattagcctatggtaaaattggttttgttaataacagatgttggcaagattttggaaaaaagggactgcttatccactggtggtgggaatgtaaactagttcagccactgtgaaaaacagtttggggatttctcaaagaasagaaaacagaatttccattcaacccagcaatcccattactggttatatacccaaaggaa

SEQ ID NO: 820628 - DNA, 549 bp, Homo sapiens
ccgccacgcccagctaattttgtatttttagtggagacggggtttctccatgttggtcaggctggcctcaaactcctgacctcaggtgatccgcccgccttggcctcccgaattgctgggattacaggcrtaagccaccatgcctagccagtctttcttaatagtcacagggaatttcatttgtctgatataacgtttaaattaaatagggtggaaatacctgttttcttttccctccacccataaatttcaataataatcatccttagatttgtcttgttggatcttagcctgtcagattgctttttgcacatgaaactactgaggtgggatggttcagtgacttgcctaaatcgtgcagggggtgagtggcagagcccagacataaactttggctccttgtctgttgctctttctagtaaattggactgcttcctgctgtggggcactgagaaaacccgtgacacccagggtgctgagatgagcaggaagtcacacgagtctggaaggccaccttttttaggtgtaagtcctttcttcctggtgaag

SEQ ID NO: 820629 - DNA, 629 bp, Homo sapiens
cttagaaaaaaaatctacatcttgacatattgtttttatatcttgctgggttgaatttgctaatatttttataagtatttttcaatctgtgttgatgttgctctttcattattcataatatatttgtcaagttttcatattaggcttatgatggcctcataaagtgagtcggaaaatatgcccagctcatctttttcctaggtttgtatggattaaaggtcttcatttgtgtttggtagaatgcaacagtgaaaccactcaagcctgcgattttctttgtaggaaggtttttgatagcaacttcaaaatttttaatagacataagactatttaggtttcctattttttgtctgtgtccattttggtaaattgtgttttacagggaatttgttcatttcatatttaagttaccaaatttgttggtattaagttactctaaatattatctagttatccttttaatgtctgtaccatgatagtaatagcctatctttcattcctgatgttggtagcttgtgttttctttattttttctcctgaccagtctcrttagaggtttatcttttaaaaagaaatatcttctcaaagattcagcattcttaattttttctctggctttttttttttct

SEQ ID NO: 820630 - DNA, 572 bp, Homo sapiens
tctagaccaggccagatggcgagcggatccatctagaccgagggtgtccagtcttctggcttccctgggtcacaccagaagaagaagaattgtcttgggccacacgtgaaatacactaacactaaagatagttgatgagccaaaaaaaaaatcacaaaaaaaatctcataacattttaagaaagtttacggatttgtgtagggccgtcttcaaagccatcctgggttgcatgcggcagacagacctcacattgaacaagcttgatctagaccttatcttagtttaattacaactgcaaaaactttatttccaaataaggttacattccgaggtttcaggagggacgtgaattctggggaggacacccttcaactcaatgtacttgggaatcacttggtgataaaggcttgactcacaggtatgagccaagtccgaaggccgagagyggctgcggcttcccagtctggtggtgggaggacctggctccccatggggtcccctgtgctgtctggggctgttgaacttggctgcctgcaccaatgcattcagggactgtctctgagaactgcatg

SEQ ID NO: 820631 - DNA, 652 bp, Homo sapiens
aaatcacaagcattcttatacaccaacaacagacaaacagccaaatcataagtgaactcccattcacaattgcttcaaagagaataaaatacctagaaatccaacttacaagggatgtgaaggacctcttcaaggagaactacaaaccactgctcaatgaaataaaagaggatacaaacaaatggaagaacattccatgctcatgggtaggaagaatcaatatcatgaaaatggccatactgcccaaggtaatttatagattcaatgccatccccatcaagctaccaatgactttcttcacagaattggaaaaaactactttaaagttcatatggaacttggcatcgccaagtcaatcctaagccaaaagaacaaagctggagacatcacactacctgacttcaaactatactacaaggctacagtaaccaaaacagcatggtactgacaccaaaacagagatatagaaaaatggaacagaatagagccctcagaaataatgccacgtatctacaaccatctgatctttgayaaacctgagaaaaacaagcaatggggaaaggattccctatttaataaatggtgctgggaaaactggctagccatctgtagaaagctgaaactggatcccttccttacaccttatacaaaa

SEQ ID NO: 820632 - DNA, 556 bp, Homo sapiens
ggtggtactgcccttagacctggttggacacacctactagaacccccactctcttatattctgagacagggtcttgctctttctcccaggctggagtgcagtggcacaatcrtggctcactgcagccttgacctcctggctccatcaatcctcccaccccagttgcccaggctggtcttgaactcctgggctcaggtgatctgcctgccacactctcctcttgaccacacttcccaagcctacttccagggcctgtgtaggcctcctactcctggcccacctctccctgatggattcactggtgtgtgcatgtccagccccatgtggtgtccgggggcaagtgctggggctgtggacagagttgggctttgcaggacttacaggctggagtgcatcaggttccttgtggtgtgagaatgagctgggagtgggaacagaaggggaacactggcatggggcctcccactggaactcacgccctgccatgtggtgccctagaatttaataaaggaaaattcaatggcctggtaacagttaaactccccacaaaagacac

SEQ ID NO: 820633 - DNA, 512 bp, Homo sapiens
agggccttccttaagggaaggcagagggtggaaagaggggcagaggagcatgatttatgcctggttctcactacatctcctctccaacacaacatttatgggtcccaggtgagggatgagcactcacagctgggatgtggggatgacacagctgctctgagcctacccccagccctgggtggcaggtggcctgaatgggatttgcccaggaactctcggggcaatatctcaaacttgaagatgcttaagagtaacccaaagaacttacaaatgtagggtttcaaatcctggtgtcagatattccaactttctgggtctggggcatgttttaggaatcagtgttttgacagatctcccaacagttcttatgctggtggcttccaaacctcactttgagaaatactgccttaggagctggtggcttagaagcaggctgtgtccccrgggtccagcttcctctgggggagattagagcttcttaggccacgtgtggggacacacatatctgtgca

SEQ ID NO: 820634 - DNA, 616 bp, Homo sapiens
tatccttggtgtgaggtacgggcttccatcaagtgtgtctctctggccacaagraggcaaggccatgatgcagcggaacctaccccctctcccagcagcctggtccacggccccttttgcaggattccctcctgcaggatgccctgtagcatcacccccaaggataatctgggaaagcttctgctaggccagcatcatctctgcttcctaaataaggaacctagttggccttggccagagatgacatcctatattggcccctttcatggacctaaagcatctggatggatcaagaactcttttggttgcaagtgacagaaaccaaacccaaagtggcttaaactcgaataaaacttatcaattcagtgtgtaactgaaacttaccagttcagtgtgtaactgaaatgtcaggtacagctggctccaggggctcaaataatgccgtccgctttctttctttatcttgcttgcttactccacagtttgttttccatttatcttcctctctctctggcagaccctctccacatgatgactgttggcagcaagaggctcatgtcatgcctctgcctggcagtccgtcccaagttttctttttctcaacaggatttacttt

SEQ ID NO: 820635 - DNA, 564 bp, Homo sapiens
tctgcaaaagacatgatcttgtttttttatcactgcacagtattccatggtgtttatgtaccacattttctttattcagtctgtcattgatgggcatttaggttgattccatgtctttgctrttgtgaatagtgctgcagtgaacatttgtctttatgctagaatgatttatattcctctgggtatatacccagtaatgggacgacagggttgaatggtagttctgcctttagctctttgaggaatcaccatactgcttttcacaatggttgaaccagtttacatttccaccaacagtgtgtaagtgttccattttccccacaaccttgccagcatctgttattttttgactttttagtgatagacattctgactgctgtgagatggtatctcattgtggttttgatttgcatttctctaatgatcagtgatattgagcttattttcatataattgttaaccacatatttgtcttcttttgaaaagtgtctgttcatgtcctttgccccctctttaatggggttgttttcctcttgtaaatttgtttaagttccttatagatgc

SEQ ID NO: 820636 - DNA, 603 bp, Homo sapiens
tgagcagttcgacttcttccccaactgcctttatccatagacaattcatccatccatccatccatccatccatgcatagaatccatagtttttaagttactggcacatgccraatactgttttagtggagagggtttatcagtaaagacaggcaacatcatggctctaatggagtttatatttttatgtaaatggacaatcaacagatatacatcaagcaaatttcagcctgaaaaaataaaagcacttgatgataataaggtgattgggaagtaggttaaatactttagattccagaaaaaaaaatcagcaagagaaagacagtagaatagaacctgttcctgttgtatttctggagaagcacctggccatgtggaaggctctttatgttggctggaagaaaaattgaatgtggaatattatttagccaacaacaagaattcattatatctgcacgtggtaacatgaaagggtttctgcgagtagaaacatgtaagctgcagagagatcatttttgtaaactccatgcagatagatgcacagagaaagagctggaagaacccacactgcatggttggcactgggaaggaagaacaggctttc

SEQ ID NO: 820637 - DNA, 604 bp, Homo sapiens
agtgcctagaattggcttcacaccgactttctctgaaactattggccaagaatatctttcagtttatttgcacaattgaccaaaattccttctaccttagaacgtattaacctgatctacttgttcttaaggttcaggagatcacagattcttttgagaatccaacaaagctatgtaccctttccaccaaaaaaattattgttggcacacacttctcaacgaattaacaaggacccgaagccaactcatagaccctggtttgaaacccctgtgctaaagtggactccatttgggacccagggaccaaggatgggcgcagtttcatttcccgagtttcaatatcaggggctgatcatctacgcgaggtgacgagatcactataatcataagagaaaggcaccttagcgcctcccaagtttgccctgggaatttagcatcctcactggttattgtggaggcatccatccagcctggccagggccctttctcccaggggccttcaggcatttacaaaacaccagatggcacractcttctaggcaggtatgagacaggacaacctgttagtactcaaatcagggactgtctccattaggggtgtgtg

SEQ ID NO: 820638 - DNA, 604 bp, Homo sapiens
agtgcctagaattggcttcacaccgactttctctgaaactattggccaagaatatctttcagtttatttgcacaattgaccaaaattccttctaccttagaacgtattaacctgatctacttgttcttaaggttcaggagatcacagattcttttgagaatccaacaaagctatgtaccctttccaccaaaaaaattattgttggcacacacttctcaacgaattaacaaggacccgaagccaactcatagaccctggtttgaaacccctgtgctaaagtggactccatttgggacccagggaccaaggatgggcgcagtttcatttcccgagtttcaatatcaggggctgatcatctacgcgaggtgacgagatcactataatcataagagaaaggcaccttagcgcctcccaagtttgccctgggaatttagcatcctcactggttattgtggaggcatccatccagcctggccagggccctttctcccaggggccttcaggcatttacaaaacaccagatggcacgactcttctaggcaggtatgrgacaggacaacctgttagtactcaaatcagggactgtctccattaggggtgtgtg

SEQ ID NO: 820639 - DNA, 612 bp, Homo sapiens
gaaagaatatacgagaacatgtgttgaaacctattcatctcttgccatctcacatgaaatgaggcatggctggttgcactatcaagtatggtagccacttgccacttgtggctatggagcacttgaaatgtgacttgtctgtattggagatatgtagcaaatgtaaaatacacaccacatttcaaagacttaatactatatataggtataattaaaattttaacatcagttataaattggtaatgtttttgatatggtagattaaatatattattaaaataattttacctttttcctttttatgtagttattaattttttaaaattatatatatggctaatattatattaatggacagctttggtccagatgttaccagatttttgcaacacaaaggccttgtacccctctgaagcttctttttctttcttccttccccaccctgcttcctgcttataaagaataacttaattctttcataycaatatattttctagactaggtcaagctcctttgtttgttggaccatgggagattctttggatctttgtttctattgtcaatttatttttcgattattccaatttcttccttggttatgactataattga

SEQ ID NO: 820640 - DNA, 640 bp, Homo sapiens
gatattttggaagattttatctttattctaaaaacgaggtgaagcactcaaaaacgtttaagtagggatgttttaatcagatttccatctttaaaagtgatttagattgcagagtagaggagaatggattggcgggttcaggggtgacactgaataaatggaatgttattgcaaaaagcctagggaagtttgcactagtatgatggccgctgagagggagagaaagtacatgttgtgagatatttaagaactaaagttaaaaagaacaatgggggtaagaaagaaaggatgtatcaaatctgcattattaaacttattgtgctacatcaaattttgggattacagttttatcttcttctaaccctactgctgctgaactttcactcttccaggagacacacacacaaaataaattttgtattttccacgttagcatagcgcctagcatataggttctcaagaaatagttttagtaaaatagttaatagctgaaatttattatctttcccttgccctccattcccaaataatttgaaaacaaaatatttgttgaggaaaatattactcattggtayatataaactctgatatttgaaactgccaaccacaaatagccagaagcaaataattattcacatta

SEQ ID NO: 820641 - DNA, 561 bp, Homo sapiens
aacggtagaaacccagttagaatcctggcaaatgataagaactaagaatatatcagttttataagtataaaaatgagaaatgaagagtggggtctttgagaggtgactcactrtcattcaaggatgttagcttgtcattcaaagagatgctaatcttgaaagctacccccaaaagtatctttgtcagttgaaatgagggacaactctttagggtagattttttttcagggtaagatactgagaatagtttttaaaacactgtattatgtagaaaaaattattataagataaatctaggtgaaaaaaggcagaatatgcggctttgtgcctaacatgattatgcttaaaaactgtatgcacaggaagacatactggaaagaaacagtgtgaaattataaagatatttctgttaaagtggcaagacttagggagatttttggtatcctttttcataattttcttcactttgattattttacttatataatttaagataaatatttgcatttgaaaatcattctttgtcttaactacattcttactcttctttttacacaaccc

SEQ ID NO: 820642 - DNA, 611 bp, Homo sapiens
gcagcagtgcgagactccgtctcaaaaaaaaaaaaaaaaaaaaatacatgtagttgattttttccttacatatgaaaaatggtacttagaatttattgagttcttaaactgccagtacctctacaaacactttacattttcttgttcagtctgtttctacatttttatatcatgaaatatttcatgcatacaaaagagtatacataatctaaacgtctgtgaaaagacaaacacatctgtcttaaaaccattaacttaaataaaagagcattattgatgcttttaaagaccccagtaagccccttccaaaatgacatctctctactactgaagtattctctattctgaaatttgtaggtatttgttttccttctgtgtgtaataaattatatagtttttgagtttttgaactatgtgtacatatacacattcttctgctcattttgtgttcatcatatgtgtaagattcaataatgttgatgcaagttactgtagytcattctttttttattctgttatagtgatatatagtatttcttgatacgagtacaccactgtctttccattctcctatcaatgaacatttaaattatttccaggtctttggtttc

SEQ ID NO: 820643 - DNA, 523 bp, Homo sapiens
cagaaaggtgattgatcagtgctttcctggagattggtgtggtgtggggggtgmgaatggatggcaaagggctataagcaaactcttggtggtgatggatatgttcattagcttgattgtgatgatggttttacagatacagatgtcaacacttatgaaaactttaaatatgtagtttatgttaatacactataaaaagtacagattctgattcagtaggtttggggtgggatcaagagtatgcatttctggaccaggcacagtagctcacacctgcaatcctagagtttgggaggccaagttgggaggattgcttgactcctggagtttgagaccagcctggacaacatagtgagatcctgtctctaaaaaaaaaaaaaaattaggccagatgtggtggctcatgcctgtaatcccagcactttgggtggctgaggcgggcagatcacttcaggtcaggagttcgagaccaacctggccaacatggtgaaaccctgtctctactaaaatacacaaattagca

SEQ ID NO: 820644 - DNA, 539 bp, Homo sapiens
ataaaatctgtcatggtaaacgttaaaaaattatctctttctagttcaattaatggatatggwtaaataattgtatgccttaaagcaaacatcttatttaaatgtttaaagcacacgttatttaaatgttaatacaattctgatgaagaaatgtataaattctagcatacaagaccaaaaagactagaatgtatactcagcaacttaagagttaggccaattggtcatagcaccatatgctttatgtattccaagaacagaatatttactttcttgtatgattttcgatagcatataatagccaaaagatcaatatatataatattcccattatatttaccacctgtaacattcatttggcacctgttactaattttttaatcacaggaaatagatctccctgaaatagatttaaaactttatatacggtatagtctactttatagggtaaaaaaagctatgtatacatgtaacttgattattaaaaattactgtcaacaatttttaaatctaaactttgaggtgcttcattcactact

SEQ ID NO: 820645 - DNA, 633 bp, Homo sapiens
caataatttccaatggccaaatagaggctctgyagttaacaacactgtttcactgcttgcctttaacagatcttttgtttagtgctttcagaactgctaccaatttattgctagctttatcaaggtggtgatgttgattatgattgcagaaaaacagctagtcaggaagagcacaactaaacaaaatgccaaaacctagatttttaagtgtcaaaatcatttttctaagtataattttgtcacatatgaatcatttgcatttcaacctattccatgaaaaaagcttattctgcttacaatttgaaatgatagtataacttttctgtgacaagcttcttttttagatgctacccataaaacggcttgttcagtcttacaaacataaaatttaaaaagttcttacaaataaccaatctgttagagatacttactttaattttttctgctaaagctgatgttatattgatttctctttctccttcatcatacatttgaaaaataagattatgcataatatcacccgctatccaattaacctcatcctgatgtttgatctgaattgccttttgtccttctacactgaatatttgtagtcttgcaacatggctactgggaagcaacttaatagtcttc

SEQ ID NO: 820646 - DNA, 607 bp, Homo sapiens
taaagatacaatgtagtacctaatctaatgctagaccatgtatacaagcctaaggaaaggaaataaatacctaaagaagccaggtttaaggatgtcctcagcatttaccatgaattctttcaaatctttcaccagtgggattttagagaattctgggcatctgttattaaactgaatggcaatttagataaagtccaaataataacagacaggcttatgatgacataaaccgaagacatcacctaatctacttccatgagtaatatggttcctaaagctgattccaaagctaatttcatcagatttgaccagatgtagatctttgcagtggcaaaattttactctgtgaaaggtaaagaaagggaaaaaaagtaaaaaatataccatgatggagaaaagcctaatttttctgaggaatggaatttaagtgtttacaggtattttcagaataaactgtaaagctcatttgaaaaaagatgcaatgtggcatacaagataaaataaatcccctgggaaagatggcacattaaacatatacacctactttcactgtctcttaaaatcccastaatatgacagtaaagggatgtattttattattaaagga

SEQ ID NO: 820647 - DNA, 586 bp, Homo sapiens
taaccaaaaagaaatctttgaaatatcaaataaaaaattcaaaatactgattattttattttcttgagatgtggtcttgctctgttgccctgggtgaatttcagcggcacaatcatagctcactgcagtctcatgggctcaagtgatcctcccacctcagcctcctaagttgctgggactacaggtatatattaccatgcccacttgttaaattaaaaaaaaatttttttagagagtgtctcactgtgttgtccaggatggtcttgaactcctggcatcaagctatcttcccacttcagcctcctgggattataggcatcagccaccaagcccagctaaaatactgatttttaaagaagctctatgagatacaggagatagctgaaaactaatataaagtagtgagaaaatgaaattcaggatatgaatgagaaatttaccaaaggcatagttttttgttttttwaaaaaagaacttctgtaataaaaaaattcatggaaggaattacaagatatggttgaaagcaaacaatggactagaccaagcaggagaatctcaaaatgtgaagataaatctgttgaattaa

SEQ ID NO: 820648 - DNA, 546 bp, Homo sapiens
ttacgtaatcataagaaacagctcatacagctctcaaagcctaagtatttactacctgacgctttccaaatagtttgtcacccctgtcctagaggggaaagacacatttaaggaacaaaatttggtctagagttgggaaaactggggttcgataagaaccaaaagaaaacagttgtggttagaggtatggtaagtgaggatgagatcaagttggagagagaggaagggccagatcatgcgtggagtattgcagagctatgactagtttcctaggccactaaagatgaaataatataaaacaggtgagtgatatacacagttctgcaattcaaaaaaatcactttggcgtaaaatgaggaaaatgagctggagcagtgcaagagtgaaagaggacttttcattgaggcagctactacgtggttagaatgagagmccatgatgactcggacttgaatgggcagaacgaagatatacagttgtcccttggtttatgcaggagattggttccaggatccccatgtataccaaaatctgcacatacaactc

SEQ ID NO: 820649 - DNA, 645 bp, Homo sapiens
ataaccagcctagaactgatgtggacgcttgttgcctacttgagatgctaacgttgactaattagggtgaccaagcacactggtttgcccagcagtgcccctgttttagccttgaaagtcttctctcctggaaaacccctcagtctcaggaaaagcaggatggttgtttaccccagcactgatatatatgatgggaaacacatattaattatttacatttaagcccctgagtcagggtgactttcacaacttatttggaatattggcctatattaaggatggttaagaaagtgttgcctgcataatcatggaagcaaccattcctgtgttttcaaaaggcaacaaattggaaatttgagtccaatgttgtaaaaggaaaagaaaagaaaaggctatgttaacaaataagacgttaacattaggagagctaatagaaggttttagatattctgatccagcttcctttccagcctgttcttcctgttctttctctccatacctgaggatagaaaycagcaaattttgggctgagggccaaatccagcctactgcctgttttgtaattaaggctttattggaacatagccatgaatctttatggattgtctatggttgcttttgggcttttgggctacatggcaaagt

SEQ ID NO: 820650 - DNA, 260 bp, Homo sapiens
gcatatgcttttccttcttgatttaatttacatagattgttctatttttcatttttcctctcattttatgtatgtttactaagaaatttatcactttgttttcttctgaattttgaaatttggccataatttatgtcagaacctrtatttccttgtcaatatttgctaggtttgcagtagtgcttgggaatgtgtgaaaggttattttttttttaagtaaaggtggcatctaagatgataagtagaaaagttcttaatta

SEQ ID NO: 820651 - DNA, 588 bp, Homo sapiens
atactaaatgagagactatttattctcttctttcaaattatttcccagagcttttatctacataattccccttatcaaaccaggctctaaggtctcytagatttttctttctttcttttttttttttttttttgagacagagtcttgccctgtcgcccaggctggagtgcagtggggccatctcagctcactgcgatgtctgcctcccaggttgaagcgattcccctgcctcagccttccaagtagttgggactacaggcatgcaccaccatgcccagctaattttgtcatatttcagtagagacggggtttcaccatgttagtcaggatagtttcgatctcctgatccttctagactcttgttaaagacctggtctgttgtattcaccttgaaaaacttagagacaaattagttttttatagtttaccctagagctatgtgagaaaagtgaactccttcactgccctcttccctcttctagctttttttcacctgtaagtttgtaaatcaggacactgtaatgataactctctcagggatcatttaagagaggagctgagttcaccatacagaaacatacaataggt

SEQ ID NO: 820652 - DNA, 491 bp, Homo sapiens
atgaggtattcaaggacatctttgttaaaagtaatagtttttttcatttaatctctaagatgtacatggtgaaagaaatgtttgaaaaaggaaataaattactcttagtaattttaaagagatgttcctaaatacttggacttctcaaaacaggcaaatgaaaaggaggcctggagtttagaattagattgttgaaaaaaaattggggggtatattcaaatctcaaataccatagtgaattggctaatttggatgacagggaagaaatccaaataagattaaattattgcagcttcaaaaactatagattctttaaatctgtggctgccaaaagggcaaattcaaccagaaaacacaaagacacctttcttgcatttctaataattgaaatagttaatattttatgagtatttattaggaacaacgtactgttctaattactctgyaaatatattcactcatttgtttcttacaagcttatgagattggtg

SEQ ID NO: 820653 - DNA, 571 bp, Homo sapiens
ttagggatccacattagatcttggcctgaagagaagtctgggacatcaggaagagtgcctgagaatttaaagataaaaagaggaaaaaatgctcaaccccaagtctctggagtaggccaacgcatctaagccacatgccgtaaagtcctgcgagcctatggaaatgtttcaggtaccacgtgcaaggttgcagctgtacaagggaaatctgggtgttccacactgggttctatctactttatgttgcttaacaagtacctcctatctgttttacataatagatttccatgaaaaattccatttgaagaaagtattcaatcaaaaagcctctaaaagtttacttgactagacaataagggcgataagaatgcagcatctcagaaaccagactgtagtctgttctggtgagcatcatgttttgcccccaaggatggttgatggcacttaggcttctgtgctgttatggcaggttaaaaaactgagatagcccwtaaagaggtggctgtctggaaaagtgatgggcaaaaagacaggcaagggcacctgagatctgtacaacactctacagtgt

SEQ ID NO: 820654 - DNA, 657 bp, Homo sapiens
tctcttctgggatccactgaatgccactagagggtctgctcgagagaattcctgattgaatgacaacggcgctaagaacagtaagtcatggttgggaagcagtaagggaagaatggagcccagatatcctaaattaaaatataaaaggctaacgttattaggcatgtacatctaaatttcaaagtaaaaggccaacatcccactacgcctcccgaatccagcacattccacctttccacctaacacacgcgcgcacacacacacacacacacacacacacacacacacccttccctctgaggcaattaatggacccaaactgacttttttatggaaccataatatagaaagaaatgcctgtgccgaaaatgtcaatgcacacaataatttatcagaaatcaatgctctattctatgtccccaagctcaacactaacattgtaacctcttaaatgtgccttgttgtctgcagcttgaattcctttgtggtttcacatacgttatttggatgaaggctgaaactctcacacactggttattatagactgtgcagttgaaattaatagaatagagacgccctctgtctgatgagtcactatttttcctcttctgactcrtagtttttcttttttgtttttttcacattattgatcagtga

SEQ ID NO: 820655 - DNA, 547 bp, Homo sapiens
taggaatatgtatatatgtatatatcctatatataggaatatatgtgaatatatatacatatatasgtgtgtatatatgtataattcctatacatatgtgtataaattaatatataggtgtgtgtataaatatatagacaggaatatatatataaagtgtatatacactttatatataattatacatatatatacacacctatatatgtatatacactatatatatataaagtgtatacatatatactttttctttagccacagaaaaggtatttttcctatggctaatactttacccatgctttttctatggctaaagttttatcactccccacaaattcaactgtaattgaatttaatataaattaaatgccttttgtattattagttaacaaaagtacagaattcatgacctttcctcaattttgctacctacttttatctccctcacactagactctatataattgctaaagatatctgaagtgggggaaaaatacaccaggggatgcaaaaatcattttctgggatacaagaaagaaaatta

SEQ ID NO: 820656 - DNA, 436 bp, Homo sapiens
tgaatctgacaattatgtgtctttgagttgctcttctcgaggagtatctttgtggcgttctctggatttcctgaatttgaatgttggcctgccttgctagattggggaatttctcctggttaatatcctgcagagtgttttccaacttggttccattctccctgtcacttttaggtacaccaatcagacgtagattcggtcttttcacatagtcccatatttcttggaggctttgtttgtttctttttattctttttttctctaaacttctcttcttgcttcatttcattcatttcatcttccatcactgataccttgtcttcctgttgattgtattggctactgaggcttgtgcatttgtcacgtagtcytcgtgccttggttttcagctacatcaggtcctttaaggacttctgtgcattggttattctagtta

SEQ ID NO: 820657 - DNA, 565 bp, Homo sapiens
tataagccaagtatcagatatgtcctgacaaaatgaaaaaagaacgtgattaagtcgtatgttacttactggtataggtgagttgaaaaccttggtcggtgtcagatccattggtgttgaactctagccayaggtgattggatgtgctgtttaggatcagccccagaagttcatttttagtgaacgtgcccagtggacgtgaggaactgtcttttccatcatatacctgatgaaaattcacagcatgagtccctctatgccttcactggattcttatgttagcaatggtaataaacaatccaaatcttcaaagatgcagttttaaacaatacttaaaaaggcatatagtttacagaaagataaatgaaggacttagagctaaatcatatttgttctttaaattttatctttaccattaacactggaggcaaaagattccattcttgttcagatcattttatattcattactttaagagctctttctgtgttcatttaaaattaaataaatatttctttacatttccaggtttcattatctacctttttattccttttctcatagt

SEQ ID NO: 820658 - DNA, 589 bp, Homo sapiens
atatatgtatctatagatatatatagagagagagagagtttagtgatatatatatatcactaaactgtatataattctatgtagttatttaattttgggttaaaaaattgaaacaaygttctaagctaaaatgttagtttctgttgcttcttaaaagctaatccaataacggcactaaattgtaaaaataaaggtttataggataatgaatgggctaaaaatagtaccattttgtgaaattcttaaatattcttcgtgagtaaatatggaattgcatattttgattaatatagacttctattacgggcaagatttacttatttgttgcgtagaacacaatgaacttggtttaaaggagaaaggtagactttctgtttctgtttcttagttgagctgttttctatttctgtgcttttaaaataaagcttctaaaacatagagatctgcatattaatagttttcccaatttcacagtgccctcaaaagccccacaacaatttctacattttaataaccagagccatacacctttacttccagccattatgttaagaaacatctctgttaaatgtgaggcattgtataggct

SEQ ID NO: 820659 - DNA, 479 bp, Homo sapiens
  misc_feature 1, 2, 3, 4, 5, 6, 7, 8, 9, 10, 11, 12, 13, 14, 15, 16, 17,18, 19, 20, 21, 22: n = A,T,C or G
nnnnnnnnnnnnnnnnnnnnnnaaaatgtttcttcttaaactaattttaaaataagcctatttttggattttagaactttgttaactttttttgattgaagtctttaaaagccatgatttctgaacatagaggcatattctggataacgtttaaagcattaatagctataaactacttgtagagcttatggctataaactactgaaacaatttgtaagtcccacaggaaaatgaatgttattacacatgtctccagtgaagaaaatctcttatgattgataaacgcttctgtacaatcagaacataatttattgtcaaaatgaacacagcccacaacttatgatggttcacttacaatttttcaactttataatgatgtaaaagtaatacacgttcagtasaaagtatactttgggcacccatgcaaccatctgtttttcatttcctgtacagtattcaatactagcacaaatcgtcta

SEQ ID NO: 820660 - DNA, 597 bp, Homo sapiens
caaaaattacttgaatgtattaccaaaaatgaacatttactatagaccagtaatattctctttccaataactgattataaggctctttgaattcatctgagataaacaaagacccaatgtatcsatatatacataggggaattagaatacaactgtaacagtggatgaagcaaggcctggcacggtggctcatgcctgtaattccagcactttggcaggtcaaggcaggcagatcacttgaggccaggagttcgagactagcctggccaacatggtgaaaccccattttatctaaaaacacaaaaattagccagatgtggtggcacacacctgtaatcccaggtactcgggaggctgaggcaggagaatcgcttgaacccaggaggcaggggttgcagtgagctgcgatcatgccactgcactccagcctggacaacaaagtgaaactctctgaaaaaaaataacagttgatgatgcaagagaaaacatataaggacaattattacacaaagtaggtgacatatgaattcaaaaatgagaatttatgggtcaaggagatttattgcctagcttaataactgtaatgtccataatact

SEQ ID NO: 820661 - DNA, 641 bp, Homo sapiens
ctaatttttttgtatttttagtagagatgggttttcactatgttggccaggctggtctcgaattcctgacttcatgatctgcctgcctcagactcccaaagtgctgggattgcaggtgtgagccatcgtgtccagcccatttttaaaatctctttcagagcagtcacaccgatttaacctgccatcagccatatatatttattaatgttttctctgactcacagaaaacaccacactttatagattttaaggcacaaagtgatgatgtcttgttttaattggcattttaaattaataataaggtcgaacttttttttttcatatgcttattggctgtttgaatttgttctttcctgattgatcagctaatttacttttttactttttattattagagtatatttactcattactggctctctctctttctttcccttttataaaatctcttaacctctcacctgttgtgtgtgacaacacttattttcaacacctgccattgctgttgctttttcttgagtgttgcttggatacctcacttttttgttgttgttattgttayatccgaaatgacttctaccatgaagcctcctctgtttagctttttgacttagtctagaaggagaattctgtagaccaaa

SEQ ID NO: 820662 - DNA, 479 bp, Homo sapiens
tattaatattggcaaaatgttttcatgataayatccagtatcatgaaagtccattcatggataaactaagggacaagtaaaacagaataatatttctgtggagcaaaatggaagaaagggtgtcacaaaccctaaagtggtccctatctgtagaccctttgattgggacttagagaaatatatttttaaaaccaaaatttaaaatatgccccaagatttaaactcaaagttattaattgtggttttattaattaagaagaaaaatagagttaaatgcagtctaatgatctatagagtggatgccttaataagctatggtttcattgatgagattctagggagccattcataattattaaaagaaaacagaacagcataaaagaaaaatcctatagtaattgttcaagaaaaggcaagttataaaatacaatgatttcattttgtttttttttaagtataaatatatcaatgtaaaaagg

SEQ ID NO: 820663 - DNA, 482 bp, Homo sapiens
tacaccctctctttcaaaattccagtrattcttttccccagaaagatgaagttctcatgaagctctaaaatttgaccagagtttccccctcctttctaaatgccatttctttccagggatcccccaaaacagcacagattaccttagaggcttaaaatcatatatgtacaagaagaaaagcatttccataaaccataaaggtgtgaatgactgatagtcaatagcagcacattctctaattgtttcaaggggcttcttgttaatataatgattctgcagataatggaattattaacatgctactgagttagtttttaaacaatgggttatgtgggggaatgttacgaaaaaaacagaaaggtgtcactgttacatgaactcttactagaaattggccactggtattgtctctttagaaaatttcttcttttcattgttggttttccttttgtctttctaaatccacaatttccattaaagta

SEQ ID NO: 820664 - DNA, 561 bp, Homo sapiens
tgctctttctttccctgtctttcaacatccagtgaaaagtctcacagtgtaggtaaaycaaacttaaatatcataactctattatgttattcaggagtacgttagttctagctactttgatttaaaattcggacataacattaatgattgtaacttcggaatttggtcacatagagaaataatgttttgtgactagcaaattagaaaaacagagatggcagataattattacatatatattacgtgcaattcttatctaagaattttacatgcctttgcccatttaatccttattttaaaacaaaaaccctgtgagctataggtactgttattattctcattttaaagatgtagaaaactgagcctcagagaggataactaccatgctagatcacgtggttagtaaaatggcaaagtcaaggtttgaactcaagtcataaccccagagcctgtgctattaactttgacattgcactgcttcctgggtctgggttggcagctgagagacttacgttccaatccaaatctaccacttccatattttctaaaccaaagccagga

SEQ ID NO: 820665 - DNA, 561 bp, Homo sapiens
tgctctttctttccctgtctttcaacatccagtgaaaagtctcacagtgtaggtaaaccaaacttaaatatcataactctattatgttattcaggagtacrttagttctagctactttgatttaaaattcggacataacattaatgattgtaacttcggaatttggtcacatagagaaataatgttttgtgactagcaaattagaaaaacagagatggcagataattattacatatatattacgtgcaattcttatctaagaattttacatgcctttgcccatttaatccttattttaaaacaaaaaccctgtgagctataggtactgttattattctcattttaaagatgtagaaaactgagcctcagagaggataactaccatgctagatcacgtggttagtaaaatggcaaagtcaaggtttgaactcaagtcataaccccagagcctgtgctattaactttgacattgcactgcttcctgggtctgggttggcagctgagagacttacgttccaatccaaatctaccacttccatattttctaaaccaaagccagga

SEQ ID NO: 820666 - DNA, 589 bp, Homo sapiens
tacatttatcccttatctttcatcattttctttttccactggacactccttgacagaccctttttacttcttccatttccacaatcagatcactaaaatttggtttgtatcatttctcacatgttcagtatttcatcctgctccacggttttaaatagcttgtatggtaacgactctcaaacatctgtatcaagcacaggtctctttgctgaacttcatatcttttaccctagtgcttgcaacattctcacttgaatatttcctaaacttctcaaaattattatatccaaaaagggaactcttgattttttctggttttccaggttaggactttacatgcactttctctcttttagcaaaactcttggtgcttttttatcctcatgtctcatctaagacattgcctgcaaagattggcttttccctacttaaatagcttccaaatctgtaaactctattttattaytatgcttgtattttttttagctgttttcacagcctgctttattttcattatatattgtcttgcatatttctaagtaagctctatggaaacaaaattcacatatatcttcatcattgctgtatc

SEQ ID NO: 820667 - DNA, 605 bp, Homo sapiens
acattatgataaaactgattttctttcatttgaagtccagaaatgtaatttaatgggtgcttagttttctatagctgccttaacaaattctcamaaatgtagcagcctaacacagatttattagctcagttctgaatacgagaagttctgatatgagaagtccgacattggatttcgcagggagaaaatgaaggtgtccacggggctgctttccttacaggaggctcggtggagaaatttgccttcaggcacattcaggttatctgtagttcagttcctgcagttctgaaactgagttaccagtttgtttgctggatgttaaaaagaggatccgacagactgcccatattccttctcatgctttctatgagctcctagaggcctctttctgggctttgcacaagagcccttaaaactcaaagctagtaacagtgtatctggtttctctcacacttagaatatttctgacttctctttcagctccatttctctgttttcttctattgcatggttctgactccagctagagaatgtctttagctttaaaattttagtatttagattgggtttatctgaataattgaagatactccccttattgtgaa

SEQ ID NO: 820668 - DNA, 540 bp, Homo sapiens
atggaccatatctcaattagagctatttaagacaaacccacaggcaacatcgtactgaatggacaaaagctggaagcattccctttgaaaactggcacaagaaaaggatgccctctctcaccactcctattcagcatagtattggaagttctggtcagggcaatcaggcaaaagaaagaaataaagggtattcaattaggaagagaggaagtcaaattgtctctgtttgcagatgacatgattgtatatttagaaaaccccatagtctcagcccaaaatctccttaagctgataagcaacttgagtaaagtctcaggatacacaatcaattgcaaaaatcacaagtattcctatacaccaataatagacaaacaaccaagtcatgagtgaactcccattcacaatgactataaagagaataaaatactcaggaataaaacttagaagagattggaaggacctcttcaaggagaactataaaccactsctcaaggaaatgagaggacacaataaatggaaaaacattccatactcatggta

SEQ ID NO: 820669 - DNA, 560 bp, Homo sapiens
ggagatgatgcctaggccgagtcttgaaggatgagaaaagtattaggcggggggacacaggagcgagaggcctctgtgcagaagaacacgggcaagggcacaaaatcgagggccggggggagagagaggtggggagcagccacaacctggaggtgcatatgcggctcgcaggtggatatacactagtgaagacaggaaccagggagggagggtcttctcctcagggataaatatacactttattcttctaagggcaaagaaatatgtcaaaggatttcttttaaaatacatttaacgtgttttacaataatatttgttttctacatatgaaaaatatacccaaaaagttgggggggagggggtggggggaaacagaaaagtagagggaagaagaggaacaaattacccagggctctactgctgaagaaaactccagctaacattccacacaactgaagggttctaatcaaagtcacacccacagtgtctggtttacttctggtagcaatgaggaaaataggctgaaggkgaattgaacataaagcaattgttgcaaacac

SEQ ID NO: 820670 - DNA, 547 bp, Homo sapiens; identical to SEQ ID NO: 820537

SEQ ID NO: 820671 - DNA, 520 bp, Homo sapiens
cagagatatctaaactggagtgtggaacaattactagcaccgttttacccataagggaatttcacacctaatggcaaagcaagggtatgttttctcaagattyccactgtgtaatgtagcagcatttcagtgatgcctgcaatgcatggcaagataaaataatgggaagtgcagtaaacttatccaatatctgcgtacaacttatgcgtgggaattaactccctatgcactctcagtctatgcagctaatttcctaggcagctaattccacttctagctctgaagcatattatgtgatacagacatggccaaacagagtatcattttatacggtgctcattactaactcacaagcaggccaatcatagtaacgagactcacactgttagaggcatcaaggtagcagactcctttcctgctggactcaaaccagaaagattgtgaatatgaggcttttgcagctctctcatcaccacaaggagtcgtagaatgaagcctgagcatatctcacatagatggt

SEQ ID NO: 820672 - DNA, 619 bp, Homo sapiens
agttatagtgaacaactcacaattctcttaaaaaattcaagattacccactcttctgcctctttgcacaagkttttcttttggcccagaaaacatttcctcacttgtactgtacccttactttcctataactctttacgggtgcctatactattttccaccataattgcttgttcctatgattatctcttgtgttagagaaatgttcccataagaggcagactaccatttcatcatgggttagcatcatgaacagacaaacacacctgaattttcagttaggatttgaatccagagtggagggaataaagtttccgggcaagaggaccttggacacaaatgcctgcaggtggaaataagcatgacttgtttcagagactagggacgaaggataagagaactcttccgcataaaaataagtatatcagccaggcatggtggcttacacctgtaatctcagcactttgggaagctgaggcaggttgatcccttgagctcaggaggtcaagactagcctggacaacatgatgaaaccctgtttctacagaaaatacaaaaattagccaggcatggtggcatgcatctgtagacccagctactgtggcggctgaagtgggagg

SEQ ID NO: 820673 - DNA, 579 bp, Homo sapiens
agctgagccccaggaagtacagggttgcccttagctgagatgtgcaagactgcaggggtgaatatgtttggaggagtttgggaagtcacttttatttaaataattaattaattaatttttgagagagtttcactcttgttgcccaggctggagtgcagtagcgtgatctcggctcactgcagcctccgcctcctgggttcaagcgattctcctgcctcagcctcctgagtagctgggattacaggcgcctgccaccacacccggctaattttttgtatttttagtagagatagggtttcgccatgttggccaggctggtctcaaactcctggcctcaggtgatccgcctgcctcggcctcccaaagtgctgggattataggcatgagccactgtgcccagccaagaagtcacttttaggcatatgaaaatggagatgcctgttgggacatccctgtagagagttttggagacaactagacacaggattstagacctcagaggagggtctgcagggtacatggggctgagtattaacaggtggggcataaagccatgagatgagaagtacggaaaggcag

SEQ ID NO: 820674 - DNA, 275 bp, Homo sapiens
aatttcaattagctgaaactttattttagcagtgcaatgctgwtgatccagtcctagtggagagaaaggctgacatagcagaaaatgacctggggccaagaggagtagagagcccaggcccgctcctttcccggccctgcccgcttcccacagcccaggctgcaccatagcagcttccaccctcccatcccgccgccctcttccagccctttcccgttgcccagaccccagcccagggcgacttttacccttctcaccccaccccttccccactg

SEQ ID NO: 820675 - DNA, 582 bp, Homo sapiens
ttcccatcatagagaggacaacggggaaagggagaagcgtgtgcataggatgagatgtgtgttgggtggacagaaagactcctttccctaaatgtgaccccattagctcaccccattctattgcacaaattcctgagcggaggggcaccctgtggggatgaacacagctcttcctgcctccagttcctgcgtctccctgccatgaccagggctgtaaccctccaactcccttcccagggccccgtggcccctctgcactggagaaaggtccatgttccacagcgggtttcaaggaccttgcccctcagctccccagctgccttgtgactctgtgactctgttatcttggaataaacagggagaggccactggcctggctgcaagaatgtggcagctttatcttcccaaggacagtcccagtggaaacctctgggccgcaggtcagtgtgctgtgtttcactctgattcttggagaaatctttcccttactctgggaccctgataatcactccctcttgagttgcacccacagacgcccccacamcaaaccctccctaatgaaagccatctgcgcctgattct

SEQ ID NO: 820676 - DNA, 594 bp, Homo sapiens
tttttagtacagacggggtttcactgtgttatccaggatggtctcgatctcctgacctcgtgatccgcccgcmtcggcctcccaaagtgctgggattacaggcatgagccaccgcgcccggcaatgctgtgtattttcttgacctcatatatcagaaggtagtgatcttaacatgtaattcagttcttatattgtgtgctggtggtaagtggaagttttggcttttttcttaagtggaaattgtttacaattctgcaggctgtataaatgtacatattattttcttgttttatcgttggttacaatattttgttaattgaattttatgactttacatgtgagtattcagtatgtggcatgcaatataactgacacactgcactcattaatgtcacaaagtgccactgggtgcagtggcttatgcccgtaatcccaaatggccaacgtggtgaaatcccatctctactaaaaatacaaaaattagccgggcatgctggtgcttgcctgtaatccaaggtattcaggaggctgaggcaagacactcactggaacccaggaggtaaaggttgcagtgagccaagatcgtgccattgc

SEQ ID NO: 820677 - DNA, 594 bp, Homo sapiens
tttttagtacagacggggtttcactgtgttatccaggatggtctcgatctcctgacctcgtgatccgcccgcctcggcctcccaaagtgctgggattacaggcatgagccaccgcgccyggcaatgctgtgtattttcttgacctcatatatcagaaggtagtgatcttaacatgtaattcagttcttatattgtgtgctggtggtaagtggaagttttggcttttttcttaagtggaaattgtttacaattctgcaggctgtataaatgtacatattattttcttgttttatcgttggttacaatattttgttaattgaattttatgactttacatgtgagtattcagtatgtggcatgcaatataactgacacactgcactcattaatgtcacaaagtgccactgggtgcagtggcttatgcccgtaatcccaaatggccaacgtggtgaaatcccatctctactaaaaatacaaaaattagccgggcatgctggtgcttgcctgtaatccaaggtattcaggaggctgaggcaagacactcactggaacccaggaggtaaaggttgcagtgagccaagatcgtgccattgc

SEQ ID NO: 820678 - DNA, 603 bp, Homo sapiens
ctttctagtctgcatttcactttcatttaatatattcactaattcaatagttttcattttctttcacttatagaaaagagaaaaacactgacaaagaaagataccttataatgaacagatacatgaaaaggtgggtacaaagagacaacagcactctagactctaataaagacggcaaaacaaccacgtacatgatatatcagactaattataatatcctagatgaatatagtattgagtattaagaattgagtgaacaatatatttctaaggacaaaaaaggaaatacagtattctccagttggtcattcaactgaaagtactttttcatgcaatattctgcgacaacctggatcacctggttttgccattaaaaaaaagtgaaagtgtgacaatactctttcaacttttatgatgtttgtgcaccaaaatttacttaacaggttcgccaagcttagattcttactaaaatttctaataaagtggyttttcactactctgtattgttcataaattgacttaaaaatataaaagaataaaaaagaatccactagactgagttaataaatggtgatgactttatttggtagactggaaattgaa

SEQ ID NO: 820679 - DNA, 451 bp, Homo sapiens
gtatagcatatagttttgcaatgtaatttaatttttatgtagagccttttggctcataaaaatctggagggtctgaaagaaaaagccttcagagacaccagttcctccatctgccccaracaactggagcagaaacagagggtatcacctcatgagagggtgctgatttctaatcactagtgtctcaaaaattaacatgataaacttgcataatcccactttggactgtaatcctccacgacatagacaaaaagtcattaccagctccctctttcagagggttctaagaatgaaataatagatgtggtcaagacttctacacttgaccttggctgaaaggcagagaagcaatgtgactgagacttttgaagaacagtgtcctggtccctattctaagagatgctaattcactaagtctggaaagggatccagttagttctgacgatcagcc

SEQ ID NO: 820680 - DNA, 591 bp, Homo sapiens
aaaagtcaaactcattgaagtaaagggtagaatggtggtttccaggggttgcaggtggagacaggatgggagatgtttgctggtcaaaagatacaaagttttagytggatagcaggaacatattctggagatatactgtactgcatggtgactatagctaatgatagtgtagtgggtacttaaaaattccttaaggaatacattttaattgttctcaccccccaaaattgataagtattaaggcgatgaacatgttaattagcctcatttaattattccaaaatgtatccacacatcaaaacatgttgataccataaatacatacaatttctatttgttaatttaaaatgactaaagtgtaatatgtaactaaaaacaaatataattttttaaaaggtagttagtcattctatttattcattcagtgtttcctaaatgtcagacaaacgtgttttgcctagagatcacacaggaagaaagtttaatgaaaacggaagtcatcacaaagtattatttagtcaagagcttaaccattgaaattttacaatttattcaccagctgaaaagaattattctgggcctcccctcaca

SEQ ID NO: 820681 - DNA, 547 bp, Homo sapiens
  misc_feature 541: n = A,T,C or G
tttgtttctttatctctctggaagataatcatctcagattactctaatcatgatgtgcccagcaacactgtttgattctctttgctgagctgtgggaagtcacctctctaaaactgttcaccctcagagcaaaatccactctttcctactctcatgtagcaaaccagatgcccaaaaatccagacaaagtgagttatttgtgtcccagttaaaatggcttatatccaaaagacaggcaataacaaatgttggcaaggatgtggagaaaagggaacccttgcaccttgctggtaggaatgtaaattagtacacccaccacggagaacactttggagggtcctcaaagaactaaaaatagctgggcacagtggctcacgcctgtaatctcagcactttgagaggatgaggcagatggatcaccagaggtcagragttcgagaccagcctggccaacatggtgaaactccgtctctactaaaaatacaaaaaaaattagctgggcatggtagcaggcacctgtaatcccagctactcggaaggntgaggc

SEQ ID NO: 820682 - DNA, 604 bp, Homo sapiens
tgtcaaatctatatttctagtcctgtcctgtctaaactcctcctggctctgcaatattccccttgtatttccaacatgatgcccaccatcactgcatactcagtatattcaatgcttaacccastatttaaccagcttctctgtcacttgcaccatgggttcttagacatttaacattttccccctcttggattgtgtagactttataaaacatgactgaccataactctttcctatgggtccccatgttggcaataagacatttcaactctctccacacggcatttagtcccaccataaagtgattctaatctgtctccaggctccttttctgccattcctcaacatgtacccttgccctatccatactggaccatcaaatttctttgaacatttcccacttctatgcctctgctcatgattcatcctctttctggtatgctctactcatcatgcttttaacttccttttgtagctggagtgggtgctgtgatgtgttccctctctcaggactcaattacttattcccccagctacagggagtgttgatggcagaaaagtgggagataagccatactgttaatgattgacatgggttacagag

SEQ ID NO: 820683 - DNA, 625 bp, Homo sapiens
cctcagtaggagctgttccatttgtcttgagtctagtgggccatcttgggatttttttttctttcttttccctccctcccttcctccattctccttccttccttccttccttctgagagggccataatatgttttagagaaaaagtcaactgttttgagagtttattttaatgattataagctttgtttaatttgttagaggtcaaaagtcatatttttggttcagttctataactataatacacaatggacacagttaattcttagtcttgtatgtatatgtgtatctgacctatgtactggtgtgtgtagggggacataaaggaaaaaattgttccctttaaaaatatgacatgctgagtaccagtaccaaacactgttctaggtttcagtatagggcagtgaacatatatgacaaaccttcattttcagtgcacttttatttgagactcatatattatcattgagcataaaaacattagcatttgttatttcttcytccctatacctatccctgatcctcctctttctattgttttcatattgttcttatcaacattcatgtttgtgttcccctaagtaaatgtctaaccagatactttcttaatatacaacattagaggga

SEQ ID NO: 820684 - DNA, 625 bp, Homo sapiens
cctcagtaggagctgttccatttgtcttgagtctagtgggccatcttgggatttttttttctttcttttccctccctcccttcctccattctccttccttccttccttccttctgagagggccataatatgttttagagaaaaagtcaactgttttgagagtttattttaatgattataagctttgtttaatttgttagaggtcaaaagtcatatttttggttcagttctataactataatacacaatggacacagttaattcttagtcttgtatgtatatgtgtatctgacctatgtactggtgtgtgtagggggacataaaggaaaaaattgttccctttaaaaatatgacatgctgagtaccagtaccaaacactgttctaggtttcagtatagggcagtgaacatatatgacaaaccttcattttcagtgcacttttatttgagactcatatattatcattgagcataaaaacattagcatttgttatttcttcctccctatacctatccctgatcctcctctttctattgttttcatattgttcttatcaacattmatgtttgtgttcccctaagtaaatgtctaaccagatactttcttaatatacaacattagaggga

SEQ ID NO: 820685 - DNA, 362 bp, Homo sapiens
tcctcccacctcagcctaccaagtagctgggaccacaggtgtgagccaccatgccccgttaattttttgtatttttggtagaggcagggtttcaccatgtttcccaggctggtctcaaactccttcgctcaggcaacccactcacctcccttggcctcccaaagtgctgggattataggcatgagccactgtgcccgacctggatgcccttcttaccagagaactgaaaagtgctgaaaacaaagacatgactttacaaatacctcaccctcccaaaaatgtcagcagaaagaaagaaagagaaacaatacaaattcccaatgttttgttagaaaatmcttcataatgtttgaataccattc

SEQ ID NO: 820686 - DNA, 617 bp, Homo sapiens
catcactagtcatcagagaaatgcaaatcaaaagcacaatgagrtatcacctcataccagttagaatggcaatcatttaaagtcaggaaacaacagatcctggacaggatgtggagaaataggaaagcttttacactgttggtgggaagcattagttcaaccattgtggaagacagtgtgacgattcctcaaggatctagaactagaaataccatttgacccagccatcccattactgggtatatacccaaaggattataaatcatgctactataaagacacatgcacatgtatatttattgtggcactattcacaatagaaaagacttggaaccaacccaaatgtccatcaatgatagactggattaagaaaatgtggcacacatacaccatggaatactatgcagccataaaaaaggatgagttcatgtcctttgcaggaacatggatgaagctggaaaccatcattctgagcaaactatcacaaggacagaaaaccaaacaccgcatgttctcactcataggtgggaactgaacaatgagaacacttggacacagggcagggtacatcacacaccagggcctttcagggagtgtgggggcctggtggaaggata

SEQ ID NO: 820687 - DNA, 441 bp, Homo sapiens
acttaaaataaaaaatgtagaccataggcttctcagggtctgagcacatccaagagatagcacccattgaaaagaggtaaataaagctcaacttgccttcttggctgcaaacctacctcatcaagaattgcttaggacacaatgcaattacggggaaacagtacacctcttttcccacagcacttagttctttttgtgaaaatctgaagaggatttacattatgtaattcaacctctgtctaccttaacttataatttcattttggtcatcttattttgaaatattttattattaattcttgcagttgcattcayatatatgcaataaaattataaaaatttggtctgaagttaacttgggagttatagcttccagacaatgatccatttcttttgtttcttacaattagccaacatatgtatagtatttgataaatcaat

SEQ ID NO: 820688 - DNA, 544 bp, Homo sapiens
tgggggtccatgttcgagcattcagactctacyaaggccaagtaggaagtaaaaaacggtatctgcaaaggagagcacagatttgctgcaaagtactaagggtctgtgttatgagtcatctgaatgtgcctgctaaggcctccttacagccttcctattaacatgcagtggtccctccatatccatgggttccacatccagggattcaaccaatcatggattgaaaatacaatatttgagggatgtggaactcaaagacatagagggccaacttcacatattcacagggtctgcagggccaactgtgggacttgagcattgatgcggtttggctgtgtccctactcaaatctcattttgaattaccatgggttgtcagggacctggtgggaggtaattgaatcacaggggcaggtctttcccatgctgttctcgagatagtgaataagcctcacaagatctgatggttctataagggggagtttccctgcacaagctctctctttgcctgctgccatccacgtaagatgtgacttgctcttctt

SEQ ID NO: 820689 - DNA, 544 bp, Homo sapiens
tgggggtccatgttcgagcattcagactctaccaaggccaagtaggaagtaaaaaacggtatctgcaaaggagagcacagatttgctgcaaagtactaagggtctgtgtwatgagtcatctgaatgtgcctgctaaggcctccttacagccttcctattaacatgcagtggtccctccatatccatgggttccacatccagggattcaaccaatcatggattgaaaatacaatatttgagggatgtggaactcaaagacatagagggccaacttcacatattcacagggtctgcagggccaactgtgggacttgagcattgatgcggtttggctgtgtccctactcaaatctcattttgaattaccatgggttgtcagggacctggtgggaggtaattgaatcacaggggcaggtctttcccatgctgttctcgagatagtgaataagcctcacaagatctgatggttctataagggggagtttccctgcacaagctctctctttgcctgctgccatccacgtaagatgtgacttgctcttctt

SEQ ID NO: 820690 - DNA, 632 bp, Homo sapiens
catacattctgtacttctcttgactagtagaattggaggggtttataaygctgacagcacgttagctcagaaactatggcagcagccaggtaaaagttggaagtttcctccaccactctgctttcccagacatctgtcaagagcgaggccttgcgcagcgtgtccatctcacccggaacgtggtgcttttttaaacggagtccacctttactacattattgttggtcatcagtggagacggtttccatttaaccctatcggccacgtcgttagagctgtccacaaagaacaccctggctgtacagagcgagactataattctcctgtattccttcctgaaattttggttcagtagcccgtatataatggcattgaggcagctgttgaaatacgccatgtagtaactggccacaaacagccactctgggatcctaggcaccatgctggcggggtcagaggccacggccaggccaatgaagttcagaggagcccagcaaatggcaaaaaggacaaaaaccacaaacatggtgacaaaattcctgaagtcctgtggtttcagtttgggtttgcggtcaggtttcaccctctgtctgacctggagaaccaggatccatattctcaggtaacagaag

SEQ ID NO: 820691 - DNA, 609 bp, Homo sapiens
ttatgacaggcaatcttttggacttgtttgggtctgtgtgtattcacctttcatatggtatcttagccaagatcttatttggttttaaaattttgttattttcttaatagacaaaaaaaatagacaatatctgctttgagcaagtcatagggataagactcctcagagaatacctgatggaatgaggttggaaatgagtacttgggaaaaactagagaacaatagatttctcaaaaattagtgattgcctgaagcatgctgaatataaagatgattatttgagccatgccgcttttctcatagtagcttaatacacaatttcatagcccttccattgaccattataaataaatcaaacatacttttgtcactacgaagatttatacatccagtagatggacaaacatttgcaaatagaaaatatgatgttacaatttagtattattaaagcaaacaaagtttactctttgctctgttaatgctgcgtaaaactgccttataagagaattgttatttttatgctragaaaatgggataagaccaacttctgtcaaaaaaggaaaaaaaaaaaactataaatcaaatggatgttagagaacacacagacaa

SEQ ID NO: 820692 - DNA, 535 bp, Homo sapiens
gaatcaaagctacaatgagatatcatcctatycccattaaataggctttttttttttctgagatggagtcttgctccatcaccaggccagaatgcagtggcacgatctctgctcactgaaacttccgcctcttgggttcaagtgattcctctacctcagcctctgaagtagctgggactacaggcatgcaccaccatgcccagctaactttttatattttagtagagacggggtttcaccatgttggccaggatggtctcaatctcctgacctcatggtccacctgccttggcttcccaaaattctagggttagaggcgtgagccactgcacccagcctaaaatgtcttttatgcaaaagtcaggcaataacaaatgctggcgaggatgtagagaaaagggaaacctcatacactgttggtaggaatggaagccagtacgaccactatggagaacattttggaggttcctcaaaaaaattaaaaatatagctaccatgttatcctgcactcccactgctgggtatataacccaag

SEQ ID NO: 820693 - DNA, 718 bp, Homo sapiens
ataacaaatgctggcgaggatgtagagaaaagggaaacctcatacactgttggtaggaatggaagccagtacgaccactatggagaacattttggaggttcctcaaaaaaattaaaaatatagctaccatgttatcctgcactcccactgctgggtatataacccaaggaaggaaatcagtatattaaggagatatctgcactcccatgtttattgcagcactgttcacaagagcgaaaatttggaagcaacccaagtatctatcaacagatgaatggatgaagaaaatgtgcttcgtatacacaatggagtactattcatccacgaaaaagaatgagatcctgtcacttgcaacaacatggatggaactagaagtcattatgttaaataaataaaccaggcagagaaagacaaacatcacatgttctcacttatttttgggatctgaaaatcaaaacaattgaacttacggagagagagaatagaaggatggttaccagaggccagcaagggtagtgagagggatggaggaaggtgaggatggttaatgggtacaaaaaaatagttagaataaataagacctagtatttgacagcataayagggggactataatcaataataattatgcactttaaaataactaaaagagtataattagattgtaacacagagaataaatacttacggggatggatacctacttttccatgatgtga

SEQ ID NO: 820694 - DNA, 650 bp, Homo sapiens
agcaagttcttagagacctacgacaagacacagactcccatacaatagtagtgggagatttcaacactccactgacaatatkagacataactttgaggcagaaaattaacagagatattcaggacctgaactaaacattggaccaaatggatctgatacacttctacagaactctccacaccaaaacaacagagtatacattcttctctttgctacatggcacataccctaaaatcgaccatgtaattggacacagaacaatccttagcaaatgcaaaaaaatccaaatcataccaaacacactctcagaccacagtgcaataaaaacagaagtcaagactaagaaaataattcaaaaccatgaattacatggaaattaaacaacatgcttctgaactacttttgggtaaataatgaaacttaggcagaaatcaataagcttttgaaactaaagagaacaaagatatcatattccagaatctctgagacaagtaaggcagtgttcaaagggaaattcattgcactaaatgcccatgtaaaacagtcagaaagatctcaagttaacaacctaacatcacaactgaaaaaaattagagaagcaagaaaaaatcagccccaaaactagcagaagacaagaaataaccaaaatc

SEQ ID NO: 820695 - DNA, 552 bp, Homo sapiens
aaatgaagcgtttgcccttgaggaccatctagtctgtggatcctctcctcccagaattaggatcaacagtagagtccaaaaccttacctgatgcacctcgaaaccaaggctcacccactctgtggattcttagacggaaagtaataaagactcagtgatgcataattcactcattatgacatttcactgctaaaactaactcccctggcatgaacacacatatgtattcagaagtggtaaatttcaagcagaaattctttaaaggctcctcatctgagtagactgaaaatctagtagtatgttttattttatgaaacctagatcgagagatataaagatatttgcccaaaatctgacttctgcttaatatgagcactaagactaaaatatcttttacaaatctcctgctgaatgtcaamtcacaatccataattattagcacttttaaaccacagtcacaaacaagccttgtatttttctaagtaaggtagaaagtggtgttgtcccccatagtattgaataacacttggtgaatgaatgagtgaaatagac

SEQ ID NO: 820696 - DNA, 529 bp, Homo sapiens
actctgtatctagctactctggtggggacttggagaacctttgtgttgacactctgtatctagctcatctagtggggaggtggagaacctttgtgtctagctcagggattgtaaacgcgccartcagcgccctgtcaaagcagaccactcggctctctgtaaaatgaaccaatcagcaggatgtgggtggggccagataagagaataaatgcaggctgcaggcaccagcagtggcaacccgctggggtccccttccactctgtggaagctttgttgtttcgttctttgcaataaatcttgctgctgctcgctctttgggtccacactgtgtttatgagctgtaacactcaccgcgaaggtctgcagcttcactcctgaagccagcgagaccacgaacccaccgggaggaacgaacaactccagacgcgccaccttaagagctgtaacactcactgcggaggtcccagcttcacacctgagccagcgagaccacgaaccccaccagaaggaagaaactcccaacacatcc

SEQ ID NO: 820697 - DNA, 617 bp, Homo sapiens
gatgatgctactcctccaaggatttcagagttcccagacgcctagttttctgtctagttcttctggaagatgttattcttggggagcaataggtcctcgagtttggggctctttcaggttctctctccatttccccattctactacaataaacaaacaaacaaacaaacaaaacaattctcacttccagaagatcctgcctgtgccccttcatgagcctttcaggaggtctggatgtctggtccaccgctccccggcttctttcccagcttttgctttttcctttcccagctcttgacctaccaccccacggccgcaccaccgcccagctgagcccccgtggctccaccgcgcagaaggtgcgccagaggccctgccagttgccctccctgccgggtgccgagaaatcaacgctttgtaaaaagaacttccccgtggaaaaaatctcttgatttccactctcagggctcttcaaaggactaaaagctaaaggcgacgatgaattcattccacaagtcctagtcgtgcgccctggtgagtaccagaccctgctccccscgaggggacccacgagcgaccctcaccaccatccctgccctggtggagcccccgtgcgga

SEQ ID NO: 820698 - DNA, 609 bp, Homo sapiens
tgcctctccatggggctcatgttcctaaaatgggggcgttagcaatcatctgagagtggagtttgtggccttctgacgtcaaaatctgaggcaatggacatgaaaaccctccactgtacatcctctgtagtctggccagaatcattcctaggtcggtggtctcttatcaggagggaatgctgcttgcttgttttgtcaaaaccacaaaagggagggaaagcatcaggctgttggttgataacagcagtgaagcaagtctctccaaaggcttggattgttaacccttaggaaaaaaaatcctaattcttgccagatggtgccgtgcatttccaggctcttggtgtcccaaacaaagaactgtacatgacacacacaaagcagcaaagcaaagcaaaatttattaagcacagtaacagtctcagagtggggagagtgggctgatctctgggatgtgagatcagtattagtttggtgtacgttgggtctttttatgtgtgtttctttctcttctcttcccaaggatgcctaatcgttagccagtgtttgccttttgattgataggtgggttgcttagttaytttggcccttgtgtgcttgcacattgcctcc

SEQ ID NO: 820699 - DNA, 581 bp, Homo sapiens
ataatactattatttgtctgcttgaagatgtataaagcatttgaaggaaatgtgatatgaaaagatgaagaacgctcgcygtcaatgtttccttgtttgggagaatcccatttcctaagttaatatgctttgatgtattagctatgtaaggagtagactagtttaaggaaatattgacggtcaaatattagcatattagtcttttgatgaagttcaaatagtagagagatttctttcctcaattttctctggaaacattcaactgaagagacaaatccagagttttctccatatgttgggtctgggagtcattatgactttttcaaagacaggagctgtgacatggaatcatgcttcttctctagctgagaagccaagctaggtccaggctgcgtcataaacttgagcccaccaaggaaatcacccttcacattgacctcgcagagttttggctgttctctgttctttgcccaacacccaagacacacaccagctctggccaacaaaccttaacatatgatctatatccaccagagctatatttattcccaaatctccttctaaaatacaaacctgtactt

SEQ ID NO: 820700 - DNA, 645 bp, Homo sapiens
  misc_feature 628: n = A,T,C or G
gtgagagctacccagctgagcccagtcaaaccacagaaccrtgaagcataataaagtactgtttgaagtcactaagttttagagtggttcttacttagcagtagataaccaggacacataccaagatgaatgtctgtgttttcaacacaaagtgtcaataacactgataactatggcaaatagcattgagagcttaatgtatgctgggcaccattctaagcacttgtactaattttttttttttttttttttttgagacagagtcttgctctgtcacccaggctggggtgcagtggtaccatctcggctcactgcatcctccacttcccaggttcaagcgattctcctgcctcagcctcctgagtagctgggattacaggggtgcaccaccatgcccacctaatttttatatttttagtagagacagggtttcaccatgttgggtagcctggtcttgaactcctgacctcaggtgttctgcccacctcagcctcccaaagtgttgggattacaggcatgagccaccacacctggccagcacttgtattaattcatgtaaacctaatatccaccctttgagatgggttctgttatcatcctcacttaataggtaatgacaaaggctcanaaaggttaagaaggttg

SEQ ID NO: 820701 - DNA, 645 bp, Homo sapiens
  misc_feature 628: n = A,T,C or G
gtgagagctacccagctgagcccagtcaaaccacagaaccgtgaagcataataaagtactgtttgaagtcactaagttttagagtggttcttacttagcagtagataaccaggacacataccaagatgaatgtctgtgttttcaacacaaagtgtcaataacactgataactatggcaaatagcattgagagcttaatgtatgctgggcaccattctaagcacttgtactaattttttttttttttttttttttgagacagagtcttgctctgtcacccaggctggggtgcagtggtaccatctcggctcactgcatcctccacttcccaggttcaagcgattctcctgcctcagcctcctgagtagctgggattacaggggtgcaccaccatgcccacctaatttttatatttttagtagagacagggtttcaccatgttgggtagcctggtcttgaactcctgacctcaggtgttctgcccacctcagcctcccaaagtgttgggattacaggcatgagccaccacacctggccagcacttgtattaattcatktaaacctaatatccaccctttgagatgggttctgttatcatcctcacttaataggtaatgacaaaggctcanaaaggttaagaaggttg

SEQ ID NO: 820702 - DNA, 637 bp, Homo sapiens
agttcattcaggaaaggaaaggatttaacctgtattatggacttaaaatactttttctttcttttttttttgagacagtctctctctgttgcccaggctggagtgcagtggcacaatcacaactcacttaggcttgaactcccaggctcaagtgatcctcccacctcagccacccaagtagctgggactacaggagtgcgccactacgcctggctaattttttgtatttttagtagagacggggtttcaccatgttgcccaggctggtctcaaatgcctgacctcaggtgatctgcccgcctcggcctcccaaaatgctgggattataggtgtgagccaccacgcctggcctcagcgtagttttaatttgtagttgggagcgagccccatcccatccccatcctgtgctctctcccaaaggacctgctgcagctgggaggggagctggcccggacatcacgagctgtccaggaggcgggcctgggactgagcacgggcctgtggctggcaragagccgggccaaggcagccctggagaagcaggccctgctgcaggcccagctggaggagcagctgcgggacaaggtgctccactagaaggacctggcccagcagcagatgcaaagtgacctggaca

SEQ ID NO: 820703 - DNA, 445 bp, Homo sapiens
cacccacctctgggcctttgcactgccactttctctgcctgggacgctcttccctcttcctttgcacagctgactcccccgcttgtcggccagatttttgctcaaaagtatcaccttctgagggacctacccctgactctcagctaaagaggtccctccagtggctgttccgttttctccaacatgtatgttgtctgtctcctccttttttttttctttgagacagggtcttgctctgttgtccaggctggagtgcagtggcaaaatcatggctcactgcagccttgacctcctgggcttaagggaggcccaggagggggggcctytgggaggccacctcagcctcctgagtagctgggaccacaggtgcatgccaccatgcctggctaattttttacttgttgtagagatgagatgttgcccaagctagtctccaactcctggg

SEQ ID NO: 820704 - DNA, 490 bp, Homo sapiens
ggtcaggctggtcttgaactcctgacctcgtgatctgcccgcctcggcctcccaaagtgctgagattacaggcgttagacactgcgcccggccacaaagctctycttatctcacctgatccccataatacttgacaagtgttctcacccagtctctgtagaaggcaggccagagaaaaggtggcaaaatgtcctgaagcaataaagatgggcttcgcagcgcacactgagtggactggacctagatggggcagggaggtgccgcgtgccctggtctgcatggaaggcacttacgctctctggaattctgggatgctgaagatggcctgcatgacagagctgagatagcagctgttgcccaggttcttcagacccgtgtagccaggaccatacattggcttcagtttcgtgcccgactcctggatcacttcccactcactgaccctcagcttgatgtcattgtcctggagcccattctctgtctgagacaa

SEQ ID NO: 820705 - DNA, 447 bp, Homo sapiens
tagtaaaaatgatgatatatcttgctggattcagatttctatggcacttctcttattttaaataagactattcacatttcaaattatactccaagtacaacaataagaaaaggcttttttattaatttttttaacataaagacttattcatgaggggctgaaaggaaaataatttatcataacatttattcacaatgtttcttctcttctgacagcagaaataagagttatattaaacaaggcagtaagaactctcagtattacagaaatataagcattggtatataatttcaggtaatgggatgaggtaaggccattttgtccactaatatattttatccttggtaacagccacatgagtcaacatggaattggagaaagcaaaggtaatttaattctgtatgccctactgaacwctgtgcacttagtactaaaagaagaggcaca

SEQ ID NO: 820706 - DNA, 627 bp, Homo sapiens
ataagattaaatccctttttgagctggatgcagtggcacaagcctgtagtcccagttacttgggaggcttaggcaggaggatcacttgagcccagagtttgagccttcagtgagctaygactgggacactgcactccagcttgggagacagagcaagacttcatctctaaaaaatcaaaataaaaagattaaattatttttacatgtttctatagcaccatatatcttctatttcaatgcacatttgtaattacttatttagtagatgtcttctcaatttccctctttgcccaaaggtagaagaaggcaaggaccttgtctattacactcaatatttagttcttacacattatagtacatggcctggcatacaataaggcatgtaagatgtgctcaaatatatatgttgaattggattcaattgacaacctctcagttaaatagtacagaacagtaagtaaacaaaacataatcctaaaagcaagatactagttgtgcagccttgaaataatctgttgcaacctttgaaccagtttctaaatcatcctaatggagtattgttcctgaaattgataatgctttgtcaagaatggatattgcttattgacttaattggctttaataatg

SEQ ID NO: 820707 - DNA, 573 bp, Homo sapiens
tcactcattctgcagaccattgcattcttgcgaggtacatttccatgttcatagacttgggcgattstaatcgttctgtctttgagagtcccttctgttgatggagtataatttatatatgcatacacatatcctgagagaaaggtgaggtacagattccagttgaaagttactcacacattttctccgaacaattaggcctacttctgtaatggtgtccaaattctgagggaagtgaaaatttcttcttctagggaagccatctgttttcccctatgaaatgactaatgatctgaagttcctggacgttctgatcatgttctcagttcaatgaagcaatctgtgaaattcacatgggaattggctcagtaacaggctttatagaattgtcttcagctccagaaaaaagggtcaatgtcatatgcagttaggaacttcgaacaaaaatatgtcatgaaaaatttaaccaattttttttttgcttttgattcaatttcttagaatgttaattacaagtaatagtgattgcagacattttagagtcaatatgcaatctcaacacaaattgaggac

SEQ ID NO: 820708 - DNA, 589 bp, Homo sapiens
tgttttgtgttggtaatagtttggagtaaataggaaaatcaaagctacagaaaatattttgagatttagctttatttcatgtgtatgtatatgcatagcatgacaaatataaatagctatttgctggtgttwccatgcatcttaaaatagactgcaatgttattgctctgctatttggaagctcaagcaccctgaatactaggaatgatgcaggaatgatttccctgcacaagatctctctgttcatctctagaaatataagtatttagtcttcttgaagagggctgaaccttaggctccttcaagattcccaggagactctggatttctccacatccattgtttctttcccagtatataaaaagatgagaaggtcataattggccaagagaggtctattttttgtttagttaattaattcgagatttaaacattcctgtacttatgcattcaataataattcaagaaacgcctattgagcaccaacttaccagaggctcagcagagagcaaaacagaccaaacctccatcctcaaggagtgtgcatggtagtggatggagacagacacaaatgggagaaatatgttgg

SEQ ID NO: 820709 - DNA, 626 bp, Homo sapiens
gtaggtgtatttttctccttcaaatacttggaaaggtttttggatagcaataggtgtgtttcagaagatttttgccttactaatcatattttttccttttcctaaattctatatttttgccatgcatttggttttcattcaggaaataacctcatcttggtaaattggtggtgggaactatgctctatgaattgtacatgacagttatttaggtatatgtgatgttaattttatgtattactgaaatgcaactcttggctaaccttcttaaatcaaagttactggataactgactgttcttaggatgtaagccctttgatcttagaaaacacgctgtgacatttacattgtagattctcaacacatacttgttgaatagaaataaattacatcccaaccctagtggttgagaataattttccattaagaaggtctggcacaatctacaagctgctgaactcacatcagaattttaattggattctatggtgattcgccaactcatttctcacattgatttatcttcccaattccttaaaggaaataactccttaaactccttaaaggaatcctrggaaataaaacaatctttcaattcatattacatttttctatgccttacattt

SEQ ID NO: 820710 - DNA, 486 bp, Homo sapiens
ggcaacttgaccatgccaacaattacacacaaaaagagcagccccaaggaaagcgtgttctctctaactaaaggatgagaaaatgagcagctgaggaaaacagaaaagttttagacaaaaccaccttactgcataaaaacactctaggaataacagtggctccagccccaaccagccaacaaaggtcaagtggagagcttagaatttcattcccaacagaatttaattatttattcatttcctttatttttccctgctggcattgtgttagagaagtcaaaatgagatgctataactttagcctcacctagcagaaataaaagcccacacaatcaccctttatatcagtggaagccacattgtaagccrtaatgtggtatccctcctcttctcagccatggtattttcagtggaggcctagggggagctaaaactctcctcctaatattgctaggtaatattgttgctattacctagcaataataa

SEQ ID NO: 820711 - DNA, 629 bp, Homo sapiens
tgtttcagtactcgaagatattgcttttccctcgatttttgcacagtttcattatttsatgtgtaagatgttggagatttgaccaagtgaccccaggctactgtgttagtggccgaaacattgtcataacattcacgtgcaaaaaaaaatcagatccattaagttttaaattgtttagtttctaatattacaagctgttcctatatatcaagttagttgattcatttcaaaataagcagtccctctttgtaatttttacgtcattcatatttcttattttcaaggactaactacattaaaatatataagatagaaaaagtaatactttaatattatgaaattaattcaattttcaaatatatttcaagcaccaacaatgcacagtgctagacaatgaaagaaaatgtaataaacaaagaatacattatacatatcctaaggagtttacaatctattggaatttacagaaagataaaaagatgtttcacacagggcagggatcaacttgtgctgggtgcctaggagtccaaaggaagagcgaagatttggtgtatgcatggcatgcacacacgtgcacatgcatgtttatatgaatattttaactcctacacatagtgtttttacagggt

SEQ ID NO: 820712 - DNA, 511 bp, Homo sapiens
attagcttaatatgtgtaaattattataagaaagtgatctaaaaaaggtgctgaaaaggtcactgcaaaaactcatgaataaatattagatttaaaattcagtctcaaatgaaacttckggttctgttttgctcagctaaattctgtattttgaaatttattttacataaaatggtgaccagctcttttgcatacagggtgtgaaaaacacagggtaacagtgcaacataggaaggtcaactgacataggaggtaaaggaatcctggcaaagagaaagggctgatggtggaaaagattgccagaagtcagattctagacaccactgaagaacaaacatacactcattcctctaagctgatttcagagaggtcctccctgctcaggaacacatccagctcttttttcaagggtgtgattagcaggaagagatgactgcactttatgaataagaaagcttcatttgagaaacaaagatcccaccagctataactgcaataacaaccttgacat

SEQ ID NO: 820713 - DNA, 511 bp, Homo sapiens
attagcttaatatgtgtaaattattataagaaagtgatctaaaaaaggtgctgaaaaggtcactgcaaaaactcatgaataaatattagatttaaaattcagtctcaaatgaaacttcgggttctgttttgctcagctaaattctgtattttgaaatttattttacataaaatggtgaccagctcttttgcatacagggtgtgaaaaacacagggtaacagtgcaacataggaaggtcaactgacataggaggtaaaggaatcctggcaaagagaaagggctgatggtggaaaagattgccagaagtcagattctagacaccactgaagaacaaacatacactcattcctctaagctgatttcagagaggtcctccctgctcakgaacacatccagctcttttttcaagggtgtgattagcaggaagagatgactgcactttatgaataagaaagcttcatttgagaaacaaagatcccaccagctataactgcaataacaaccttgacat

SEQ ID NO: 820714 - DNA, 531 bp, Homo sapiens
tttccttcccaatagtccactgcaaaatacggtggagaatgagcatccttccaagaccaaagaggttcttggagaagaacaaaggcaattaggcagaaaagggaagttggtctttgggtttaagatttcctctctgaggttatctgggattagagagtctacttgacttttgcttggactcagtagctttaggttgcatttcgatatggtttggctatgttcccacccaaaccttattttggattgtagttcccataatccccatgtatcctgggagggaccaggtggagataattgaatcactggggtggtttccctcatcctgttcttgtgatgattaagtctcaccaggtctgatagttttataaggggcttcccctttcactggtcactcatacttcttcctgccaccatgtggagaaagatgtgtttgcttccccttccaccatgatcataagttttytgaggccttcccagccatgcagaactgtgagtcaattaaacctcgttcctttataaattacccagttt

SEQ ID NO: 820715 - DNA, 454 bp, Homo sapiens
actggcaaattggatagagtcaagacccattggtgtgctgtatttaggagacccaactcacatgcaaagacacacatacgctcaaaataaagagatggaggaatagttaccaagcaaatggaargctaaaaaaataaaaataaataaataaataaataaataaaaacagcaggtgttgcaatcctagtctctgataaaacagactttaaaccaacaaagatgaaaaaaagacaaagaagggcattacataatggtaaagggatcaatgcaacaagaagagctaactttcctaaatatatatgtacccagtacgggagcacccagattcataaagcaagttcttagagacctacaaagagacttagtctccaacacaataatagtaggagactttaacaccccactgtcagtattaggcagaacaatgagacagaaaattaacaaggatattcag

SEQ ID NO: 820716 - DNA, 454 bp, Homo sapiens
actggcaaattggatagagtcaagacccattggtgtgctgtatttaggagacccaactcacatgcaaagacacacatacgctcaaaataaagagatggaggaatagttaccaagcaaatggaaagctaaaaaamtaaaaataaataaataaataaataaataaaaacagcaggtgttgcaatcctagtctctgataaaacagactttaaaccaacaaagatgaaaaaaagacaaagaagggcattacataatggtaaagggatcaatgcaacaagaagagctaactttcctaaatatatatgtacccagtacgggagcacccagattcataaagcaagttcttagagacctacaaagagacttagtctccaacacaataatagtaggagactttaacaccccactgtcagtattaggcagaacaatgagacagaaaattaacaaggatattcag

SEQ ID NO: 820717 - DNA, 627 bp, Homo sapiens
gatatactggtgtcagttctgacccccagcatagtcccagtggtggtggccacaggggtgcatttgtcactccatccccagctccagaaggctcagcaaagagagakagactctgtttgtttgggagaaggaaagaaaacaagagtctctgcctggtaatccagagaattcttccggatcttatccaagactgcccaggcagtttttctagaagtcggcaagaaccccagtcttactggacttggggtgcccactaatgcagatatggactagatcacaacacccaagtcctttcaaataccggaaagtcttgggctgaatcaatcctactgcattagcatctttgtacccatcttctcaagaagattgggtacaaacaatcccagactgcaaagacaaaaataaatatctaacttttgtattcccagacaccagcaaacatccataaggatcaagactatccaagtgataggttacgctttgtgtccccaccccagactcatcttgaattataatccccataatctccacgtgtcaaaagagagaccaggtggaggtaattgaatcatgggggtggtttctcccatgctgctctcatgatagtgagtgagttctcatgaaatctga

SEQ ID NO: 820718 - DNA, 581 bp, Homo sapiens
aaaacttagggaatttacaaagccactggcaagcgcaggttttatagatgaagcaacagggccagagaaattcttttcttaaggccacctatctaggcagtgkattctttcctggagttgttttcctgacttgttacagtaatgctttgtcctctgtgatagagtatcagaaggactccagggcacccaggtgcaaagctgttttacatctgaggaaataatgttggttgctcattgtataaccaggctcagaaggtgcttccatctgatccatgagataacttcctttctgcttcatactcctgctttttggtctgtattgtagtaaatccagactgcattcctcccaacacttctgcttcccagcttacctcttacttcattcagggtcctttacaccgaatcccctctcctgcaatccagtttcatatccaagatcataatgcttccttaaataaaggagtacagactgggcccaggcagaccccacttgtccactagcgagaagggacacccctcccactctgatgtcacacatgtctttcctatgtcatatcacattcctcttcctactgtacaca

SEQ ID NO: 820719 - DNA, 624 bp, Homo sapiens
gtgaatactgaaccattgctcctaggggaaatatagggttagtttgctgtaggcctccggtcacatttttgtctactgatcaataagtaattatattttatatgtgcttctgtttaaagggactctgtttaatatataatgctggcttgtgaacatggaactcacggaaacagcactagaactcaggcctgaacgaagctcatccaacacatgggttttctccttgacgcacctcacagcttcttgtgcttaggaactttaggcagcacctcagcactatacttgcgagtcactgaaatgcaaaatcactaaccaaaagcacaaaagtgcaaaacacatgggactaagtagatcctgaacaggcaacttatttacagtgtgagagttgaaacaaaaagatagaacattgctctgttcagcattggctggaaacgtgggtgtcaggtgacatatgtttttccaggaataagtgcaaaggcaccatgagtattcatkttgaggctacaaataaattttagtgagtaggtgaatttggaaatacagaatccacaaataatgaggatcggctgtagttgcagcagagtctatacagatcacaaagtctaaagtatatgcgttgtgccc

SEQ ID NO: 820720 - DNA, 624 bp, Homo sapiens
gtgaatactgaaccattgctcctaggggaaatatagggttagtttgctgtaggcctccggtcacatttttgtctactgatcaataagtaattatattttatatgtgcttctgtttaaagggactctgtttaatatataatgctggcttgtgaacatggaactcacggaaacagcactagaactcaggcctgaacgaagctcatccaacacatgggttttctccttgacgcacctcacagcttcttgtgcttaggaactttaggcagcacctcagcactatacttgcgagtcactgaaatgcaaaatcactaaccaaaagcacaaaagtgcaaaacacatgggactaagtagatcctgaacaggcaacttatttacagtgtgagagttgaaacaaaaagatagaacattgctctgttcagcattggctggaaacgtgggtgtcaggtgacatatgtttttccaggaataagtgcaaaggcaccatgagtattcatgttgaggctacaaataaattttagtgagtaggtgaatttggaaatacagaatccacaaataatgaggatcggctgtagttgcagcagagtctatacagatcacaaagtstaaagtatatgcgttgtgccc

SEQ ID NO: 820721 - DNA, 620 bp, Homo sapiens
ggtaagctattgattattgccacaattataaaatgcctgtttttactgatgataatattctttattctcaagcctacttttctcatatgaatttagcctttttggcttttttttgtctttgttagtatttgtatgatctatcttctttcgtcattttacttttaacctgtgtctataaatttcaagcagatttctcatagaaggcatataggtgagtcttatttttttatccagcttgatacttttttctttttcattggaatgtgaaatgatttatggtaaatgtaattactgatatgatttggtttacatctcttattttgctatctgtttactatttgatccatatgttctgtttttgttttccattcttctttagaaatgactatttttaaggattcggttttatctcatttattagcttattagaaatacttctgtgttttatctttagtagttatttactttagtggtttgtctatggattgctctatgtatatttaatatcattatatattcaaattctaatataccacccatgtaagartcttacaacagtgtacttctatttgttcatctcattgttttatgaggttattacatattttacttctacatgt

SEQ ID NO: 820722 - DNA, 510 bp, Homo sapiens
atttcaaagaatgtccatttcagatgtgagagctctgaactcgacagagataacttgctgcttggcacccactcagcccctgcagctcctgtcacttaatggtccaaccctctttgccagcaaaatgtctggggcctctgcggaaaatgcagaatcctttttcagaatctctgttattgaatatcctcactcagctaaaatattaaaatcctcctgggattaggtaatgagacagtgtacacttcatagggtacaaattgaagaggtagtttggatgaattctgaattgaatgagataagagtgtcaataaaaataaaaggaaaaccatttattttgtgtagtatctgattctttccccatttcttcgccccactyctccactgctttgataatgtgtctctatagaatatgactcccgtggcaacatttaagaaaccgaggtcactttttagatcttgtatgccaaacacttgcctaggcaagcctttgatttagatgcctgtaaatgt

SEQ ID NO: 820723 - DNA, 587 bp, Homo sapiens
gaaaagaggtttatttggctcatggttctgcaggctgtacaggaagcatggtgccagcatctgcttctggtgaggcctcaggaagcttccactcatggtggaaggtaaagggaaaaacaggcwtgccacaaggtgagagagggagcagggaggagggagatgccacacccttttaaacaaccagatctcacgtgaactcagagcaataactcattcattaccatggggaggacaccaagccactcatgaggaatctgcctgcatgacccaagtacctcccacacagccccacctccaacaatgggaattacatttcaacatgagatttggaggagacaaacatccaaaccatatcatgtgtgtacctatgaaaataatgcccaagtcaagatattaaaaattttgactatcccccaaaatgtatcttatgtccctttgcagtgaatctcccccatagaggtaaccactgttctgatttatatagccataacaattataatctttaataaatgaacacatatattctgagtcatctggatgaccgtctcataactgatcattgtgcctattttatctttacagtcaag

SEQ ID NO: 820724 - DNA, 553 bp, Homo sapiens
caccattcctactgaggagaagaccctggaaaaggtgaacaggtatttgaaatccatacatgtagaatacttggggaagttgtcagaatggacaggtgcagtggtaaatatgagaaaaraatagttagcgtttggctgccatacagtataccagttcagccaaatatgagttcttcggcatcagccctcaagttttcttgaggatgtgctgcttcattggggcaatttgccctttggcacccatttaccatacatattcctactttctatcagtcaaagaaatgaaagataagtaagagttggcagtatatatgcaaattgtttacaggaaattcacacacgtgttcatatacttcttcttgacatgtatcattgtatcagtatttaatttgtgaacaaaataggcatatataattattggaaaaaatagcttaaaatagggttgatgtaagtttgtcttattgtaaatggccagattaacaaaaaattagattcaaatagtctgataacttttaaaatgtattaataattataaaaagcacgaaaagataat

SEQ ID NO: 820725 - DNA, 582 bp, Homo sapiens
cctttctaggaaatattaaaatgagctttcaagtttcttttaaaaaactgttgggattttaattggaattgcattaaatccataaactgacatctttgcgatattgagtttttcagtctaagtattttagttggacttttgcctcaattactttactgaaataactcttgttagagtcatcagcatattttctcttactgtattcaatgtcctctccctactttacctttagctgcattgcactttgttaataaataccctttctggaaacattgcttcacttgttttttaaaacaacatattttattagtttttcttctaaaacgatttagtcttcttttcttattctatgtgttgttcctgatctttaagcctttagatgttctatttttttacattcctatattctctataggtttaaatactacctttctgtttctataattttaatattacctcgttgtktctatacactgatgacatccaaatttataacctgacctcagactgtcttctaatatccaaatattttttatctctttctttacatttgtaatgaaacctttattttatatatttaca

SEQ ID NO: 820726 - DNA, 626 bp, Homo sapiens
gcatataagatgctaactcattaatttctacttttaattggttaatttcttctttaacaggattagccttagttatttgaaaaattcatatttcatgaatttaccatggtgaaagttaaattagcagttacttctttttctttttccttaaaaagacaaatagtaggctggtacagtggctcattcctgtaatcccagcactttggggtgccaaagtgggtgggtcacttgaggtcagggatttgagaccagcctggccaacatggcgaaaccccctgtctactaaaaatataaaaattagccgagtgtggtggtgcatgcctgtaatcccagctactcaggatgctgaggcaggggaattgctcaaactcaggaggtggaggttgcagtgagcttaccctcctcatctctaaaatgctatcactgcactccagtctgggcgacagagagagagtctgtcttaaaaaaaaaaaagacaaatagttaagtataaagagattaatataygttttagtctattaaattataggttgttaccctgtcacaagggttccttgaaaagtcacagttcctttaagaatgccacgtggtgccaatatggagaaaacaccatttatttttcatgt

SEQ ID NO: 820727 - DNA, 604 bp, Homo sapiens
aaaccagaaatcagtaacaaaaggaattttggaaactataygaacacatggaaattaaacaataagctcccaaatgaccagtgggtcaatgatgagattaagaagaaaattgaaaattttcttgaaacaaatgataatggaaatacaacatacaaaaacctatgggatacaggctgggtgcggtggctcatgaccgtaatcccagcactctgggagcctgaggtgggctgatcacttgaggtcagtaattcaagcctagcctggacaacatggcaaaaccccatctctactaaaaatacaaaacaaaacaaaacccatgggatacagtgaaagcagtactaagaaaaattatagctataagtgcctacatcaaaaaagaagaaaaacatcaaataaacaacagaaaaatgcatcttaaacaactaaaaaagcaagacaaatcacacccaaagttagtactagaaaagaagaaagatcagagcaaaagtaaatgaaattgaaacaaaaaatacaaaagatcaatgaaacaaaaagttgatttttttaaagataaacaaaattgacaagcctttagccagactaaggaaaaaagagagaagcccca

SEQ ID NO: 820728 - DNA, 529 bp, Homo sapiens
tatgagtccaccgaaggcaataggagaggccttaagaatgcctttcactacttgtcactatttttttcattgcagctgtgtagaacactaacagcttcagtgtagaccctgtaggcccayctcaggccatgagactacaccctaactgggagaaataaatgtcactgtcaagttcaaatgaaaatgtatcttttttgtaggaaaatgtgcagctacacacattttatggtcaaagactgcctttttcatgtttgatttttcaaaatctcacaagggagaacaaaaaatgttctttttatttatcatctctccatgcttcctcattaaaatgaagagaagctaacattataacagtgttgattaattacagatatgaagcatttaaatatgtccccatttcttcatctaggaacacttggaatgaggtgacaggcattcgggacagtggagagtgttgtgaactgtgggactgcctttcttttcttgtaagcagacaggagagctggctactaattttacttcagaaact

SEQ ID NO: 820729 - DNA, 572 bp, Homo sapiens
aattaaatatatggtgaagaaactattttaaatttatgtttaagatggaagttttactaatcagaaatatgttcaattgcaagtatgcaaaatctcattacaatggctaaaacaaaagtaactttagttttctcatctaacaagaaatctggatgtgggtagctgttggcattggttgtgttgctaaataattgcgttggttacatattccaaccttcctatctttagagagttcacttttatcttcatgcatgttgcttcatggtagcaagatagttgttgaaaatccagagagctggtttgtcttcaaggcaggaagaaaaggggaggacaaagaatagcggcagctgcatctgacatccccttctctgtttttaaaaaccaggatacaaaaagcttttcagaaaatctgtaggaagtgtcactgtcattggccagaactatgtcacctggccacttctacrtacagtggggattgagaaagtgactatctcacgtgggactggaaacatggctacctcaaaccaagttgagctttgttagcaaggaataatcaggatataagtatagag

SEQ ID NO: 820730 - DNA, 669 bp, Homo sapiens
ataattcagctaaattgcctaacctgatggtaggatttcattgcaaattggaaaatgcaatgaaaaggagcacactatgagctctatgagggcaggaaccaygtcttcttcatcactatattctaaatttagtgctatagtcagatgcccaatatgtgatgaattaataaataaaaatgaataaaatgagaaagaaataaaggaatgagccaaagtcagggtaagaggaatggttcatgtttacaccttgcttgttctttacaaatagtacagatctaccactgctatctatttaccacgggacaagaaacactttctgtacttttgcttaaggtcccataacttgtgtcagtgaaaacagtttttcatcttttccatttttttcctctaaccctttccttacctaccactatttttttctcaaaagttaacttttattccatatcctcagattccaggcttcttaaaactggtagagcattcattctgcctatctgcatatctgtcaggaaatatttttaaaattacattataataggaaatcaagggctcccagaagacatagtaaagagcagtggtgatttacccatttccaaagtagagaacacttacttttctgtgttggactcctagcaacagagaaggcataggagggatgagtattctatg

SEQ ID NO: 820731 - DNA, 594 bp, Homo sapiens
tatgcagccataaaaaacgatcagttcatatcctttgcagggacatggatgaaactggaaaccatcattctcagcaaagtaacacaagaagaaaaaaaccaatcatcgcatgtctcactyataagtgggagttgaacaatgagaaatcatggagacagggaggggaacatcacgcaccgggggtgggggactggaggagggatagcattgggataaatacctgaagtaaatgatgagttgatgagtacatcaaaccaacatggcacatgtatacctatgtaacaagcttgcctgttgtgcacatgagacccatcttatgagaaaggataaaggaagtcttcaagttcaaagaaaaaaagatactaatgagtaacataaaaacatctgaaagtataaaactcactgaaaaaagtaagcacatagttaaattcagaatactctactactgtaatgctgatgtgtaattcacttatatctgtaatataaaggttaaaagataaaactattaaaaatagaattgctataataatgttttaagcaatatgaaatataaaaagatgtaaatcatcacacaaaaatgtaaaatattatgga

SEQ ID NO: 820732 - DNA, 643 bp, Homo sapiens
tcttttttttccctctaacaaaaacctacatatttttctctaaggtgaaaatgatgtcacttttatccacatgttagcagtaccaagagtctgacacatcaaaacctgtgtatttcrttgctttgcttatcattaaattgctggaggaatttgtggcaccgtagctaaatactcaaaaactgttcagggttccagtcaataaaatatatatatattttatatatatgttatatatgttatatgttatatatgttatatatattatatatatgtatgttatatatatgttatatatacgtatgttatatatatatgttttttatatataagttttatatatatatataacataagagtctcttgcccatatttcttcaagttatatatggctagaaaacatgagaaaatctggtgttctttcttctagagatgattaagaatatttatttccgtgtcaacacgtgtcaattggcataactgtgtatattgctatttagaattctagatttggaccttgctttcagactaagtgaagacaattacttattaaagagcacacagttaataccccagttataggataccagtaaaaatatgtgtgcctccttatattcctgtgcctccttatattcctaatggccca

SEQ ID NO: 820733 - DNA, 569 bp, Homo sapiens
attcagataattctagaagtacatagcttttatgtggctgctaaatatatggctaaaattaaagactgtctatttcaatcctctatcatggtttcattgcttcragcactcttagcagtcaccaccaaaaaaagcaatgtgccctttgttaataatagccattctgacaggtgagcaatgaaaaaaaaaaaaagacaagtgttggtgaggatgtggagaaattaggaaccttgcaaactcttcgtggaaatgcaatacagttcagtcagttcatactatttggaaaacagtatggaagttcctcaaaaaataaataaataaaaagaaaactaccatttgggccagtactcatatttctggatatataaccaaaatacttgaaatcaaaatcttaaagagatatttacactcccaatgtttattgcagcactattcacaacagccaagatgcagaaacaacctaaatgtccattaatggatgaatgcacaaagaaaatatggtatatacatacaataaatattcacccttagaaaagaaagttctttaatatgagataatatgagtaggc

SEQ ID NO: 820734 - DNA, 663 bp, Homo sapiens
ctatttaatatataaaatttgatgagtttggatataagtgtacacccrtgataccataacctcagttaaggtagtaaacatatccatcactcccaaaggttttcccatgtccttttttttttgtttttgtaagaacacttaacatgagctccatcctcttaacaaatttttaagtgcacaaactgtactttgaattataggtattatgctgtataccacattatctagaacttacttattttgtataactataactttatacccactgaacaacaataaccattgtgtcctcctcctacctcctggcagtcaccgttctattttgcctttctataccttggccattttagatatctcatataagggaagtcattcagcatttgtctttctgtcactgacatttcacttaatatgatgtcatccagactcaggtaagttgttgcaaatgttaggatttcgttttttcaggctgaattttattccattgcatgtatatttcacatttttgtttttctttacccattcatctgtcaatggacattttggttattttcatatcttggctattgttaataaagctgccataaacataagagtgtagctatctctctgagaccctgaattcagatctttttaatatatgcccaggagcaggattgctga

SEQ ID NO: 820735 - DNA, 576 bp, Homo sapiens
ctcctaacctcaagtgatccatccgcttcggcctcccaaagtgctgggattacagatgtgarccaccacacccagccaggggtcagcaaacttcttccataaaggaatagatagcaaatattttaggctgtacaagccatatggtttctgctgcaactattcagctctgctgttgtagtgctgaggagcatagctatattccaaaaaaaatttacttatggactgaagtatgaatttcacattttcatatattatagaatacttatttttatttttatttatttttttaatgagatgaggcttcgctatgtccaggctggtcttgaactcctggactcaggtgattcacctgcctctgcctcccaaagtgctaggattacaggcgtgagccaccgtacttagcccctattatttttttagagacaaggtctcctctgtcacccagactggagtgcagtgtcttgatcatagctcgctaaaaccttaaactcctagattcaaatgattctcctgcctcagcctcctgagtggctaggactacaggcacgcactcctacacctagctaattttttatc

SEQ ID NO: 820736 - DNA, 576 bp, Homo sapiens
ctcctaacctcaagtgatccatccgcttcggcctcccaaagtgctgggattacagatgtgaaccaccacacccagccaggggtcagcaaacttcttccataaaggaatagatagcaaatattttaggctgtacaagccatatggtttctgctgcaactattcagctctgctgttgtagtgctgaggagcatagctatattccaaaaaaaatttacttatggactgaagtatgaatttcacattttcatatattatagaatacttatttttatttttatttatttttttaatgagatgaggcttcgctatgtccaggctggtcttgaactcctggactcaggtgattcacctgcctctgcctcccaaagtgctaggattacaggcgtgagccaccgtacttagcccctattatttttttagagacaaggtctcctctgtcacccagactggagtgcagtgtcttgatcatagctcrctaaaaccttaaactcctagattcaaatgattctcctgcctcagcctcctgagtggctaggactacaggcacgcactcctacacctagctaattttttatc

SEQ ID NO: 820737 - DNA, 637 bp, Homo sapiens
gcgtatgagagagggaccaaaaaatagtcagatgacaatgacaacaatatatcattctgaggagtatgattgattgattaaatctgtgtacctgagatccaataagagagaaatcatcccaattctatatttttggttcccaaagccctacttggtctggtctccacccatgtcccccatctcatctcctaccattttccctttcccttgctcagtgggctccagcagagaaaaaaggaagagtgcaattgagcgtgccatttcccagaccattcatgcatacgcattcattcattcattcagcacatgtaagaaatccctaccacacatcaagcattggttagatgtggaggaacagagctaaataggggactacagtctagtgcaggaggcagacagatgataaagaaatataagaggggtgatggaaaccttgcctgggacacttgggaaaggctgaacagccttgagctcagtcttcaaggagaagtccaagttcaccaagcaaaaatcagggtcgtagttcttggctgaggrgacagtgtttgcaaaggcaagaaccctgaaagagcacaggcagatcagagggtggggagcaatgtggtgtggatgggcccaggagcatgctgggaaatga

SEQ ID NO: 820738 - DNA, 499 bp, Homo sapiens
taggtttgttgtttaagaagacaccttctgagtattctcataggagactgcgtcaagcaatcgagatttgggagctgaaccaaagcctcttcaaaaagcagagtggactgcatttaaatttgatttccatctwaatgttactcagatataagagaagtctcattcgcctttgtcttgtacttctgtgttcttttttttttttttttttttttttttttggctagagtttacactatcccaatcaaagaattacagtacacatctccagaatccataaatgtgttcctggcccactctgtaatagttcagtagaattaccattaattacatacagattttacctatccacaatagtcagaaaacaacttggcatttctatactttacaggaaaaaaaattctgttgttccattttatgcagaagcatattttgctggtttgaaagattatgatgcatacagttttctagcaattttctttgtttctttttacagcattgt

SEQ ID NO: 820739 - DNA, 492 bp, Homo sapiens
aggatccagtaagttgctgggcacatgggattgctcgccttgcccagaatgtaccaaggatcttccctcctctcagccttggctcctgctgtcagctctgctaggaatgccctttccctatctccacctggcaacttgcagtctcctccttccaccatctctgaagcttcccccaccctgcccaggcaggatgaattgccctctcctctgtgctcctccaagcactttgctcaaattgctagcctagcacttccacacacagtagtgcggttagcagagtgtctgccccctccctgcctaagaggcctggggcaggggctatgacttgctcagctccgcttctgtgatggggtctggcacgttagacatgttcaatactggtttgatggatgggtgagctgccctctctcctctttctctactctccaccttcctgtttggcctgtctcccgagwtgaagccatccactttaagaagtcttgccagaaggca

SEQ ID NO: 820740 - DNA, 491 bp, Homo sapiens
acacacacacacgcacacacctgttttctctctmaacaattcagtgcggccccactccgaccccgggcccccagtagaggaccccactctgtttcctccagcttttccttcagtggctgcccagcaatggattctccagttttatttccaaaattctggccaattttgtattcttctccataacatgtccatgttatttcaatatgaaaatattttacctcccagttaaattatcaaacttttccctgaaaaatcttccagtgagaagcagaaccatattttatcctttgttttttcctgctgaagacacccaaggaggactcaagggtccctgtgccccatttgagtcacgctggcggggctctgtgcgtacacagaacccccaagacagagcctgctgtcccgcaccgggagaggaaggcaaaggcaatgtgggagagggggtgtccctggatccctggcaccagtcttggtctcagaaacaagacttt

SEQ ID NO: 820741 - DNA, 566 bp, Homo sapiens
accctgagctcccagccaagtgggtgctcactatgggggctactctgggccttggccagggaggagcaggtgggagcagggagcagagcatgcagatcttccaaagtgggtggagttataaactggagcgggagaggaggaaagggtaatgaaggggctgaatgatgagcccaccatcattttactaaaggcctggaaactgacagcaacgtgggatcctggagggaggtgctgaattgggggtgggggtggggtgtcaatatcactcaacatccaactcactgtcagcttaaatgagcaaaccccagctgagccagagaagactgacatatccagcattccccaaatccatctgagtatctcctccttctctccacctcttccttctcctctaggaaggcccctcaagtcatctccacccccacaggtgtgttccctgtgtgcctgcccagctcttgtgcctataccctgcatcctggccactccatctccctgtgttctgggcatgctctatttcctccatcagcaagargtggaggttctttttttttttttttttttttttc

SEQ ID NO: 820742 - DNA, 628 bp, Homo sapiens
ggttcaagtgattctcctgcctcagcctcacaagtagctgagattatgggcatgcaccaccacgcccagctaacttttgtattttattagagacrgggtttcaccatgttggccaggctgatcttgaacctctgacctcaagtgatctgcctgcctcagcctcccaaagtgctgggattacgtgagccacggtgcccggccttttacttttttttttttttgagacagagtcttgctctgtcacccaggctggagtacaaagacgcaatctcggcttactgcaacctccacctaccaagttcaagtgattctcctgcttcagcctcctgagttgccgggattacaggcgcatgctaccacacccagctagtttttgtattttttttagtagagatggagtttcatcatgttggatcacgaggtcaggagttcgagaacagcccacctcagcctcccaaaatgctgggattataggcatgagcgaccacacccggccccggcctacttttcttaatggtgttttttttttttttttttttttaaagtatgtaagtcacaggttgagtgaaataaaatctggtaacaatgccacaactgttacattttaacacaacttgttaaaattaaa

SEQ ID NO: 820743 - DNA, 642 bp, Homo sapiens
aatttatattgtgtggttatttcacaaaatcatccaattccatctggtttttgatacttattctacctcttggaaggatataacaacctcattgtcgaatactctggtggataaatattaaaagtactttgtagacataaatagctcaaattattcctcctgaatcatgtcagaagaaaactgcctatgattcaaaactttatgctttgataactcatttcaaacagaaaataaagagggcatcaatgtaaaaacaacaagaacaatacctagaataggttctcaatttctttaattttgtgaaatgttagaattgaaaaaataaatcagaagttgtatagttcaacttcctgccagatgtagaaatggtcatactcttaaatgatgggttacctcaacacgaacccttctttgatggggaggactctttattgtgaggtggccttatccaatttctagtggttgtaatttttaaagaaaaagaatttcaataggacacctttccccattaagaaaaatctagatattcaatgattcttttaaaaatctaatttagtaagtacttacataatatttattcaattttgtcctatataacaaaccattggtcattccargccatgtggagatcttggttagttt

SEQ ID NO: 820744 - DNA, 536 bp, Homo sapiens
agccaagaagcaatgtcaccccaggagcacacctggtgcccagatcttgatttctaacatcattcttcaacaaaagaaatcagagttctctggggaaatggctggcactacatctggggcacagactatctgagatgatcctggatcatcttttaatgtcagaaagcaagaaagtcctcaaaactaagccaaaatccacaaaacatgatgatgggagtctatcaaaggaacgcagaagccaacccaaagagctcccagagacaaagactgggacaatttaaacaacaaataaagtagtgttagatcataacctaaaataaatatccgagtccatattgtcataaataaattattcaatacatagataaatggaaaaaatagacaaatattctcccttcaaggagatagcacataactcytcattccttaagtatggactgtgcctaatgaatttctttccaaaaagtacagtaagaaagcagggggtggggagttggaggtaggggtagggtgaagagtaaatttttggtagagaa

SEQ ID NO: 820745 - DNA, 428 bp, Homo sapiens
cagcttctatgggactaccgagggctggggtggagtgaggggtgagggcagagacactccatgaaaaagggatctgtccagcaaggaccgatgagatggagagactcaaaataaccaagcytggtcctgccttcaaggagctcacgtctggcagaggcgagagaaatgttggagaaacagatgtgaatcccacagattccccgagcgtgcaaatccctggcaccacccagtcagccccttgcagtttccccaggcgggcagcagacacgcagcccacgtctctgagggctggctgcgtgagtgaactgccttgaggtcgcctgggctcccacggaccccgccttcgccctctgtcctctttgtgtgtttcgtgacaggagggacgtgcgacgtccacatatttttcctggagcaggagaggggtggag

SEQ ID NO: 820746 - DNA, 540 bp, Homo sapiens
gcaaaactggggggaaggtcactgacaaggaagcatgaaaaaaagaaaaataattaattagtcttaagtgttatctcctattttcaacaaccatgcattagaagtgctggatttgtcaagagattggagtttcatctgtttctaggactgcttgaggtatcgaagtttacatttaagggtctcattgtgattagttttaagaatacagagagacagccataaaaaaggaatgaaataatggccttcacagcaacctggatggaattggagaccattatcctaagtgaagtaactcaggacgttctcactcctaagtgggagctaagctatgaggatgcaaaggtataagaatggcacaatggactttggggactcgggtgaaagggtgggagggggtgagggataaaaggctacatattgggtacagtgtgcactgctcaggtgayggctgcacccaaatctcagaaatcaccgctgaagaacttactcatgtgaccaaacaccatctgttccccaaaaacctattgaaattacataaat

SEQ ID NO: 820747 - DNA, 617 bp, Homo sapiens
gagatttatcagtctgttctttacagaaaaggaaagcatgatgggatgcattaaataactaaccaatggtcaaacagcaaacctatggctggggaaagctttagaaagcaggaagtctaatttctaaccctgttcttctatctctggtaataaaaagatgaagaaaaacaaagtgttgcacaggaaagcgggatggggtagaaagtcaagagaatttttctatagaaagaaatgtggggtcagggacaatagctcatgcctgtaatcccagcactttgggaggccaaagcagaaggatcacttaagcctaggagttcaagatcagcctgggcaacacagtgggaccttgtccatccaaaaaataaacaaaattagccaggcttggtggttcatgcctgtagaaccaactgcaagggaggctgaggcagaaggatcacttgagcctgggaggcagaggctgcagtgaaacaaaatcacgcaactgcattccagcctaggtaacaaagtaagaccctgtctccaaaaaaaaaaaaaaaagaaagaaagaaatttgccacacagaytcagagtatgtattacctcagttacttttctttctacttctgttccatccacat

SEQ ID NO: 820748 - DNA, 599 bp, Homo sapiens
tgccaccttccccaggtgtcctcctgctcctccccatcccatccctgcctgtcctgtttctcatactctaatgggactcgtttccctgtttgctygaatgtacggtaacctcgaaggcaggatttgttctgttcacctgtagtgcttagtgcggtactatgtccaaggcgtatgtcaaatatttgtgaaaaacacactccctttctgtcggacaaagaattttccaaaatgctgcctccggaagcagacccgcctgagtttacattctggctgtcatgtttcctgtgtgacccagggcaagtcacccaccttctctgagcctcaggcttctcatcccttccagtgcagcgggtttagtgcggctcctatgtcatcataagcaagtgctgggggccctatggcagtgaactcaatttcttttgtgatctcagctaagtccttctaggtactttgcttcaaaaactcaaaagctagcacccccaggggggctattctgcagaggttagggaggctgcctccaagcaggctcaatctgatgggcttgggggaccttttctcgggcggcaactctagccccgttacatgtcaggagtcgtgcc

SEQ ID NO: 820749 - DNA, 570 bp, Homo sapiens
tcattatttcttcatattaataatagactcacaggccaggtgcggtggctcacgcctgtaatcccagcactttaggaggcagaggtgggtagatcacaaggtaaggagctcaagaccagcctgaccaacatggtgaaatcccgtctctactaaaattacaaaaattagctgggtgtgatggcatggaactgtaatcccagctactcaggaggtggaggcaggagaatcgcttgtacccaggaagcagaggttgcagtgagctgagaccatgccactgaactatagcctgggcgacagcatgagactccatctcaaaaaaaaaaaaaaaaaaaaaagactcataaaacattatttaaaggattataatccattgctattgttttaaagaaatcgatgctcacttgtcctagatttggacagagggtacccatttaagctaatgcctacatatgaggtgtttgtcaatactccatcattcttcaagcacaktcttactttgaaggtgttctaggcttgtcttgtatttctccagccttggaatcaatagttcttgttctttttggtggataa

SEQ ID NO: 820750 - DNA, 534 bp, Homo sapiens
aaaactgatatccatcataagatcatggtgaaatacagtctgaagcaggtccagagtgagaagagaaaagaatcacagaaatggggctggagtttcaactgtattaagccagaagactacctgcctccaaactttcaagaagccaacaaagttcctgactgtttaaactaatttgagttggatttctattgcttgtatctaaaagaatcctaactggtaagctaaacctcccggagttgatagttagggactttatttactattcacctttacttattattattttacttttattttaaactaattttaggccaacagaaaagttgacaaaaatagtagagttcgtataaactcttcactaatattaccatcttacataaccacagtacactgatcaaaactakgaaattaactatagtacaatagtattaactaaactatgaactttatttgaattccactagtttgtccacaaatgtccacttttgtgttccaggatcctatcaaagatcccacattgcatttcattataat

SEQ ID NO: 820751 - DNA, 520 bp, Homo sapiens
cgatccaacatagtcctacaaattatgaggtgatttcatgtttattatggtaaacataaattgatgggcayattaaattcaagagctagaaggctgggttaaatgttccatcggggaagagaaatcaacaaatagatgtgtaacctgcttttggttgcagttagcaagcatgttttagcatttggatgtcgttttaaaacataacctatagtatgtcattagttctttgactaaggaataaaaatccattcattcagcaaatatttagtagctactggtgacactgcttggcactagggatacagctggaaaccagaagatggtctctgccctcacatacctataacaggatttcttgtgcttagcattaaaaatcttaatgttcagccttaaaatagcacatcatttgagaaagccacctaaataatagaaatggcctttagagacactgttcagtgtcatgtttttaattcataccacattccaaaatctttcatgaggcacctttgccctccagtac

SEQ ID NO: 820752 - DNA, 664 bp, Homo sapiens
catagagacggggtctgactacgttgcctaggctagtcttaaactctgaggctcaagcaatcctcccrccttggccttctgaagtgctgggattacaggaatgagccactgtgctcagcccaaaagggattttaattttgcaaaaggaccaaccttaaaagagctttgaataataagtttctttagtgcaattctttttttttttttttttgagatggagtctcgctttgtcacccaggctggagcacagtggcgcaatctcggctcactgcaacctctgtctcccgggtttaagtcattctcctgcctcaccctcctgaatagctgggattacaggtgcccaccaccacgcccagctgatttttgtatttctagtagagatggggttttgccatgttggccaagtttgtctcaaactcctgacctcaggtgatctgcctgccttggcctcccaaagtgctgggattacaggtgtgagccaccgcgcctggccagtgcaattcttttatgtttttgttccccacctctgttccgattttccattccttaggtatagtactttatgagctttttgtattaaccccctgtgttccttcatgcagatgcaggccaattagacgatacatattattactctctctcccttttcttaaaaggagataga

SEQ ID NO: 820753 - DNA, 570 bp, Homo sapiens
ccatacacttatcactatatctttataaaagaaggaaagctttcttcaaaaattcaacttcatcctttcactaatgtttttttcctttctactgctttgattaaattagtatattttttaaagtacagtaaatgttacttcctgtaaataagttaagattaaaaaaaaactccagcctgggcaacatgatgaaatcctgtctctactaaaaacacaaaaattagccgggcatggtggcacatgcccataatcccagcgactcaggaggctgaggcagaagaatcgcttgaaccccagaggcagcggtttcagtgagccaagatcgtgcctctgcactccagactgggtgagggagtaagaccgtctcaaaataaaaaaaaaaaaaaaaaaaagaaagaaacaacaacaacaaaacaaacaaataaaaaaacttaagaaactgtcaatatatattagggaaaacaaaatgatgtaacttgttctcatatacatgaagtaaaawaactcttagctctccatacacttcataattttcctcatatttttctcaagaagctttctcaaactgtg

SEQ ID NO: 820754 - DNA, 614 bp, Homo sapiens
tgataattattattgttggaagaatgacgaatttgaatgtctgaaaaatttagcggaatatattcaacagataaggctcaggactctgaaaccaagaaaaccatgaaacaggagagggtaattcaagaaaatactgtggagagagacactgtgggccaagaacagaatgagggtggctgctaatatattaaaagtcgagaaagaagaaataattcaaaaaacaaagacaaaatggtcaaggaaatgcagagactctcagaagaggttacagtcaagagtcccaagcgaatagagcttcaagtaataagtgctcagcagtgctgaatgcagagaagctgttctagtatctttaatttgttagaaactagtaaagtatcaaccacgtgaaattctgaggtggttactttaagctacaatctaaggagtggatcagttgtcttatcataacctcaaatcccatgttatttagtgtgccatcaggaaccccacacttcaaaagagcattcacatgtgcttgacctcgagatgccatatatgtatatcagycaaacagcacgctcctttataaagtactatgaataatattacaaataagttttcattactgaaactag

SEQ ID NO: 820755 - DNA, 614 bp, Homo sapiens
tgataattattattgttggaagaatgacgaatttgaatgtctgaaaaatttagcggaatatattcaacagataaggctcaggactctgaaaccaagaaaaccatgaaacaggagagggtaattcaagaaaatactgtggagagagacactgtgggccaagaacagaatgagggtggctgctaatatattaaaagtcgagaaagaagaaataattcaaaaaacaaagacaaaatggtcaaggaaatgcagagactctcagaagaggttacagtcaagagtcccaagcgaatagagcttcaagtaataagtgctcagcagtgctgaatgcagagaagctgttctagtatctttaatttgttagaaactagtaaagtatcaaccacgtgaaattctgaggtggttactttaagctacaatctaaggagtggatcagttgtcttatcataacctcaaatcccatgttatttagtgtgccatcaggaaccccacacttcaaaagagcattcacatgtgcttgacctcgagatgccatatatgtatatcagtcaaacagcacgctcctttataaastactatgaataatattacaaataagttttcattactgaaactag

SEQ ID NO: 820756 - DNA, 634 bp, Homo sapiens
cttaagcaacagacatttattttcttatagtgctgaaagctggaagtctgagatgaaggtgtcaacagggtttctttctactgaggcctatctccttggcttgcaggtggctaccttctcccygggtgcttacatggtcttccctctgtgcatgtctctctcctaacctgccagtcacactggattagggcccacctatatgacctcattctaccttaatcagctctttaaaggcccaacctccatatacagtcacattctgaggttctgcagttaggacttcaacatatgaatctaagggggcatagctcagcccataacactcttcttctgactctccaggtcctgattgttacccctcctggggcctggttacacttcccatccttgggatataagatcagttctatctttgacttgtgataacttaagcagatttctactccagccagtcaaacaattcctcacaaagataattacccttttagcaaaagctgctctgtgatttttccagaatatgaggatcagaaatgttaatactgtctttatatatatgaatgttaaacagcaacagtttccagctatctcttgacgttttcattttgaactgatctcaaatttctcaaagcttcct

SEQ ID NO: 820757 - DNA, 591 bp, Homo sapiens
tctcattgatgggcatttaggttgattccatgtctttgctattgttaatagtgctgcaatgaacattcgygtgcatgtgtctttatggcagaatgctttatattgctctgggtatgtacccagtaatgggattgctgggttgaatgatagttctgttttcagctctttgaggaattgctatgctgctttccacaatggctgaactaatttacactcccaccaactgtgtataagcgttcagttttctctgcaacctcaccacatctgttattttttgactttttaataataggcattctgactggtgtgagatggtatctcattgtggttttcatttgcatttctctgatgaccagtgatattgaacttttcttcatatgcttgttggcggcatgtatgtcttcttttgagaagtgtcttttcatgtcctttgtccactttttaatggagttgtttgtttttctcttgtatatttaagttccttatagatgctggatattagacctttgtcagatgcatagtttgcaaatgttttcccccattctgtagggttgtctttttactctgttgatagttttctttgctgtgcag

SEQ ID NO: 820758 - DNA, 500 bp, Homo sapiens
catggtgcctataattaacaacattgtcttgtgcacttaaaaatctattaaaagggtagatctcatgtgaagtgttcttactacaataaaaaagatgtctttttaaaaaacacactacatgtcttgtcattgaacttttcacattgaaaataagagtattgattagttcaaagtcatagtgacgctatatatcatttttgggaagattaataaaaaatggagacacatagaaaatagcttggggtaaaaatatgaaatttaatctgaattatcagatatatagtctgccactagaatagagagtgaagtttatataatgtggaaaatatttttcatcaaacttgtccatgtggaacctgggcagttcagcttgttgtgtggcatcayctcttctctactgtccattcctcttgcccagtagctgacctgtctacacgttaacagggtttgtaagtgcaggagaggtgactttgggtggagacatgcaccagaagattgcg

SEQ ID NO: 820759 - DNA, 500 bp, Homo sapiens
catggtgcctataattaacaacattgtcttgtgcacttaaaaatctattaaaagggtagatctcatgtgaagtgttcttactacaataaaaaagatgtctttttaaaaaacacactacatgtcttgtcattgaacttttcacattgaaaataagagtattgattagttcaaagtcatagtgacgctatatatcatttttgggaagattaataaaaaatggagacacatagaaaatagcttggggtaaaaatatgaaatttaatctgaattatcagatatatagtctgccactagaatagagagtgaagtttatataatgtggaaaatatttttcatcaaacttgtccatgtggaacctgggcagttcagcttgttgtgtggcatcatctcttctctactgtccattcctcttgcccagtagctgacctgyctacacgttaacagggtttgtaagtgcaggagaggtgactttgggtggagacatgcaccagaagattgcg

SEQ ID NO: 820760 - DNA, 571 bp, Homo sapiens
gcccagctggcttcacccagtggatcctgcccggggccacaggtggagctgcctgccagtcccatgccatctgcctgcactcctcagctcttgggyggtccatgggactgggcaccatggagcagggagccgcactcctcggggaggctccggctgcacaggagcccacagcagggcagggggaggctcaggcatggtgggctgcaggtcccaagccctgccctgcgaggagacagctaaggcccagtgagaaatcgagcacagcagctgctggcccaggtgctaagcccctcactgccaggggcttgtgggctggccagccactccaagtgtggggcctgccgagcccacaccctcctggaacttgcgctggcccgcaagcaccgtgtgcagccctggttcccatcggcacctctccctccagacctctcagcaagctgagggagctggctctggccttggccagcccagaaaggggctcccacagtgcagtggtgggctgaagggctcctcaagcatggccagagtgggcgccaaggccgaggaggtgctgagaccaagcaagggctgt

SEQ ID NO: 820761 - DNA, 494 bp, Homo sapiens
gagagcaccaggatccactaaggacttctccacacaggggatagtgggaagcctttgcagcacagcaaagacacaaacagctttgtgttttgagaagatggttctggctgcagtgtggaaagtggattgggattggggatgggaaaagagcagttagcaagctattgaagtagttggacaatggtggctgggaatagtttctagcagtgaaacgggaggaaagtggagaaagtcaggctattttaagatatacaagtgccagctcttagagaccaaatagatatggggattaaaggcgatgaaggagttcaagataacttccctggtttttaagcaaatttttgagcaactgggtgaatgatgayaccatttactaagacttggaatattggagatagagcaggttttgaggacactaagttcagtttggggataatatgattagtgagaagtatctaggaggcctctatgaagaaatgaccagtaattaggct

SEQ ID NO: 820762 - DNA, 573 bp, Homo sapiens
tacaacaagatgaaacccttggtggtgggttagtggttgcatttaattttcttttgccattgtccgtttttaatttattgaattttcagcgtatgctactttcacaatcagaaaatgacaaatattatctataaaataaaagtatagcttctgccttatcatttcaacaccaatcaagaaccaaaagcaaggtggcaccagtcagcaagccttaaattaaagggtgttttcccagtttctggttaagataggaatgcaagacacagtaaaggtgacaggtatgtatttacacagcacagtcccaacaacaatcatagctttaaagcaaaacctctcactcttcttcttccctgttttatagtttaatttctgcctgcagttgtcttccttttttcatctgtcttattctcactagtcaaggcacaaaatgcaacacaacccttggctagagcctattattatattaaaaggataaaagaagtttgttttgtcgtggtattrtaaaattgcatatcccttaaacacctatcaagttgtttcatgtgaaaatctttccttgctgccaatataagt

SEQ ID NO: 820763 - DNA, 582 bp, Homo sapiens
atttatatttagttttaggtatttctgtcatatttttgcatatcaagtttacctccttactagatcttaaacattgtcaggacaaaatgtgtttctattttttcttctatcttgtttttaaataacatttattgtttttattcttgttaaaacttaaaacatgtgcaactcagaaaactagtaaaactctgggaagaatactctcaaaacatctttttctaactcttttgcatctctgttcacagggctttgcgtagtggcagctaaccagatcacagtgataaaagaaaagctgatagaacatgccataatattgggtttttacatgctcataaggatcagagtcaggagcgtggttgggtggaggtgggggaggtgtcatatggcggctaagcaaaatcagcagagaaaagagcagcagtcttgcagtgacatgatctgaccccaccacttgcccctggcttcaaataagtaatgtttggggwctcgggtttctcaattgtataatgaggataataatccctggtcaaccaacctcacctggatgctgtagtgatgcagaataatataacttttgaaggt

SEQ ID NO: 820764 - DNA, 660 bp, Homo sapiens
ctgatagtctagtgggaaagacataacaggcaaataaataaaaattaacacacatgaaagtaagagatgtcaaataaacagtttccaaaaagaaaccaacagctgaaactttctttagattgagtggtcagtagcagcctctctaagtggtgaagtttgagttgagacctgaaggaagagaataagccaggcttataaggagaaaaggagagagggggggaagcacagtctatgcagaggggacagtatgtgcaaagcttctgacgaaagagaagatccggcacgtccaggggaatggatgaaggcaggagtcagggaggtaaagcgtgatgaggtgaggctggagaggtgcgcaggggccagaacacacacccccttggaggccacggcaaggagtctgacctttattctaggtgcaatggaaaggcactaagggagggtttcaggcaagggcagaggagatctgatgtatatgttaaggttacaatagcttctgggtggagaacgtaccgcatgaaggccctggtgggtacagtgrgcctggaaggctgcagtgggagagctcagatgagagaggacggcagcctagacccctgcaccatggccaatgagagagaaggagagggaggtgggcggagagagggagagagagaagcagag

SEQ ID NO: 820765 - DNA, 660 bp, Homo sapiens
ctgatagtctagtgggaaagacataacaggcaaataaataaaaattaacacacatgaaagtaagagatgtcaaataaacagtttccaaaaagaaaccaacagctgaaactttctttagattgagtggtcagtagcagcctctctaagtggtgaagtttgagttgagacctgaaggaagagaataagccaggcttataaggagaaaaggagagagggggggaagcacagtctatgcagaggggacagtatgtgcaaagcttctgacgaaagagaagatccggcacgtccaggggaatggatgaaggcaggagtcagggaggtaaagcgtgatgaggtgaggctggagaggtgcgcaggggccagaacacacacccccttggaggccacggcaaggagtctgacctttattctaggtgcaatggaaaggcactaagggagggtttcaggcaagggcagaggagatctgatgtatatgttaaggttacaatagcttctgggtggagaacgtaccgcatgaaggccctggtgggtacagtgggcctggaaggctgcagtgggagagctcagatgagagaggayggcagcctagacccctgcaccatggccaatgagagagaaggagagggaggtgggcggagagagggagagagagaagcagag

SEQ ID NO: 820766 - DNA, 523 bp, Homo sapiens
caaatggcttacctgaagtcacacagtaagtgacagtatacctctcagaaaatgtcccaacagggagggaaaaagcatggcacactgtttagtaaatatatgtaggatgaaatgaatgaataaaatcctactttgttgttgttgttttttctatttccattatccaagagaactttgaaatagctccaaaggccgggcacagtggctcatgcctgcaatcccagcactttggaaggccgaggtaggcacatgacctgaggtcaggcatttgagaccagcctggccaacacggggaaaccccgtctctactaaaaatacaaaacttagctgggtgagatgatgtacgcctgtaatcccagctactcaggaggctgaggcaggagaattgcttgaacctgggaggtggaggttgcagtgagctgacatcscaccactgctccagcttgggcaaaaagagcgaaactccgtctcggaaaaaaaaaaaaatagcttcagaaaatatatttcttattctgagcaaatg

SEQ ID NO: 820767 - DNA, 517 bp, Homo sapiens
gcagtcacatggatggataatcctatagaagtatatgttaatgagagtgtatgcgtacctggccccacagatgatcgctgccctgccaaacctgaggaagaagtgatgatgataaatatttccactgggtatcrttatcctcctatttgcctagggagagcaccaggatgcttaatgcctgcagtccaaaattggttggtagaaggacctactgtcagtcccatcagtagaatcatttcttacatggtaagtgggatgtcactcaggccacgggtaaattatttacaagacttttcttatcaaagatcattaaagtttagacctaaagggaaaccttgccccaaggaaattcccaaaggatcaaaaaatacagaagttttagtttgggaagaatgtgtggccaatagtgcggtgatattacaaaacaatgaatttggaactattatagattgggcaccttgggtcaattctaccatgattgcacagggcaaactcagtcgtgtcccagtgcacaagt

SEQ ID NO: 820768 - DNA, 226 bp, Homo sapiens
tggaagaaagaaccacatgaaaagattagtggaactgtagctggagctcacatgagcctgggaatagtatccatttcctccagccaggttggaaaatttcctaattcacaggacactgggtagagtgtttaggaggatcttgccctggtagtagggaacaattagccctagactaggcttatcaggtggaactwgaggggtgttaatctagcctaaaagatcaaac

SEQ ID NO: 820769 - DNA, 614 bp, Homo sapiens
ccttcttgacaattctgtttaaaaattatacccccttcatctttatccccagtacyctctgtcttcttttcctgcctatttttcttcctggcatttattagacttctgtgattcaagctatatttaaaaaaatgggtatttggcaacatgtgtagaatggagtagatgtgaagggcatcaagagttcaactgggaaactttcagtagtccatgtgagagaagttaagactttggcttgggatagtcataatcaaaatggaaaagaaagtgtattcattcaacattatcaagacttactgtgtgccagatgtgttgctagtgctaaacatataaatataaataagatgatccttgtgtgaagaagctcactgcctcgtgtagtggagaaatcactggaagagctttttcagaaatcacaaattgagatccattgttgctaagggcttgtcagaatatcagtgaaggtgaggtggacgtgtgtgttttgaagaactctgcagtgatggaaatgttctgtatctgatggctattgagcacttgaaatatgactagtgcaactgagaaactcaaattttatttcattttaaatagatatatgtagccagtggctacca

SEQ ID NO: 820770 - DNA, 679 bp, Homo sapiens
gttaagggtgttgctgcaaaccacagtgataatattattgagtggaatgagcattttgcttagtcatcagcagtgtaattcagaacaacttggtttttgtctgttcttagaagcaagaaggatgcaatgactgagagttttctttcccctgttgaaggaatccatttgcattgggcaagaggttatttccctcaggcaacttcccctacctgcgtttaagttgtttccgcccccgcaatcatgtcaggagtcagcacagtcctatgactacagggagctttgctatgtaagagactgatttttttccctcttgggaggcaacttattaggccaggcctccccttcctttcttagtgtgactgtgagggatgtctcaggaaagcctttaatctgatatttttcccaaccccttagttatagttgaggggaccttttgtttacccatgccttttaaatcatgcctgaaagcccaactcctctgctaggcagggctattttagctggtacgggacccatcatccttatggctccaggacagactctttgtctcaccctagtgcagaccaatattaattaacccagaagtctgggcaactgaaaggaaaattggtgcagccacaactgccatactggtctaggtccaccttaaggatccsacctccttctctaaccagagaca

SEQ ID NO: 820771 - DNA, 635 bp, Homo sapiens
aagacaaccatgatcttttgttctttactgcagtattttgctacttctgtctccacatccagtagattgtcattaacttgttatgtgtttttctaaccaatacccatctctatgttttattcccaaggctgaaatttgagcctctttcctcaaatggtcttcggatgttcttgtaaattaactccactagtatgtcttgcataccatacttccaggacacacccacttttcttatcgattcctcagcctaatgatgcaaatttggttttgatcatgtagatcataacatacccttaagtatgcctgccactttaaagtattttgtgtcattacctgatctttgccatcactagcagtgctctttgtgcctaatctttttgaaacctttcctgctgacctgtccatccctcattccctcacatccctgaccaggctgcaggggctctcaaacacaggtaaatctgtcattgactctataagggtttatgtatatatgaaaatggacttttctggcctggacagtaccaattggtgtatatcagttttttcttttatggaytattatttggtgccaaacctgagagctctctagcccaacatcctgaaaattttctccattttggagtggatttttg

SEQ ID NO: 820772 - DNA, 684 bp, Homo sapiens
cctcatagtttctttgggggatccagtgaaatagtggacatcaaataactttatgggttgtattggttcctttactatgttctagctgtgtttgccgctcttactttccttgcttttcagtacatagcagaatgttctgaaaagctctgaagtgtagactcagtttttttcataacttcagtgtctgacaaaagttctctctagtagcctcctttaacacacagataaacggaaatgattatttctcaggtttcttttggcacagtgacttttattctgtttcagtgttataaagctcccaggatacatttcttctttgagagtggctcttacatcctaaatctttaatgtgggtagatttaaccacagatactgtgttgaggaggaaggggtaaaggaaaaatggaaggaaccccttaatttacttcagtgtcatattcaggtaaaaaggaaagccagtcatttttgctaacttataggaagggtttgtctttctgtttattatttgtagagaggactttattaatcattttgttaagcttcccttattttgtaaataaacacttttattgattcatgctaaatctggcaccatgaaaggagaccagagatatgaatargacagctgttgcctttaagggcctcaggaaaacaccttgagcattgtgtatctagagatacgtg

SEQ ID NO: 820773 - DNA, 541 bp, Homo sapiens
gcttattgaggtattaaacacattttatactaatgatattttgacttttgatggatttatcaggacataaccctattgtaagttgaggagcatctgtaatatgttttaatatctgtcagcaaagaggctctttactttattgcttttctttttaagagatttttctgcctagccttgctggtttagttttatttatgaacttcaaaattagttttctagtttcattgcacaaacaaaaatatacaaacaacaaaataagaaaccatcatcacaaaaattcaaaaacaaaggcatgttagttatttttttaatattgccttacattattaaaaacttgatggaaatttacatccttctagtgttgattttttctattcaataagaagggacgtcttttaatttgttcagttcttcttttgagacattcagcagtgttctaaaacttctcttatataaaatgtaaacacttgagtttttccaaaaaatttttatcyttattttgctgctgtcttaaaggtattttccctcactttatcctcta

SEQ ID NO: 820774 - DNA, 252 bp, Homo sapiens
ttcctcttgtcgccggtgcgttstgcctgcatctttgctccagctaagccagctcctctaggcctctggctgcccaccgcagtgggctctggactggactctggaccatgcgttgctgggtttgctgctgtgatgatggaggtgctgcttttgtctgtctgatgtttatactttgtgggtgtggagtgtgctaggaacatctcatatgtgccaggaactggctctttggaaaagtcagtccaggttagaaac

SEQ ID NO: 820775 - DNA, 552 bp, Homo sapiens
acttattttgcccaagataaaataattaaaatgatatgtatatgattctttttgttatctcttgtccaaatgattagattctttctaccttggacactaccaatgtgtactgataaattgtgttttcattcctttttaaaatatatgtcctgaaaaaattactactccttaacaccacatttttccacattatttgttgtaacatctccaaatagtgagataccttgcatacataaagagtgtactaaatatatatttgtgatcaataaaataatagttaaataatcttgtaactaacatgcagagtaagaaataaacattgcacatgccacacacagaagacctatgcctgtctccttatcacatccctctccttaactcctagaaaactactgtcctgacatgagacaattatttatttgactttttaaaaatttwaacaaatctgtacttactgctatacaaaatgttttagtgttcaaacttttttttttttcagatggagttttgctcttgtctcccaggctgcagtgcaatggcgcaatcttggct

SEQ ID NO: 820776 - DNA, 674 bp, Homo sapiens
gcattgcattgcattgtattgtattgtwttgtattgtattgtattgtattgtattgtattgtattgtctaacagtaatttttcctattaattgttttcctcatttttttctgttataaattgtgggaacaggagagattgtgaaattttaagtgttttttgtataaatgatgatagatgtgaataaattcatacacaataagtttagaagtcataggtacctattacttcacatcattccttaggtgtaggtttcttttgaggttctcagctattatatttcttaaagaagaaataaattcttgtttaagaataaataacctatttttagttttaaagtcatcaatttatggttttttcattttctcttattttgtctaatgaatagaaaatataattgtagtatattttgaaatttggtttttattttcttcattaaaaacctttttttctgagaatgtccaatataatatggccattaagaagcaaattcattcctaggtgttcacaactaacagttaaacaaatcggtattcataacgacaactccattgctgctatcaagtgattttcattgttatgaaaccatatgatctcagaattttagaaaacctcagagaacagagaccccagctctcctgagagccccagcatagcccatcaacatcaacaatt

SEQ ID NO: 820777 - DNA, 607 bp, Homo sapiens
gggaatatatatgtgtttaatacaacatttatattactgatttgtttcccaattataaaagctctatatttgcttatcttagatcccctacgatacaaaattacctataggcagatatggatgtgaagagcatgaattttgggtcaagctggctttagcttgtattgtggctcctccctttaaaaactttattgctgtaggcaagttactaatctgtcctgagcctcagtttcctcagacatacaagagggatgaaggcaggatgcaagcataaatacaatgcaatgtatataaagtactgaacatagtgcttggcatgtactgagtgcttataattatctcaatacctaaagaactgctattgaaaacacagcatggtttaccacaagtttatttgctttatataaacgtaccattgttttaagaatttgaatcatattctagaacaggggtccccaacccctgagctgcagacgggtaccagcccatgacttgttgggaagccagcagcacarcaggaggtgagtggctggtaagtgagcattacctcctgagctcctcctcctgtctgatcagcggctggcattagattctcataggagcgtga

SEQ ID NO: 820778 - DNA, 596 bp, Homo sapiens
gtgtctttgttaattaagatgataagcctttataataaaaatcaggccaagaaagaatgtgtatttacatagcagggtcaactacatcatttttgcaaggaagttatattcrcagaaagaatgtgcatccgtcacgtaaaccagcagtctccagcagcagaaacagaattaattcttgtattgacaaagtatgtttacctttgtgtgttttaggaaggatcactgccatggaataactggaagtgaaaaaccagatgcatttttaccctttacccccgtccaataaaatagaattcaaactaccccagcacttggaatcagcaaaaggctaatccgaggaagatcccatgatatctcatacaatgtggtcaagaaaggaggggctgccatgctggtttcatttgaatgaaggtaatttatgtgaagaataacaggagatgggaggttgtaaagaaaatagaactacaggaagaaattaatgatgaaggaaagagacaattgcaggggcaaatctttgtgttctctagaaggatgactatgctcttgaagagatgggcaatcactcattgtgacaagaaggatatcaggtagcacga

SEQ ID NO: 820779 - DNA, 509 bp, Homo sapiens
atgcttacaatgaacattctttctatttccaatatttttattcatctcaaattcagtatggcttaagatgggaggtgcgtttctaacttgattagcttgccaatttattttcaaaaacgttacccagttaccatgtattaaagaatcactcttttcctctaaagaccccaaggtttgtcttttctaatctatttatttgtgtttaaattaacccttgctgtataagaaaaccccacaaagctcagtgacccaaacactaagaatttagtcttgtttaggagcctgaaagtcagttagagtgctttctgatcactgctgagctcagtcacatacctacagctagcttcaaggtgggtggaaaactcgaggatcctgggtgagttctttcatgtactgggggtcyggtggtcctagaatagcctaggatggctttggttggaaccaaagagaagaaagagagcaagcacaaaaggataagtcctaatgtgtaagaatccctcaagtctatg

SEQ ID NO: 820780 - DNA, 582 bp, Homo sapiens
cagttgtaccccttggtacaggtttatgttggggttgtggcattgcagccctttgtatgggtgtagtggaataatgatgcggtctcagaagtgtgaggctatattggcccccaggaagratgcgctttagcagtggctctactctcaaaatagcactatgccgtaacagtttgggtcctggggagtgggatagacccagtgtgagttctttctctggcacaattctgctgcatggattctgggcatctccctttactgggcttaggacccatgaggactgtttggctcttctgcaactaagactgcaggtgtctgtggtagtaatggggattgctggggacctcccacttacctttgcagccattctgagtttccatgccttagggggtttatatgacttccttgatgcactccgttattctctattatacactccacttgaagtgtaattatttgtttattgttttgacccctctctgcagaagaaatgagcattgggcacttgtagtcagctatcttgatgatgtctagcttattttctgctttcttgttttattattttctgtgtctgatggaatatat

SEQ ID NO: 820781 - DNA, 614 bp, Homo sapiens
taatttaattccattgttgtcagaaaacataccttatatgacttgaatcttttaaaatctctttcgacttgctttatggcccacaatatgctctatcttgaaatgtattctctgtgtactgaagagaacaygttattctgctggttttggatattaatgtcaattagataaaattgtttaagagtttcattcatctatattattactaaatttaagtctgcttttttgcttgttctataaattgttgtttaattttagtaagggtatgaaactgtaactataattgtggattactcttcctctttgcagttctatacatttctgctttatgtattttgaagatgtattactaagacatgcaaatgtttcggattgttattttctcttagtgaatctatccctttattattttgaagtgaccttatttatccctaataatattctttgctttagaatatattttgtctgatattaatataatgatcctaggtttcttttgattaatgttagcatggtatatcctaatccatccttttacgtttgactcatttatgtctttatgtttaaaaaagttcccattttttggcaatcatgtgttttaaaattttatttaa

SEQ ID NO: 820782 - DNA, 556 bp, Homo sapiens
tcatcccagagctccacgatgccgtcctttccacctgttacaaagccctgtgaaggcacacatgagaggtattatatacacatcaaaatgaccaattacccasttggccccaggaggattccccgcaggtaaggaagctttgtggatgctaccttcctaaatatatgagatggaaaactctggtgataacaatgttcgaataatattttttgggagcatttctcccatacttccctaagcaagattaagcacgttctcagcatgtgtccactgcactctcctcagaacaatggttggcagctggcccactgatcaaggatggctctgcttgtgcccagtctcccaaccagaatgtggttcctacagaatggaaccagcctcaaaacctagcagagtttctggtatctcacatactctgaccaaatggattgaagttaacatcacagtttaaaattattgttaaacatttaaaaataaaagtcatgtccagaagaaaacatcattatttattaagagtagcttaggtactttatataatgaaacgatcctatttcat

SEQ ID NO: 820783 - DNA, 407 bp, Homo sapiens
ttgattggcatagcctaggtaactcatccctcgaccaatcagtgtagcaacagggctggtgttatcctaattgattggatcaaccatggcctatttctggagtttgggatgcaggcttttctaaccaaattacatggctgctttcaaatggaggaagagatgaatagatgttgaaaagccagatgaatgtccattcatttaatcctcaaacacgctgtgaattagatcccagggagaggtgagaaaaatgacctcagagaagcaacttgctcaagatcaggcagctagtaattagcaacaytgggatccaaactcaggtctgtctgacttcaaagtctatgcacttggcctctagactccagtgccccaaatctcagctattgtatgaatctctccagttgcctcca

SEQ ID NO: 820784 - DNA, 407 bp, Homo sapiens
ttgattggcatagcctaggtaactcatccctcgaccaatcagtgtagcaacagggctggtgttatcctaattgattggatcaaccatggcctatttctggagtttgggatgcaggcttttctaaccaaattacatggctgctttcaaatggaggaagagatgaatagatgttgaaaagccagatgaatgtccattcatttaatcctcaaacacgctgtgaattagatcccagggagaggtgagaaaaatgacctcagagaagcaacttgctcaagatcaggcagctagtaattagcaacattgggatccaaactcaggtctgtctgacttcaaagtctaygcacttggcctctagactccagtgccccaaatctcagctattgtatgaatctctccagttgcctcca

SEQ ID NO: 820785 - DNA, 595 bp, Homo sapiens
catgatcttctttaacttttcaaactacatgacaggtattaycctgttttgctcatcagggaaactgaggttcaaaaaggataagggacttatccaagatcacaaaccaaaatgtggtggagccaggaattcaaatgagttccaactctttccattgtctttattacatgttttatagcctgggtccatatattttcaagtaaaaacactaattaggggtacctctgagttcaaaaaacattgcaaccataacacacaaccagatggtcataattaggtaagctgactctgctccttaattcagtctctctttatatacacatcccaccttgactctaggcaattttatcagattaatacctgatcaagaataaagttcctctttgtccgggaagcaatctggaccagcttactaaggcactgggaggcttgctgaactaaaaggtctcggcttttggggtccatctctggctcctcgagacccttcatctgattagtttgagaggaagtgaaaaaaaaaaacaaaacacaagttatattgcaagttaaagcccaagagttattggtaaatgtcacctcttcaaatactgaatct

SEQ ID NO: 820786 - DNA, 637 bp, Homo sapiens
catcacttattcccctgaaggtagtcccctggctacaagcacccttgaatttsagacagatggcataaatactacatcaccttggtacttagggcagggtctgcaaattcagttaatagacagtcttggatatagggcctgcagggattgcattttccagaacaggaaatagaaaactgatatgggccacaagggagtgataccatgagagcagcatcttcacacattatttttccaattatccacagatatttgctattcaagtggggcatgggaattactaaggtaattactagctgtcccaacaactgctatgtggacccttcattccaaaaaaagggaagaagatatgaaagagagaaaatatgcaaaataaacaatattctaaccaatgccttttggatgaattagagcagaaaagaacagaaatgtggaaaacaggagatgcttgcagtgactcacaaatgagcagatgagggcctgaaccaagaaggcagttgtttaactgctttgataatggcaagtatgagacattgtagaagaaaaaattaggataagtttttgatgagttagacatgggacgtgcaagagaaaaaggaacagaaagaatgatgaggttattagcttgagaagcagg

SEQ ID NO: 820787 - DNA, 624 bp, Homo sapiens
agaaaactaaaacagctgaagagaagagaagcattaaatctagattcttctaacttaactctgctactgattatctttgcratttttaggaagtgtaccattctttgataaacagaaataaggatccagaagataaattgtaattataaagattactgtggactaagatcctgatatttgcctcatttcctgatccctttcacagtgtaatttatgtgaaggaaatgtacaattattcaagtaaacacggtactagattcacagttcctaagtataataatttataagtggaacattgaagaatccagaattcatgttgctgtaaacatgttacataagcttatttaaatgttttccttttgtgaattcaataaatggtaatttgtaatttataataaaacatacgattatgatttcgtaacttactgaaaaaaactttaagaaaattaggtatcgttcaactgaaaagacaaaaggaatataccagaaattatagccattttattttcatgttcctgatgggggtattgctgtcacaattggggcagagtcattatttttctcaaattcaggattagaaaggtctttgcctttattgcatcagaacataatcacagaatttct

SEQ ID NO: 820788 - DNA, 601 bp, Homo sapiens
actgagatatatggaaacttgtctagcacttatttcttcactcacgtgaaattttttatcatgtatacttgtctctgtttttttttttttttttttaagacaagagtcttgctctgtcgtccaggctggatgtggtggtgtgatcttggctcactgcaacctctgtctcctgggttcaagcgattctcctgtctcagcctcccgagtagctgggatttcagatgtgtaccaccacacacagctagtttttgtgtttttagtagagacggggtttcaccatgttggccaggctggtcttgaactcctgacctcaggtaatccgcctgcctcagcctcccaaagttctgggattacaggcgtgagccactgcgcctggctacttgtctctgtttttacatgtatccttcgcttccagattgtaaattatagtagatggagacttgtaccacagtgctttcataatgctctacccacagtatacatacataagtttsttaccgatgatactaggagcctagtatgatctgggtaggctttctagaggaagtggatttgaattcaatttgtgggctttggaatgttgcttatggcatagtcccat

SEQ ID NO: 820789 - DNA, 546 bp, Homo sapiens
gaacactgtgcatgtctgtagattattgaacagtgcttttgaatacttgagatgtttccatgtgtaacttttctgcataagctttctstataggacacagaatattcccagatgaggaaacagactctgctcctgatctccagggggataggcaacagggtcttaagagaccgtgtcctggaaaacatgtcaaccaggtgtcaagcacagcctcagctgggtgatctagtggtggcatcacttagacatttattcagcaagtatttatggagtacctcattcatgtcaggcccagagttgagctaagtgaaagcatgaaatcatctttagcaatctgtaccccccacccccaccaaaccaaccacctagtgagaaaggacattatcaccttcagattagggatgtgtgtctcagagtttaagagacttgtcccagtaacacccacttaatgacaaagaaaggatttacatttaaaccaaagtctctaagacaccagagctcacatattctggtgcattcccagctcccaagatcacttgcagattc

SEQ ID NO: 820790 - DNA, 621 bp, Homo sapiens
caatctcctggtgtgccattttttaagcccattggaaaagctcagtattagggtgggagtgacccgattttccaggtgccgtctgtcacccctttctttgactaggaaagtgatctccctgaccccttgcacttcccaaatgaggcagtgcctcgccctgctccacctcgttcacagtgtgctgcactcactgtcctacacccactgtctggcactccctagtgagttgaacccaatacctcagatggaaatgcagaaatcacccatcttctgtgacgctcacgctgggagctgtaaaccggagctgttcctatttggctatcttggctccagcctccgggaagcctattttaagatagtccctatctcaaacttgttttaagactagtatgcttattgagaagaggtagcctcattgtaaaaatttaactagagctagcgtgaacccaggtggtggagcttgcagtgagcctagatcacaccactgtactccagcctgggtgacagagtgagactccatctcaaaaaaaaaaaaaaaaaaatttaactasagctgtgggtgacagttatgagtttcagtacgggtctgggcccaggtttcccttgagcaccaaatgaata

SEQ ID NO: 820791 - DNA, 624 bp, Homo sapiens
atacccatagatagacataatattacatatttggtgattagaatgtaaatttaattttacagttccctttgtacttcattatatcatacgccatttttaatgttcctgcacagacttcaaaatcatagtttttggtgtctccaaattcaatttccataattcattaactaattcatttcaaagcatttattgcacatccaatacacaccaggtcctgataatagagatttaaagaaggatatggctactctcgggtttctcacagtcatggaatcaaatgcctgataatatagtgtgtttaagttatctttatagaaatatgaacagagagttttgggagcttggaggatgaataggggaatctaattctatggagaaattagaaaagtcttgttgaaggaagtgacatttgatgtaactcttgaaggacaggaaattttccagatgaagaaatagtaatatttacgaaggtttaaagttgtgcaagagcctagagtgtttcaggaacaatttaatracttagaaatttgagattaaataaggacaacactggatgaagattaaaagataaaccgggctagattgtgaaatgtgctaaatttcaaaataaggaattttgttttc

SEQ ID NO: 820792 - DNA, 602 bp, Homo sapiens
tgtgtaccccttctgtgttattattcataatatcctagggggatgtttctcttaatgtcacaaagagtgtacaaaatgtcacaggaggtgtacacgttgtgacgtyatctgtaataccctagaaggatgttactcgtaatatgtcacaggggtgtacatgctttgatgttatttataatctcatagagcgatatgacttcaaatatcacagtggatgttcacacatagtgtataccctgtgacagtattcataatatagtagggagacacaactcctgatatcacagtgcgtgtaccccgtgtgtgtacacccttgatatgagtcgcgatatccagggtaaatatgactcctcatatcacacagtgtgcacaccctgtgatatttttcatcctactttagggagatattgcttctaatatcacagtgggtgtaccccacgtgtgtgtactctgtgacagtatattctatatcctagggaggtattactcgtaatgtcacagtgggtgttcaccctgtgatatcattcttgtttgaccttgctgccttttttaacccacactacaaaaggaatggaacagataagaaggtcttgagattagac

SEQ ID NO: 820793 - DNA, 552 bp, Homo sapiens
gtgtcacaaagcccggagtccaagcaccgcccgtcacagcttcaagacacacgcyggatcccatttcaccgctcctaacccccactcaggccagtgctttaaaattgcacacaggtcctgccccgttagtgggttgggaaattgacttagtgagttgcactacttgttttccgaaaatgaaattaaaaagaaaatttcaaaatactatgcatgtagtgagggtaaatattattttgtgacgctcttacttcagctttaaatatatagccgggtgcagtggctcacgcctgtaatcccagcacgttgggaggccgaggcgggaggatggcaagaacccaggaggttgcaattgagctgtgatcgcatcactgcactccagcctgggcattggagcaagactctgtctctaaaaaataaatataaagtaagttaaaataacaaacaggatgtttgcttttactacggattttggtcaaaaaacttgaaagctactgtcctgtgtagaaatccaggaggcgccctgatagaggttctgatgctcaggttccgatt

SEQ ID NO: 820794 - DNA, 625 bp, Homo sapiens
cgggtgaatcaccttaggtcaggagtttgagaccagcctggccaacatggtgaaatcctgtctctattaaaaatacaaaaattagctgggcatggtggygggcgcctgtaatcccagctacttgggaggctgaggcaagagaatcgcttgagcctgggaggcagaggttgcagtgagccaagatcgcgctactgcactccagcctgggtgacagagcgagcggccccatctcaaaaaaaaaaaaaaaaaaaaagttggatgggtcttttgggactgtggcccgatctcctggaagtacggatggggacactgaggcccagacaggaaaggggtttgcctgcgtttgggcagtaactcagacgctcacctgaggctggagcttcccaggcctgccttcttggcttcaggcctgtctgtgagaaggggcgaggctgcagcctcctgtggggcgggacacagggcctcactgagccatcgcgcgtgcagagggccaggcaccgggcaggtggtcaggaaacagctgctccttctgcctgtggaggtcccgctcacgcccactgctggggttgggattacatctcaggcgtcatccagacctggccaaatcctggctctgccccttgct

SEQ ID NO: 820795 - DNA, 625 bp, Homo sapiens
cgggtgaatcaccttaggtcaggagtttgagaccagcctggccaacatggtgaaatcctgtctctattaaaaatacaaaaattagctgggcatggtggcgggcgcctgtaatcccagctacttgggaggctgaggcaagagaatcgcttgagcctgggaggcagaggttgcagtgagccaagatcgcgctactgcactccagcctgggtgacagagcgagcggccccatctcaaaaaaaaaaaaaaaaaaaaagttggatgggtcttttgggactgtggcccgatctcctggaagtacggatggggacactgaggcccagacaggaaaggggtttgcctgcgtttgggcagtaactcagacgctcacctgaggctggagcttcccaggcctgccttcttggcttcaggcctgtctgtgagaaggggcgaggctgcagcctcctgtggggcgggacacagggcctcactgagccatcgcgcgtgcagagggccaggcaccsggcaggtggtcaggaaacagctgctccttctgcctgtggaggtcccgctcacgcccactgctggggttgggattacatctcaggcgtcatccagacctggccaaatcctggctctgccccttgct

SEQ ID NO: 820796 - DNA, 527 bp, Homo sapiens
cgaaaccttgcttctacaaaaaatacaaaaattagccaggcgtggtggcgagggcctgtcgtcccagctatttgggaggctgaggtgggacgatcgcttgagccctgsacgcagaggttacagtgaactgagatcacaccactacactgtaacctgcacaacagagtgagaccctgtctcaaaaacaaagcaaaacaaacaaaaaaaaaacgagtgtgggactgagaacaggctttcggctctggggtgggggaggtgatgtgtgtgtgccaggccttgggggactaggagaaagtggagatggggtcaaaggatgacatatttgactggggctaggaggtgagaaggacggggttagtccaggccagccaggtctgggcgggggcagtgctaggggagggcgggagggaagaagctttgctcagcacccagcagaagtgaggataaggactaacaggctttatttggaaccagggaagtcatgcaaatatatgcaaaagatcatgcaaatgagcctggctgggtgg

SEQ ID NO: 820797 - DNA, 527 bp, Homo sapiens
cgaaaccttgcttctacaaaaaatacaaaaattagccaggcgtggtggcgagggcctgtcgtcccagctatttgggaggctgaggtgggacgatcgcttgagccctgcasgcagaggttacagtgaactgagatcacaccactacactgtaacctgcacaacagagtgagaccctgtctcaaaaacaaagcaaaacaaacaaaaaaaaaacgagtgtgggactgagaacaggctttcggctctggggtgggggaggtgatgtgtgtgtgccaggccttgggggactaggagaaagtggagatggggtcaaaggatgacatatttgactggggctaggaggtgagaaggacggggttagtccaggccagccaggtctgggcgggggcagtgctaggggagggcgggagggaagaagctttgctcagcacccagcagaagtgaggataaggactaacaggctttatttggaaccagggaagtcatgcaaatatatgcaaaagatcatgcaaatgagcctggctgggtgg

SEQ ID NO: 820798 - DNA, 539 bp, Homo sapiens
ctgtgggcttttgtggggcgaaatcaaagacaacctagaatttacccccaaaccagctgggggtggtggctcacgcctgtaatcccagcactttgggaggctgaggcgggcagatcacctgaggtcaggagttccagaccagaccagccaacatggtgaaaccccatctctactaaaaatacaaaaattagccgggtgtggtggcttggcaagcacctgtaatcccagctactcgggaggctgagacaggagaatcgctggaacccgggaggcggaggctgcagtgagctgagatggggccactgcactccagcctgggtgacagagcgagactctgtctaaaaaaaaaaaaaaaaaaaaaaatccccaaacctcgctggtaataaaaccccatgtattctcaccccgacaggaccgttggtgggtctgacacctcatgttgctggacccagtgcaagatgcagacagtcttgcrctgacgaccggctctgggttcaagctccctccctgaacactgctgagcctcagtttgtctttgt

SEQ ID NO: 820799 - DNA, 511 bp, Homo sapiens
tgaaggttctgagtagggagaggggatgggagtctagtccttaccctccagcrgagttaagtcaatgcccctctgctctcccccaagctccctgtcagagaggtctcccaaggaggatcttggggcatttgaggccagagacttaagcaattcagagaattctggaggctgaaaagcagaggaaaagtcttttggttttccaaagatctcggtgtgaatcctagatttacccatctggctgtgggatcttgggcaagcattgcagcactctaagcctcagtttccctgggtgttaaatggctccttctgtgcagttttggagggaaaagattcaagagagacaataggtagcattaataccccaaggaagagaggtaggctcagtccgcagagctgggacaaagacaagtacaggggcgggtcgagagggtgcccacatcaatttctaccagggctgctgctgctgtgaggatggctggcaggggcgtgggcgacgtcgcccggcacacac

SEQ ID NO: 820800 - DNA, 592 bp, Homo sapiens
tttctaaagtacaccacttgatatctttcacagctcaaggtaaattctgcagcacgaacttatagaatttttttcttttacctggggtgagaacataccttttcctagtgctattttttttttctgggctacctttcatctgtttacatgaattccacttcttctcgctgtgttaaagaaatcccctaagctgtctacataggtgtgaaacttttggttgtgatttccttgaagttagttggaactggaacatttttttctgtgtcctgaatggctcacacattccctaacacagaatggatactcagcgaacagttgttgaatcagtgaacggtaatggctcagttctgtcagacaatggattgaattatttttacacctttaattcactcatggactgaattaacctactcatgggctgtttggggcatcaagtgatatttatacatttctgaagaatgtggaatcaccwgggttaacagtgtttgcaggtggcgttcgattgcaggggcccaaggaaccacggctgaattccgcatggacataggccattttccaccagcaaagttatgagaactttttttgttttggt

SEQ ID NO: 820801 - DNA, 419 bp, Homo sapiens
taagtggttgagctgtgacctgaacaaaggtcatctgataggaaggcaaggarcccactaccccggactctgggtaatgcatccctgcctccttgcctgggaatgtagcatgaaaaatagtgagaaaaccatagctttcacttactttttatgaccccaaattttataatgggaatttggcctcacatttgctcatattcctgtgtagccagagcttgattttttgattagcataaaaaatgaccccaggagaagttcattcccagctcaaggaacattgtgttgaaacaggatgttaacgaaaacctcatagcccacgcctgagtcattaacatcccagggtttgaacggggcaggtcctaattcttcagttgagatttctttgctccactaagttcaatccatgctgggaccattaa

SEQ ID NO: 820802 - DNA, 628 bp, Homo sapiens
aagtattcatctttaaaatttgatttatttatgagattgttcattttcaaaattgagccacagatagattattttcttttcacttgcaatagagccctgtggttacaccaactactttttctctcygcagtttattttgcaaaccagaggaacaattatactttatgaattttttttaaccaagagaatatttttgacacttctgatgataacccaatagtcatgtcagttgcaaatttaaatcggaacccactatatacatagcaagtatttgacactaaaacattattttttaaaaaattaatatcatacctctaaaaaagaactacaatcttctgtttcaattgtggatatgtttaaccatgcccagcaccttctagaccactcaggaattaaacagatgccaatgaaaattcaaagccatacttcacatttctgtgatgcattttcactgagacatttaaggccatctttaaaaaaatagtaatggcaaaagaaggacctgaggccccaagaggcttatttttcccaaattgagtcaatgaccgaactagtgattaaacagacgtttcttatacatgggtcattgtctctgaataaaacgattctatcaacatttcccccaaag

SEQ ID NO: 820803 - DNA, 538 bp, Homo sapiens
tctgggggtgattttcctttgtgggtcaaatgcctctagaggaagtgcatacatccgccattttgcttcttcctgtgcatgcttgagcctgctcgcccaactcctgagatcttatcaggaggctayggaacaccagctttgggtgttttctatctgttgggagactgtcttcctatacattttcagaaaggcagtttaacaactgctccaaccatcatctgatagtcacctggcattcctggggggccctttcttgctcttctcatgtctgcctaactacctactctaacaatataacatagaaaagatgtgttaatcaactgtttatattattcatttatttattttgagacagagtctcactctgctgtccaggctggagtgcagtggcctgatctcagctcactgctacctccacctccctagttcaagcgattcctgtgcttcagcctcccaagtagctgggattacaggtgtgtaccaccatgcctggctaattttttgtatttttagtagagatggggtttcaccatgttga

SEQ ID NO: 820804 - DNA, 538 bp, Homo sapiens
tctgggggtgattttcctttgtgggtcaaatgcctctagaggaagtgcatacatccgccattttgcttcttcctgtgcatgcttgagcctgctcgcccaactcctgagatcttatcaggaggctacggawcaccagctttgggtgttttctatctgttgggagactgtcttcctatacattttcagaaaggcagtttaacaactgctccaaccatcatctgatagtcacctggcattcctggggggccctttcttgctcttctcatgtctgcctaactacctactctaacaatataacatagaaaagatgtgttaatcaactgtttatattattcatttatttattttgagacagagtctcactctgctgtccaggctggagtgcagtggcctgatctcagctcactgctacctccacctccctagttcaagcgattcctgtgcttcagcctcccaagtagctgggattacaggtgtgtaccaccatgcctggctaattttttgtatttttagtagagatggggtttcaccatgttga

SEQ ID NO: 820805 - DNA, 538 bp, Homo sapiens
tctgggggtgattttcctttgtgggtcaaatgcctctagaggaagtgcatacatccgccattttgcttcttcctgtgcatgcttgagcctgctcgcccaactcctgagatcttatcaggaggctacggaacaccagctttgggtgttttctatctgttgggagactgtcttcctatacattttcagaaaggcagtttaacaactgctccaaccatcatctgatagtcacctggcattcctggggggccctttcttgctcttctcatgtctgcctaactacctactctaacaatataacatagaaaagatgtgttaatcaactgtttatattattcatttatttattttgagacagagtctcactctgctgtccaggctggagtgcagtggcctgatctcagctcactgctacctccacctccctagttcaagcrattcctgtgcttcagcctcccaagtagctgggattacaggtgtgtaccaccatgcctggctaattttttgtatttttagtagagatggggtttcaccatgttga

SEQ ID NO: 820806 - DNA, 498 bp, Homo sapiens
gacaacaagctctcttttttgcttaagttattttgagttggattcctatcactcataactaaaataaagcaraactgtttgaggacaaaaaatgaaactgtaaaaaaaattaaatgttaaaaacttttcattactttgagccaagaagaactaggaaaacattggcataaaggttgtaataacagctgacatttctatggtatttatagtctacaaagcactctaacattaactaagttctttcttctcgtaattctgggagatgaatggggtaagtatattatcattacccacatttcacaaacgcatttcaagatttgagtcttgaatacgggatttctgtcctaagctttttgtttttgtttttgttttttggctatctagactgttctttaattattatcattcccagtactctcagaactgtttagataaagaataacaaatttactttacagttacagagaacagagaatgttgagggaagttgaagtagat

SEQ ID NO: 820807 - DNA, 612 bp, Homo sapiens
aagaaaatttttgcaaatcacatatgggataaggaattaatatccatattatttaaagaattcttacaattcaaaaaaaccccttaacagcctgatgctaaaatgagaaaaggagaattgtctcctgagaaaatatacacatggtcaataaacacaggacaagatattcaatatcagtaatcaacagggaaatgcaaatcaaaaccacaatgggataacatgtcacacccattagaatggctattatcaaaaaacagaaaataagtttgtggagagtatcttagtccattttctgttgctataaatgaatacatgaaattaggtaatttactttttaaaaatatatatatgtatgtatatatatatatttcttacagttctggaactgggaagttcaaggtcaagcagttgcatcttatgaggaccttcttgctggtgggactctggagagtttcaaggtgccacagggcatcacatgatgaggggacagagtgtactagctcaggtctttctccctcttcytttaaggccaccagtcccacttcttgataacccattaatccattaatccgttagtccacgggtgaattaattcattcctgagggcagagc

SEQ ID NO: 820808 - DNA, 383 bp, Homo sapiens
taggtaaaattattttatgatccagcaattccacttccagacatatacccaaaagtaaagatattgtaaaagtgagggcattgraaaaaaagtaagaaaaataagaattccaacagatatttgtatattcatgtttatagcaccattattgacaatagccaaatgtaaaaacaacacaaatgtccaccaacagatgaattactaaacaaaaatgtggtatatactacaatggaagaatgaattctgacacaagcttacaacataaatgaaccttgatgacattattttaagtaaaataagtcagtcataaaagggcaaatactacagatttcacctatatgatgtacctggagtagtcaaattcatagaaacagaaagtagaa

SEQ ID NO: 820809 - DNA, 452 bp, Homo sapiens
ttaaatggtttcaaaagtaaattctttcaaactctccaggaatgtataagcctgatactatttaaagtatttcagaatgagaaaagaaagaatcattccaatttctctttataaactggcataatatttatacaaaataattaagaagaatgcaaaataaaaatctgtagaaaaaatttttagtgaaaaatttttgctaaaccactacacattcattaaaatgggcaaaatccagaacactgacaacaccaaatgctggtgaggatgtggagcaacaggaactctcatccgttgccggtgggaatacaaaatggtacagacgctttaaaagacaagttggcagtgttacaaaatgaacacactcttatyagacagtccagcaattgtgcaccctgatatttacccaaatgaaacatgtccacacagaaacctgcacataaatgtttataaaa

SEQ ID NO: 820810 - DNA, 611 bp, Homo sapiens
gtagaagaatgaaactggatcctcgtctctcacctaataataaaaatcaactcaagatggatcaaaggcttaaattaagaccagaaaacataaaaatctagaagataacactggaaaaacgcttctagacattatcttaggcaaatactacatgcccaagaacccaaaagcaaatgcaacaaaaacaaagacaaatatatgggacttaattaaattaaaaagcttctgcacagcaaaagaaataatcagcagacttaacagacaacccacacagtgggagaaaatcttcagaacctatacatctgacaaaggactaatatctagaatctacaaagaactccaacaactcagcaagaataaaacaatcccgtcaaaaagtgggctaaggacacgatagaccaattctcaaaagaagatatacaaatggccaacaagcatatggaaaaatgctcaacatcactaaatatcagggaaatgcaaatcaaaaccaaaatgtgataccaccttgctcctgcaagaatggccatagtcaaaaaatmaaaaaataatagatggcatggatgtggtaaaaaggaaacacttttacactgttggtgggaatgtaaactagg

SEQ ID NO: 820811 - DNA, 623 bp, Homo sapiens
gattcaacccagggatgcaaggttggttcaatataaacaaataaaaaaatgtgatacattacatcgacagaatgtagaataaaatctataygatcatctcaatagacgcagaaaaagcatttaataaaattcagcatccttttatgataaaaactctcaacaaactagtcatagagggaacataactgaacataatgaagggcatatatgacagattcatagctaacatcatactaaatggtgaaaggctgaaagcctttcctttaaaaactagaacaagacaaagatgctgactttactactcctgtttgacgtagtactggacattaaagtcagagcaatcaggcaagagacaaataaaaggcatccaaattagaaaagaggatgtcaaattgtccctctttgcagatggcacgatcttatacccagaaaaacctaaagacttcaccaaaaaaagccttagatctgataaataaattcagtaaagttacaggatacaaattcaacataaaaaatagtgtctatatatgaacgacacactagctgaaaaagaactcaataagggaatcccatttacaataactacaaaaatacctaggaataaatttaaccaaggaggtaaa

SEQ ID NO: 820812 - DNA, 585 bp, Homo sapiens
tgtaaacactcagatgagtttctccctccctctgggagagcacccagcgcagggtcgaccacagagtcggggcttgatgagggcttgcagagcgacagttgtcctttcccagttggtatgagtgcagtaraagcctcgttcttcctggctgggagtctggagctgacatcctcaaatgtggctggaaggggacagcagtagaaactgagggaggcagtcttcagtgggcctgggtttcttcattttatgtttcaattttttctcatttcaaggaaatcttcccttgactctaggaccttctagctgcattcctgtctctctcctccccagacttctccaaagtttgcgccctttcctcacgggccaaacatgcattcaaccctctctagtctggttttcgcctgcatctgtccccacgagcactctcactgagaccccccacccccacaccgtgactccctgttgttcagtcagcccctccttccttccttcctgggcactctgctgtgttggagacgccacgcagccctgcctctcaggacttcactttccctggttcttgggatgtcatgctctgctcttgtc

SEQ ID NO: 820813 - DNA, 565 bp, Homo sapiens
tatgaacaactctatgcatatacatttgacaacttagataaaatggaccaatttctcaaaaactacaaactactaaaacttgccccagccgaaacaggtaatctggatagtcatataactatgaaggacatttaatttgtaatcaaaaacctgaaaaacagcagcactaggtccaaatgtttacactggtaaattctatgaaacacacaaaggagaaataacacaaaacatccacaatcacttccagaaaatagaagaggagggaacaggtctcattttattttatgaggccagaattacccctgtgtaaagtttttgcagatgtgattaagatccttgagatgagaatagtatcctagattatgtaagtgggccctctatggcatcacaagtggtccttataaaaacagaggcagaggaagggccaacacacagaagagaggcaatgtgaagayagagaagagactggaatgatgcagttacaagccaagaaatgctggcagccaccagaagctagaagcagcaaagaacagatgctcctctagtgcttctgaaaagaacacga

SEQ ID NO: 820814 - DNA, 593 bp, Homo sapiens
gatgcagacaatgtaattctaaaatttatatggagaggcaaaggaactcgaatagctaaagcaattctgaaaaacataataaaatgggaggactcacactgccagattttaagacttatataaagttacagtaatccagacagggtggtgttcacaaaggaataaacatgcagatcagtggaacagaatggaggctttagaaatagatccacacaaatatggctgattgaatttttacaaaggttcaaagcaattcagtagagaaagaacagtcttttcaacaaatggtcagagcaactggacatctgtaagcaaataagtaaactttgactaaaatgtcatacattgtacaaaagccagcttaatggatctaaatgtaaaatataaaactttaaaacttttagaagaaaacccatgaccttgatctgggcaacgagttcttaaacacggcactaaaaacatgaaagaaaaaactggcaaactggaattcatcaaaattaaaaacttttgcyctaagacagacactattcagagaatgaaaggataagctgcaaactgggagataatatttgcaaatcacatatccaatttgt

SEQ ID NO: 820815 - DNA, 610 bp, Homo sapiens
tggcatcttgataatattttggtgattacctccccttcttggaaacagttgaatctcccagtgatttccataaaaggttcaggtgagtgagacactgatcccctctgtcctggttggggagrcagtgtttagcagtcacttatgaccagaagtagccttacgataaggaagaacaacttatcctttcactccatcatgtcttataagcgtagtatcctttgcatgtcagaatacaaaaacagttgagaaaaaaggcaaccaatccctgaaggactatttatcaaggcatcctgacctcaatggtcgacagggagggaacccgatcaaggatagaacccgatcaaggtcaacagaaaattcccttactagaacttgattcatgagcagtgtccgggactaagaacattttctccagtggcagcacctggatgaggctgctgaggagttcctgctgctgacaccctctgaagctcctgtctggccttgtcttttccaaacctaagtttgtcacctcttctcttataagctccctttaatgtctccaataaattctctttttcatttaagttaacccatcagtatctgctgcttacaaccaaggaacgctagc

SEQ ID NO: 820816 - DNA, 598 bp, Homo sapiens
gaaaccccatcactactaaaaagacaaaaattagccaggcgtggtggccaactcctgtaatcccagctactcaggtagcaccttcaagggctttgattcttttgctctgtctccatcctagaaagagttttgttgcgtttgtttgtttgtttaagtggagattctacatcctctttacctttgcccctctcttttgggaaaatgtcctcttgcctttgggcaaggccagcccggccctctgagcaacacttttaagttagatgggcagccttgatcagcaaaataggggtgtgagggaaacagcaactgtgtcacctcttcattgctgctgggatgcgttgctatggataccaaattcagggaagcaaagacagcagcagaagaaaaaaaaagctatagtgtgtatattgatgtggccacgtgtgtgctcctgcatgcttgcacacttgtgtatgagaaccagagaaaaaggaaaggtgttcattgaggaggaggcctgatattttagcaattagattggcattaycaaaggtggattagcatttccagatactatattagtgatccgcccctatacgatactccatagtcagaacag

SEQ ID NO: 820817 - DNA, 264 bp, Homo sapiens
aatttgtatgaatcagtttttgagattggggttctcaaatattttgtaataatttcctgactgtcttcatttttctttctctgcagatcccctgtaaattctaagatcctacgttttaccacaggggcatctactggctaattctgcagtttagtaaccacaggactctggtccaactcagccaacaaaccacttggcacatttcarccctggcctgttgtaatcatgggggatattttggtttttctctccttccaaaagctt

SEQ ID NO: 820818 - DNA, 492 bp, Homo sapiens
cattttacaaccgtacaaaaacagttctttctttatatccttattatataaggtcttttctatttttaaatattttwaatttttttactttttaagctttttaattaaaaactaagacacatatacacatattagcctaggcctactcagggtcaggatcatcaatattgctgtcttccatctctgcatcttgtccgattggaaggccttcaggggcaataacacacatggagctgtcatctatgataacaatgcctttttctggaatacctctgaaagatctacctgaggttgttttacagttaactatcttttttataagtagaaggggcacactctaaaataatgataaaaagtttagtataataaatacataaaccagtaacataattgtttactatcattatcaactatgatgtactgtacatgattgttatatgctatacttttatacaactggcagcacagtaggcttgtttaccccagcatcac

SEQ ID NO: 820819 - DNA, 595 bp, Homo sapiens
tgtttgattccaacgtgaatttactctagtttaacttcaagaatatacaaaaactctgtttctatacagctctgtccccaccaactttcagttattgatgttacaaaattacatctttatacattgtgtatctaaatacatacagtaatgattgtccttcaatacactaatctcttaaattacatagaaaaaaagtgcagctaccaactgaagttacaataattctaatttttaaactaaaagtagttttttaaaaaactattggcctgttacatcatgtagaaaacaaaggtgtaattataaaccaatattaaattaatacttgattttataactgtcaatgtatttatctttactcacatctatgtttattcatatggctttaagttactgtctaaagtcagggattcagtccaggtccatttggtcactgaacagaaagccaatcactgagagaatgagtgttgccagtgaagaaggctttaatcaactacttcaatcaaggagatggaaaatcaatctaaaatcaatctscctgaccaactaaaattgaggatttatacagcaggaaataaatttaaccatgtgtggggaa

SEQ ID NO: 820820 - DNA, 627 bp, Homo sapiens
cacatgttctcaatagaaatccagactccaktccttgtacttgaacatttaattgtttgaaagtaacacattttattatgaagaaaaataatctatattcaaaatttagcaagtataccctggcaaaaaaatatataaagttgttttcaaattttcccattcaagaatggtgatatttaaatatattttctccttgactttttcccgtatctattaattatattaattaatatattaataccatattattacatattatatcatgttataataacatatcttataatccccatgcctttaaaaatgtcttattgttctgtcactcaaacagttattttggactctcatttgctgttttgacttctaatgttgcaaaatcttcttgagccaataacatttataattaagggagcagagttcttaaaattgaaaatgaaacctgtttggttatgaaatatcagagagttacaactttttccttaaatagatgtgagttgactttcattaaagggggaataaaagaaagaacaaacattttaagcaaacgttctaaacaaaggttgcaaaatcttactatctaaggcatggctcctcaattggatcttactgagatttactgataggtca

SEQ ID NO: 820821 - DNA, 615 bp, Homo sapiens
ttgttctttgatgtgagaaagtagaaagaatattgataagtaaacaagaaacatgcatatttcctcttcagaaacattttgatcctgataccatcctgtaaattaagttgacttaaagktcaacttactattctgttacttcttgtagttgtaatagatgtcaaaagtatttaattttacttagcttaatagttttagtagtaccagaggagattctgactaccaaaacattatttgttcctggaaatagcatacatgcttctactgttaaaaattctgccaagcctgagttgcctttctctatggtattttaagtctgggcttattttttgttttcaaggagattataactttcatttgttatatgattatgtaagtaaaaagatgtgctactcctaggaggttggtgttgccatttaaaactttaaaatgaataattttgctgagagttaagttttaatttttctacatgtgttaatacattatgcttgtctattagagtcgatttacattttgagtataatgtagagaattgacttttgtatatattacaaaatattttatagatacatagtcggcatatataattatggggtacatgacatattttaatac

SEQ ID NO: 820822 - DNA, 471 bp, Homo sapiens
ttaagggtattgagtcagagcaacattcaagtgggatggaaaaacatagactttacatatctactacagatctatgatggaacacaaacttaagtatgtaattaacaaagtgaaacaatatatacagaaaagagctatatgagaaataatatttagaaagaaaactagcacagcatacatttaagtctaagtaattgttgactcatacactcacaaatagataagatcacatgttgggccatgatgaataggagagtaagggggtgataatctctgaaaataatatgaagaacataaaatcctgctaagatttttgtcttggtgggttggagaatattcwtggtgattattaactctaaatattggtagaaaaatacaagtttcaaaatgtagcttaagtgtttgatagtaaccattagaaattagtatttataacttaaaaatcattagggtaaataaaagtagagcaag

SEQ ID NO: 820823 - DNA, 317 bp, Homo sapiens
gaatctgctttgctttctggcaacctggttacattaaagaatattgagtttcyagtccttactgcagagcatgggtgggtagtatttccagccatgaatttactagatttctctctctctgtctctcgataggtaggtaggtaggtaggtagataggtagatagatagatagatagatagatagagttttatatactctgggattatcataacaacttttactttcttaagtgaaaataacattttctatacaaactatgtttaatctgttaatgtattgagcccatgaaaatgtccacagatagacacatgaataa

SEQ ID NO: 820824 - DNA, 411 bp, Homo sapiens
ccttttcagataggcttctttcaatcagcaataaatacttaaggttccttcatttcttttaatggcttgtagctcatttctttttatcacctagtaatattccagtgtctgaatgtaccacaggttgtttatccattcacctactcatggacatcttggtagatttctagttcttgcaatcatgaataaagctgctataaacatttctgtagagatttttgttagaaataagttttcatctcctttgaataaataccaaggagtatgattgcaggatcatatggtaagataatatttagttttgtaatgtactgccaaactgtcttccaaagtggctgtaccattttgcatcctcaccagcaatgaatgagagttcctgttgytccacatcctcacaagcatttggtgtta

SEQ ID NO: 820825 - DNA, 512 bp, Homo sapiens
ttcagtcctgaaaatagtcacattgtttcttgtggaaactaaaaatctgacagtcagctgcctctcaggacagttcagtctcacatcttagcagcttctctgagccatctgcaactgataagcttccagatcaaaggccaaaggccccacctggcagggatcagaccttagtgaaggaaaggagaaactcgagaaactgttgagctgaactgtttccttttagataaaacttttgttattagacgtgccgttatatttagccatagtatttcagaaattctatagaccaggacattgatttcaataggagcaaggctaagaacttggtaaaacaattagtttagaattatttctcaaatggaatgttttcctgactttcacggttacttcctttactcagactactgtcatcattgtttgcttggcttagtgaaagggtctcctaaacsatctctagggcttccagttgttcccaaactcaggtgacaacaaactgtcagtcatttgaagag

SEQ ID NO: 820826 - DNA, 620 bp, Homo sapiens
gaagatctgaaactgaaaatactgccaaatcaaaaaatgtatgaatgccaacataatgctaaaagcaaatgcccattagaacattttcaactttagatattttgatttggggtgctcaactggtaagtatatgatgtaaatattgaaaaattcaaaagaaaatatttgaattctgaaatactcctgatccaaatcactttggataaggaacatctgtagtcaacccataatatttgttttatatattcaggtgctccaatgtttagtgcatttatatttaaaattggtatattctcttgatgaactgacctcattatcattacataattatcttctttgttgattttttgccatttttgccctaaagtctgtttttagcttacctctgcttttttttttttgtaattatttgtctgatttatcttttcctcatctctttattctcagttaagtgtggccttaaagccaaataaggtttttttttttaattcttccagctaccgtatgtattttgattagggaatgtartctttttaaatttaacataattattggtaggtggaggcttagtactgttattctattaaatttttactaatttatagttcttttgtttcttc

SEQ ID NO: 820827 - DNA, 624 bp, Homo sapiens
ttagaatctaccccactactcttcctggctcctaggtaagccacaactgacagtagcaaagtcattgcaaaacttggctcactgaccaaaatggggttactagggcccccaaataataaaaactctgtggtgacacttaacttccagaacttagatagttaaaattgtcataatgagagtagggttgaagtggaagacaaatggcctgacctacacagacttatggggatgtttaaaaacacacagagtttctaagggcaaaatagatgagtagccaacaaacaatactcaacttgtaacattagaaaataattacaggcctggcatagtggctcacacctgtaattccaacactttgggaggctgaggtgggtggatcacgaggtcaggagttcgagactatcctggccaacatggtgaaaccctatctctactaaaaatacaaagatgagctgggtgtggtggtgtgcacctgtagtcccagctactcgggatgctaaggcaggagaatcgcttgaaccctggaggcagaggttgcaatgagccaagatygtgccactgcactccagcctggtgacagagggagacatcatctaaaaaaaaaaaaaaaaaaaaaaaatacac

SEQ ID NO: 820828 - DNA, 516 bp, Homo sapiens
agaaataaaggatgcagacaggactatatttcataagtcagctattgttaatcaaataaaaataggtacgcagaattctaccgggcttaaaactataatttcaataaacaatgcaattattaaatatgttaaggaatagtgaccaggtggtagtgtacttatttcttttgagttgtcactaaaatggatcattagacacatgaccataaagaccttcagagaatatcaaatccaccctcctattttgcagaagagagaactggtagatggactgactctctcaaggacctacaaatagctcatggcaattccaggatgagggtcaatgcctggtatccttttcatgtaaccacattgcctaatttgctgtaacaactactcttcaaagatttgccctgtcataatccagatgcttaatgcataaaaatgtgatcctggaactaatcttttgcatcaacaagcaacatgattgctctttsttaacagagcagacatgttaaaaatcaagcatgtgga

SEQ ID NO: 820829 - DNA, 609 bp, Homo sapiens
tctctctccctttttctttctytttccccctccctatttgctcttctgccttttatgacacagcaagaaggctcttgccagataccagcaccccagcttccataactgtgggccaataaatttctttttattataagttacccagtctgtggtattatgttatagcagcacaaaatgcactataacaaaaattagtactggaaggcttgttgcccagggccacttcaagtctttattccttgcatcccagcacaggacccctcagctccctgccccagtcatgtatcaagcaggtccaggtgtaactcagtccactgcactagaggtcacaagaagtaagatttggtggtatccacatggtgctaattttacaagtgcatagagttcatgagctgtgaaggcatggtacctctacctatattttgaaggttatatctgatagcctgagagcccaggaagaaatctgcacaggggaaaactacctaagagaatctccattagggcaatgcctagtggagtcacaggggtgatgctgcccttgaaaacccagaaccatagagctactcacatgcagcaccaccctgtgagagctgcatgcatgagactcca

SEQ ID NO: 820830 - DNA, 581 bp, Homo sapiens
aagacaagattacagagccttttggataaattaggatttcagctggtgcccccaattsacgtttttttgtttggttgggttttttgttgttgctgttttttgttttgttttgttttagtagagatagggtttcaccatgttagccaggatggtttcgatctcctgacctcatgatctgcccacctatgacttcccaaagtgctgggattacaggcctgagccactgctcccggccttccaattcacgtttggaagaggaaacttgcagatcggagtgactcattcttcaagtgtgttctttaggcagggcctccatctagtggtttgccctggaaattaacccgcagcctttattaaatacacactacttcttttcacaaactttatgaaaatagaaaattagagctccctcatgtagcatggcagaggaaaatttccctcctgaactcatgaattctgtcctttcattgcttgctaagaagtgcagcattcttaacgtctagattttgtcatgccctctccattcatggagttttcatacccagtgtatctctttgcacatagaagaaaactgtgatttc

SEQ ID NO: 820831 - DNA, 611 bp, Homo sapiens
cccaggtactctggaggctgagacaggagaaytgcttgaaccccgaggctgagacaggagaattgcttgaacccaggaagtggaagttgcactgagccgagatcgcgccactgcactccagcctgtacgacagagcgagactccatctcaaaaataaaataaaataaaaatttttaaaaaacatagttgagctcctgcttgcaagtgaggacatacagtatttggttttccatttctgagttacttcatttagaataaaggcctccagcttcattcaagttgctgcaaaagacattattttattctttttatggttgagtagtattccatggtgtgtatataccatattttctttatccattcattagtcgatgggcacttagattggtcccataactttgcaattgtgaattgtgctgtaataagcatacattttcaggtgtcttttttacatgacttttttcctttggggtagatacccagtagtgggattcctggattgaatagtagttctacttttaattctttaagaaatctccatactcttttccataaagattgtcctaatttacattcctacccacagtgaacgcttcccttttcaccacatc

SEQ ID NO: 820832 - DNA, 489 bp, Homo sapiens
tatcattcatttcaaagaatttttaaatttccatcttgatttcattattaaccccaaaatcatttaagagaagattgtttaatttccatgkgtttgtattgttttcagggttccttttggagttaatttccagttttattccactgtgttctgagagggtacttgatataattttgattttcttaaatttattgagaaatgttttgtgaactattatatggtctgtcttggaaaaccttccatgtgttagtaagaatgtgtgttctgcagttattgggtagaatgttctataaatatcaggtccatttgttacagagtgtagtttaagtccattgttgctttgttgactttctgtctcagtgatctgtttagtgctgtcagtggggtatcgaagttccccactattattatgttgctgtctgtcttacttcttaggtctaacagtaattgttttataaatttgggagctccagagttagaggcatatat

SEQ ID NO: 820833 - DNA, 489 bp, Homo sapiens
tatcattcatttcaaagaatttttaaatttccatcttgatttcattattaaccccaaaatcatttaagagaagattgtttaatttccatgggtttgtaytgttttcagggttccttttggagttaatttccagttttattccactgtgttctgagagggtacttgatataattttgattttcttaaatttattgagaaatgttttgtgaactattatatggtctgtcttggaaaaccttccatgtgttagtaagaatgtgtgttctgcagttattgggtagaatgttctataaatatcaggtccatttgttacagagtgtagtttaagtccattgttgctttgttgactttctgtctcagtgatctgtttagtgctgtcagtggggtatcgaagttccccactattattatgttgctgtctgtcttacttcttaggtctaacagtaattgttttataaatttgggagctccagagttagaggcatatat

SEQ ID NO: 820834 - DNA, 489 bp, Homo sapiens
tatcattcatttcaaagaatttttaaatttccatcttgatttcattattaaccccaaaatcatttaagagaagattgtttaatttccatgggtttgtattgttttcagggttccttttggagttaatttccagttttattccactgtgttctgagagggtacttgatataattttgattttcttaaatttattgagaaatgttttgtgaactattatatggtctgtcttggaaaaccttccatgtgttagtaagaatgtgtgttctgcagttattgggtagaatgttctataaatatcaggtccatttgttacagagtgtagtttaagtccattgttgctttgttgactttctgtctcagtgatctgtttagtgctgtcagtggggtatcraagttccccactattattatgttgctgtctgtcttacttcttaggtctaacagtaattgttttataaatttgggagctccagagttagaggcatatat

SEQ ID NO: 820835 - DNA, 589 bp, Homo sapiens
ctatcattgcaatgatttttaaggatttctaacattttaaaaattatccatcatttgtatttgattgtaaattatttccacagacaacgccccgcattattattgtcctctgaaatgtcttaccccgtctgagtagctaccttgagacagtgtggggtatattttatacacaaaatcctgatttgaaagctagaaagaacctacagaaccatcacattcattttatgggtaatattattgtggcaaagagaaagacagagacttgtgcaacctcacacaggactttggtgggaaacctattacataaagtaacagagttagcaggccttgactattttggaaatgcacttaggatctgtgtgctggctgagggtaatgcacaagcatcatgtggcagaaacataacaactggtgcacatctcgcagtctgggccaccattgtggtagccagcaaacagcgcacacagggctgagcttcagaaggtgaccctgaacaaatgcaatttgtggaagaaataagccargaaaggaaacatatgaagtttgagggcacaaacatcaaaacaaacaagcaattaaaaattaaaat

SEQ ID NO: 820836 - DNA, 563 bp, Homo sapiens
caaacaaatcctatgctccagacctccttttccctcaatgacctaacagtagggcaggagtatcttcctgttcccccagaggtggattgccatggagctcatgaagcttaaggtgtaggccccttacttggacagtaatgcattgacaaagtcataagagtttgtaaagtttgcaaaagaaaaatatcttaaccacaatcagttgacatccctgtctcttttcatttctactttccctctgttacatctttcttcttgtcagaaggcaatggggtggccgtgggcatttttaagacctggagaaggggaagttaatttaaagatatgtcatttgtgtgagtgagatacagtcacgtggcttgcagtcgcttccatgtattactagctgtctaggaacagaaatggtttcaaggaaatgcctgtcttcctctgtgatgayccaccccacaatattgtgatatgaagatgtaaggcataagtcaaatgagttatgaacatggcagccagctttaggagtgttcagcagcaggaaaaaacaaggtttgaaatgaacaaaatcagaa

SEQ ID NO: 820837 - DNA, 633 bp, Homo sapiens
ttttgtggttaactccacataacttagtgaaatagctggggtaaaaaggaraccaataatgctgaagacaaatcacaagccctggagttttgtgaagtaagtagtctgcctattgaggtgattgtgtactatctatctctcctttcttcacctacttcctttctcttccactccaaacgcctggtcaccatggggcaacttctctagtttgtcctaacctgaatatgacaataagcaactatttttctcttttcaggataaactgcatactatttaaaatgcttaatactcccaaaaagattttacacacggacattgtgatcagctcatttgtctattattccatctggtttgagcaatagaagataaaataatttggaaaagtcaaaataaatgaatgcaagtctatctaatgtcacaaaaatttcaatttggtgaaataaaccctgcacaattttactcagttgataataagcaaaattttgctcatttttaactttactgtaagtatactaagctttgctctctaaataagtggagagacataccatgttcatgaactggaagattcaacaatgtaaaaatgtccattcttccaaaactgatattgaaactggtttcatgcagtttcta

SEQ ID NO: 820838 - DNA, 551 bp, Homo sapiens
ttttttcaagaaaagcaaaactttgattaaccaagccaagcactttccatatcttgcaagatgcatcttcacgtcagatgccattctgaacctttggcagctctgtgctccctcagagcaatggacactattattatagcaccatgtgccaactgtaacacaatctaaatataaccacttgtggcattgttcatccctcatcatgagttgctttttgttgttgttttgtttttgtttttgttttgttttgtttttgagacagagtcttgcactgttacctaggctggagtgcagtggtatgatcatagcttactacagcctcaatcttccaggctcaattgatcctcccacctcagcctcccaaaatgctgcaattaaaggcatgagccaccacatctgtcctgactatgggttctgtgttatcccaagatctctgagcctagatcagtgcctagcataaggtaatttcttaatatatttgaatgaataaccaagctatgctccaaatctgaggtgtaccagggagragattgaattaaaaataagtacaa

SEQ ID NO: 820839 - DNA, 595 bp, Homo sapiens
aaggcccccaggcagcagcgttgtaaaatctcaccaggtgattccaacccacagccaagtttgagagagccagtgatctggaacaggggctgcaaactttttctgtaaaggaccagagaatgacaacttttggcttcatgggcgatagggcctctgtcctgactgctcaactctgccatcatacggcaaaggtagccacagacagtacatgaacaaatgggcatggctgtgttccaggcagagccagcctcatgggcgttcagcctgtgcaagcaaagggcccacacttaaaaggacccctgtgcctagcttagttctctgccgttgctgtcttgacagtcttcataatttttgaacaaagggtctcacgttttcatattgcactgggttccacaaattctgtagccaatcctggttccaataaaactctgtttacgaaaacagacattgggtcacatttgccccgtgggccacagtttgccaaccaatcagtgatctagagccttgtgcccaaagttcagtccactcggagytggtatggagaccagcaaaagcagcagcagcagctggtggcttgttagaaaccctgagtctc

SEQ ID NO: 820840 - DNA, 555 bp, Homo sapiens
tttaaggagatgtcaaggggattttcaaaaggaattaatgcacttcagtatggcttctcctggctgcctgcagcaggtagaaacagcaagactgatctatgacttccctaaagaagtgcaccaagctttctttggcctctagacctttgcatgtgttgttctctagatgataatccagccctccctttgcctggccaattcttgcttctccttcaggtctcagcttacttgttgcctcctctgggaagcctttcctgattcccccgccccacactacctctggctaggtacccctaccctgtgctctcgcaggttcctatgctgaccctgttatgacattcatcacactgcattacaagggttacatcaacagtgtaatagctcattgttacagcaataacaatggtctgttttcttaactgctgccccttcttaaytcccactctgccagggcagggactgtgcctactttgttcactcagcatgtggtatataagaggtagtcaacaaatatttgctgaatagatgatagttgaaaagaatgattttcaacat

SEQ ID NO: 820841 - DNA, 669 bp, Homo sapiens
taaaacatttgaacattgaaatggatcctctttcatcacaaacctgaactcctatatcgaggcatcaactctgctcctcctatagtttatgcttttgtttgtagttttcaaacacactacactgttatttttagtttttactcctacacgtggaggaatacacactttcacctacttttcatctacctccttcagattcagctccagggccatctcctgctagaagcctttcttgctcctttccaactttatccaattcaattagacattcctctttggtgccctagagtatactctatctgattcctttgttttgtttgtttgatagggtctcattcccattgctcaggcaggagtgcagtggagcaaacttggctcaccacagccttgatctctcgggctcaggtgattctaccacctcagcctcctgagtaactgggactagaggttcacgacactatgcctggctaatttttgtattttttgtagagacaggattttgccatgttgcccatgatggtcttaaactcctaggctcaagtgatcctcctgccttggcctcccaaastgctgcttttgcagatgtgagccgttgaacctggccatgactcctacttaagtttttataaactacattaaacaaatttgtttttatgttagtatccccaa

SEQ ID NO: 820842 - DNA, 599 bp, Homo sapiens
aattaccgtcagtatagctgatctggctactaacattactaaacatcttagttgtcaaccccagaggccagtgctgatcacctaatataaacrttgtttttcaaaagaatagccatccatctggtggcaggctcactacattggacccctttcatcatggatgaccagtaatttattcatgcagagaaagatgtatatctgagttgcaaatatacctttttcccggtaacacttctgtttgtttgttttctggtgatataactaaatacctgagactgagtgatttataaagaaaataaatttttattttattgctctggaggctgggaaatccaaggtctagggtctgtgtcttgtgagggctttcttgctggtagggtttctctgcagagttctcttatggcccagagcatcacatggtgatgggggctcatgaaagaaagtcaaactgtccttttataacagatccactcttgtgatgaccaacccactcccacaataatccattaatctattaactcattaatccattaatccacaaaaggatgaatccatttatgaagggtgggccctcatgatgcaatcacctcttaaaggcc

SEQ ID NO: 820843 - DNA, 599 bp, Homo sapiens
aattaccgtcagtatagctgatctggctactaacattactaaacatcttagttgtcaaccccagaggccagtgctgatcacctaatataaacgttgtttttcaaaagaatagccatccatctggtggcaggctcactacattggacccctttcatcatggatgaccagtaatttattcatgcagagaaagatgtatatctgagttgcaaatatacctttttcccggtaacacttctgtttgtttgttttctggtgatataactaaatacctgagactgagtgatttataaagaaaataaatttttattttattgctctggaggctgggaaatccaaggtctagggtctgtgtcttgtgagggctttcttgctggtagggtttctctgcagagttctcttatggcccagagcatcacatggtgatgggggctcatgaaagaaagtcaaactgtccttttataacagatccactcttgtgatgaccaacccactcccacaataatccattaatctattaactcattaatccattaatccacaaaaggatkaatccatttatgaagggtgggccctcatgatgcaatcacctcttaaaggcc

SEQ ID NO: 820844 - DNA, 646 bp, Homo sapiens
aatctgtttcaagtgtagaaattgartgacacaagcaaagagtgggcagaatattaaattagacattatttttcttctgtctcttaagtttgaaatattaaaagtgtcaagtaaaacagatgtcattatctaagaaaatgccaccagtaccatatttccctgtggcaattcagtcctagttttgatgagaggttaatatgaaaataaatgtagcttctttgctttttatctttatgtgcatgccttagaaaaatgacctttacaagcagcacactggaatgtaaatgcaaattgtcttcaaatgtttttgacaagaatagtgcactcagagattgctatgtaaagaacaaatttgctaagtaatttctatttaatagttgctaataattacaactattttcaatagatttggttttcatcactttttatatttttattatagtcgtaaagaattaaacacttaataaaattttacatgaataagaaatgtgttaagacattgcaaaataaaaataaaataataaaactaaaattaagattaaaatctagccttaattactaatttggataaacctactcagtttattccatataaagctgactaaatgttaaagaaacaaaatcaatgaatatactcaagtaatac

SEQ ID NO: 820845 - DNA, 664 bp, Homo sapiens
tcctgtattaacctgactttttccagagacagcaacaggcacagcccagacccagggaaagtcttgataaactatctctgatatgccctgaagactctcccagcactycctaaacatagggaggagaaaaactaattttcctctctcttatggtatgaggttagagattcatgttctctctaactagtaacttcatgtattctgttttatctaagcagtggagtgaaggtcataagccatctgagcaggcctgaactacagccacctgggggccatagtgaaggtcatggccttcaaattacagttacctaaggcttccaagctttcattgaactaatctctgttttacctgctactattttcaatatttttaatcgttatgcctagttattcttcaaatcttgaagacattaagatgatatcttgttgggatgaatgatctttaagttttctgtgcagcttttcggacataagctgtgctaggcactagggcaaacctagataacagccatctgggctacatagcaacggtcatgtgtaatcctgagttatgcacctgtcacaatttgattaactgtctttgttctgcctttgtatcctcactttcgtgccactgtaaacttgtttcaggctagcccaccccctttttgaagtgtgtataaaa

SEQ ID NO: 820846 - DNA, 664 bp, Homo sapiens
tcctgtattaacctgactttttccagagacagcaacaggcacagcccagacccagggaaagtcttgataaactatctctgatatgccctgaagactctcccagcactccctaaacatagggaggagaaaaactaattttcctctctcttatggtatgaggttagagattcatgttctctctaactagtaacttcatgtattctgttttatctaagcagtggagtgaaggtcataagccatctgagcaggcctgaactacagccacctgggggccatagtgaaggtcatggccttcaaattacagttacctaaggcttccaagctttcattgaactaatctctgttttacctgctactattttcaatatttttaatcgttatgcctagttattcttcaaatcttgaagacattaagatgatatcttgttgggatgaatgatctttaagttttctgtgcagcttttcggacataagctgtgctaggcactagggcaaacctagataacagccatctgggctacatagcaacggtcatgtgtaatcctgagttatgcacctgtcacawtttgattaactgtctttgttctgcctttgtatcctcactttcgtgccactgtaaacttgtttcaggctagcccaccccctttttgaagtgtgtataaaa

SEQ ID NO: 820847 - DNA, 529 bp, Homo sapiens
tattacagtcctaaatgtatatgcacctaactctggagcttccagatttgataaacaataaatactagtcctaagaaaggaataggcagcaacacaataatagtgagagacttcaacrcttttcactgatagcactagacagaccattaaggcagaaagtcaacaaaaaaaacaatggatgtaaactgtattccagaacaatttgaacttaacagatatttacaaaatactctacccaagaatatatgctactacagaatatacattcttcagatcagcacatgaaatgttgtttaagataggccatatgataggccacaaaacgagtctcaatacatttaaaaaaaatcaaaatcatgtcacatatcttctcagatcatagtgaaataaaaccagaaatcaattgcaaaaggaatcatcaaaactacagaaatacatgcaaattaaacaacttgtttctgaaatatttttgatttaacaatagaatcaataaatggtgctgggaaaactagatagccacatgtagaaa

SEQ ID NO: 820848 - DNA, 630 bp, Homo sapiens
ttttgttttggccaatttatcccatttggaacaggtgtatgtacccaatgcttgtacctccattgtatcaagctagcttttgattttacaggcktataggcagaagggacttgccttgtctcagatgagactttggagttccatttgtgggttaatactggaatgagttaagatttgggggactgttggaagggcatgattgtggtttgaaatgtgaggacatgagatttaggaggggccaggtttgaaatgctattgtttggttctgtgccctcacctaaatctcaccttgaattgtaataatccccatgtgtcaatggtgggaccaggtggaggtaattgaatcatggagtggtttcccccagctgttcttgtgaagtgattgaattctcatgagatctgatggttttataaggggcttccgccttcactgggcgctaattctctctcttgccacggtggagtggcatagtggagtgccttccaccatgattgtaagcttcctgaggccttccagccgtgcagaactgtgagtcaattaaatcttttttcttcataaattacccagtctcaagcatttcttcatagcagtgtgagaatgaactaacacactgcctttctttccttctg

SEQ ID NO: 820849 - DNA, 535 bp, Homo sapiens
ttttctacatgtggctatctagttttcccagcaccatttattgattctattgttaaatcaaaaatatttcagaaacaagttgtttaatttgcatgtatttctgtagttttgatgattccttttgcaattgatttctggttttatttcactatgatctgagaagatatgtgacatgattttgattttttttaaatgtattgagactcgttttgtggcctatcatatggcctatcttaaacaacatttcatgtgctgatctgaagaatgtatattctgtagtagcatatattcttgggtagagtattttgtaaatatctgttaagttcaaattgttctggaatacagtttacatccattgttttttttgttgactttctgccttaatggtctgtctagtgctatcagtgaaaagygttgaagtctctcactattattgtgttgctgcctattcctttcttaggactagtatttattgtttatcaaatctggaagctccagagttaggtgcatatacatttaggactgtaatatattc

SEQ ID NO: 820850 - DNA, 632 bp, Homo sapiens
acagaaggaaagaaaggcagtgtgttagttcattctcacactgctatgaagaaatgcttgagactgggtaatttatgaagaaaaaagatttaattgactcacagttctgcacggctggaaggcctcaggaagcttacaatcatggtggaaggcactccactatgccactccaccgtggcaagagagagaattagcgcccagtgaaggcggaagccccttataaaaccatcagatctcatgagaattcaatcacttcacaagaacagctgggggaaaccactccatgattcaattacctccacctggtcccaccattgacacatggggattattacaattcaaggtgagatttaggtgagggcacagaaccaaacaatagcatttcaaacctggcccctcctaaatctcatgtcctcacatttcaaaccacaatcatgcccttccaacagtcccccaaatcttaactcattccagtattaacccacaaatggaactccaaagtctcatctgagacaaggcaagtcccttctgcctatamgcctgtaaaatcaaaagctagcttgatacaatggaggtacaagcattgggtacatacacctgttccaaatgggataaattggccaaaacaaaag

SEQ ID NO: 820851 - DNA, 613 bp, Homo sapiens
aaaaagaaataatttatgattctgaaggattaaaagataaaagattaagtatgatcaacaatctaaatagtctatatacaacttgactacagtgatttaagtattcagacaaatactattatcaggaaatgatctcaggtttaggcaaataggtatatcttaacttacgggaattaggaaacccagtagctgttctcttgagggtaaccagaaaggctgttccacatttacctgtacttaccttacaaggctaaacccttgaattttctagaagttcctagaatatggttctctataaacaaagaatgtcaataacattatagtatcaaatatctttggaagtttatttttagcatgctgtgcatttatattccaggagaggactctaaggagcatctatagaggtgctaactgtgtggcctatataggctactgtgtggcctaacatttattgaaacctcagttacagaacaagaaggcatagacacattttcccctaattgtaactgctatgtacaactaaaaaccccagaagtaggggagaaggaaacaaaagggtggtaggcagaatgcaaactgatttgggatccragcactgcagaaaatggtcatc

SEQ ID NO: 820852 - DNA, 613 bp, Homo sapiens
atacccatgaaaataccaaacactagttggctgtttatttattttactaaacaaactaattctaaattttatgtgaaaaaacaactaagaaaattagagaaatttttgaaaaataatgtatacatcctaattgtttcatgtaataaaacattataaatttctaataattagataagtatagtgttaagacataagctttcagggaggacaatagaagaaaataaaaatcataaataggcccaatcacatatgagaatgtagtaagtgattaacatagcatctcagctcagtaggaaaatatgttatttattatatcagactctgacaaagggacagacatctgagcaagaaaataggattaatataaatctgacaccttacaatgaggtaaattaaaaatgagtcaaagatttaatctaatcaggaaatcctttctaatgatttaagtccagcagcatatacatatatatatttgtgtttgtgtgtatatatatatgtagagagasagagagagaaatagcacattttttaaaagtttgcattaacaaaaatttataggcagattcaaagcataatgataaactgaggacaagacaatactcccaatttctgt

SEQ ID NO: 820853 - DNA, 584 bp, Homo sapiens
atacgataagctagttaacctcaattctaataagaaaacggcctattaaaacagtgcctaaatatccttttttagaaactatgattagaaaatcctaatatgtgtcaaktatgtacctgtggagaaacaggatactctcatacattatcagtacaacctctatagattacaaaagtgcaaatgcatatacgtttaacccagatatcctacttctagaattttttctagatatatccatgtaagtacctaacgataaactgtacagtggtttttatggtcaaccatatgcattagcaaaaagttggagataacataaatgctcagtacatgtacgctagcaaaagttatgtacatatctgtataaaacaaagtggaagctctctgtgtattagtagggaacaatctatcagacatagcaaaaaaaagcaaaagttatagttattatataattcaaaaattatagttagtgaaaaaagtaagagtgcaccacatttttaaaaaaatcaaaagttatagttattatataattcaaaacttatagttagtgaaaaaagtaagagtgcacgacattttaatcactagcc

SEQ ID NO: 820854 - DNA, 632 bp, Homo sapiens
gaataaagaggctttgggagagaattgccctctttaataaactagtggcagttcagcatcatttaaatgtattgtttcaattaatcacagcaattgcaaagtgatccttaagcattgagagaaaattgtgctttcaaacagagtgcctcaagtctgccaaccttgctgagctgttctgcagcattttagaaatgcatatgatagcaggaagcactggagaaaatcatgcttactcatatttgagctggaaattaattttctaagctgtgaagttcttcaacttcttttgcaaagctaggtcacctgttttcttaatctaatcatctaaccttcccctaaagcatagaagtttacttttctttgcattaagttctacccagataagcagtgcaaggaaatatcctacatctttaattctaacgctccataaattgtaaggcaaacaatcattttagtaatagttttccagggggaacatgaagaaagaaatgctatcatrcaacgcacgtggattagtgttttactgaaagtttattgccaaacaattcatgctttgtggtagtttgggtgagccttgtctagaagcagtctagccagagagaaaattctaaaactgccagcgcaagcatagc

SEQ ID NO: 820855 - DNA, 481 bp, Homo sapiens
ccaatcttatccatatttcttattttataatgtaattgttattgaaatttgaatcaaatgtatttatctagtttcaacctctatttttctaaattttatatatatatatatatatakagagagagagagagagagagagagagggagtattttctagggataaaactcagtgctaattatagtgaggaagacaaatgtaataagacatggtgtctgctttcaaatgtaagctctttattaaataaaatagaatcttatgtagacattatcaatatcaataaaagcataagggaaaacactcagaaaatttaaaagatgaagagtctgtctttagctggggaattctagaaggaaagatttaatgaacatttctaattgatcctgtaataactttccctgatactcttggtttattgtccatccagatgttaatctttaagataattctactatggaaaatttaatatgtctaggtaccata

SEQ ID NO: 820856 - DNA, 618 bp, Homo sapiens
gggagctgggggcctcttcctggaatcaaatgcagacaatttcccacgcctgcccacttggctttcaagctccgcttcctctgctctcacattaagtctrtcctatttattatccatttttcctttgtgagaaaaagcactttaagatcttagcaaattagcagaaaaagaaattaacttcttattcattttcattacttgatttccccaaggaagtgaaaaattaatgagaggacaaaaagagaagtgaaagaggctttgaggtgcttataaaagccactttaagtggcttcaagagctgatggaattttttttcatcatgtctaatttcacatcaaaacttattcttttataaaataaaaggaaaaccatatcatatagctcataagcttatgagctatgaatagaattgaatatggagggagattggcaaaatggataaacacatttctaagtgggcaagagaaatcagagatgaaggagatgagtacataagaagaacctggattaactgaaaaggaatgagaaaaagtaataacaatgataataccaataaagaaggccacagggcaccccggagggcaggctctcactgtgtgctgtcaaaccatgctcagc

SEQ ID NO: 820857 - DNA, 560 bp, Homo sapiens
ttttcatcagtggccattcatcattttgcttttaggaasctggaagaaattgtcttctttgagtttcaaatgttctggtaaatcacatcatttcttagcttcctcaatatcaccgtgaattgctgaaacaagtgactctaaagaatccgagaagtttttttctgattagtaatttcctttatgaggtagtcaacgatagtcacattgaggattttcccacagaagtcctagttcactgcagcctcaaactcctgtgcccatgagatcctactacctcagcctcccaaagagtagctaggactaatggcgaaccaccacacctggcttttttttttttttgtacgaacaggatcttgctaggttgcccatgctggtctcaaactcctggcttcaagtgatcctcctcccttggcctttcaaagtgctgggatgacaggtatgagccactgtgcccagccagaagtcctctttaaaggcatgcatggtaggagtttttgtggattttttgggtatttttgcagtatggattccaccctatgttcaccaccatcttatggaca

SEQ ID NO: 820858 - DNA, 611 bp, Homo sapiens
ttcccaggggcaaggacttgggctggctaatgaagagggccagagtctgactttcagaagaccaggtcagaagctgaatgggaaaatcaggccacctagcctggcctggccagcccatcytaatcccccatggcaggtcacagggtaaatttacatgaggctgaattttgagaaaagagcaactttcagggcctttcgcccagctgcccaccactggagtgagtctagcagctaataaaccaaagggcatttttccaggttctagctgggccagtccagggctgaggtcacaatgcccctgtagacacaaatgcatgtgccagggatttagccgcctcccacccatgtgcagcagcaccctttgggaagcaatggcttttcttcctcaattcaatactttaggacctctgcctggacttcttgaaataaagtgcagagatgtcaccgtaagtaccatgtacactgggtctgttttgttttgtcttgtttgagtctctctgtgtcacaggctggagtgcaatggtgcgatctcagctcactgcaacctgcgactccctggttcacacaattctcccgcttcagcctcccaagtagctgggtttacaggcacg

SEQ ID NO: 820859 - DNA, 564 bp, Homo sapiens
tgccatgttggtttgctgtacccatcaactcgtcatttayattaggtatttctcctaatgctatccctccccaaggcccttaccccctgacaggccctggtgtgtgatgttccccaccctgtgtccaagtgttctcattgttcaattcccacctataagtgagaacatgcagtgtttggttttccgtccttgtgatagtttgctgagaatgatggtttccagcttcatccatgtccctgcaaaggacatgaactcatccttttttatggctgcatagtattctctggtgtatatgtgccacattttcttaatcccgtctatcattgatggacgtttgggttgggtccaagtctttgctattgtgaatagtgccgcaataaacatacgtgtgtatgtgtctttatagtggcatgatttataatcctttaggtatatacccagtaatgggatggctgggtcaaatggtatttgtagttctagatccttgaggaattgccacactgtcttccacaatggttgaagtagtttacactcccaccaacagtgtaaaagcattcctatttc

SEQ ID NO: 820860 - DNA, 631 bp, Homo sapiens
ttgatattgctaagaaatatagacggaatgaaaagaaaaatcaggctaaaatcaccatcaaatcaattacactgtgtttaccctcctcagwgtccatcacttgtattatagagacagaagattacatgagccaatcactgaccttatggagagcaggagccaagactggtaccaaaaatccattgtaaatgtaattgacaagctgatttcgaatcaaggggtgagccacctgagagagaggcacataggcatgaaaaaggcaaagagttcaatcttcagttcttaaaataaaacaattctgtgtacatcctgaactcaaaaaggaaatccacattttggccatttattctgtgattaaagaacaaatcagacctcatactgtcatataagcctttcaaatagcttattccagtataaacaccttggttaaaatccgcagaagttgaactttcaaacataatattggtaattttaaactgcgtatttggaaaaaagacaataaatagactgagtatgtataaggattcatacttacacataccatatccagtgtgttaaacatatccagtttgttaaagttaacaaactggaaagtataatttttgccccttactttcttctaaatcacatc

SEQ ID NO: 820861 - DNA, 462 bp, Homo sapiens
tctactatttctctcccactctccaacagattgtcttatttatccttgggagtgtctgcctcacttttgaattccccaaataaaagagattatttgactactccttcacatgggaaaagatgttttacattgctatgattctgaaaatgatgttggttacccttttttttatttttttgagacagagtctcactctgttgcccaggctggagtgcagtggtgcaatctcggctcactgcaacctccacctcctgggctgaagtggtccttctacctcagcctcctgagtagctgggaccacaggcatgggccactatgcccaggtaatttttgtattttttgtagaggcgaggtttcatccaggctggtctcaaactcctgagctcaagcratccacccacctcggcctctcaaagtgctgggattataggcgtgaaccactgtgcccagctggttactctt

SEQ ID NO: 820862 - DNA, 586 bp, Homo sapiens
agaagatctgagttgaggccgtgaagaataagtggctgtttgcctggtgaagacagagggaataacatgcaaaggcaagagggacaagaaacagcagaacacatgcagacagttcaraatggcgggagcatagggaataaaggatacagcaacagaaatgaggctggacagctggctcggggtgcctgcacagagtaccgtgtgagccttgctaaggaaaggacatttgtccttaaatgttaaggtctatgcaagattgtgttatcggccccaatttttcactcctctgtgcagccataccctttgctatgtgactttgtagtttttaccactaaataaatggaatatgttgccctatttcttgactttggggtttgggttttttgtttgtttgtttgtttttttgagacagggtctcgctctgtcacccaggctggagtgcagtggtgtgatcatggttcactgcaacctccgcctcctgggttcaagcaatcctcccacatcagcctccggagtagctgggactacaggtgcacaccaccttccctggctgattattgtattttttgtagagatggggttttgc

SEQ ID NO: 820863 - DNA, 517 bp, Homo sapiens
agaagctttaatttccagttttgaggatgcccgaatgcttgtgttttattggctgttcyctccaaactcatatcagggataaccccaggaaccgcaggtctagtctagtctctcctgatggttcttggaaagaaaggccctgccttcctctctgacctcagctcctgcaagctcccctttgaccccatcgctccagccatgctggcctttctcattcctcctggaacacggagttcattcctctcacttgcttccctctccatgggaggctcattcctagccatcctatggcttgctttttcttatcatgtcggtctccgctcaaatgtcacctcgcaagagaagtcttccttgaccacccactctgaagtaatgccgacctgcttgcccaaccatcagtactttccttcatcctatcatatggatgtcatgattcttgtgggggatgaagacattaaataaagaagcaaatggttgtattatcttacccgtttgcctctttatttactgtcttcat

SEQ ID NO: 820864 - DNA, 539 bp, Homo sapiens
aaccatgcacctttgggaacaaacactaggttactccatttggggtcctcagcaactagctttaaatctaaaatatgtgtgggcggcaagccacccaggtgccaaggcaagagaccgagggcatgagctgttccagtataataaaatatacaaaataagaatagttatactagatatagatcacagatatgattatatatgaatatcattaatcattagtttgtagcaattactctttattccaatattataataatccttgctctacaatcataacctaggaaaaaccaggccatacagagataggagctgaggggacatagtgagaagtgaccagaagacaagagtgagagccttctgttatgcccagacagggccaccagagggctgcttggtctagtggtaacgccagcgtctgggaagatgctcattgccaagcggaccgtggtctagcggtagcatcagtgtcaaggaaaaacacccactacttagcagrccgggaaagggactctccctttcccccggggagtttagagaag

SEQ ID NO: 820865 - DNA, 630 bp, Homo sapiens
ttgttgaacgctttttctacatctattgagatgatcatgtggtttttgtttttaattctgtatgtattgtatcacatttattgacctgcatatattaaaccatccctgcatccctaatatgaaacctacttgatcatggtggatcaacacatctttttgatatgttgttggatttggttagctagtatttttttaaggattttagcatctatgttcattaaggatattggtctgtagttttctttttttggttgtttggttgtagtttcctttcctggttttggtattagggtgatgctggcttcataaaatgaattagggagggctccttctttctctgtcttgtggaatattatcaaaagaattggtaccaactcttctttgaatgtctgatagaattctgctgtgaatccgtctggtcctggacctttttttgttggtaatttcttaattaccgtttcagtgtcactgcttgttattggtctgttcagcgtatctaattcttcctgatttatgtgaggagggttgtgtttttccaagaatttatccatctcttytaggttttctcatttatgtgtgtaaaggtgctcacagtagccttgaatgatcttttgtatttctgtggtgtca

SEQ ID NO: 820866 - DNA, 611 bp, Homo sapiens
agtctgtctcaaaaaaacaaacaaaaacaaaaacttttaattagctgggtgtggtggcgcatgcctggagtcctagctacccaggaggcagaggcaggcrgatcgcttgagcccaggaggtccaggctgcagtgaatcatggtcatgctactgcactgtatcctgggcagactggacccccatctctaaaaataggctgggatcagtcgttcaaggctgtaatcccagcactttggggtgccaaggtgggagaatctcttgagcccaggagttggagagcagcttgggcaagacagggaaaccccgtctctacggaaaaatagagaaattagccagatgtggtggtttgggcctgtggttccacccattgggaggctgagatgggaggatcgtttgagcccaggaggtggaggctgcagtgaaccgagatcacaccactgcactccagcctgggtgacagagcaagaccctgtctcaaaataaagttaaattaaataagtaaaatgagtaaaaaagaaagattgtctctatcccctaagtgttcaaaggcaacatgagccaattgcatgaaggccttgggtttttgcctcatgaagatttgccagagatga

SEQ ID NO: 820867 - DNA, 622 bp, Homo sapiens
ctattccacagtgtccatgccatcatggtaggagatctgcctctggggcttactgccctcctggggcttccccaggaatcaagatcttttcaatccacttaaaagaggtttattgaacttcagatggggctgggtgcgcagttcctgttctttcgcttcctcttccaatgccccacctgtcttccctctctaatgaaaccttatctggagcggaggtgcggagaattgtttctcctcttcctgagtcttttggtctcactcttgaatgcacagcttgtgagtttaaaaaccaagatgttgttgactttttttatctggttctatcctaggagggatggtggccttggattaaaagggattttgagaaagggaaagaagaaactcgttatcatcttaaattattatcctgcctcataaataatgcagcaaaattatctgggcacatgtcaccagtgacctttggcagacagggtggagcagagagctgtgtatgagccaagacctgatgtcattgrggaaggtaaagtgaggctggggaggctgatggtaaagacagcagcataggcaggtggttccccctgtgaaaaaggagaagggtgcagactgtgggtgtctgaacaac

SEQ ID NO: 820868 - DNA, 310 bp, Homo sapiens
ctacaaagtaacaagatattgggccgggatcatttagractatggggagtattctcattcaaatctggaggattttctacaatcatagaatggaagataggattattttgcttgatttatttagacctaatgtggtattgcttctcagccttttggctaagatcaagtgtagtcctaatgtggctcgcatctagaactacaagtgagttacatcctacccaaaccattttttcatttaaaaaaataataataggccaggtacggtggctcacacctgtaatcctagcactttgggaggccgaggcgggca

SEQ ID NO: 820869 - DNA, 646 bp, Homo sapiens
cttgaaggacttgcagaacattgtttgcattggaagcagaaccaagaggtactaagatcccactgctggacctccttggccagatgtgctagccacatctggtccccaaacacaggcactggcactgctagtattttgtactccgttctgtgcctgtctttgtggagtgaatgtcctctccaaaggagatgaggtaaattaaccaaggtacaaatcctcgcagcacagtgggaagtaattctcactgcaacttgttgggggaagagctaacccccttccttctctcccagctcccagtcagggaattgggccagcttctttttaactatataatttttacagtcccctcacaccagctcatgttctctgtttactctacaaccatctttcttgcccagccaacaagaaaagtttaaagtgattgcctgcttatatctaaaatgcttccagactgtagacttctttggtgcttacagatttgcatggaaagagaaggctgaaagttttatgacttgaaaattcagacttrtcactagatctaatgctagtcagctgaggttccagtggcttttaaacacagctaagtggatttcaagctgaaagatataactaaacatttcatcatttattcatctttcaactttaa

SEQ ID NO: 820870 - DNA, 566 bp, Homo sapiens
acaatttgcaacttgctgccccattgctgggggctggtgactacagtgtctttggacagattagaggaaagacattgtagctgaactcccaggcagcccccaggaaaggagcagggagctttctgtgttcccttcagtctgagcatgccaagatgccctggctctggccttgaggtgttagtcagcattagcacttatgatcttggcaaccggaatggccactgctggccggaaactgatcagaactgttcagtctcattaaggagcccctcagatcaccttctcagatgtaacgcttcagaaatcatcaaacggctaaggtagaggctggcttccttgaagtctttccagaggctttggcatatctgccttttggatgagcttaactaaacagagagcttttgaggtccagggtgggtgtgggagctctcagggcactggaagtaacactgtggtggggtgggaggagggtatactgagcttttcttggcccacccgttcactccctccttcctccsttaacctcttcctcatcctcactggtaactctccagcaccaggaggag

SEQ ID NO: 820871 - DNA, 566 bp, Homo sapiens
ttggagttcctagcaggcagacagcactcattatttttctaaacccagagactgggacttagcaggtatttaatattttgagaatggtctattcttgatgcctactctggcaggaccttatgcttatataactcgctaccacacgctatgaagctcaatggttctatttacagaacacttggagaaagccagcttagcctgtggtgtccatctagtggttgatagaggctgtggtctcaattccttttcactgtgagtcattgtgttggtttaaagctcctggctggtgatatttagggctaaggatgttggcttttgagaatgaggctgatcaatagcctagtgtagagagaaaacaggatgtaagcatttggtcttccacagtggctttttaggggctgctgtcttccctccttggtggcaggaattactycatcaacaaatatgggcacagatgcctgcggggagactccgttcttcagaaattgaggaactcattcatgctgaattaattaaagtcatccctcagtatccatgagggattggtttcaggacccccagaaaat

SEQ ID NO: 820872 - DNA, 566 bp, Homo sapiens
ttggagttcctagcaggcagacagcactcattatttttctaaacccagagactgggacttagcaggtatttaatattttgagaatggtctattcttgatgcctactctggcaggaccttatgcttatataactcgctaccacacgctatgaagctcaatggttctatttacagaacacttggagaaagccagcttagcctgtggtgtccatctagtggttgatagaggctgtggtctcaattccttttcactgtgagtcattgtgttggtttaaagctcctggctggtgatatttagggctaaggatgttggcttttgagaatgaggctgatcaatagcctagtgtagagagaaaacaggatgtaagcatttggtcttccacagtggctttttaggggctgctgtcttccctccttggtggcaggaattactccatcaacaaatatgggcacagatgcctgckgggagactccgttcttcagaaattgaggaactcattcatgctgaattaattaaagtcatccctcagtatccatgagggattggtttcaggacccccagaaaat

SEQ ID NO: 820873 - DNA, 621 bp, Homo sapiens
gttgccacctttgaaagacaatgaacgatggccaacacataagatagtgtgtatatgctgccctgggtgggaagcagtggatgcttcctgctgatcttggccctgagctctttctactttgctttaarttctaagtggcctatggacttttcttcattccttcttggttctgcaacatgtgtgtgcccttagagctgtgtaaaaataggcccagggcccagggaagaggcaactcagctgcccaaggatctcagacactccccaggcatgtggccggctttctggcagctgttgggagggctcaaggtcactgggcctggaaatctgatcccactgcagatggccttttcctggcccaggaggctctggagagaatgtagccagagaggtacctggcgccagggctcttcgaggccaattcaaggagctgcctttcacaaggggccacctgcccctgtttcagctttcatgttgccatcagcaggtcaactcaggccctttccagaaatgttccatctcctccctttttgctaactctcagctaaacctaactggttctgctgtagctgcagatgaaaactaaggagaacacggcttggtgaggtggagactatttttatg

SEQ ID NO: 820874 - DNA, 526 bp, Homo sapiens
ttgacatgatgacattttatttttatttttttgagatggagtctcactctgttgcccaggctagartgcagtggcgcaatctcagatcaccgcaacctccacatcctaggttcaagagattctcctgcctcagcctcccaagtagctgggattacaggcatgtgccaccacacctggctaattttttgtatttttagtagagatggggtttcaccacgttgaccagcctggtcttgaactgctgacctcaagggatctgcccacctcggcctcccaaagtgttgggattataggcgtgagccaccgcgcacagccagacatggtgactttttaatctcttattcttttttatacttccctgtgttgattgagcattccaaggatgtgctatctttataatccagaagaaattaggaatttagaatttaggaaaaaatatacgtatgtaaaaaactggaagaaaaccctcaaatggccataccttttggttggaattatagatacatttttttctcctttcttctct

SEQ ID NO: 820875 - DNA, 526 bp, Homo sapiens
ttgacatgatgacattttatttttatttttttgagatggagtctcactctgttgcccaggctagaatgcagtggcgcaatctcagatcacygcaacctccacatcctaggttcaagagattctcctgcctcagcctcccaagtagctgggattacaggcatgtgccaccacacctggctaattttttgtatttttagtagagatggggtttcaccacgttgaccagcctggtcttgaactgctgacctcaagggatctgcccacctcggcctcccaaagtgttgggattataggcgtgagccaccgcgcacagccagacatggtgactttttaatctcttattcttttttatacttccctgtgttgattgagcattccaaggatgtgctatctttataatccagaagaaattaggaatttagaatttaggaaaaaatatacgtatgtaaaaaactggaagaaaaccctcaaatggccataccttttggttggaattatagatacatttttttctcctttcttctct

SEQ ID NO: 820876 - DNA, 638 bp, Homo sapiens
aagcttcataagtgaaagagaagtaagatcctttttagacaagcaaatgctaagggaattagcattataaccagccttataagaggtctttaagggagtcctaaacatggaaatgagtgactgttacgggccaccacaaaaacacacacacttaagtaatagaccattgacactataaagcaactacacaatcaagcctagataacaaccatctaacaatatgatgacaggatcaaatcagcatacatcaatattaaccttgaatgtaaatgggctaaatgccccacttaaaaagtgctgagtagcaagtcagataaagaagcaaggcctaactctatgctgtcttcaagagacccatctcacatgcaatgacacccataaggccaaagtaaagggatggagaaaaatctatcaagcaaatggaaaacaaaccaaaaaaaaagattttatattaaaatatagcaggggttgctattcttattttcaacaaaactgtctttaaaccaacaatgatcaaaaaggacaaagaagggcattacataatgataaagcattcaatttgacaaaaggacttaactatcctaaatatrtattcccaacactggaacacccagatttgtaagacaagttcttataga

SEQ ID NO: 820877 - DNA, 624 bp, Homo sapiens
cagacaatataggtaggcaaaaatagaaattcggcaaaagaaataaaaggtatccaagtcaaaaagaaagaataaaattatctctgttcacagattacatgattgtgtatgtagacaaccctaaagattccacacttcaagaaaactgtcacaaataataaattcagcaaagtattaggataaaaaatcaacacataaaaattagttgcatttcaactcactagcagtgaacaatctgatatagaaattaagaaaatttcatttataataacatcaaaaagaatgaaatactcaggaattaaccaaggagatgaaagacatatactgaaaattatgaaacactgctgaaagaaattaaagaagacataaatagaaagatattccatgttcatggattagaagacttaatattatttaaatgacaatattagttagccaaagcaatctacaagtcaatgtaattcccacaaaattccaataacttatttgttttagataggggcttctctgacccccaaactagggtgtwgcagaatgatctcagctcactgcggcctccacttcctgaactcaagggatcctgccacctcagcatccccagtagctgggaccacagccatgtgg

SEQ ID NO: 820878 - DNA, 563 bp, Homo sapiens
gtgtgtatgtatgtgaccagtgataaaggcattcacccttttcaattagaacactgaatctcagagtttagaaaatgtgctcaaggttatacacttagtaagtgaaagttctcatgactttgtgtatatcatagaaccttcctgagctttagctaacccctctggaaaatgaggaaaataatacctgccaccaggagttgatgaaatattgttcataaggatacctcacctggcacaaaccagcagctcattacacataactgcaataaatttgccccctcgaccacgcaatgtcatcttcatgtgggtgaatgctgaaggagttagagctatgctcctgtccttgtaacttaggatctgctgtagaggtgatggcatgcactattggaatggattatcttcgacacaagcagaagttagaatgtagtatgccactttaattacrctttaattgaactgcaatatacatcaccacttggcataggccctttgaagtccggtatcaccaccctgcctcgtgagaatgtgtgccgttaccactagcataattgttggagcaactg

SEQ ID NO: 820879 - DNA, 753 bp, Homo sapiens
ctttgaagacaaatagaccagtattaaatcccagcgctgtgtgactttggacagcatgaacstcagtgaagtttatctggaataaactttacctgaagttcattagaaacttcaatgtctttatctggaaaatgcagccaataatacttgcctggcaaacttgttttgagaattaaattagttgaccagctgaaagtgcctaggttagtaagctgtcacgtaggaggtgccagatcaatggcagtgattattacttgtgcaaggtacaagaggtggcatcaatttgagattcataaatatgctaggtatgtagtgggaccatcacccttattagaattatagctggaatatcccattgggttaagctgcactctgaatacagggttccttctcagattgagaaaccctttgtgagccttctcttcaccactgtacatgcggaggtaggaacaagtgctggccttccaccactgcttcctctcaccccgtggggagggtggctgagtcatgctgacttgcacccagtgcagcttgcactcgtgtcattacagtgcagaggtctgcaggcgccaccaaagtgagttctggctttttatcctccttgttacaaaggccagaatcacacatagaacagaatgtaaacaaattttccaagcctctatttgttctcaaattggtcaatgtttcctgtcccactgcccccggatccccaccctccactctaaacctcaaagactaaaaatgcaaataagt

SEQ ID NO: 820880 - DNA, 484 bp, Homo sapiens
taattataaagtgtactgtttgtccatgtatgtgtgtttatgccataacaagaactctgcmtatgtagatttatactgattaattaaattaaatggaaaatgctttcattttagatgtacatgtatggttatattattgatgatcaagcttgaataaaatctttaactataacatgaaagattaaactattaaaaacatcttatcttgtaatagataattagatgctctttttttgtggtacttgcggttgcatgttcattttttaagataatttcttaagtaaataagcttgtgtatggcctgttgtcctcctgagcattacctcatatgttacttttattcttataatgctaggtttttttacactccgagaagtaaaaataatttcagttctgtgttaactttaacaggtcatttgaatcatacatttatttatacttgtgtggtcctctttattaagataacagctttgtcaaatgtcag

SEQ ID NO: 820881 - DNA, 484 bp, Homo sapiens
taattataaagtgtactgtttgtccatgtatgtgtgtttatgccataacaagaactctgcctrtgtagatttatactgattaattaaattaaatggaaaatgctttcattttagatgtacatgtatggttatattattgatgatcaagcttgaataaaatctttaactataacatgaaagattaaactattaaaaacatcttatcttgtaatagataattagatgctctttttttgtggtacttgcggttgcatgttcattttttaagataatttcttaagtaaataagcttgtgtatggcctgttgtcctcctgagcattacctcatatgttacttttattcttataatgctaggtttttttacactccgagaagtaaaaataatttcagttctgtgttaactttaacaggtcatttgaatcatacatttatttatacttgtgtggtcctctttattaagataacagctttgtcaaatgtcag

SEQ ID NO: 820882 - DNA, 629 bp, Homo sapiens
aatccctggcaggaagctaacaattcaggaataggcaaaagagacctagcaacaaacagtaggaacaatccctagagaaaattatataatctttgaccttttggtttcttcctatgtatgacttccttttagggaagctatcataatttgtgatctacagccaattggaatccataagtagatacatctgttttgtgtacattgtggaaatgccttgtgaattaattgattattattgttttatgaataaaggtccctaatggtatctttccaaaagctcacctcaaagagcacttgtcaaacagaaatatttcattattaaatattttttctaaaacatcacattatactccgtaaatatgtacaagtattatttgtcaactaaaaatttaaaaaagaaaaataaattttctcaagttggtaaagaattaatgcccagcatgtcaatgactcaagcacattgacagtggactaaatgtcacattaaaaatctactgagctcttgccctatargttagcaattttggttctgctgcacacaaaaacataaaataactaccattttttaatacctacttgatatcaagcacttaactgagacatagtcctactatataccagacacttaa

SEQ ID NO: 820883 - DNA, 559 bp, Homo sapiens
gaactgtgggctcagaaattgggtctatcttctgctctcaccgttaatctttgtttttctttatgtttccataaaaatacccctcatgcccaagactaggagattggttcgacaaaatacggtgtagtgtgcctacgttaggtctttggtgctgattgatatttgttctgatgtatgttccttccctttgcagatccttacctcacaaggcctgaccagtgtcttcaataaacccacttccttgtttgtgaaacatctggggaagtattaaatgggggaaaggaaggaattaacagcccaccaaaatggtgtgaaaattactttaaactcaaaacatcttcacaatcagcagccacagaaagaaacattatctaaacttaggcagagcctcctgaattacagcttctatgaccccctctgagggagtttcccgattgtgagaagactcatcctaggatcagcgagtgaggatttagctgtcccytatcatcacaaggcccaatagaaacttccctactttcccatggagtccaaaccccactccccctctctgttaagt

SEQ ID NO: 820884 - DNA, 598 bp, Homo sapiens
actaaggacccccaaaagatatccctgtcctaattcccagaacctgtgattgtgttaggttacacagcagaggagaatcaagggagaagatggaatgaggttaataatgagctgatcttaaaatacagagattatcctgtactatctgggtatacccagcgttgccacaagaggtcttggaagaagagggaggcagaagaagactgttagagaaagatgtgactgtggaagaagggtcaaagagatacaatgttgctggccttaaagatggaagaaggggtcaggagccagggaatgcaggaagcctctagaagctgaaacaggctaggaaactgattctcccctagagcctcaggaaaggaacacagtctccctgacagcttaattttagcctggtgagatccacattggacttccaacctacaagattgtaagatgactaagttgtgttgttttaagccactaaatttgtggtaatttgttacagcagcaataaaaaactaatstaccgtatcacaaacaaacaacaaaaactcgcttcagctgttgtcctattttcttgctcccttatagaaaaccctttaaataagtcaccaag

SEQ ID NO: 820885 - DNA, 572 bp, Homo sapiens
atcaaaaccacatctgatactaccttactcctgcaagaatggccatgataaaaaaaaataatagtaatagatgttggagtggatgtggtaaaaagagaatatttttacgctgttggttggaatgtaaactagtccaaccactatggaagacagtgagagatttcttaaagaactataagtaaatctacgatttgatccagcaatctcactatggggtatctacccagaggagaagaagtcattatacaaaaaggatacttgcacatgcatgttcgtagcagcactatttgtaattgcaaaaatatggaaccatctgaaatagccatcaatcaacaagtggataaagaaaattatatatatataaattatacataattatatttatattttatatgtctaaatcatacataaattatatataattatattttatatgtataaatcatatatatataaatacacacacacaccatggaatactacytaaccataaaaaagaataaaataatggcatttgcaggaacctggatggaatggcagaccattattctaagtgaagtaactcaggaacg

SEQ ID NO: 820886 - DNA, 538 bp, Homo sapiens
ccttacccctggctggtggggagcattctccagattttcaagagtccccacagaatggctcyggggctcagaagcctgggaggcatccccatcttccagacagagttgcaaatgctgagccagtcatggcttctcaattggaccagaattccttccatgtgtatgttattcacatccccatgtcatgaataaggaaactgagggtcagccaaatgaggtcacttgtgaagtgagcacttagtaaagagcagaagcagagcctctcgttaggcaggtgaggtcacttgtgaaagtcactgagctcaggagagagtagacccttgcctggctcctatgtctgccaagcagatgctgatcttgtgtttcccattgcctctctggtttggagccttgaatcaccacctttgtctcaaatttaatcaccccgttttccttccctcagcaggattccttcagcattaagcaaaactaagatctctggggccagcatggaaccccaaagtcagactagagtactcacatcccgaacttacagcat

SEQ ID NO: 820887 - DNA, 547 bp, Homo sapiens
actacattactgatatggctttcagaaaaatgccatgtagcttggggtgttggggagcccatccwgagaagttcagaggctgcggggccatgtggtgggggtactatggaggcctccaaacaccaaaagaaatgtgagtaagatgcatttccaggtcccttccaattgaagtcttcttggcttgtggagggactggcttccttacttcctgctgacctgtctgctgtgcctggaaaaatgtccaggatggtacagagccacatgcctaaagccatcagtggatatcaggagatccagggcctaaagaagacagggcctgagaagacttgtttcccttcttattctttagcagccagagcttccccctgctcctgctccagtggcagaaggtgaggtgaggtagttgactccaggtcactggcggtgctggctttaatcacagtgcttgctttcattgtttacctagtccagaggtcaggaaactgctctccagaccctgaaatttcctagaactgggttcagagggtgtgggtatctgggggaaagt

SEQ ID NO: 820888 - DNA, 594 bp, Homo sapiens
ctctactaaaaaatacaaaaaaaaaaaaaacaacaaactagccgggcgtggtggcgggtgcctgtaatcccagctacccaggaggctgaggcaggagaatggagtgagcccgggaggcggagcttgcagtgagcygagattgcaccactgcgctccagcctgggcgacagagcctctccgtctaaaaaaaaaaaaaactttccactttcctaacactgcttccattctggcagcgccacaacaaatccacctcaccccaagaggctgcagagaaaactgcctctctgacctgcaggaggactgcctggtgccctacatccccttttttgtagactagggtgaaatcccagctctcccacttcccaacagtgtgaccttattcaagttccactgccttcatgtcctcagtttcctcgtctgggaaagagggcaccgctgccttggctgtggagtggtgtgtccttaactggtccacattcagagtgcatggcacgtggctcaccatgacagcctgcttaagaaaggccttcattccctccagggtgactgttcaagagtcttctcagcttgggaagcagtgttcttgggtggctc

SEQ ID NO: 820889 - DNA, 597 bp, Homo sapiens
tcaaaccagtaacctatgacaaatataggacatcatggccaagtgacatttatgcagaattacaagttcatacttcagtgtgtaactttgaaatgcacaatggaataattaaatcaggaagacatagttgagtcagttcaatacatttgaaacattaattcacaaatttcatcacctatttattttatttaaaaatcccagcaaatttgaaatagaggggaattttctccatgtgataagttacatcaatgaagaaaattaacctaatataatgtgtgagacgtggaaatcatttctccctgtgattgcgaacaaggcaaagatatcagctctcatcattctcttcaattttagatagaatatttagcaaatgcggcaaacaaaagagaaaacaggcagaatgttgcaaagaaaacagtaggacttccttatttaccaaagacatgaattgatacgaaaacatttaaatgaatgtatttttagacccatggaactaatgaatgtgattagcatggttttacatttaagrgtaatgtacacattcatttttatttctatatttttagcaacagttcattggaacatagatgaatcagt

SEQ ID NO: 820890 - DNA, 607 bp, Homo sapiens
aacattgattagagattcagtagtaagttgccagttctgcataagttgattgatagactcaatgtggtcccagtagaaacctcatcaggattttgtagaaattgagaarctgtttctaatatttatatggaaatcttgactttaagaagaacaaagctggactatagttacaactataaatgtacaataattaagatagtgtactgtttgacacaagcatcaacaaatagactagaatagacagcccagaaacagacacacacacatacagttacctaacttacaaaaatgcaccaccctagttcagtggaggaaaaatggtctttcctacatagtgctgtctcaagtggatatctattctaccaggaatagatagaatgtttattaataaaactattagaaaaaaatggaaaaatatcttcatgatttcaaaatcatgaaaaatctcttcatggtttcaaaatcatgaaaaatatcttatgattttgggatgggcaaaaatttcttaaacatgacacaaaaagcactaattttgaaagaaaatatgaataaataagactttctcaaaattaggaaattttgttcatcaaaattcaacattaggagc

SEQ ID NO: 820891 - DNA, 591 bp, Homo sapiens
agatgctatcatggattttaggtaagggagtgacactcagttttgcattctgggaggaacattttgacagcattgtgaaggaaaygtaataggactagatgcgatgtaggggccagttgggatgttatgcagtgatccaggtgagatgtaataagtcctgatttaagtctgaagtgatagaaatggagaggaggagacctaattgtgaggtattaaagagaatggatgaatagaccttggtaatttattgagtatgactgagaaaaaggtctctgaatggcccttgattttctgagttggatgactatgtagatatattatccatcaggatagagcagataggaaaaaggaatacatttaagaaatgtattcttaaatgatgaattaggttatgatatgttgaatttggttgatgcctagacagaattagtcaacagatggttggatatgtgtttggaattaaggagagaggtttgggttaaagatacacatttgtgagttagcagtataggtaatattaaatagttggagttgttagttgagatcaatgaatctcaaccagaggtgattttgatgtgtagaagacattta

SEQ ID NO: 820892 - DNA, 574 bp, Homo sapiens
agaaatttcaaagcagggaatacattattcttacaatagcagtcaccgatagtttggccagtcaaactgatctcaataattgctccagaatttattcatcttatagacaataataattccctggcattatgcaakatgtcctgttacagagctcccactggactctggttttgaagaagtgatgctttctatgttaacactggtacatattacgggggactccctgcctttgagctacttcttgtactaaacaatgtgaacttcctcaagttcctgaagggaaaactccaatcaagtggtttagggacttcgctaggatcaaagaaagagtatgaatctggtataacatgggacagagtaacctcttagttttatattccagtaaccaaatggcaatttctccttttttaaaaaagtttttaagaacacaggttggttggtcagtacctcatgtttctccattattttcaatggttagaaacacattctggtcagcgttactaaaattcacacacaaaacagaaacagaaaggttacttgaaatacaagattaagaattatttttagcctttga

SEQ ID NO: 820893 - DNA, 483 bp, Homo sapiens
aatatgtgaaagaagctgtgtattttataacgcttaggawccaggaacattttacatcatatgactaaaacagtgttgcattaattatattattttcttgcataatgtataatattgatatccttttgtttaataataaaactgcaatgcaaaaatggcaaattaattctcatggccctaatggccataacacttacaaatggcagaatagtgacttgaagttagaacagctcatttcaagttttattttacttttaaaacagtaaaaagttttctatctacagtgatgttgattgttatttccttaagccctacacacaataaaactttacaattcaaagggaattttatttaaaagttaatttaattttacttgcaaagtgatttggacatttagaaagagaacttgaggcgaataaacttgagtatcatgtcagactgggggtctttaattgctttcattctacacaaaggaacctgaaa

SEQ ID NO: 820894 - DNA, 560 bp, Homo sapiens
catctcactagggagtgccagacagtgggcgcatgtcagtgggtgcgcrcaccgtgcgcgagccgaagcagggcgacgcattgactcactcaggaagcacaaggggccagggagttccctttcctagtcaaagaaaggggtgacagacagcaccaggagaattgggtcactcccacccgaatactgcgcttttcccacaggcttaaaaaacagcgcaccacgagattatatcccacaaatggctcggatggtcctacacccagggagtctcgctgattgctagcacagcagtctgagatcaaactgcaaggcagcagcgaggctgggggaggggcgcccaccattgcccaggcttgattaggtaaacaaagcagccaggaagcacgaactggggggagcccaccacagctcaaggaggcctgcctgcctatgtaggctccacctctaagggcagggcacagataaacaaaaagacagcagtaacctctgcagacttaaatgtccccctctgacagctttaaagagagcagtggttctcccagcacacagctggagatctg

SEQ ID NO: 820895 - DNA, 560 bp, Homo sapiens
catctcactagggagtgccagacagtgggcgcatgtcagtgggtgcgcacaccgtgcgygagccgaagcagggcgacgcattgactcactcaggaagcacaaggggccagggagttccctttcctagtcaaagaaaggggtgacagacagcaccaggagaattgggtcactcccacccgaatactgcgcttttcccacaggcttaaaaaacagcgcaccacgagattatatcccacaaatggctcggatggtcctacacccagggagtctcgctgattgctagcacagcagtctgagatcaaactgcaaggcagcagcgaggctgggggaggggcgcccaccattgcccaggcttgattaggtaaacaaagcagccaggaagcacgaactggggggagcccaccacagctcaaggaggcctgcctgcctatgtaggctccacctctaagggcagggcacagataaacaaaaagacagcagtaacctctgcagacttaaatgtccccctctgacagctttaaagagagcagtggttctcccagcacacagctggagatctg

SEQ ID NO: 820896 - DNA, 613 bp, Homo sapiens
ttgaaaattaagaatacaaaaagatattttcaggacatcaactagaaaaaatggtacctggacaacatgaagaatcttcacatgtgcagatttagtaatcaaaatatgtatgtgttctatgagttaaatcttcattgaaaaattactataactcacctgacccatgaataaacatatcttataaacaaattatttattataacaggtaacccaggaattatattttcccggcaccttacatgacctaacagtggccctgccactacaaattgcaataattattctctggattcctcttggatttggccaataaagtggtccagtgatccatcacataatctgaaggaggcctaaaaaaaaagctagtttattaattaccatctctgctgtgccatcgagataaattcctctgccaaaggtcataatctgcttcttttgttaagacctcttatatgtacaaccgtaaatttcatttgttctgctaaccactccttcctcttgacttktcaatcatttttcttttctttttttttttgtttaggagaaaacgcatgcaaatttatcaatgcatgtcgtggaaaatcacagagtgattatccaattactcagtgtg

SEQ ID NO: 820897 - DNA, 543 bp, Homo sapiens
atcttaatttattaatcagctttactgtttatggaaatttgggttatttctagttaattcttattgtgaatagtgctactgagaatattgttgtacataatattcagcaacttttatagtggaattgcacagccataaggtgagatactatcaaaggagagatactaccaaactcttttccaaaataattacatgaatttctacccctaccagcaggatatgacagtaccattcttccacatccttgctaactcttgctattatctttttttttaattcagcctcatttgtctgcttatagtgacatctcattgtaattttagcttgcattccaaaagactaataaaggtgagggatttttaggatgtttattgaaaatttgaaagccttcttttgtgaagtttatatttatgacttttgcccaattttctattcagttgtctcattttcttattgatttatgaaagtttattgtatatattctgagtattgcaggtttcyttttatactccatggcttgtcatttcatattctacttggcat

SEQ ID NO: 820898 - DNA, 447 bp, Homo sapiens
gtgaacctatattttaatctctaggctagaaagatctgaggatatatgaatcacatgtgtaaacaagccagtaagtcttcatacaatctattacgtactgcaaaaggtataaggtgatttwaaaaaaggaagaccaaaaccattctgtgcttgggaaagggagagaaattttggcaacttcacagaataattggtgtttgagttgagccaggaaaactgagtatatagttatcagagagtgacaggatttttggatatttcgggcaaacatacaaaggcaaaggagaacatggtgtgttccaggactagctgttatttggggaggctaaagcatagtggatatatggagatgaaaagacaagaaataagtttggaaaggtataacttggatttgtttatttgttcattgcaaaactcctccaatttgtatgcaataataaaactttg

SEQ ID NO: 820899 - DNA, 490 bp, Homo sapiens
tactacaggcgcacaccaccacacccagctaattttttgtgttttagtagagacagggtttcaccatgttggccacgatggcctcaatctcctgacctcatggtccgccggcttctgcgtcccaaagtgctgggattacagacgtgagccgccacacccggcatctattatttttgttttactttttattaatagccattctggctggtataagatggtatctcattgcggttttcatttgcatctctctgataattagtgatgctgaacatttttacatggttgctggctgcttgtatgttttcttttgagaagtgtctgttcatatcctttgcttactttttggttttgttgcatttgcttttgagaacttagtcrtattttttttgcctaggccaatgtctagagagtgtttcttaggttttcttctaggatttttatagtttgaggtcttatatttaagtatgtaatccatcttgagttaattttt

SEQ ID NO: 820900 - DNA, 385 bp, Homo sapiens
ttgacagttctgcagggctggggaggcctccggaaacttacagtcatggtggaaggggaaggaaacatgtccttcttcacattacagcagcaaggaaaagtgctgggcaaaaggagggaaaagccccttataaaaccatcagatcttgtgagaacttactgacttcatgagaacagcatgagggtaactgcccccgtgattaaattatcctccactggttccctcctaagacatgtggagattatgggagctacaatttaagatgatatttgggtggggacacagtcaaaccatatcacctattgttactggtggcaagtctgaacrgggtccttggtcctcgattcttgtcctgttggaagaaagaatttggccaagaagaggt

SEQ ID NO: 820901 - DNA, 503 bp, Homo sapiens
tatgtgaagatatttcctttctcaccataggcctcaaaatgctcacaaatatccctttacagattctacacaaagacggtttccaaactgctcaatcaaaagaaactttcaactctgtgagatgaatgtacacaacacaaataattttctgagaaatcttcttcctagttttttggtgaatatattccctttttcaccataggcctcaaggggcccctaaatatccctttgaagattctacacaaagactgtttccaaactgcccaatcaaaagaaaatctcaagtctgtgggtagaatgcacgtatcacaaagaagtttctctgaaagctactgtctactttttatgtgaagatattccctttttcaaagttgtcattaaagggatcctgaacatccctctgcagattctacaaaaagactrtttccaaactgctgaatcaatagaaaggctcaactctgtgagatgtatgcacacatcataaatatttttctcagaaagct

SEQ ID NO: 820902 - DNA, 561 bp, Homo sapiens
tgtctaaagaaaggttgaattctgagagttgaatactcacaacacaaagaagttactgagaattcttctgtctatcattatatgcagaaataccgtttccaaagaagggcctttagaggtccaaatatccacttgcagagtttacaaacagagtgtttccaaactgctcttttaaaagaaaggttaaactctgtgaattgaatgcacaaatcacaaagtagtttctgcgaatgattttgtctatttttaatacgaagatatttccttttttaccattgtcctcgaagcgcttgaaatctgcagtagcaaattccacaaaaagcgtgtttcaaatccgctctctctaaatcaagtttcaactctgtgacttgaatacacacaacacaaagaagttactgagaattcttctgtctagcattatatggagaaatcccgtttccaacaaagggamctaagacgtccaaatatccacttgcagactttacaaagtgagtgtttccatactgctctattaaaagaaaggttgaactctgtgagttgaacgcaaacatcacaaagtag

SEQ ID NO: 820903 - DNA, 561 bp, Homo sapiens
tgtctaaagaaaggttgaattctgagagttgaatactcacaacacaaagaagttactgagaattcttctgtctatcattatatgcagaaataccgtttccaaagaagggcctttagaggtccaaatatccacttgcagagtttacaaacagagtgtttccaaactgctcttttaaaagaaaggttaaactctgtgaattgaatgcacaaatcacaaagtagtttctgcgaatgattttgtctatttttaatacgaagatatttccttttttaccattgtcctcgaagcgcttgaaatctgcagtagcaaattccacaaaaagcgtgtttcaaatccgctctctctaaatcaagtttcaactctgtgacttgaatacacacaacacaaagaagttactgagaattcttctgtctagcattatatggagaaatcccgtttccaacaaagggaactaagacgtccaaatatccacttgcagactttacaaagtgagtgtttccatactgctcwattaaaagaaaggttgaactctgtgagttgaacgcaaacatcacaaagtag

SEQ ID NO: 820904 - DNA, 625 bp, Homo sapiens
ctggtgtgagatgatatcacattgtggtttttatttgcatttctctgaaggccagtgatgatgagcatttttttcatgtgttttttggatgcataaatgtatttgagaggacaaataaccaaacaccttatgttcacactcataggttggaattaaacaataagaacacttggacacaggaaggggaacatcacactctgggtattgttgtggggtgtggggaggggtgtgtggaaatatacctaatgctaaatgacaagttaatgggtgcagcacaccaacatggcacatgtatacatatgtaacaaacctgcacattgtgcacacatactctaaaacttaaagtaaaataataaaataaaataaagaaagtttctgtctagtttttatatgaagatatttcctttttcaccataggactcaaactgctcagaaatatccctttgcagattctacaaaaatactgtttccaaactgctcaatgaaaagtaaggttcaactcagtaaggtgaacacacatatcacaaagaagtttcacagaaagctcctgtctagtttttmtgtgaagatattccctttttcaccacaggcctcaaagggaacccaaatatccctttgcagattc

SEQ ID NO: 820905 - DNA, 625 bp, Homo sapiens
ctggtgtgagatgatatcacattgtggtttttatttgcatttctctgaaggccagtgatgatgagcatttttttcatgtgttttttggatgcataaatgtatttgagaggacaaataaccaaacaccttatgttcacactcataggttggaattaaacaataagaacacttggacacaggaaggggaacatcacactctgggtattgttgtggggtgtggggaggggtgtgtggaaatatacctaatgctaaatgacaagttaatgggtgcagcacaccaacatggcacatgtatacatatgtaacaaacctgcacattgtgcacacatactctaaaacttaaagtaaaataataaaataaaataaagaaagtttctgtctagtttttatatgaagatatttcctttttcaccataggactcaaactgctcagaaatatccctttgcagattctacaaaaatactgtttccaaactgctcaatgaaaagtaaggttcaactcagtaaggtgaacacacatatcacaaagaagtttcacagaaagctcctgtctagtttttatrtgaagatattccctttttcaccacaggcctcaaagggaacccaaatatccctttgcagattc

SEQ ID NO: 820906 - DNA, 625 bp, Homo sapiens
ctggtgtgagatgatatcacattgtggtttttatttgcatttctctgaaggccagtgatgatgagcatttttttcatgtgttttttggatgcataaatgtatttgagaggacaaataaccaaacaccttatgttcacactcataggttggaattaaacaataagaacacttggacacaggaaggggaacatcacactctgggtattgttgtggggtgtggggaggggtgtgtggaaatatacctaatgctaaatgacaagttaatgggtgcagcacaccaacatggcacatgtatacatatgtaacaaacctgcacattgtgcacacatactctaaaacttaaagtaaaataataaaataaaataaagaaagtttctgtctagtttttatatgaagatatttcctttttcaccataggactcaaactgctcagaaatatccctttgcagattctacaaaaatactgtttccaaactgctcaatgaaaagtaaggttcaactcagtaaggtgaacacacatatcacaaagaagtttcacagaaagctcctgtctagtttttatgtgaagatattccctttttcaccayaggcctcaaagggaacccaaatatccctttgcagattc

SEQ ID NO: 820907 - DNA, 545 bp, Homo sapiens
aagtggtcctttagcatcctggaagtttgaaagcttaaaaacttygcatattagcgaattattcggttgagtgtaactcatgtacattaggtaggttaaaattggattaagttaatttgttaaagattttgcaaaataaatatttcaccaacccagaggacaatggatggtaggcacagtggaaatctataataggccaaatctaacatattgattctataatctgtccaataaaatgagtgcctcagtcactgttcagttccaaggataagttccacgtggggattatttttctttaacaagattttacttactggtaaggctgttgcttgtgacagggaaaggcttccacacagtgggaaatcatacaaatcataaccaagacaaatttgtttccttgagatggtggtagctggataaagcccatctgccttatctcagaagttcataaaggcaaaggataaatttcccatagaactatgaatagtttttctagggctgtgtttgggatagacttgccatgtgtgataaaatgtgaagtgtga

SEQ ID NO: 820908 - DNA, 638 bp, Homo sapiens
tagaggtgagagatatgttaaagtaagtctggtgaaagattttaattatgtcatttcaacagttccttaggaactaaaaaatacaacatatgcaatccttgtgtttgttactacttttcagtctgaccaaatgagctttttttgctgttaaaaagaaaaaaaatgtggcacatacacacaatggaatactatgcagccataaaaaatgatgagttcatgtcctttgtagggacatggatgaaactggaaaccatcattctcagcaaactatcgcaaggacaaaaaaccaaacactgcatgttctcactcatgggtgggaattgaacaatgagaacacatggacacaggaagggggacatcacacactggggactgtcctcgggtgggggcagtggagagggatagccttaggagatatacctaatgctaaatgacacgttaatgggtgcagcacaccaacatggcacatgtatacatatgtaacaaacctgcacgttgtgcacatgtaccctaaaacttaaagtataataataataaaatttwaaaaaaagtagaggaaaactttttatggtgttttgttaaacgaagcactattaacttaatcaaaacaagaacgaggatcaaattaaatctatttt

SEQ ID NO: 820909 - DNA, 585 bp, Homo sapiens
atgtatcattcacctttcatccctgacatcttccaaggtgactgataagtatcaggtgcctcaaaataatggttatactaattgatcagstattcacattcattattccatggctaaaaatatatccatgcctaaatttattacttcatcactgtaagtatattagcaacaatttaagtgtattaaccatccccctttagagttttgattaactatattttatcttagtaatcttgactttttactggacagttcaaaaccttttcagaaacaaatagcctaattatagtctaaatacataatgtaggattttatcatctagattatcattctaacttcctaactgggcaattttattatccagttctcccccagattcatgctatagactagcatttaagtctctctccataaatatgtcatataccatttcagcattgcatcatagtattgttcattatgaataatccattacagcaaggttaataccatcactactataatgcatacaataggagtttataatacaattttaaaaattcagcaataatgcaattaatccgagcaaaatatatagcaatattt

SEQ ID NO: 820910 - DNA, 328 bp, Homo sapiens
tgtaatgcatttcttagatgtaataacaattcaaaacaaccggttgatgttaggctttgtgttggtatgttttgtgttgctataaaggaatacttgagactgagtaattcagaaagcaaaggggtttatttggctcacagttgtacaagctgcacaagcatggtgctggtatctgctcagcttctggtgaggccttcaggaagcttaaaatcatgaattacagagaaaggagaagggggagcaggcatgtcacatggggagaggggagcaagatggaggggaggaggcgccasgctctttttgatctggcatgaactcatagagtgag

SEQ ID NO: 820911 - DNA, 620 bp, Homo sapiens
aatcaggaaaacaaaactgctcctcctcacaattgtcttaattcaactccttcactcattcagtttcttgagaagagaagggaagatgagtagtaactaaatcaactaatccayttcatacacttgtttctcacttctttgagacgtacgtagttctgatgacattgttcactcagtaagagagcagagtggcgtaatagctcccaggactgagaatcagcagctccattatagtctcatctttactgctgagtagctgtgtaagcctggacaagtctctttctttctctagctcctgtttcctcatgtatcaaacatgcatactaacatttatttctcagagatttgtgaggatcaaggaggttttggctgtgtaagccctttgtaaaattcagtattgacatccctgtctatgtatctgaacctgtttggatgttttttatttttgttgtttattttttatttttgctgtttttggtgttttaagacttggaaaaaaacagtgaaggtagtaaactgttgctaatcaccaacaccaactcacaaggatgagttctaccatttctgtcctgagacattctttgtgcagaactggtcatctgataataaagggaggtaat

SEQ ID NO: 820912 - DNA, 590 bp, Homo sapiens
cctgctctgcaaaaaatgttgaaaaaatttataatacattttgaaattaactaattccatgaagccagcattaccccaatagcaaaaccaaataaagatattacaaaaaaggaaaactacagatcaatatctctcataaaaataactacaaaaattctcaaaaaaatattagaaagtcaaatccagctatatataaaatgaattgtacatcatggccaagtagactttactgtagatgtgtgaagctgattcagtattcaaaaatcaatcaatacaatccaccatattatcagttttagaagaaacacattatataatcctatcaatgtgcacagaaaaagtgtttgacaaaaatttaatacccattcataacagctctataacctagtaacagaggggaacctcctcaactttatcaagagcaattacaaaaacctatcacacttaatggatgtttccccaataaaattgggagtgaggcaaggatgttctctctcattagttctactcagcattgtgctggaattcctagatagtgaaataaggcaagaaaaaraaataaaacatatatagattagaaagaaaaaaat

SEQ ID NO: 820913 - DNA, 610 bp, Homo sapiens
aggtgttataccataaaatatcttgaaataaaatgttcagagtcaacaggagctgtgtgggtaatactgagaaaaccaatagccctacaaaaaaaagtatgcatacatgtataaagttcctccaaggaaggggacagggaggtagaggaagactgctactttctatgatgaggccttctgttctaattaattttttttccacatgggtatgtgttacttggagaatgtctttggatgaatcacattaattttcagtttctctatctttgtaatgcagaaaataatgtcttctcacctacctttccagaaacgtaaggaaatgtatacaaaaatgtttcaaaaatgctgaagatgcatttaataggaaatataggtacagcaggacaggctataacaagacctagaggatttgacagggcatcagcccagtgctgtccaatgaaaacataattaaacactttctggtagccacttaaacaatttaaaatgaggcagacaaaagtaattttagtaatctatttggcacaatgtatctaacatattatcatttmaacatgtaaataatatgaaaattgttgagatgttttacagtcttttctttcatgtgacg

SEQ ID NO: 820914 - DNA, 610 bp, Homo sapiens
aggtgttataccataaaatatcttgaaataaaatgttcagagtcaacaggagctgtgtgggtaatactgagaaaaccaatagccctacaaaaaaaagtatgcatacatgtataaagttcctccaaggaaggggacagggaggtagaggaagactgctactttctatgatgaggccttctgttctaattaattttttttccacatgggtatgtgttacttggagaatgtctttggatgaatcacattaattttcagtttctctatctttgtaatgcagaaaataatgtcttctcacctacctttccagaaacgtaaggaaatgtatacaaaaatgtttcaaaaatgctgaagatgcatttaataggaaatataggtacagcaggacaggctataacaagacctagaggatttgacagggcatcagcccagtgctgtccaatgaaaacataattaaacactttctggtagccacttaaacaatttaaaatgaggcagacaaaagtaattttagtaatctatttggcacaatgtatctaacatattatcatttaaacatgyaaataatatgaaaattgttgagatgttttacagtcttttctttcatgtgacg

SEQ ID NO: 820915 - DNA, 524 bp, Homo sapiens
tattgttcagctaatcatattttgttatggacaagttttcttcctggagtctggggctgagtaatacagtccatttattgttggtaaacacacctgatggtccacttcatgtgaggtgctgtgcttactctcctatggatgggacaatcaccataaatgttgaaataaatatcctcggccgggtgtggtggctcacgcttgtaatcccagcactttgggaggctgaggtgggcggatcacgaggtcaggagatcaagaccatcctggctaacatggtgaaaccccgcctctactaaaaatacaaaaaattaggcaggtgtggtgatgggcgcctgtagtcgctgctactcgggaggctgaggcaggagaatggcgtcaacccaggaggcggagcttgcagtgagtcgagatcatgacactgcactccagcctgggggacagagygagactccctctcaaaaaaaaaaaaaaaaaaaaaaaaaaagaaaaagaaagaaatatcctcacacgaaacagtcatattt

SEQ ID NO: 820916 - DNA, 579 bp, Homo sapiens
gtgaaaccctgtctctactaaaaatacaaaaaattagctgggcgtggtggcaggtgcctgtagtcccagctactcgggaggctgaggcaggagaatggcgtgaacccgggaggcggagcttccagtgacccgagatcacgcctctgcactccagcctgggcgacagagcaagacttcgtctcaaaaaaaaaaaaaaaaagattttctagagaagcaaacgactgtccagaatagagtatatttccccgcttaccttgatgccagatatgtttatgtggccaaattctggccatggaataaaacttgaagtatccaacagaagtttctgagagccttctttaggagctaagtacatagttttgtctttttgctctatccatctgttgcctggagtatacatggtgttttggactatgatgaggccacactcgaggagtggatgagtggggaatakaaagacgcccgggtagctgacaacttcgtgaaacggagcttccatgccatgcctgggcctttgtgtgaaggagaacaaaatttctgtcttgtttaaaacactcttgtgttgagtttagatgttac

SEQ ID NO: 820917 - DNA, 602 bp, Homo sapiens
ttatatttaaactcacacttaaaacctgtaatcatcttcactttgtgttcagtatttcttcatactctgttttgccattttatgccatatgctctgatcagcacacatatactcagattgctaagtaccagtcatgactattctaatttatttgaaccaaggggcattgagaaaagaccatgaatgatgctcccaaaccatcacgatccttgtaagaatccttaaggcaataactttcaatgtgaagttgattctaacttgcctagttgttcaataaatattaaatggtaatgattccaaagaaaccatgttgttggtaatctcatcctatttaatattgtatctctgcaatcatgtatgagtaaattcttcaaaaatcaaatttagtattttcataatattgctgaaattataaaccactgtgttattgtgtctttccacttagtttcatttttcaacaatagcacactaaaatgaaatatcattctgaaataactaaaaaaaggtagcaatrattattgtttgttcctttggaaaaaatatttttagaaggtgagataacttaggtttgaagttttcctccgaatgtttacaagagggaa

SEQ ID NO: 820918 - DNA, 595 bp, Homo sapiens
ttaaaaagatacctgcactcatatgtttattgcagcactattcacaaaagcaaagatagagaattaacataagtgtccatcaacagagggctggataaagaagataatatatatatatatatatatatatatataggaatactactcagccataaattaaaatattgataaatttgactagacataaattttaagaacgtccctttatcaaaagaaccatagagatagtgaaaaataaaggcaaaaattgtgataaagtggccgggcgtggtggctcatgtctgtaatcctagcactttgggaggccaagccgggcagattgcctgagctcaagagttcgagatcagcctgggcaacatggtgaaaccccgtctctactgaaacacacacacacacacacacacacacacacaattagccaggcgtggcagcgtctgcctgtagtcccagctactcaggaggctgaggcaggagaattgcttgaacttgggaggcrgagcttgcagtgagccgagattgcaccactgtactccactgaatgccagcctgagtgacagagtgagactccatctctaaaaaaaaaaaaaaaaaggtg

SEQ ID NO: 820919 - DNA, 489 bp, Homo sapiens
gatccaatcctgcccaagagtttccagccttcccttccctagctcagatgtaccagatatgcccagccaccccagcaatcacataatccaaaggttttcagtgtgtgtgtgtgtgtgtgtgtgtgtgtrtgcatcttgtcggttctgtttctctggtagaaagtgagtaaggcacacttaagattaatattcatccctgttgggtgcagtggcacacacctgtaatcctagcattttgggaggccgaggtgggtggatcgcctgagctctgggatttgagaccagcctgggcaacatggtgagactccatctctactaaaaatacagactaaaaattagcccagcatggtggtgcatgtgtgtaatcccagctacttgggaggctgagatatgagaatcgcatgaacccaggaggtggacgttgcagtgagctgagatggcaccactgcactacagcctgggtgacagagcgggactacagcctgggtg

SEQ ID NO: 820920 - DNA, 555 bp, Homo sapiens
ttatggcactctgccacgtatgctgaagatgtgttcatgtgtttctcccactcaactgtgggcttctggtcagtctggagtgtaaytggcagaataatgcccctctccccttacccacccccacgcacaaagatgtccacagcttaatccctggaacctgtcaatacgttttgttacatggcaaaaaggaattaagctagcagctggacttaaggtcactaaccaactgactttaaaacagggagatgatctggattattggcgtgagcccaatgtaatcacatggatccttcaaagtggaacagaagcagagagtcagagggaaatgtgactacagaaggtcagggtgacacagtgggaaggatttggctcaatgttgctggctttgagaatggaggaaggctgggcgtggtggctcacacctgtaatcccagcactttgggaggccaaggcaggcagatcacctgagatcaggagttggagacaaacctgggcaacgcggtgaaactccatctctactaaaaatacaaaacttagctaggtgtggtggcacat

SEQ ID NO: 820921 - DNA, 555 bp, Homo sapiens
acctatgcagcagcccaggacccagtgagccaagaaaggaaaggcaggccaggcctcctctggcctggggctgcactggggatagtgacagcagccctctggcccccacttgccttcaagagtccaaagggakctaaggaaccgacaacacccagatcatagccttggacaattctgccccaagacctccttaagagtcgtctttcacacttaacactctctactaaagcacctcaaccccatttccccaagaacaagctggagctcttaaaggcctggatctcacacccagctgaaacaccagaatatccacctccacccaaatccctttatttacctctaattcaatagaccagtgggcctagtccagtgcccagggccttcccaccacacagacagcaaaatgagcccctggaaaagggccacctcatctgcccccatcctctagctagctgtagggagctgggatctgtccagacactccaggtctccatggccacaagcccaaagttgcatagggaggtcatgagaaaagaccttagaagcagtctgctc

SEQ ID NO: 820922 - DNA, 562 bp, Homo sapiens
tgagtattttaacaaacaaaatatttttaaaaagaaaaatttgagggctgaagaatacaataactgaactaaaaacttaactaaagggrctcaacagcagccttgatcaagtacaagaaagaatcagtaaactcaaagacaggacatttgaaattatacattccacaagagcaaaaatgtttttaaaagactgaagaaaacataagaaacttatgagacactatcaagcaggccaatttacatattactaaagttagagaaagagaagagagagaaaagcagtaagcttatttaaagaactaatctgaagagaaaaatggacatccagatttatgaagctcaaagaatcccaagtaggttgaatgtaaagagatctacaccaggacacattataatcaaattgccaaaagtcaaagacaaagaattttgaaatcaaaaagagaaaagcaactcactacatacaaaggagactcataaaactgtaaaaggatttttcaacagaaactttataggccaggagagaatgggatgatatatgcaaagtactgaaagagaaaaactg

SEQ ID NO: 820923 - DNA, 610 bp, Homo sapiens
tatattattttattttattccttataatccttggattgggtttcaacattcccctgaatctcaatcatcttcgttcctattcatagtctaaattctacttctaccatttcagcctggttaaraaccattgctggagaactagtgtgggtgtctgtaggtaagaagacactctggctttttgagttgccagagttcttgctctggttctttctcatctgtgtgggctcatgtcccttcaacctttgaagttgctgtcctttggatggtggggtttttgttttgttttgttttttgcttttatctccattgatgtccttgggggtttgtggcataaggtggggtccatcgactggcttcatttctagtagattttgaggagccaaggctcagctcaacactcccacactgtatactctaactctaaggggctggtatcgggtcactggctttgttctctggtccctcaaagttgggacctgctgtgttaaatgggccaaagtgttcctggtccgatggccacaacactccaacgagtggtgccagccaaagcgcttcatcaggcagtggcaatgtgattaatgcttgtttgcatgtgccagcagcagtggta

SEQ ID NO: 820924 - DNA, 593 bp, Homo sapiens
caatggcagctttccatggaactgttgtccttcccacataaggcatgacacgtcaatgtaaattgcgcctagttgggttctatcattatsaaataactggtagcaacgttgaatgaagctggatccaatctgctcccaaatgggcttgtctcccactctggagcgtcacccggcctcagggagacctgaggggctggcacaatggcagcagcggtggcagcaaaccagtgtggtctgcgtgagctttttttcatatgatggttgaccacatgtatgtcttcttttgaaaagtctattcatgtcctttgcccactttttaatgggttttcttaattgtaaatttaagttccttatagatgttcgatattagacctttgtcagatgcatagcttgcaaatattttctcccattctgtaggttgtgtttcttttcatattctagtgaactactactgtacatatacttaatactaactgaaaaatagaaagcttgtccacattagtgtcagggttaaaaatatttagaatgtttatgacaatgcaaaaagagtttaaaatatcagaataaatatgttaaggcatttttgtatttat

SEQ ID NO: 820925 - DNA, 604 bp, Homo sapiens
agaaacaatattctaattggaatgtcaagcagtgaggcacagggagagaaagacagtagccagaagatggcaacgcaggtgagcaaggtcaaggcagctgaagatccccattaagttagataacttatttatttatttttttatttttttgagacagggtcacccaggctggagtgcagtggcatgaccacagcttactgcaacttctgcctcccaggctccagcaatcctcccaccccagcctcctgagtagctgggactacaggtgcacaccaccacacctggttaatttttgtgggcttttttttgtagagacagggttttgtcatgtcacccaggctggtctcgaactcctgagctcaagccatccacctgcctcagcctcccagggtgctgggattacaggcacgagcaaccatgcccgaccctagagcttcttaattcaagggtactcccactaatttgcatcccttcctcttcctttttgctggggctgaggatgttgctctggtgtggccagtggggctggggagccaaggtgtgscttgagcacagctgggagatgggttacatacaggcaaactgagcaaataggtaaatatac

SEQ ID NO: 820926 - DNA, 610 bp, Homo sapiens
agacgcccccagggaataagggaactctttataacctgtccagtgccgtcatctgggatttttctctgaagtacaagaatttcaggtgatttaagctgcttgatcacacttatttgtgcaaaattgattttcatttaatgttaatgttttcctgcttaattttatataacttcagaatgtaaagagcttcaaggtaaattacagggtgtttaacctggggagttaaatgtgtacacttgaattaataggagcaccggttgttgctagtataaagtaatttgtgtggcagtttgtactgtgctgagtttttaaaataaacccaatattttaaagtatgtgcctattttaaataacttacatctcctttttttcccacaggcaaagtgaaatgtgatttacagaaaccactgagaatacttttatatgtgatatgactatagtggattatttgccaccccttccccccgagaaaaaaattagtgacartaaaagctaacatttattgagcacctactagagcattgctctccgtgcttgccatgtagtaacttatttaatcctcacctcatctctgtgaggtggagagcatcattgttcccattgtatagat

SEQ ID NO: 820927 - DNA, 608 bp, Homo sapiens
tcacacactgaagaaacatcaccaaagttaattatgatttaaaaacttgcatccacagaaactatttctagttacaaagccactcggataacttacagactggactgggggccgggcatggtggcwcacacctataagcccagcagtttgggaggctgaggtgggtggatcatttgaggtcaggagttccagaccagcctgatcaacatggtctctactaaaaatacaaaaattagccaggcatggtggcacatgcctgcaatctcagctactggggaagctgaggcaggagaatctgttgaacttgggaggtggaggttgcaatgagccgagatcacaccattgcactctagcctgggtgacagagcgagactccgtctctaaataaataaataaatagactggattgggtaactgggcctgtcttgtgcccagctcatcacataatgcagtgcattttcatttatacaacatcacagaagttaacatttgtggaattcctaggcattcaaagccaaaataaaaactcttcagcaatcctagacttccagagccaggaccagccctgttagcattagggaaccttagcacctccaggtgctactgac

SEQ ID NO: 820928 - DNA, 632 bp, Homo sapiens
tgggggtggatccttgatcaggcagggaggttcctgctgtccctacagctgggcgaagggtgtgggccatccgtggggcctgcaggagaacaagtggaatctgcagcatgggacrtctctgcctagagcctgtgcaaacaatggcactgtcctcatcattgagggggtcacgcacaaggcattccccagaggcctggcccttccagggcccaagcccagcctgagcctgcctgtgcgtgggaagagggtgatcggagcccagggtgcattcaagaacctgtcaaggtagttagttggtcaatgcgtcatggttaaataacttggctgcagtcacccagccagagtcacccagtaccctggttgggtaggaacttgccaccaggagtgcggtttcagccatgatttgcctttccctgaacttcccacccactgcctccacatccccacaccaagctcccccaactccttctcttcacataccaggccctctcctttgaacttccctctatctagccaagtatgttctcaagcactggtattgtatcagactctcacactttagtatgaagaggtaggccacttctgtaagcctgattcctgactttttgctgaagagactgagtttcagacca

SEQ ID NO: 820929 - DNA, 631 bp, Homo sapiens
ttaaaaataccctaagagtgttttgttaagattaaatgtctttgaatgggttggttggatatatccatagccagtgcctgtgtggaatgacagttttaagatctggataaacatactcccttacytgcttgacagagttaagtagaccagaaattgatcacactgaacagaagtatacaagctttgtgaggtagatttctgttggcattgcctagcatctatttcccttgttctggtaagactctttttcctgaggcctggtcaacacaaacatgcaatttctggctatagttcagctatgagttcatgactcaattacggcaggagtgaaatggtgagtcttttactaggactatagaaagaggattgctcttttgatttaaaaaggtgaacctggatgtttcgtaggccacactagagcctgagaattaaatctggccagagaaaagaggagccaaggtattgagagaaatggatgttgctggtctcagaatcgagttagacctaaatatacgaccacagaactttttacttgcccaaaacaaacaaacaaaaaatccccttttatttaaaatttataccggaatttctcacttttataatcaagagttctgatgcatatgggaaccag

SEQ ID NO: 820930 - DNA, 631 bp, Homo sapiens
ttaaaaataccctaagagtgttttgttaagattaaatgtctttgaatgggttggttggatatatccatagccagtgcctgtgtggaatgacagttttaagatctggataaacatactcccttacttgcttgayagagttaagtagaccagaaattgatcacactgaacagaagtatacaagctttgtgaggtagatttctgttggcattgcctagcatctatttcccttgttctggtaagactctttttcctgaggcctggtcaacacaaacatgcaatttctggctatagttcagctatgagttcatgactcaattacggcaggagtgaaatggtgagtcttttactaggactatagaaagaggattgctcttttgatttaaaaaggtgaacctggatgtttcgtaggccacactagagcctgagaattaaatctggccagagaaaagaggagccaaggtattgagagaaatggatgttgctggtctcagaatcgagttagacctaaatatacgaccacagaactttttacttgcccaaaacaaacaaacaaaaaatccccttttatttaaaatttataccggaatttctcacttttataatcaagagttctgatgcatatgggaaccag

SEQ ID NO: 820931 - DNA, 583 bp, Homo sapiens
acttggcttgattaaactggaaactatttcctgaaaactatcagaaaaatgtaataactagagttatattaaatgtcgggtgagttttagacagtgtgatcaaatgagagcaccgatttcatttaaaaaatatcataacacattcttatctcccttgcaataggctcagataagtcattattttaagaatgttctcatgaaaatacataactccacatctgtaaattttgttggccataatttatatattccttttcatcagcattgcttggaagtatattgtgtttaaacgacttaagaggcctgctgaatagattcagcattcgcgcatattgtaaactggtactctttttggtctatggggcagcattattacatgtcattcttttttctttttctgattgctcatgctcctcttctttcatttatatgcagagacaatgccatttcttcatttacctctgtacaatcrtgctctcagactcttcatttgtagtgaagcatcgttttgaaaataaccttcctcttgttttaatttaatactaatactactaataagaatagctattgttttcagcactga

SEQ ID NO: 820932 - DNA, 475 bp, Homo sapiens
cttagctcagcacagagcaaatagagaaaatgttcccagctcccagcttctccttcagagggaaatagttgatcaatgaattygatgccacattttggaaggctgcccccagaactagtttttgtcttgcttgtcttggggcactgacaaaatcagacacaatctacccatctgggggctactgaaacacagattaaggtttgggctggtagtcaccatagcctctctccagattcgcacagagtgcatgattaaaaataaacccaatttctaggttctccttggggaaagaaataattaaatgaaacatcacatgatccgatattttgggggagggcacctgaggaactcgcttcaatcttacttgtcttacttcagtgcgctgatatgacctggaaaactggatgacatctgggggttataaagaacaagaaagaagcttggagcagtacaaaggtttgaaaagatcccagaa

SEQ ID NO: 820933 - DNA, 492 bp, Homo sapiens
cacagacccaacaccatgtggaagtcaccaagtcttggggcatatgctctctgaagcagtggcctgtgctgtacttgaccccttttattcatggctggagctggagcagctgggatgcagggcaccatgtcctgaggctgcacagagctgtgagaccctgggcctgtcccatgaaaccatttttccctcctagggctccaagcctctgatggaaggggctgccatgaaagtctctgaaatgtcctggaggcatttttcccattatctccgatgttagcatttcacctctctttacttaagcaaatttctgcagtcagcttgaatttctcccagaaaatgggtttttcttttctaccacatgaccagsctgtaaatttttcaaacttgtatgctctgcttcccttttaaatatgtttcagtttcagactgtctttttttgtgtatgcatattggcatatacagttagaagcagccaggtcacatcttgaacaa

SEQ ID NO: 820934 - DNA, 592 bp, Homo sapiens
ttttttcatagttactgggtagtgtcccytgtggtatgttaaattcaaaaggtcacaagtccctatatatttggctgaagtgaacattctctgccacaacatctaaagaataatatttgggggtggcacactaatacatcatgtcaagctgacatttatatcatgaagtttactgttttctggtgatattgttcataatataagcctttgacttgtttgcaatcacaagttggtaggatatagtgtcctgttaagcatctctggtggtggtttgcaatgaatatgtgactgctctacaaattttcagagatgttttgccctttcattttggtaggggtatagagaagatgataaaaggctctattcatcaaatgttgtttctgtgggagtatcttcaaattttcctggattcttttttcaggtggccagatgtgtatatatgtggttcatcattctgaacaatagccctgaagaaaattgcatttgttgtaactgattccttaaaaagttgtattaaaagtgttcttttgaacataataaaacaagattgcttttgttcagatttgctttttcactgtatcacagtttttag

SEQ ID NO: 820935 - DNA, 630 bp, Homo sapiens
aacagtaatcttcttgtatatttccattagggctcttggatgacatgatgcattgccaatgagtagtaatattttgtaaataatctttttttttcctctaaatagtaggtcttaacaatggccttaaaaatattcagaaaaccatgctataaacagatgtggtatcatccagcttttgttgttccatttatagagcataggcagagaagatttgggaaattcttaaaggccttatgatttttagaatggtaaatgagtattggcttccatttaaagtcaccagctgcattagcccctaacaagagtcagcctggcctttgaagcgttgaagccagccattcacttctccgttctatctatgaaagtcctagtggtgtcttttccaagagaaagctgttttgtccacattgaaaacctgttgttttatggagccacgctcatcaatgctcttagctagattttctggataacttgctgctgcttctatatcaacgcttgtagcttcattttgcacttacccatcctttccttaaactgcatgaaccaacctctgctagctgcaaacttttcttctgcagtttgctgacctttctcagccttcrtagacttcaaaagagccttgatctggat

SEQ ID NO: 820936 - DNA, 612 bp, Homo sapiens
actatcacagtgtataaagcccaaatgagacctttaaatctgtcctttaacattggccaagattgtaagtcaaaaacaacattgcataccagggaaatatcgtattagaaatcccattaaagccctaaagaaatagtcttcctatcataaattctgaagaattactattgactgactttagttcaacaaagtattaccctcattgtaactgctgtgtaagatatagtatcaatgctaaatgaactaaattccagaatgtggcaagactttctcagcagaggagagaccaatactgctgtcaacttggtggactggccgaaggagaaagaatatcccatagagaatggaaaggaagaaactgacagatatataaatattgtttgtcagtcatgttttggccagcataacttatgatgattttaaacttaagtcttgaaatttaaggcacaaccaaaacacaagcaagtcctcctctgcccaacaactcctctttacaaatsttcatcaaatgtgtgaaggaaatacatagaacggtgagaatgggacaagagaactgacgagaaccagggattctcatggattctgtggttttacaaaacaggaatggcttat

SEQ ID NO: 820937 - DNA, 437 bp, Homo sapiens
tagcgtgatgcttggggttattggagcctgagcttgacctcaaacgggtggcgatttgatgggtacccccaggctggggaaaatgacagcgcttctcctaatcagctcactggattccatcaccctgagyggtaaaccagatgggcgtcaccccagttctgcagacacatacacaacccgtttgctgcagagccggacccagtggctacacccacagcggtctgtggtagagaactctcttccttctttccaccgacaggggcgagggctgcttcctcgcggcagcccccgcgaagaaatctcgagagaactggcatgaggagttaggttcatcacaaatacacacacactgcccccaaccctctgccgttgcctctctcagaaaaacaagacgtactgaatgaaatattttactaagcgttcagtctgtgcctcct

SEQ ID NO: 820938 - DNA, 528 bp, Homo sapiens
agcgtaacaattttgctgcagaaatggagaaacttatcaagaaacaccaggctgcyatggagaaagaggtggcttattcagtattattactttgcttattttaggttttgaatgtctcagaattaaccaacatggcagtttgatgttagcgtatctgttcccgtgaaccaagcaaattggggaaaaggagaagcatttatgtgacttatataaaggtttctgtaaattgatattacaagaaagggtggcacctgtgtgttttatctctcactaattttgtgtgtgggtcatttaaaactaatcagtcttaaaactgttcattggagtagtccactttatagtttttgtaatagccaacaaaattttgagtctgaaaaattgatgtgttttaatatcaagtactaggtctgggaactaataagacatgggaccatttcgtgattattgatagttttgtagtgtcacaataggtaagttactcagttactttaagctttctgtttcatggttatctgaggagtatgctaa

SEQ ID NO: 820939 - DNA, 657 bp, Homo sapiens
gcacctggctgccagggagtgtggcagcactaagggcacttgtgccagtggctctgttggggtggggattaatgtctggagtggcccagctcctatggccagtgaggtcctagggtgcaggtgagggtgtggggagagaggtcactgcttcttctctcgggtggtgatggtgaccagctgcttggcagccttggcgatgtcataggcgcactggatcacctgctgagtcagcagctggaagtccactggggcgccgggctctgggggcactgtcttccggcactcactctgcagccggtaggcgctggcgttgagcagccgcagtgagctccgcactggctccagggctggcctctggagggggcaggagtgaggctggaccttggactttaagccgccagctgagatcagggcccagtttgtctgtgtctccacccaggtagcgatcagatgggattctccacgcctgccccagctcgaggccctcccactcctggtcctctctttggcccctgtacctttgggaagagggaggccatctcggtcacagccaaatggatcttctctgagcagggcacgaagctgcggggagaagggaggctataaagcagggggctctcaagggargttcccagggacagcagaacccagggcccc

SEQ ID NO: 820940 - DNA, 576 bp, Homo sapiens
ccccaaacctcatgtaatacacccatgtaacaaacctgcacactattattattgggagaaaaagagctaatttagaacaatatatatagcttgacccaawttgaggaaaaattttacatttgtttatttgttgataacaactatcaataaaggactaaaactgtgtactattcgttcatataactgaatactacatagctattaaaattaatgaagtaaggcaggtgcaggggctcacacttgtaatcctagctactcaggaggctgaggctcaacaatcacttgaaactgggagatggaggttgcagtgagccaagattgtgccactgcactacagcctgggtgacagagcaagactgtttcaaataataataataataataatacacatatatcaacataaatgtcatttttcaaattatagaatgtatgtactaaaatatcacataaatttgaaacacaatactacatgttaaatatatttaaatatttgtaggaagaatataagtgcatgaagctaaaaagtaacttctacataagaaaataggatctaagaggatgacaaaagggactcca

SEQ ID NO: 820941 - DNA, 527 bp, Homo sapiens
gaataatagatgaaaacttcccaagtctaacaaaagtttggacattcagatacaacaggcttagcaatccccaggcagatacaatggaaaaaggtcttctctaaggcacattatagtcattgtctaaaatcaaagataaagagtgaatcctaaaagcagcaagaaaaaatcgtgtctagtcacatataaaggaaacctcatcacattaactgtagatttcttagcagaaacctcacaagccagaagacaatggaattatagattcaaagggttgaaagaaaaaagtatgtcagtcaagaatactgtatccagcaaaattacccttcataaatgaaggagaaatgacattttttccaacaagcaaattctgagaaaattcattatcactatattgaccctayaagacatgctcaaagtagccctaaacctggaagtgaaaggacaacatttagtatcacaaaaacacaccaaactatgaaactcactggtaaagcaaagacacaaaggagaaagagaaagaactcaaa

SEQ ID NO: 820942 - DNA, 582 bp, Homo sapiens
attactgtcaacagaggccaataagagaaaaacattgtagtaagcrgatgctttgttgccctacatcacatccctttggtctacctttgatttcaggagaggctctagtggacagttctgcatgagctcagactcctggggatagcatcctacctcaagctcacatctagcttcttttagttatttgtctcagggccttctccaaggccacaaagctctctcagccctctgtatagtccagaagtgcaagaacgtataatgcttgtagggcaatcctaaattaataagggatgtaagaataaatgtcccagcctcccgagcctcgcattcttttttctttgagatggagtctcactctgttacccaggctggagtgcagtggtatgatcatggctcactgcagcctcaactccttggctcaagcaatcctacctcagcctcccatgtaggtaggaccaaaagcgtgggctaccacacctagctaatttatttgtattttttgcagacaggaggtctccctatgttgcccaggctggtctcaaactcctgggctcaagtgatcctcctgccttggcctcccaa

SEQ ID NO: 820943 - DNA, 631 bp, Homo sapiens
accaacctgtcaaaggtggagaccttggaaccacctgatggcattccagacttayaggtgggtaattaatgacttcacagcatggaaacttccagttggcagcagttgcaggccattctgacccttactgagatggtttttggggaacgtggtccagatggtggatgtgacactctcagcgggcacaggtatgaggactgaggccatcctcgggcaggggcaggagatggaggattgccagctgtctggatctgggcaagggctatgaggtggcacaccatccaacctgagcaactcatggccctacacgccagctccttcccccaaggttggcaggggattccctgtccaatgccgtgacttttctagtgttggacgcaccagacatgcctgcaatctaccacaaaactagtgactggtgagacctggaggtcagaaggttggaacaggtgattgctaagggacatccccttctgagattccattattcagtccgagaagcccacaggagacactgtcaaaaccctccaaattactttctgcatagacatatcagatcattctactggagggcaaccctatagcatgactgacaaccatgacattctcaccgaatagagctacacctgcc

SEQ ID NO: 820944 - DNA, 622 bp, Homo sapiens
tatggtccacagtaacatccttctatgaacacacacacacacacacacacacacacacacacacacacacccctacctctggcactgttaacaataggctttggagcattaacaacctcaggtgaaaacaaaccagtcattaacaacagattctgagaagattacaacctaaataactatcactggaacacgtaagttacttaatataaagtggttccatatggttcatttataattcacacagcgccaggcagcaagaacccatcagatgacacctactggtgtcaccagatatgctttaatctttccaaaagggcagcaaaggaggatgtatttgagagatttttcaggtactactgggttctagaatattcttagagtaaaaaattatttcttggcttcccaaccgtcacctctcctttgagtttttcagtatatatcttcctgaaattggctttaaaaagcttcaaggagaaaaatttttgaagtgtatctgcttgctaagcttaccatgactaatgttaactctttttgtgtggttcctggttgtgagcagacaggctggaactaagcacacatgtgcagtgcaccaactkgactcctgtcataaaactgataaaag

SEQ ID NO: 820945 - DNA, 622 bp, Homo sapiens
ggagagccttaaatgagtatgagaaaggcccacaggaattaaatcagctctggctattatcatgttccttaaaagagttcaaattccccatgatgaaaaaatgtaagccatcttcactccccaagaacacaggcttgtttgcagatgatgcctcatctgtgggaaccccaaggtggagaaagcccaggaaagatgttaaaatgctagcactgggtaggatgctgcaaaccttctagttcatcctccccattgtgcggatggaaaagtcaagtcaatgagatgactcgcatgctagttaaaggcaaggcaggtagttaggaggacagctttcccaggctcagacaagggctctgtctattaccccatcctgtccagtgacactgaagaacaaaagtgctcaccaaattcagaatccaggatgaaatcctatgtatctgccaatgtggcagtcttctcctatcagtctgcatttgagaattaagtccaatctttgtatgccagacccwcgagcagggctgcctgagatcacagaactcccgaacaccaagactccattccccaaggtgtttcattcaaggtacctcccctctaaaatccctacttctccccatatttttcccat

SEQ ID NO: 820946 - DNA, 643 bp, Homo sapiens
agacacaatctctccagtagcactggcctccaagacaacaagcagggctggctctctggctgcgactcaaggctatagggcatgcagcgagggtctgaggcttcacagacggtagaagtcagttcacgggccacagctggctgccaggagtacccagcaggatctgctcagagtagatgccactgggcctgggggtgggggtggccgtgcctggggcttatacccacaccaagcatcaacctcaggacaactggcccatctcagtctcaggacagctgaggcagtgtagaggcatcgagagaccctctcctctcccagcgctaggcgctgaggaagtctctttcagctgcttccttggcagaatttagaacagagaagacgggtcaactgctgggggacaaagaccaaattccagtggcccctctctcctgaagggtggatccccgtattctgggctccctattgctgtctgaggtcttaggcaggcaccatagggcacaggcaatgttttgaaacttyggttgttcatatcccacccttaaaattttgccatactcacataccaccacctgcactattctttactcaatattgttctttacagtaactttttttttttttttttttttttgagacagagtct

SEQ ID NO: 820947 - DNA, 525 bp, Homo sapiens
tctccccttttctaggatggaggttctcttgccctgagctgggggctgttcctctcaggccagtgcttcaggggtgccactgaggtctttttggacaaagggatgaactgggctctgtcctgaaggatcctaagcaactgtccctccatgccacctcttaggtagaaatgttgatggcagataggactgcacctctgccctgtggaggagtgcgggaggaaggctgggcctcaggagcagaagcacgcgtgttcccagccaggaaggctgggcctcaggagcagaagcacgtgtgctcccggccaggtaggctgggcctcaggagcagaagcacgcgtgttcctggccaggaaggctgggcctcaggagcagaagcacgcgtgttcccggccagggattctaaggctccttctccacataagtggctcttaccctttttgtgtttatgggatkgcagtcttagagttggcaagaaccttaaaagacgacctatagtccaaatttcctcaagacttccctgtcata

SEQ ID NO: 820948 - DNA, 573 bp, Homo sapiens
tgggaagctgcaatgggaaagcaggcagtaaaatatgtgttagcaagaactttaagcaccgtgggcaactggagcccaaccccactggggagctttggaagacagtatagaacatgccttagaatgatccttcctgaggtgaggagctggggtatgaatacacccatcccactctcccactgtcagtagccgagggctgctcccgcagggtgttgattttctggtactttctgacctgctccacacatggctggagtgggctctggctaggagtggaagaggatctaagatgatctgagcaggctgctgcagagtcagctatactcagacatcacattgcatgtttaacatgtcgctgtctctttagatttgaatcctattgttttggtggtatggtctcttttttgcaagtgctctgccttttagattcccttcgtcccctttcccctgtccaatatgaaagcaagccaccagaggagstttctcagcctcctagtgggagaggaatgggcatcagatcttgtctctcttcttctgtggctgatccatggcttgtatctggtgaagtgtgat

SEQ ID NO: 820949 - DNA, 489 bp, Homo sapiens
gatgagggccggctcccatcctggaatctgcacttcrtccccagagtgaaggtggcagagagtggctgcagggaccatggctatgatctgcccaggggtggggttcaggcccacgaccagcctggatttccagccgcagctatcaggggttccacattgggtcccaggaactgagggacatgagggcagcccgggttagcccagagaggtcatcccgacctccacctcctcccattcctccctctaaaaaaataaaaacagtgagtggaatgaaataaacaacaacaacaaaaaacagtgacaaaatctgtcccatccacatagcccctcctgatttgttggcggagagggctgcatggatctctgatacgctagcagatggctttacatagcacacagcaaacagtggttccagctccctaggccaggccaggggcatgtagcctgcaacgggctgaactgagttccccaaaaatgtaggttcaagtc

SEQ ID NO: 820950 - DNA, 640 bp, Homo sapiens
aagcacattgttgctattactattttgaacaaactgcctactgtcacaccaattaaaaatgagaaaaatgaaagtttttattttaccttaaaaaaaaaaagacattaatttaactggagtcattaagtgatttctacttggatgcttatagaggtactaaattatttctaattttcttctggattattgatttaatgaattaaaatatttgccacacattcaagattgcctaccaaagttaatgagttaattctctttttttttttgccaattttgacaagctctatagaaataaaccaatatacatattttagagctaaacatacattgttaatgttttaaaattttaaaatgtaatatcaaatataaaattatttttcaaaatgttcaaacatttctaggaatttgattttatttacaataagtgaatcatgtgtgttccatatgaaaacactttatataaatctttcatcatattttattttagcaaaattagctgtaattttcttaattattccaaatttcatgaaataaataaggaatctgagaagcatatgaaaatatatttcataaattttcccaagtttgattaaygaagcaagaatattattcactattcacaaaatgaagttttcagtct

SEQ ID NO: 820951 - DNA, 623 bp, Homo sapiens
cagccaagtagaaagacaattggacaaaaaggttatgatttaatgctaaaagactgttggaatctgcctgrcctgtccagattcctcttggcctctctgtgaagcattccttcttttttggtgtgcgacatctatctctggaaggtgggtgttctgacataccgtcaaaaaaggtaagtcagatcatttctttatggcagtttttaacaaaaaggagtggaaaaagttagagtaattttaaacatttaatcctggcttcttggaaaaagggttctggtttctctgacccactttggttaagagaaattctagtttctatggctatcctcgagggaaactgagaggccagagatagcaggacaggagaaagtcagagagagttgcttctgaggccttcattctggagtatcattttctgagatccttcatatcatatgtatattatttacatatataattagcatgtttattttttctcttcaaagtatatgagaatcattctattagaacatatgcaaaaatatttagattttttctgtatactgcaagtgacttgaatgatgagagagagagagagagagatacgaagtgggggaccagggagggaggtagtaagaaggaaa

SEQ ID NO: 820952 - DNA, 582 bp, Homo sapiens
gtgtttgggtcatgggatggatcattcatgcatagtttgctgccctcccagcagtaaggaattcatgtgagatctggttgttagaaagagtctgggacctctccacttctcycttgcttcctctctcaccttgtgacatgcttgctctccctgcttccaccatgattttaagctcctgagtcctcaccagaagcagatactggtgccgtgcttcccgtacagcctgcagaactatgaaccaaataaacctttataaattacccagtctcaggtatttctttagagcaacacaatacagattaacacactatctcattccttactcagcacaatgtgcaaagtgcccagtgtggcttgtaactatctgtcctaagccccaacacccacaccttcccctttctaactggacaccagtcgcgctggcctccctcaacatcaggcagcctgcctctcgagacctttgcactgactgctccccatgcctgggggcagaggggtaagccccagacacctccacagctccctcactccccaggcctttctcgactgcctgccactcgctgaccgagcagctcagctttc

SEQ ID NO: 820953 - DNA, 617 bp, Homo sapiens
atacaccaatattgagtatatgtaaacttggtaaagaagatacaagagcaaactttaattcagrcatagaggctgtgattaattctgatttccaagatgaagggccattgctgaggaatggaggtggggggttgaaatgcagattggctgactctgggcctgggagtttggttacttcaacagactgcttgtgaaatgaagaggtctgaagcatgaggaagagaaaacagggtctggaagaattcacccagccggggtgccctatgacattttatgctgagttgggaccactatgacattttatgctgagtttacagcacatgtccctcccagagtgtacagtggaatcatctgcagtagggtagggagtcacccagcaaaaatcctatgtgagttgcttctataacccaggcaagatgaggacaaaaaatgtccgcgaaaggaagcctccctttcctctaggagagtgacatttatgaatgcttacccatccctgatttcctgtcatcattgcagctaccctgttacgggctaactggtgtgccccaaaacactcatacattgaagtcccaatccccagtaccagagaatgtgaccttatttggagacagggtgtt

SEQ ID NO: 820954 - DNA, 617 bp, Homo sapiens
aaagttgtgtggaagtatcttcttcaagtgctcaaaacattagtttatgaaattgcttccatgaaattgcatcagcgtcatgaaccaaattttcctgtcaaggaggtgaggaggcagtaagtcatgaccttagttgcttactaaaaacgaaaggcgtttgaggaaagcctgataattcattgacaacattaccatcaaccacaccttaccattcctaggagagctggccaaacggatcttcctctatcaatagcgggaagtgggtatctatttggtattaacaaacatgcaaattagtgatttaggagccacacagcccctgatgatgaagacacatgattcctacactataatttcaagatgtaacattgaatactaagttgttttaacaataacaaattttaaattaatatatttgggataaaatatcagatttattttttcattgcataacatcaatctatgattataatattcactttttrccttggctttgaccagagacagattttaccatttgccaatttggaatctggtcaaatgcatatttaccgggcacctctagaatatacatgcatggacacacacacactcctcataatctcaatgtctccaag

SEQ ID NO: 820955 - DNA, 576 bp, Homo sapiens
gcaagtaggagagagattgctaaattcttttcctagcaaggaatattaatattaataccctgggaaaggaatgcattcctgggaggaggtctataaacagctgctctgggagtgtctgtcttatgcggttgagataaggactgatataagccctggtctcctgcagtaccctcaggcttactagggtggggaaaaactccgccctggtaaatttgtggtcagaccatttctctgctctcaaaccctgttttctgttgtttaagacgtttatcaagacaatatgtgcaccactgaacatagacccttatcagtagttctgcttttgccctttgccttgtgatctttgttggacccttatcattagctctgtttttgtcctttaccttgtgatctttgttggacctttatcagtagttctgcttttgccctttgccttgtgatctttgttggacccttatcagtagktctgcttttgccctttgtcctgttccctcagaagcatttgatctttgttctgctttttgccctttgaagcatatgatctttgtacctactgtctgttattacacccccttc

SEQ ID NO: 820956 - DNA, 622 bp, Homo sapiens
ataagagattatgtgatttcccatcaaatcaactttagtcttaatactccttgagttgaacagcatctctccaattacaccttgcaatatctacttgtcraggtatggatagtaagaatattttctaatatatgaaaataatttcaatgttgttctttaaatgtgtatgaaagcatacgtctgcattgaaatcacaatgacaatgtcattatgaaacctaggtttaattaataacaatctgtgagaatatagctctacacttacatttctgcagcatgagctacttgagtgaaaagagccatgtgtaaaatcgctaagtacgttataatgctgattgtgggaaatgtatattacattgatgaaaaattgcattaaaggtattatcatcatttgaaagcaccaacgattaattctacatttaataggcatttttttcatggaataaggtaatccaaaattgaaaatctttagcaacgttgtgttaatttataggcaagttcaatcataacttataatgataagaaattcaaatgttaagaaatttttaaaaattcaatataagaagtttaacacatttaagaatggctcatatgaaaagggtatattttagttattctgaaat

SEQ ID NO: 820957 - DNA, 604 bp, Homo sapiens
ggaagggaaataaaacaatctgtgttcacagatgacatgatggtctacacaggaaattccacagtatcaattaaaaaaaactgtaataarcaatgatagaaagattgcaggacacaagattaatgtacaaaagttaattattttctatatgattactgaatcaacaattgcagtttaaaatcaaaaacaaaataccatttaatatagcacctaaaatatagtacctaagtacaaatacaataaaatatgtgcaagatatatttttagaaaatgacagaactctgaataaagaaataaaacaacttataaataaatgtagagatattctttacccatgtattggaatactcgatagtctaaaagagacagatcttctcaaattgatctgtagattcaatgaaatctcaataacaatctttgcgtgctgttttgtagatatctataattctcaagtttatatggaaaggcaaaactcagagtagccaacacaaagttaaagtgtacacaaaaagcagagaaatcatacaacctaactatatgtattcttataaagttgcagtaattaagacagaatggcattggcaagaaaatggacatgaagtta

SEQ ID NO: 820958 - DNA, 649 bp, Homo sapiens
tataaacagtgcaagattaaaaatttagtagatgacraagacagtaggatgtgcagaagctcagaagaggaaatgataacaacatatagaaagagaaaaacttcacagaggagggagaattttagtagatttaataccaagtcatctagtgtgaagtacaattgtgagccttgcatccaaatttaaatatttcaatctctaatctatattctttttaaatttttgacttcctgtttcttctgaaaagaaacctgtttatttgtaaagttgaatctttcagcaaaataacttctcaatcctttgaatcttttcttcctcagttatcttctctctaattaaacataacgttgattgatactgaaaaattcagatattttatgtccatttcctatcaattataatttaaaatcagttaaggaagtaggaatatataacttaaaattttaacaaggggcttatgataaactttgccccaatgcacttttacatgtctaaagcaagcttttatatttaccacaatgttttatgtgtatgtctatactttttgtaaaatagtgtttttcaactggtgtgttatgatgctggaatgtcaagatcaattcagagctatgttacaaattaataaataataatggcaacactaaaatcc

SEQ ID NO: 820959 - DNA, 628 bp, Homo sapiens
tgaactcctgtcttcaagtgatctgcccacctcgtcctcccaaaatgctgagattaccaggcatgagacaccacactcaggcaatacatgctatttaaatctttctacctacctaggcatctctattgaaatatatttatgcttatatgtaatgtactatacacatatatatgtaacatatatacacatatgtaatatagtgcagatatacacatatatgtatatactatatagtatattgtgcatatggtatatacatatataagtctatacaggtatattgcatatacacctatatacatatatactatatgcactatatactacatatatacacataggcctatatatacacacaatatatgaagatgtatgtgtttaaaaaatagcatatctcctaatcacaataatgtattacatatttattgaaaattttaaatgtgtgtacactttttaaattaacattactaaattgcaagttgtgtgtgtgtgtgtgtstgtgtgcataagctgagtgtgtatgactggatgtggctggatatcatcttgttatttttgctgagttttttcataatgccttgtatttaacaggcactcaatattatttctgaatgaaatagatttgcca

SEQ ID NO: 820960 - DNA, 647 bp, Homo sapiens
attttagtgttgccattattatttattaatttgtaacatagctctgaattgatcttgacattccagcatcataacacaccagttgaaaaacactattttacaaaaagtatagacatacacataaaacattgtggtaaatataaaagcttgctttagacatgtaaaagtgcattggggcaaagtttatcataagccccttgttaaaattttaagttatatattcctacttccttaactgattttaaattataattgataggaaatggacataaaatatctgaatttttcagtatcaatcaacgttatgtttaattagagagaagataactgaggaagaaaagattcaaaggattgagaagttattttgctgaaagattcaactttacaaataaacaggtttcttttcagaagaaacaggaagtcaaaaatttaaaaagaatatagattagagattgaaatatttaaatttggatgcaaggctcacaattgtacttcacactagatgacttggtattaaatctactaaaattctccctcctctgtgaagtttttctctttctatatgttgttatcatttcctcttctgagcttctgcacatcctactgtcttygtcatctactaaatttttaatcttgcactgtttata

SEQ ID NO: 820961 - DNA, 630 bp, Homo sapiens
taacttcatgtccattttcttgccaatgccattctgtcttaattactgcaactttataagaatacatatagttaggttgtatgatttctctgctttttgtgtacactttaactttgtgttggctactctgagttttgcctttccatataaacttgagaattatagatatctacaaaacagcacgcaaagattgttattgagatttcattgaatctacagatcaatttgagaagatctgtctcttttagactatcgagtattccaatacatgggtaaagaatatctctacatttatttataagttgttttatttctttattcagagttctgtcattttctaaaaatatatcttgcacatattttattgtatttgtacttaggtactatattttaggtgctatattaaatggtattttgtttttgattttaaactgcaattgttgattcagtaatcatatagaaaataattaacttttgtacattaatcttgtgtcctgcaatctttctatcattgyttattacagttttttttaattgatactgtggaatttcctgtgtagaccatcatgtcatctgtgaacacagattgttttatttcccttccaaatgtttatcttctatttcattttc

SEQ ID NO: 820962 - DNA, 585 bp, Homo sapiens
ggagtctcagaagaagaagagtaagagaatagggcagaaaaagcatttgaagaaataatctccatattttctccatttatttaaagatataaacttgtggcttcaataaggccagtgaactscaagcaacacatatatgaagaaaaccacacctaggcacatcatagtccaattgatgagatccaaagataaagagaaaatcttgaaggcaaaaaaaaaaatgaaaaaataccaatatattacataagaggcgactgcaacttggctgaccacttgctccttatcagagactatagaggccataagactatgaaacaatagctttaaagtgctaaaagatacaaaagtaattatataaaccaacatcataaccaagaattttatattccacagaaatattcttctagaatgaaagataaataaagacgtttctggtaaaagaaatctaagaaatgcttcactagcagacctgcactaccagatatattaaggaatgttcctgaggctgcacagaaataataatatatgaaaattaggctcttcagcaaagaaaggacataagagaaaatgatgctgatatttgtc

SEQ ID NO: 820963 - DNA, 627 bp, Homo sapiens
  misc_feature 241: n = A,T,C or G
ttattgtgtcattgaatataacatayatagtatgacatataaaacatgcactgatactaagaacgacttgattttttttacagtatgtttacatgtgtataactacaaatcagataaaaaatatggaatatttccagaacttggagagtttcacttctgcactttccaggctatatctccctctacagaagtaatcactaatatgacatctatatttattaatttgacttttatataacantgtgtaatgaaatcatataaatagaattgtacagtattcagtatataattttatatcttgttctttgtaacatcttgtttttgatagaatttaaaaaatgtagataattttcaaattgtcaaaaataaaatttaaatatcagtattaatttttttaaacttaatattcattattaaaaaaactattctttgagcagttaaatgttattggctgtggaatttttctttgcataagcaataaaagtacataaggcaataaaagtgaataatagatcttgacaaatttatgctgtggtgatagataagcatgaataaagctgccaattatgccttctgtccctccaagagcagatcatttctctctgaatccgggctagttttgctact

SEQ ID NO: 820964 - DNA, 604 bp, Homo sapiens
tatacccttttcatatgagccattcttaaatgtgttaaacttcttatattgaatttttaaaaatttcttaacatttgaatttcttatcattataagttatgattgaacttgcctataaattaacacaacgttgctaaagattttcaattttggattaccttattccatgaaaaaaatgcctattaaatgtagaattaatcgttggtgctttcaaatgatgataatacctttaatgcaatttttcatcaatgtaatatacatttcccacaatcagcattataacgtacttagcgattttacacatggctcttttcactcaagtagctcatgctgcagaaatgtaagtgtagagctatattctcacagattgttattaattaaacctaggtttcataatgacattgtcattgtgatttcaatgcagacgtatgctttcatacacatttaaagaacaacattgaaattattttcatatattagaaaatattcttactatccatacctygacaagtagatattgcaaggtgtaattggagagatgctgttcaactcaaggagtattaagactaaagttgatttgatgggaaatcacataatctcttat

SEQ ID NO: 820965 - DNA, 625 bp, Homo sapiens
gcccaggctcagctacaactttrctccaaaatcggaatgggcactgggagctgggagaatccaggcagcaagagcaggcacttctgagcctgctggggtaggtgggattaccaagctaccgagagtgcatggatgcctgggtctacagccatggcttggcagctgcagctgtgcctacgtgggtggggctcctgtgctgccagctccatggagcgtgcagccccagccatgcctccctcactggagcctatgcctttgcactggccactctggacaggctgccactgccatcagtactgatcctgaatatttatgtttcatcatacaataagtatatcttctgtaccagtcaaaccctattatttgtggcagtattgtttaggtagttcatgacggacagagttaaccatagagtcatttaaagtctctagaggcaccttaccaatacgatgagttttttaatcatttagagttcactttccacccttcagcatgcatgcatcataatcaagaatacttgcaatattaaaattatgtcatcaatataatgtaccaggatgatgttctatccataaagactatgaaggtttctaaggaccatattatgacaggaggtcaacagagc

SEQ ID NO: 820966 - DNA, 625 bp, Homo sapiens
gcccaggctcagctacaactttgctccaaaatcggaatgggcactgggagctgggagaatccaggcagcaagagcaggcacttctgagcctgctggggtaggtgggattaccaagctaccgagagtgcatggatgcctgggtctacagccatggcttggcagctgcagctgtgcctacgtgggtggggctcctgtgctgccagctccatggagcgtgcagccccagccatgcctccctcactggagcctatgcctttgcactggccactctggacaggctgccactgccatcagtactgatcctgaatatttatgtttcatcatacaataagtatatcttctgtaccagtcaaaccctattatttgtggcagtattgtttaggtagttcatgacggacagagttaaccatagagtcatttaaagtctctagaggcaccttaccaatacgatgagttttttaatcatttagagttcactttccacccttcagcatgcatgcatcataatcaagaatacttgcaatattaaaattatgtcaycaatataatgtaccaggatgatgttctatccataaagactatgaaggtttctaaggaccatattatgacaggaggtcaacagagc

SEQ ID NO: 820967 - DNA, 582 bp, Homo sapiens
aaagtttgagtgtcctggctagaagatccagccaaccacaagattcccttaatccatagcctcatctagagcaaggctttaactctcttcaattctatgaaggctgagagaggaaaggaagctgcagaagaagaatgtgaagctagcagaggttggttcatgaggtttaaggacaaaagctgtctatataatataaaattacaaggtgaagcagcaagtgcagatcattgatgaaggtggcaacactaaacatcagattttcagtgtagatcgaccagccttctgctggaagaagatgccatctaggactttcaaagctagagagaagtcaaggcctggctttaaagtttcaaaggacaggctgacttccttattaggagctaatgcagctactagttaagttgaaggtaacattcatttattatttcaaaaatcctagggccctgaagaattatgttaaatctactttgcctgtgctctataaatggaataacaaagcctggatgacagtgcatctgtttacagcctgrtatactgaatattttaagcctactgttgagaactactgctcagaaaaagatt

SEQ ID NO: 820968 - DNA, 655 bp, Homo sapiens
aatcaaggagcaattttggcttttaagtcttactattttaagaaatacatttcataaagctatagctgccatagattcttgtgatggatctgggcaatgtcaattgaaaaccttctagaaaggattcaccattctagatgctattaaatacattcatgattcttgagaggaggtaaaaatatcaacactaacaggagtttgaagaagtagatttcagccctcatggatgattttgaggggttcaagacttcgatgaagaaagaataaataccattgtggtagaaacagcaagagaactagaatttaaagtggagcctgaagatgggcctgatttgctgctatctcatgataaaacttggaggaggagttgcttgttatggattagcaaagaaagtggttttcttgagatggaattaactcttggtgaagatactgtgaatattgttaaaatgaccacaaaagatttagaatattacgtaaacttagtaaagctgcagcagcctttgagaggattggttccaatttttaaaaagttctactgtggacaaaatgctgtcaaacagcatcacatgcaacttgaggatgtgatgtatagcatcacaagctacagagaaatcttttacaaaaraaagagtccatcactgcagcaaacttc

SEQ ID NO: 820969 - DNA, 666 bp, Homo sapiens
gtgcaaaatgcatgtatttagatttccattgtayaaaatttacgaggacattggcactgttcaactccagtctcagatttaagcctaacttattttatttggaaacctaatatataaagcttcagttttagttattgtgctttaaaaatacaaacaggcctaaaaataagtgggcagtacactacaaattaatttactagtgtgtattcttcctttctcttaggactccatcccatcgactctgagggcaccggcatgggaccagatttccttccgttggttgtcacaggaaacattcagctttccctctccaggggatgtggcacaatcgaaagacatatggctgtgtttaatgggaattgcagaaactcaggaatttaacaaactgttcacaaaatccagggtgtaaactcttttgagttacctgagaagacaaaagctcttaagttagctgaggtaaaagctaaagctctgctagtgatctgctggaaaaggaggggggtgcaggcagagacatgcaaagcaggtgagagtggagagcagcaggcagcagagtgggcagaacagaggcacctcctcagccctaacatcagagctgcccggcaccgggacagccccgactgactgagaccttctgcttcccaaacacagcaatacatgtgagag

SEQ ID NO: 820970 - DNA, 483 bp, Homo sapiens
taactggaattggggtgtcctgggcatcagggtttcttaaagttcttgaattgacagcaacatgcaggtgaggtggagaaccactggggaagcaacaggctgtggaaagcatttacatcttttgcctacatgcccttgttccaaataacaataaaaaagaaaactgtcctgtggaaaaaatgcatcactgcaaaagcagttggagagttgcaaattaaatctatttttaagcattaaaataaaaaaattaagctgttatataaaatggtgagtgggtgggagaatgtaacatgtatgcatatattgtcagttcattcatttattttctctaaagaacaatctgggaatatgttataatttgtattgttcaacttctgctgaactttgggatcagatcctaagtaaatagcctaatctgtatataggggttcatactatgtatgatttacagttaaaataawtttaaaaaaaaagaaacaaaaa

SEQ ID NO: 820971 - DNA, 632 bp, Homo sapiens
tctatctggtatttatggaaataagtwgaaatgtacattttcttctaaatagctaacctaatcttcctactaccatttagtgaataattcatttcctagtaattgttttaaatatatcagattctatttcagggctgtcttttctgtctgccatttctcaattcttttacaatactaattttgcaactttccctatgtaagcttcagaatttttttttaacttttattttaagttcaggggtacatgtgcaagtttgttatttaggtaaactcgtgtcatgggagtttgttatacagattactttgtcactcaagtatcatgcctagtacccattcgttattttttctgattctctccttcctcccaccatctaaccactgataggccccagtgtgtgttgttcccctctgtgtgtccatgtgttcttatcatttagctcccacttaaagtgacaacacacagtatttgtttttctgttcctgcattaatctgctaaggataatggcctccaactccatgttcctacaaataacatgatcttgctcttttttacggttgtgtaatattccatgctgtatatataccatattttctttatccagtgtaccattgatgggcatttaggttgact

SEQ ID NO: 820972 - DNA, 618 bp, Homo sapiens
ataaacagttaactgcttcctttaacaaatattcaaaaagacaaaaaaaaattttaacctgttttagtggtataattgaatcatttaaagcattttggcaagggatcagctttgcaattagggtttttctgacttgcattccagaaaatatcatgttcttttgaaatacatatgtgtatgtgtttatgtttgggctcgacattgggtcagtacctgtgcatattaaaatgagcaacttctaaggaccaaatctatttaatgtcaaacccatcaagccagacttagagagtcattctcacagtgacctagccattgtcaattttaaagtaatttatcctaaagtggtggggtgtcaaatgggagaagtaggacaacgaaaaagccacaaattgtgctgctccaggcttgtttatcaggatggttcactctcactcaacacacctccgcttcagcattcattaaccttttatgtcactcttacctactctgaaagcagtcttcagggaatggcccactggcaaaagggagggaatacctsagataaagcagttggtggtgggaagaatgaatttggcatgggagtggaaacttgaaagaaaagaatggagagtcctaagg

SEQ ID NO: 820973 - DNA, 613 bp, Homo sapiens
cgtcacgggcaggtctcctacctaactcaccaccaccaccacttgctcacagcagggcaaatgtgtggcccacatgtaccaacagcctgcagattagaatcgcatgaagctggaggttccaggataaggttttagtccagagtctgatatcaaccagagcctcaagctctgcaacctgaaggaggccactgtgaccccaaagagtgagctaccgtcaccttctcaggagggtgctgtcacagatgttttggctgctccccccatgcatgtttagggcaagagccttaagcggttcaacagctctttcctccttgctttctattttcacccatggactcattcagcacatgctactgaaatcccatctagattccaaagataaatgtgcacagaagttatcccctagggccctcctttcttccctgaaccccttctttctttctcttggagctcgctaccctcttccgtaggtggctccctgggktgaagcttggggcctccaaggcaataaaggtgtcccttcctgggcagacaggcagcacagatgttctcctgggggaagtcagggccctccgaaggcccacctgaggtctgctggctgccccgaatattc

SEQ ID NO: 820974 - DNA, 617 bp, Homo sapiens
ccaaactggcctccaggggagaaggacccatccgcccttctccagttgctgccctgcaggcgagctgacattcaaatctgaggtgagtccaggaggccctgcaactccaggcttctcctgctcctccataggcccatcctctctggggcctcagtccttgcccagtctggggcatcaggaccttaaaggaaactgagtatacttattttttagggctgccatgacaaattgccacagacttggtgacttgaaacaacagaaattgaaggtctcacattcttagaggccagaagtctaaaattaaggtgttagtggggttgggtctttccagaggctcagagggagaattcactccttgcctctctcccagcctcgagcaacccttggcatgccttggtttgtagaaacattccttccatctctcctctgcacatagccttcccctctgtgtgtcaaattcccttctcccttctcttagaaggaagatgccaatcattggatttagaacccactctcactcaggatgttttaatctcaagatccttatcttrattgtatctgcagtgacccttattccaaataaggtcacattctgaggttctgggtagacatatctt

SEQ ID NO: 820975 - DNA, 683 bp, Homo sapiens
gcctctatctctgcatctagaacagctaaatggaaagatacagagggatcctgtaaggttgttttccctttcacgtccatcaagatcaaaattgagagaatcaagttccatatctgaatgatctgtaggtttctagagatggaattcacgtcagaaaattccaacttctgttatccctgcccccacccaccaaaaaagccaacatttattaagtgtcgcattctgggataagccctggctgggggcaagacacggtccctgatgtcttcttgcttcccgaggtgagagaggcagccaagccaactggcgaaatgtgggtgggtgtgggaacacaggcggtgtctaccctagacttgatagaggacggagaaattcctggaggccatgtcctccaacccaaaaacaaaaggaaagataagagttaccaaagaggggaaagaatggcattggaagcagcaggagctgctatgcgtgtgcaggagtagcttggggaaggagaagcatgatggaattaggaaactgcacggccatttgtctgacctcccagatgtttttacttcatccctctctttcccggcttcccacctcttcaycaagtgcctagcgcagcttctcctggaggcacattgagggcctcctggtgtctatggtagagacgggaagtgggtttccagagggcctgg

SEQ ID NO: 820976 - DNA, 495 bp, Homo sapiens
actatactcaggtacatcataatgaaattgttcaaaacaaataaagggagaaacttgaaagcaccagagaaagacagaaagacatgctacagaggaacacagataagaatggcaatgtatttctcatcaaaaacaatgtaaaaaagaagacaatgtagcaatatctttaaagtactggggaaaaaaatgacaaccaaaatttctttacccagcaaatatatttttcaaaaccaaaggcaaaataaagatttctcagatattcaaaaactagaacaattcatcactagcagccccatgctacagaaaataataaaggaatttcctctggcagaagtaaaattacagatggagatacagatctacacaaagtaatgaagaatagccaaagggtaacttcttggrtaaatacataagacttttccttattatttaaatctctttaaaagataagtagatgtttaaacaaaaataagaatagtatattgtggtacttat

SEQ ID NO: 820977 - DNA, 454 bp, Homo sapiens
gcataacttcacatccttgttgttgaagcattccattctctggccacagacggctctgacttcctcattgtcaacgactcagcttccattcacttcaccaatccagtcctgttgtcacctcctataccttkttcctccccatcacttgggatgacccaacctgcaaaatctatatgctcagaagtctagctctgcaacccttttgggtcacacattcatgggcctgagtcttagagtcagagaagtccacagtaatctgacttttctgaattgcagttactcttctgcaaagtgagagagtactaaatgagaccctacatgtaaagctgttagcatgatgcctggtgcataaataccaagggttacaatgagagctactgttatcaagtctgtgatggttgatttcatgtgttaacctgacaggactacgggatgcccacatatctggctaaac

SEQ ID NO: 820978 - DNA, 625 bp, Homo sapiens
agtctttcaatgaaatccatcaaaaacagtgatgagtcaccattgcctatgcaatcacccaaagggcaaagatcttgagaaattttgcctttcacaaatgaagatgcacatagaggacatctcttcatttactgaggaagtttcaacgttattaattacaggcatgacgctgacacacaaagtcaatgttgcgatgatgcactttggtggagtcaaatttctgacgttccaggcagcagaagaaaagtctgtcccagctctcagtttgctgtctacatttttctctctggacccccagccaactgcctggtgcctgccagcactgagggcagatcttcccccacccgttccactcagattcacacactattctcctctggaaacacccttacagactcacccaaaataatgctttatctggattctaggtattccttaattcaatcaagttgacacctaaaattaggttgacaaatccaccccttgtcaacttggcgactgtatgcatctctttaaaccatacttaatttgcaaataaagacaatagcaaggtrtcagttccacctaatgtgaagccactaacataatgcaactatccctaatacaactgaaagcacactaatcc

SEQ ID NO: 820979 - DNA, 628 bp, Homo sapiens
cagttactaaataagagcttttattttgatgggtagccccagattgtagcaccatgtttaaaacattgtaagcgctcaacaattgattatcattattattatttgagacagagtctcgctctgtcacccaggctagaatgcagtggtgcgatctcggctcactgcaacctctgcctcctgggttcaagtgattctcatgcctcagcctcccaagtagctgggattacaggcgcatgccaccatgcccagctaatgtttgtatttttaatagagatgaggtttcgccatgttggttaggctggtcttgaactcctgacctcaagtgatccgcctgccttggcctcccaaagtggtgggattacaggcgtgagccactgcgcttagccgacaattgattattgaatgaaaatggcattacatgccgggcaccatatgcggcaaagagcacatgttaacacacatttactctttatgtgtatcatttcacttcattctggcaaatactctgtggaggaggctctgttattatctccagtttacacagaagaaatyggaggcttaggttagtttaacaaagttttcatagctagaatgtggcagagctgagatctgaacaccttaggatccc

SEQ ID NO: 820980 - DNA, 625 bp, Homo sapiens
attactgggtatatacccaaaggattataaatcattctactataaagacacatgcacacatatgtttactgcagcactatttacaatagcaaagacttggaaccaacccaaatgcccatcaatgatagactggataaagaaaatgtggcacgtacacactatgcagccataaaaaagaatgagttcatgtcctttgcaaagacgtggatgaagctggaagccatgattctcagcaaactaacacagaaacagaaaaccaaacaccacatgttctcacttatgagtgggagttgaacaataagaacacacggacacacaaaggggaacatcacacactggggcctgtcagagggtaggggggcaaggagagggagagcattaggacaaatacttaatgcatgcacggcttaaaatctagatgacaggttgatgggtgcagcaaactaccatggcacatgtatacctatgtaacaaacctgcacgttctgcacatgtatcccagaacttaaakcaaaataaaataaataaaaaagaaagagcttccaatggctaatactagaacaatttgaggaactaaataatgtaatattgaaatataacccaaaatattaaataaatacctata

SEQ ID NO: 820981 - DNA, 420 bp, Homo sapiens
agacatttgttaagtgacatctattgtttatcagcttttaaggataaaaaaggtattttaaaagttggatatttaggatatttgaggatattcctttatgagctctccatatccttcttgagaaactggttaaaaaaggaataggggttgagtgttacagagagtagtctgaagattcctgtgtaaaagcaaagctaacaagcaatgaagacatgaagcaaaatactaatctaattgtgtaaagaaaggatattttaataagttctttctgcttgctgctaagagtttgctaaastgtcatgaattattctggttattactaaagtttctatgaaacacttaagtagattttaagaataaatgtttctggaaaagaactatgttatgattttgtagaaatgtaaagattacttgaggtgt

SEQ ID NO: 820982 - DNA, 572 bp, Homo sapiens
aagcttttttggatacacaccaaactgttattaaggattactttctcagaagtagaactggagaggaagaaratggaaagggaggagagaattgttactttgtacagtaggcctgagttactcaacaaatattttttattggcaaggaaaagggaaaaaacaaaacaaaaagaaacagtgaaagagccagaaaggaaattaaacagtgcatctcactgactttctcattcaatttttatagtagcctccataatcctaatagttgttgtaattagagccgagatggattcactgctattaatttagctgctaatactgttgctattgttctgatcaagtttctgctactttttgacctgctgtctccctcaacagctgtaggagtcacaattcccttgagctcttgttggtttcttgttccattttttttgggtttctatccttatacattgaaaaaattattacagtgtggatttagcaatcatttttagctataagaaaaggtgctgtgcactagagggaattgaattagagatgtcattcgttaatcagataattagttcccaatcttg

SEQ ID NO: 820983 - DNA, 575 bp, Homo sapiens
cactggtctttctgcttttgctctcccattccctggggcaccagctggcggatgctttctacaaccccagcatgacgttcccctcacctgcttaaaaccctgcaaagagtccctgttgatatcargataaacttttttggcattgagggggttagagaatagttttgaataaatgtttttctactctctgcagcagactgaggaccagagcccttggcacgcccagccccaaacattttttcctgagggttggggggtatcgaagagccctctaacatcagagattctcccaaggggagtggtgttgagctctctaacattggggagctctgccagctccttgccaagatgctggcctagcttaggactcccttggccttctatgccttccctttccctttgctcctcccattcactgtagagtccattcagggtgcatgacctgggtgttgctaccagcagaggtgagagaaagagaaaaatgggagaaagacagagctgccagggagactcagcccccttctctcctgggatccttctttctcaccatcctgagtctgcaccctgatctacct

SEQ ID NO: 820984 - DNA, 568 bp, Homo sapiens
aagtaagtactttgccttcctgttttacatccagcttctgaatacccctgggagatggagctatgggcccagcctggcacagactatctttggtttatgaggtcaggtgtgccaaaccaccagcagggcagagacaagcatctttgtaggctttatattccaggcacccttgggcactggacaccctgcctcttttcttactcaggagttgattgtctgtggagtccagggcctgacttttccttcatagagacgttgtagttcacctcttacgcgtggtggcgtgtgcctgtaagcccagctactcaggaggctgaggaaggagaattgcttgaacccgggaggtgggggttgaagtgagccaagatcatgccactgcactccagcctgggtgacagagtgagactcccactcaaaaaaaaaaaaaaaaaatctccacagtgtaactctgctgtggttggtgtgtatctgcctttttcactcgtttttatagatgaaatactatkttatgatgcatcccaacaagtatttgttaatttcaagacagtagtggataaaagtgaggtgc

SEQ ID NO: 820985 - DNA, 568 bp, Homo sapiens
aagtaagtactttgccttcctgttttacatccagcttctgaatacccctgggagatggagctatgggcccagcctggcacagactatctttggtttatgaggtcaggtgtgccaaaccaccagcagggcagagacaagcatctttgtaggctttatattccaggcacccttgggcactggacaccctgcctcttttcttactcaggagttgattgtctgtggagtccagggcctgacttttccttcatagagacgttgtagttcacctcttacgcgtggtggcgtgtgcctgtaagcccagctactcaggaggctgaggaaggagaattgcttgaacccgggaggtgggggttgaagtgagccaagatcatgccactgcactccagcctgggtgacagagtgagactcccactcaaaaaaaaaaaaaaaaaatctccacagtgtaactctgctgtggttggtgtgtatctgcctttttcactcgtttttatagatgaaatactattktatgatgcatcccaacaagtatttgttaatttcaagacagtagtggataaaagtgaggtgc

SEQ ID NO: 820986 - DNA, 484 bp, Homo sapiens
aagatataacaggaaaaaaaaaagtatgtgcaacctatatcccaatacaacttgcagctgaactttcaaaagaagggaaaaggccagaattctgactgtccactagctctcaccatctttatagcttgtaaggaggtgcttgtatcacatgactccctggatcctcacggaagccctctgaagtgggtgttatcgtctcacagatgcagactctaggctcagagaagttaagtgacctgccccaggtcacacagctggggagaggagatcaggtgatgtgcttccaccacaccacagctgcctgagcacccactctggctctgcatacatccatgtaaccttgggcaggtctcttgtccctccacttcaggcatcttmtctgtacagtgggtgtgtttttctccattgccgccagctctagaccactgatgtggagatggtggcagaaggtggattaaagtgtgggttgggattcacaggggca

SEQ ID NO: 820987 - DNA, 646 bp, Homo sapiens
taaacagtacagtaccagagatattaattaggtactcagtaacagtatcactagctgaattaaatgtcacttcctctgggaaggtatccctgactrtacccatgtgagattaggtctctcccaaaatgttcacacagcatccagtactttaccttcatagcaccttgcatggtttgcaattatatataatttgtgcgatttgtttaatgtccatttgtggcataagaaatacatacttggtgttcgtaattgcctttgtgataggggaataggagcatcttttgttattcgtaacaagcccctttcaaccatacctgagtttatgctaatgaggtgactcttagtgggcccttagatagcttcaggatgaaggctggttgccagagaaaccaaccaagtgataaaagtgttggaactttcagttccaccaccagacctcaagggagaggaaaaggggtggagatagagttaatcaccaatggtcaacgatttaatcaaccaagcctacgtaatgcagcttccataaaaacccctagacagggttcagaaagctttcaggttggtgaacacatcaagatgctgggagggtggcatgtcaggaaaaggcatagaaactccatgcccctaccccctgtatcttgcccta

SEQ ID NO: 820988 - DNA, 603 bp, Homo sapiens
atctatacaatgggaacaatgatgctctccacctcacagagatgaggtgaggattaaataagttactacatggcaagcacggagagcaatgctctagtaggtgctcaataaatgttagcttttaytgtcactaatttttttctcggggggaaggggtggcaaataatccactatagtcatatcacatataaaagtattctcagtggtttctgtaaatcacatttcactttgcctgtgggaaaaaaaggagatgtaagttatttaaaataggcacatactttaaaatattgggtttattttaaaaactcagcacagtacaaactgccacacaaattactttatactagcaacaaccggtgctcctattaattcaagtgtacacatttaactccccaggttaaacaccctgtaatttaccttgaagctctttacattctgaagttatataaaattaagcaggaaaacattaacattaaatgaaaatcaattttgcacaaataagtgtgatcaagcagcttaaatcacctgaaattcttgtacttcagagaaaaatcccagatgacggcactggacaggttataaagagttcccttattccctggg

SEQ ID NO: 820989 - DNA, 506 bp, Homo sapiens
tgagacccaaagagcaggttgtgcgggggcgggaacgaggcgatgctgtctttggaggccctgagaaactgaggttgcacaggagcgcggctctgtcctcgaaacggcctcagtcgggtccctcctactaagtctggcctgggtccggcctgcacaggaggaggagtttgatcatgacgttgcagaggacttggggctcctgcagttcgtgaggctgcgcaagcaccactggctggtggacgacgcgtggttctgcgaccgcatcacggtgcagggccctggagcctgcgcggaggtggccttcccgtgctaccgctgggtgcagggcgaggacatcctgagcctgcccgagggcaccggtgagcaggcggcgtcggggaaggaggcacaaggtcycgggaactgctgcggggctaggagggcagagttaaggacggtcggagcagacttagaggatgtatgggcccagggcaggtgaaatgtagggatcccagggtgctggacag

SEQ ID NO: 820990 - DNA, 660 bp, Homo sapiens
ttccttccttccttccttccttccttccttccttccttcctccctcctttccttcgtttctcttttcttttctttcawtccctttttttttttttttttttttttgagaaagggtcttgctgttgcccaggctggaatgctgtggtgcgatcatagttcactgcagccttgaactcctggcctcaagtgatcctcccaactccagcttcccaaggtgttgggattacaggcctgagccaccatacctggcctggatacagtttcaagagaaattctcacctaggtccacatgggaacacgatgaggacatcagtcgtcatgttaattgtgatagttgttggcaacaacctgagttcattattaggggaaataaactgtgatggatacacaccattgaatactgtgcagcagttcatagcaacaaaccagataaacaaatagcaatgtaacaatccattgtaacaaatagcaatacaaatagctctaaaaaatttcttgttgagtgaaaaagatcagaaacaaatgagatatatgaaagttctgtgtatgtaaatacagaacagatagacatgcaaaccccatcacatattttataagggtacctacatatttagtaatatatattgtttcagctatctaccgatgcataataaaccaccc

SEQ ID NO: 820991 - DNA, 660 bp, Homo sapiens
ttccttccttccttccttccttccttccttccttccttcctccctcctttccttcgtttctcttttcttttctttcaatccytttttttttttttttttttttttgagaaagggtcttgctgttgcccaggctggaatgctgtggtgcgatcatagttcactgcagccttgaactcctggcctcaagtgatcctcccaactccagcttcccaaggtgttgggattacaggcctgagccaccatacctggcctggatacagtttcaagagaaattctcacctaggtccacatgggaacacgatgaggacatcagtcgtcatgttaattgtgatagttgttggcaacaacctgagttcattattaggggaaataaactgtgatggatacacaccattgaatactgtgcagcagttcatagcaacaaaccagataaacaaatagcaatgtaacaatccattgtaacaaatagcaatacaaatagctctaaaaaatttcttgttgagtgaaaaagatcagaaacaaatgagatatatgaaagttctgtgtatgtaaatacagaacagatagacatgcaaaccccatcacatattttataagggtacctacatatttagtaatatatattgtttcagctatctaccgatgcataataaaccaccc

SEQ ID NO: 820992 - DNA, 567 bp, Homo sapiens
ttttgtttatttttattttttgaaatggagacttgctctttcgcccaggctggagtgcagtgacacgatctcgactcattgcaagctctgcctcccggttcaagcaattctcctgcctcagtctccygagtagctaggattacaggtgcctgccaccatgcctggctaatatttatatttttagtagagacaaggtttcaccatgttggccaggctggtcttgaactcctgacctcaggtgatcctcccgcctggccttcccaaagtgctaggattacaggcatgagccactacgcctggcttttttttttttttttttttttttaagacagagttttgctctttttgaccaggctggagtgcaatggcacgatcttggctcactacaacctccgcctcccaggttcaagcgattctcctgcctcagcctcccaagtagctgggattacaggcatgcgccaacacgcctggctaattttgtatttttagtggagatgaggtttctccgtgttggtcaggctggtctccaattcccgatctcaggtgattcacctgccttggcctccc

SEQ ID NO: 820993 - DNA, 567 bp, Homo sapiens
ttttgtttatttttattttttgaaatggagacttgctctttcgcccaggctggagtgcagtgacacgatctcgactcattgcaagctctgcctcccggttcaagcaattctcctgcctcagtctcctgagtagctaggattacaggtgcctgccaccatgcctggctaatatttatatttttagtagagacaaggtttcaccatgttggccaggctggtcttgaactcctgacctcaggtgatcctcccgcctggccttcccaaagtgctaggattacaggcatgagccactacgcctggcttttttttttttttttttttttttaagacagagttttgctctttttgaccaggctggagtgcaatggcacgatcttggctcactacaacctccgcctcccaggttcaagcgattctcctgcctcagcctcccaagtagctgggattacaggcatgygccaacacgcctggctaattttgtatttttagtggagatgaggtttctccgtgttggtcaggctggtctccaattcccgatctcaggtgattcacctgccttggcctccc

SEQ ID NO: 820994 - DNA, 542 bp, Homo sapiens
ggccctaaatttttcttacgcatttctcatcttccattatttccatccagtgtgttttttcttttcttycttttcttttttttttttttggaggcggagtctcgctctgttgcccaggccggagtgcagtggcgcgatcttggctcactgcaagctctgcctcccgggttcatgccattctcctgcctcagcctcccgagtagctgggactacaggcgcctgccaccacgtctggctaattttttgtatttttagtagagatggggtttcaccatgttagccaggatggtctcgatctcctgacctcatgatctgcccgccttggcctcccacagtgctgggattccaggcgtgagccacggcgcctggccagtgtgttttttcatttcagacattgtagtttttatctctagaagttcacctggggactcttaaatatcctccacaattctacttaattttttgaacataatgggatatggctataatatctgttttaccatccttgcctgctaattctagcatccgtgtcagttctggat

SEQ ID NO: 820995 - DNA, 619 bp, Homo sapiens
tgcctccatccccaccgctgctactttagctcaggccttcatcatcttcaacatggactattacagtacactcccaacagcctccttgccacccacctccagggatctcatacattctccaractgccagcggtgtgcagtgcatgctggagtgcaccaccagaatcaccttcagcctgaggcactctctcctctagttgctgagccttctccaggaactgccctcagggaaagagaaccacttcactatggttatgtgcccctctgcaggggcagcctgtatccagtcatgctcagcacaggggtataaaggcctgacctctctgcctctctggatagggccactccacctccaaagcttccctgtgggaccaggtgaatctgttacagctggttcctcattcaactcctcctttgcccaaacctgctttgttagcgtcccctcaaatgctggtcccaagaacactccccagtaaacttcctgtatgcaaatctcccctcttgggtctctttcctgaagggcaagaccaaaaacagagagctgtctttctagattacaaacctgaccatgtttcttccctgccaacctttccacattcacttctcatcgcctgcactg

SEQ ID NO: 820996 - DNA, 665 bp, Homo sapiens
cagtggggaaggagcaagagataaatagccatcagaagaggtgctgtgggattacatctgtgctgctaattgcctaagcagtagctggagttaaaggatggctgrtagcatgtaaggtgcagctctaatggggtctgatacaaagccctgtattgccctcacttcattacctctctgacctcattctcattctttccatcagtcactctttcccacttcctctgccctgcttgttgttctcagaacaaaatggacatgcaccctcctcagggcctttgcacttactattctccctgccagaaaagacagctggctggcttgaaattcacacagctggcttcctcatcttcttcaagtttcaactccaaagtcacatttttaaaatgtatacataatattttacatattttcagggtacatgtgatattttgttgcagcaaatgtgttacgatcaagtcagggtatttgggggtacccatcacattgagtatttatcatttctatgtgttagaaacatctcaagttttctcttctagctacaggttttttgttttgtttcattttgttttttgagatggggtcccgctctgtcacccaggctagaatgcagtggcagcgatctcagcttaccgcaacctcagtctccagggtttaagtgcttctcc

SEQ ID NO: 820997 - DNA, 620 bp, Homo sapiens
tttggcaattttggttgtcaaatcttagccaccgagaggaccaatggtgtttatttgcagagttctctctatcccttggaaagcctcgggccttggtcataatgraagagcagctgtattttcatgttttctgtatctgaaggaccgctgagtccggctgggatgttcatctggctgagatgcacgcatgtgtgtgtttttaaaatttgcagagtttagaacgttctttggacgttctccatggcctggtgcctctccctggcagggcagctgttcctcccctgtgactcacccaggcaggagtggaggctccagggtcgggcagcagcgccgtcgctgggggagctgcgaagcgtccgtttccccagacagctgacagctgagagcctcacagagacacacagtgtgtggcaacctcacacaggccgcagattccggccaataagtcgttcctggtttgttcttcctctcgcataacgcgtggttgaatccctcctttttttttttcttttttaaatgtcacatttaatgttttcaccgctgtccttcaaatctaagttgtgcaaagtgaccagaaagtgtgccacggtaattgaccagcctctgagattgaacctttc

SEQ ID NO: 820998 - DNA, 599 bp, Homo sapiens
gctgggtacattgatccataaaaagcaaggtgtttacttagcagtgtaaagtrtactaaaactagtaataactttaattcagaattttcagaatttagagtccctgaacaataatcctctctcaaaaagtaacatgttatcttaattattgtttacagatgaattgtatggcttaggatacgacttaaaacacattatcaagaaaggaaagcaaacttgggcagataaactttccttatgtttcttcagacctgcttggcaagcctttataatatgtgattattatatccacaatgttgtactttatttcagaaaaaatcagatttgttttcctggaataatttttaaaaacatgtcacatcatgctttctaattttatttaaaggaatgtacaaattacagtcatatttcagtttgacatatttttcttctgattatgattaaaatgaaactacccccaaaaaagtaatgaaatgattgaaaatcttttttagtctgcattaaggtatatctttccactttagaatagaggtgtatctttcatacattttaaaggagtactctgacaagttctgtgaaataggttttttttaactttt

SEQ ID NO: 820999 - DNA, 456 bp, Homo sapiens
gttttaaagacataagactgtgcagaattccagagggcaggaatcatttgtctttgattcctagaacctgacataatgctgaacacatagctacatagaagacgctggtaactgcttccatttttgttaagagtggcagttaagtggctgaaaaaagtgttatgttaaaattactgctaaaatgtattaggtattctctacgaactaagagtgtgttttcttctatagacaaatcttttctggttggatttaaagttgcaatccccaccagcgcccacttgcaggaagctctttgtggctcaggtaaaattctctctaccgcaattcttcgcaattcttcaaaattctgtggaaaatcacgaaggaaggaaatgtttcccagtcyagttcacggactaggctagaaaaaatgtttagtaaatgctttactaaggaagacttccaataatcttttaa

SEQ ID NO: 821000 - DNA, 642 bp, Homo sapiens
tttaaagtaattttagtagctgcatatttcattccatagttatacctcagtttatttaacaggctattattggatattgaattttttcataattttatcaaaattataaataatgcctctatgaggatctttktgaataggtctttattttctattgaatgatttacttaccctaaaattctagggggaaaagtattggattgcaggatatatgagtatctttgtagttcttcctagtttgggcaaacatttaaaatgaaaatcagtccaccaacctcagtattggacattgacttcaattttgctgctgttaatcactatatttgtaaggttttttcacagtttaatattttcttcctctatcctttgtttagttgtatctaccttaaaacagcttcacttatctttctcacaatcataaggacaggggcattttaaaatgcgcttgtgtgtgtgtgtatctcatatttatgttcagttgaaaaaaatatgacccagcaactcatatggtaaatatgaaataaagaagtcagccaacctgtatatctgccactttcaataatggatttttctctggagtcaaaggaatgaacctttgtatctaaatgcctccttcactgattccatatgcccatatgcctg

SEQ ID NO: 821001 - DNA, 601 bp, Homo sapiens
taagtattttagttatgagatgaccataacatggagattgggaaagatggaacatgatgagattgtgagaaatggctagctgttaagtmtctccaaatgaccagctctaaactaattctctactcctttcctatggcttccatcctcaagatcacctcatggtcataacatcaacccggcagcaaaagctgccttccagaaaagctttacctggagacttttgttgacatttccttgaccacaactgtatcacacctatagctgcaagagagccaatagcaccacaagcaccaacagacctttctgcagtgatggaaatgttccatctgcactgtattatttcatagccactttaaacaagaaaataaaatgttaagtttatggaattttaaataatttaaattaaaatagttacgtgtacagattttcaaacgagcagtacagtaaaaatcaaaaactcctttcatcttcaaattacatggtaactataatgaggcaggctagggtggagaaaggaatgaacaatcattgagataacttgtttgtaagcatgtgaaactgtgtgaatgacttgacaattattgttgcatttagacctcat

SEQ ID NO: 821002 - DNA, 339 bp, Homo sapiens
ctggagagttggccccaaacttgtgttccccttccagtaaaatgacaaatcctcacaatggtggtgctcaaacggaaggggttctagcttagcatcagaagaagcaggttcaaatcctggctctgccctcgagctctctgaccctggttttcttctttgagagtgaggataacaatatcatcatctactccacagggacacaaggataatgatgcaaggtagtgtaagttgggatgttttccttggtagagagggacatttgatgatttgaatttgaaaccacaaccagtcttgtattcagtttgctcacrtaagaatccaagaaggtcaaagtatgca

SEQ ID NO: 821003 - DNA, 635 bp, Homo sapiens
cttcccgcctgagctggaaaacagatgtcttcttacgtgtctccacctrttgattggtagtgcctgcatgggacattatgttgagaggattgtgggtctagtgggaaacagtaccatgatcaactagtaatgtctcctgagtactaggatgaagagtactgatgtttttaaccaccctgcctatccctttttgttgactaacattttcctctagtttcctaaactatattttagctctcttctgagtcaagaacccactgtgacacatagctacatccttctaggctccttcttcaaatggttccattttatttctcatcctccctggcccttggtgggatgctacttttgggaggacagagtaactgtagctatgactcttctgcttgctaaactacttctgttgctatgatccagcaactacactggagagccttggaacagaggtagacttgacctaccctttgtagcactgcacgttgtggactctggactgatagatttcaaatgccagattttagccaggtgagctccccaatttggaccctaccaatcctaaacctcctttccttaagtctaaactgttgtatcaacctcattatcccaaagtcaaatgcctccttcataatcatctc

SEQ ID NO: 821004 - DNA, 627 bp, Homo sapiens
ttaggacagtgcctggcacatagtatgtgctcaataaaagtttgctgttattattactaaatgcacatcctactggcagatcggggcatcacctttagatgttaaccacaacttaactttatttatttttatttttttgagacagggtctcactctgtcccccaggctagagtgcaatggtatgatcttggcttactgcaacctccacctcctgggttcaagtgattctcctgccgcagcctcccgagtaactgggattacaggcgcccgccaccatgcccggccaattttgtatttttagtagacatggggtttcaccatgttggtcaggctggtctcaaactcctggccacaagtgatctacctgcctcggcctcccaaagtgctgggattacagacatgagccaccgcacctggcccacaatttaaccttaaatatagaaattataatgtgctatactgtttaagaaaaactaggtttcatatttccccagttgacacaaggtggttatcatcctttagttagaaggtacacttttgttcagtaatcaataaggatagatgtagacacccatttgatctaaratacagcatacatctgttgagttgccctttagagacaagctt

SEQ ID NO: 821005 - DNA, 615 bp, Homo sapiens
gccacaggacctcacaggagaagcagctggctcaggctgttggaaggaaggtcagtgggttagtgggtggagagatagggatggtgcctgggaagaagcgatgtgtaagctgattgtgtgttgaggtggarttcgcctagagaagggagttgctgtggtctgtgaaggctgaaaggggccaccccagcaaagacagagtagggcagacaccttagggattctcctagcatcttggaattgtaagaaactgagcccaattgcatccttatgaagcttgaggagatgagggtcccagaaagaaaacactatcaattcactggtccctcactgggggacacttctgtgcctagagccagagccaggctcctcagtgtggccagaaaatctttaaaggctggctgaagatggaacataagaacacatcagtgaaacacaccttctgtcagaaagctggacgaggcactggcccgggaagctggagtcccacagggaggtgtgagcaccagttggttgacccatgtccagaaacaggaggcctgggccacccaggttctcctgggaggtggacctcagaaagcgtctcttagaggtttccccaacagatgtacacaggga

SEQ ID NO: 821006 - DNA, 624 bp, Homo sapiens
aaccctaagacgtaagtagagtatgggacgtgactttccagaggggtgatcatttacccagtaagtgaggacagtgaaattctctgagttcaaagattaaatacctactttttttttttttttwaatgtaaactaccgtctttcctcccctaaatgggttggcttcctaagctctgatctggtgagaagctgtttctcctgaagtctttacagcccagctcaggcatccaggagggtcataaccatgtatccttccaggaatctgtctctggaaactttacagtcacacacacattcctcccctgggctgttgttcagattcagcacttagacaatgcctcttgggatcagtgatagtgccttttcccctgggtcactcagaacttatttttccttttaggcgaaagttcaccaaaaaggccccaactagcagctcccagagaagtttcgtggagtttatcttggagcctctttataagatcctcgcccaggtgagtgtgtcaggtcacactgggcagatctgctcttataagcacagtgtggaagagctggtgaactcacacttccctctgtccctaaacctgctcagttttatgtcaagtataagggtggttgttggtcact

SEQ ID NO: 821007 - DNA, 463 bp, Homo sapiens
tgacctgatcaagctcacacccaggtccttggcttcaaatccagtgctctttctgctgcccccaaatgctttcatttgctcttagaataaaccccaagacttctgtggcctgtgagactgtgtgatcatgcccctgagatcttcttcaaactcactcgcccccctggatcagagccacactggactctggctgctccttgaacgctgtaagctcattccctcctccaggcctttgcactgctatttcctccgcctggaaagtttgtcttcgccatccagatctcagctcccatgccaccttttcagaggccttccttgcccaccaagctaaaatagatatttcrtttccctcagacaccacctgacacggtctcatatgtctgtggcctgttggttgcctgtgtcctccctgagggttcctgtctggccctataagctaggtctctggaacgcacctggctga

SEQ ID NO: 821008 - DNA, 621 bp, Homo sapiens
gttttacatttctggcatctgggtatttcccattctttattragagcttagctatgtgttgatattttttaacatagcattttattcagatttctaggtgttctgaacaagagggctctaataataattcagtccactgtgtttccagaactgaaatttgtccatatgaaatcttatgcgattgaaaatctctaaatcatatgttgatatgtgattatatcaactggataactctatattaggtattgagagcaacagactttcggcaaacagatgtcaatgttctacgagaaactgtttatcagatggcataaagtcatttctcatacaattaaagtatcacaaggatacaaaataggatacgtaccaggctgggtttgatgcctacactttcagccgcttcaaatgccaacaagagattcctcttctaagttaaaaagacaaagagactggaatcagtaatttaaaatatatagcttttgccaggaaagaatatcaactgatattcccatatagattattcactattataaagcgaagaatagtaagtcaagtgtacaatatttgatctcagtttaagaaaaaaaaaaatcaacaggttgcaactgcaccaaaactaac

SEQ ID NO: 821009 - DNA, 549 bp, Homo sapiens
aaccagtctcattgagatgaaccaggtacctcagttggaaatgcagaaatcacccatcttctgtgtcartcacgctgggggctgcagactggagctattcctatttggccatcttgctctcatttttttcttagtctggtgatagctttgccaattttttatatcttttcaaaacaccaaatttgcatttcattgatttctctattgttttcttcattttaatttcatttatttctgctctgatctttattatttgtttccttctattaattttgggtttggccagctcttgcttttctagttctttaagatgcatcattatgttatttatttgaagtttctcttcttttgtgatgtaggtgcttataacaatacatttccttcttagtaatactttcactgtatcccataggttttggtatgttgtgttcccattttcatttgtttcaagacatttttcaatttccttcttaatttttttattgacctactggttatttgggagcacactgtttaatttctgtgtgtttatatagcttcaaaactttc

SEQ ID NO: 821010 - DNA, 594 bp, Homo sapiens
ctggacctatgactagactaaagtcacagtgggcccccaaaggtgaggttgagagtgtgacccatgatgtatgacacactcgaaaagaamtgcttgagttttctaatttatgtaaacagaaatctggagaacagatatgggaatggatattaaggtatgggatagtggtggaaggaacatagagttggatcaggttgaatttattgatttgggtccactaagtagggactctgcatttaatgtttcagctcggggaaccttataaaaggttctaatagtttatttgcttggtagctgaaatatggattaacagatggcccactgtgagcgagctggaaatgcctgatctgccttggtttaatgtggaggaagagatccaaaggcttagggagattgggatggtggagtggattaatcactctagacctactcatcccagctgggagggtctagaagacatatccttgtccagtgccttacagaacagatttgtgagggttgcacctgcatctttgaagagtcctgtaattgctgttctctgtatgtcaggtctaatagtggagaccacagtcactcaactacagaatttaaata

SEQ ID NO: 821011 - DNA, 445 bp, Homo sapiens; identical to SEQ ID NO: 816958

SEQ ID NO: 821012 - DNA, 532 bp, Homo sapiens
acaacaagtctagaacgtcttgccacaacaaawaaaaattgtccccatcactggcaactatgtccctaacctgctttcttaattctcatgccatagttacaatcatgaccttggaagcaataagcgaataaattaaactgttgagatttggaatataattttcatagtctaatgcaataggagagttaacattcatcagataattcttagtttgatttctgacacatatcactagcttgccagatccttaaaggcatcacgtccctgaaagattggatcttgttgatgttagtatcattcacattgcctagcacagtctcttacacataatgagtattcaacagaacaaacagaaagataatcatattcaaccataattcactgatcatgtcaagttgcacatatttccagcatcttaccaagttactgttcagggcgatccacacacgttcattagatgtttccatctgcagccacgcaaatgcattactgtagggatccagaatgctggctataagggaattgtgaagct

SEQ ID NO: 821013 - DNA, 532 bp, Homo sapiens
acaacaagtctagaacgtcttgccacaacaaaaaaaaaktgtccccatcactggcaactatgtccctaacctgctttcttaattctcatgccatagttacaatcatgaccttggaagcaataagcgaataaattaaactgttgagatttggaatataattttcatagtctaatgcaataggagagttaacattcatcagataattcttagtttgatttctgacacatatcactagcttgccagatccttaaaggcatcacgtccctgaaagattggatcttgttgatgttagtatcattcacattgcctagcacagtctcttacacataatgagtattcaacagaacaaacagaaagataatcatattcaaccataattcactgatcatgtcaagttgcacatatttccagcatcttaccaagttactgttcagggcgatccacacacgttcattagatgtttccatctgcagccacgcaaatgcattactgtagggatccagaatgctggctataagggaattgtgaagct

SEQ ID NO: 821014 - DNA, 592 bp, Homo sapiens
gcttaccttcagaagaaagataaacgattctttatctggagctccacagccttttaaatcctggagagtatttcacagttacaaagttccctgtttttaaaattctttgactgtgcactgggagctagagaggattatttcagcccagaaaagttttcagttgctatggagagagctgctctgaaggtaacaatgaaggtggataaaagggagaactttctgtctggtagattttcaaggtaatcaaatcagtgtggttcatgaatttaactttttagatcaagaattaaccaattttcttaggctcacctactgtcacttgcctttcaagggacagaatctaggtcaaaggatttcacctcgcagaatagaaagacttcagtgttagatgaagattttttcctctccagttgattctgtaataactgtttcatccaggctcaaaccaaagatttgttgaaaagataggctctttggaaccatatttgttttgcragatgcagaagcctaaaagattgaagtctttcgtaatgagatgctttcaaatgaaaagtattggttgaaggaatgaaattcttaccagggatgtagg

SEQ ID NO: 821015 - DNA, 607 bp, Homo sapiens
caaaacctgggagacttcattagttctaggcacttaaagaaatctgcacctaccacatctaacaccacatgtatacacatcacgataaaactaccaaaagacagaaagtcttaaaatctgtgagagagaagggtctcatcatgtacagggatcttaacactaatttcacattagaaaccatggcgtccagcaagcgatgagctgacatcgtgaaaaagatgaaagaaaatgactgtcaagcaggaattttctatttaacaaagctatcttacaaaaaatgaaggaaaaagtcagacattcctaaaccaaaatgaaaagaaattatcactttaagaactactgaagaaaatacttccagtggaaataaaagggcactcaacagtaactcaaacccacacaaagaaataaagagcatcaataaaggaaactacaagggtaaatataaaaaatagtttaaatgtgctttttatgtataactctatcttttctaattgaaagataactgtgtaaaacaatacttgtaaatcwgtgcttatgggtatgcaatggataaagttgtttttgtctgccaataacagcacagaggaaggcagagggaatggagcta

SEQ ID NO: 821016 - DNA, 545 bp, Homo sapiens
ctgctctcaccgttaatctttgtttttctttatgtttccataaaaatacccctcatgcccaagactaggagattggttcgacaaaatacggtgtagtgtgcytacgttaggtctttggtgctgattgatatttgttctgatgtatgttccttccctttgcagatccttacctcacaaggcctgaccagtgtcttcaataaacccacttccttgtttgtgaaacatctggggaagtattaaatgggggaaaggaaggaattaacagcccaccaaaatggtgtgaaaattactttaaactcaaaacatcttcacaatcagcagccacagaaagaaacattatctaaacttaggcagagcctcctgaattacagcttctatgaccccctctgagggagtttcccgattgtgagaagactcatcctaggatcagcgagtgaggatttagctgtcccttatcatcacaaggcccaatagaaacttccctactttcccatggagtccaaaccccactccccctctctgttaagttggtatataaaccttta

SEQ ID NO: 821017 - DNA, 545 bp, Homo sapiens
ctgctctcaccgttaatctttgtttttctttatgtttccataaaaatacccctcatgcccaagactaggagattggttcgacaaaatacggtgtagtgtgcctacgttaggtctttggtgctgattgatatttgttctgatgtatgttccttccctttgcagatccttacctcacaaggcctgaccagtgtcttcaataaacccacttccttgtttgtgaaacatctggggaagtattaaatgggggaaaggaaggaattaacagcccaccaaaatggtgtgaaaattactttaaactcaaaacatcttcacaatcagcagccacagaaagaaacattatctaaacttaggcagagcctcctgaattacagcttctatgaccccctctgagggagtttcccgattgtgagaagactcatcctaggatcagcgagtgaggatttagctgtcccytatcatcacaaggcccaatagaaacttccctactttcccatggagtccaaaccccactccccctctctgttaagttggtatataaaccttta

SEQ ID NO: 821018 - DNA, 520 bp, Homo sapiens
attctcccccagaggtaccgttctacagccacactcactactttatccatgtctgtgtgcagtgagcatttttctgttcttctagtttcactggagttttattttatgcacccttcccctgccccayttcttgagaccagctggaccgcatgctggaaaaacaaaacaggagagaggggaaggtccctcagattccaaagcagaacacaaccaaggcttcctaagtaaatgaaaaggacttggagaagacataacacttcagtgtagacacttaagttgaaatttctgccctgtcgttccaatgccatgatggagaaggacccctaaaatcgcctttggcgtgtgcagctcgagcgttacaacgatgcaaagtgcggtctttggaggatgcgggagtcggtaacccctcaattcactctcgccgttccttctctccagtctgcgcgaaagccaggtccgagggcttcgaagatctgggggacccgagctgcgcacagtggcgggaaacgagcgggctcag

SEQ ID NO: 821019 - DNA, 519 bp, Homo sapiens
atggtatctccttttttcattcctgatatttgtaagctgtatcttctttgctttttataatctttctaactagaggtttatcaattttgttaatttattcagtgatrctgcttttcatatcattgactatctattatttttctgttctttatttcagtgatttccaccctaatttttattatttcattcttctacttttgcttcattttgtgcttctttttataagtctttaaaatggaatcttagataattgatttgggatctttcttcttttctaacaaaaacatttacagatataggttttcttttagatacttccgtagctacattcacaaattttaaaatattgtgctttgtttttttaagagtcaaagtattttctattttaccttgtgatttgtgtttcatggactatttaggaatattatgtttaattttctaaactatgggaatttttcagatatacttttggttaggtttttaatctaattctgatgtgatcagagtatactctatatg

SEQ ID NO: 821020 - DNA, 623 bp, Homo sapiens
ttctgcctcacacttaaggccccaaaggaacaagaataaaagcaatacttagattatcaggaactacaatgccaatgawggaatgacaaccatcattgttgtcaacaacatgtcaacaacatcaacaaatagaaagcattcctccattcatcactccttctgggtaagccagttttaacttttttccctaaaactcaaaaagttgtgccagaatgtgacaaaacgttctataactttaatccctgtttagataattttttgcttctatatacaaaagagaaaaaaattgagtagtcattataagatctatacattacaaaaataaatcatttgcctatctaaccattataatcttcccaacttgtaagcatgttcaaattaccacagatgaaggaaaccatttaaataattctaaaaacaccggttttaattgtaagatatgtcatttgatttgtgtgttggtcaaaagtacctaaattatctttttaaatcattggtataaaaccaaaacatcttccagaaccacaataataattgttttcttttctcctggtgcatttcttaaaatgttaacttcagcagcagtatttgaataaaaacactttttgagcacatggtattgt

SEQ ID NO: 821021 - DNA, 398 bp, Homo sapiens
tccattccttatttatgagaatattattttcctaaaggacaaatctgaccacataactagagaacttagtgtatcttaagattcagataccataatgtggcgtakgaaatttttcaatatcttactttttcagtttcattattcattactctccttccatccatcacacatttcagcctgtcccttgactgtgctatcagctttcttgcattcatttcttaatacataattcttttcttaaactaatagactttctatattgtagaaattttaggtttatagaaaaattgagtaaaaagcacagagttcctatatacccacctcttagcactttcccctgctcttaacatctttcatcagtatggtacatgtgttacaagtgatggaacaaatattga

SEQ ID NO: 821022 - DNA, 541 bp, Homo sapiens
ggctggagtgcaatggcgccatcttggctcactgcaacctccgcctcccaggttcaagctgttctcctgcctcagcctcmtaagtagctgggactacaggtgcgtgccaccatattcagctaattttttgtatttttagtagagacggggtttcaccatgttagccaggatggtctcgatctcctgatctcatgatccgcctgtcttggcctcccaaagtgctaggattacaggcgtgagccactgcgccggccgaggtaggttaatttttattatgctcattttactgatggggaatttcccccaaggtcacagagctaggaagtggtgcagtgtgtctgcagagcccacattcttagcacagaacaacactgcaatggagctgggcagtagtagacaagtgggacaaaaatacggcatggcttcttgactatcggccatgtcacctgaaacccacactgagccctcacatccatcatctatggaagttgtaggtgttaacgactcccatgttaaaatcacataaacatagacataggcg

SEQ ID NO: 821023 - DNA, 406 bp, Homo sapiens
ggaggcaactggagagattcatacaatagctgagatttggggcactggagtctagaggccaagtgcrtagactttgaagtcagacagacctgagtttggatcccaatgttgctaattactagctgcctgatcttgagcaagttgcttctctgaggtcatttttctcacctctccctgggatctaattcacagcgtgttgtgaggattaaatgaatggacattcatctggcttttcaacatctattcatctcttcctccatttgaaagcagccatgtaatttggttagaaaagcctgcatcccaaactccagaaataggccatggttgatccaatcaattaggataacaccagccctgttgctacactgattggtcgagggatgagttacctaggctatgccaatca

SEQ ID NO: 821024 - DNA, 406 bp, Homo sapiens
ggaggcaactggagagattcatacaatagctgagatttggggcactggagtctagaggccaagtgcatagactttgaagtcagacagacctgagtttggatcccartgttgctaattactagctgcctgatcttgagcaagttgcttctctgaggtcatttttctcacctctccctgggatctaattcacagcgtgttgtgaggattaaatgaatggacattcatctggcttttcaacatctattcatctcttcctccatttgaaagcagccatgtaatttggttagaaaagcctgcatcccaaactccagaaataggccatggttgatccaatcaattaggataacaccagccctgttgctacactgattggtcgagggatgagttacctaggctatgccaatca

SEQ ID NO: 821025 - DNA, 628 bp, Homo sapiens
accctgcagggatggagcttccagaggaaggagcaggctgccatctttgctgttttgcagccttcactggtcataccctgtatgacacttggtatgggaaaaactgaggcaactagggtctggaatggacctactgttaaaaaccgaaaacaacatcaatgaaaaacctgacacaaaccccattcaaaggttaacaacctcaaagatgagaaaggatcaacacaaaaatgctaaaaactcaaaaagccagtgcctctcttcctccaaatgactgcaacacctctccagcaagggcacagaactgggctgaggctgcagaactgggctgagatggctgaattgacagaagtaggcttcagaaggtgggtaataatgaactttgctgagctaaaggagcacgttgcaacccaatgtaaagaagctaagaatcatggtaaaacattacaggagctgttaaccagaagtaaaacactcctcagcaaatgaaaaagaattgaaatcataacagtctctcaaacctcagcacaatcaaattcactcaaaaccacacaactacatggaaattgaacaactgctscttaatgactcctgggtaaataagtgaaattaaggcagaaatcaaggagtt

SEQ ID NO: 821026 - DNA, 221 bp, Homo sapiens
attgaatattgaagtgtattttttagaaatttgtgggatatgcaaatacagattagaatcacatgggtatattcttagaygataaatcagtatctagaatgtttcagtttacttttaaaaattattttaaagcaatgcaattaggtaatgtctgagctacattggatattttagtctgatatcagtgatcaatatgtaaggagtcagtatgttttagtgta

SEQ ID NO: 821027 - DNA, 644 bp, Homo sapiens
agaatctacagataggtggctggaatgggacagccataaattaggtattttcatgtacagatgcaataatttaatatttaacaaaaaaaaatmagaagcctgtagggggagataaattatttaacaaattatactgcaaaaattggctatttgtgaaaaatgtcaatatggattctcaacataataatgaattccagtataccagagttaaatgtaaaacataatcaaaccacaaaaaactagtttatatactcatttaaacagcacatatactaaaattgaaacactatgaatatttgatgtacaaatattttaatcattcttctgaaaatcaaaatactttaaaaaatgtatatataaataatcaattgtcttacagtacataaaggcaatgcaaaaaaacgaaagtagcaaaggccaatgaatttccctgaataaaaatttaaacacttatatgttaaagaaattataaataaaactgaaattgggaacatttacaaaaattaatttgattagaatttaatgttctcaatatataaagatgatgtaagaagtaataagacatacttttacactccagtagataagtaaagaaaatgaatagataattcttagaaggaatttaaaaaaacctgtaatactca

SEQ ID NO: 821028 - DNA, 454 bp, Homo sapiens
tgtaaaggaaaaatcaggcaaaagaaggggagagagaaaaagaaaacagaataaacctctaaagaagaggcaagtaatagctgagtaatcctgaaatttacaatatcctgaactgaactttgtgaagctcatgcagaaagaaacttcagatttcatgcaaatttgagaataatcattatataaaaaccaatttggtaatgagtatttattgaataattaatatgcattcagcactgtactagacacagtggaacacagaagtgctagacatgacttctccaatacatacattatcctatcatgtccaaaagataacctgattcaaaaatgcgttctctgacagtgttttggccaaggagttggttaaaaaaamcttcagttttggatgtcaagttagactttgccacaagattagagggtaaggcctccatctaagttgcttctaaacctccaa

SEQ ID NO: 821029 - DNA, 542 bp, Homo sapiens
tttggacttggactgagcctctttgggagccacactactagttccctgggagacatgcttgtggctcctctggttttccagcttgcagacgatctctcttgggactttgtgtttgtaatcatgtgagccaattcccccttaataagttccattttatatatatcccatttgtcctgtctctctggaagatcctaaccaatacagcttggttaaaaaaagttaaacagggtactcactctgtggttcttctgtgtacgtgttaataaaatttgtgttccttttctccaattaaaaaacaaaattggccgggcgcggtggctcacacctgtaatcccagcactttgggaggccgagacaggtggatcacgaggtcaggagatcaagaccatcctggctaacatggtgaaaccccgtctctactaaaaatacaaaaaacattagctggcygtggtggcacatgcctgcagtcccagctactccggagggtgaggagggggaatcacttgaaccctggaggcagaggttgcactgagctgaaatcg

SEQ ID NO: 821030 - DNA, 500 bp, Homo sapiens
gaagaataaaaatttaggggagggtatgatgtgggggtgttgaactgcggtgttctatttcgttgaacacaggcctytgacaggttgtaaaagcagcatttatttcagcaggcagctgaggactcattcacggaaaggctacgccccttcttttgctgatgctctggtgtgcacagaaaggactcccgtcctggcttgataactggattttgatgggaaattttccttctagtaaaggcagaggtaggggaatcacagaggtacaaaacttaccacttgcctttcccatagtctggccaaccccgccccaaagggctccctcccttctcctcctgcaccccttcccctcagccagctgctgacccctctctgtcttcccagtatatgctgcacaactgcccctctagcctggcccctcaggctttcctgagaatttgcattgtagcctttgcttgcacctgctacacagcccctccccttcgctctcctctcaggggtct

SEQ ID NO: 821031 - DNA, 633 bp, Homo sapiens
tcgtttgccgtcagaggtaggatttatataaaatgcgcgtttcctaggtctacctcagacctactgaataaggatctccragggtagagctttcgaacttcgttcaccaattcgataaaacttgccaggctccttgtgagtggctggcgctgagctctgcatcggagctctgcatcgggagtcgagaagagggggcgccatggatccgggcgcggaggtcgcgcagcctaggtagaaggtgcgcggttagcacgtaggttaaaaacattgagaatgacactcagttctttcccacaactctgggttgcttttttttttttttcttttgagacaaggtctcactctcaccaggctggagggcagtgacaacatcaggctcgctgcagcctccacctcctaggctcaagcaatcctcccgcctcagcctcccgagtagctggggctacgggcgcgcaccaccacgcctggctaatattttatttttttgtagatatggaggtcttgctatgttgcccaagctggtttcaaatttcggggctcaagcgatcctcccaccgcggtctcctaaatcgttgggatgacaggtgtgaaccatagtgcccggccggaatttgctttttaaagaagattcca

SEQ ID NO: 821032 - DNA, 599 bp, Homo sapiens
caatccagtatgcttttgcatagccagaaatccgacggaccaaattatcagcactttttattaatttatcagtgatctttcatgttgggtagggttttgattatcacttttgtraaataatacatttctgtccgttttaaagcaaacataattttgactcataagaaataacttaaaatttaagatatattattatatgttatatatttataatttaagatacattattttttatacttttaggaatagacagtaaattagatgtgatttattgaaaattgttgagtataaatactaatagatcctactttttaagacaatccaacatttaaaacactgaggctgggcgtggtggctcacacctgtaatcctagcactttgggaggccaaggcaggtggatcacctgaggtcaggagttcgagaccagcctggccaacatggtgaaccctcatttctactaaaaatacaaaaattagctgggcgtggtggcacacgtctgtaatcccagctacttgggaggctgaggcaggagaattgctggaacccaggaggtggagtttgcagtgagccaagattgcaccacctcactccagcctgg

SEQ ID NO: 821033 - DNA, 444 bp, Homo sapiens
gctttaaaaaaatgctactagtgtatgattctaatgyaattttcagaactgaaatactgggggccaaaaatatatgataatagcagacaatctgcagctcacacacgaggctaaatcaagcggccaggtcctcctccgatctctgctgatgctgctttcagaggccttcggagaccaccccacaccctccacggctactccccagccccactcccattacccacttcacatattacctatgcatttatctattcatttgaacatccttcccagtggaatctgtttacacttatatttgcagtgtgtaaatatctgggttataatgcgagaagcagcagccaaaggcttatttgtaatagtgtagacaggaagcagcccacctattctcaaatcccacactgaagttcaaaggaacttattttgacttactgaggagtccctgct

SEQ ID NO: 821034 - DNA, 531 bp, Homo sapiens
tggcacccagaaagcagaggctagagacactgctaaaatgtgcaggatagcccccacaacaaaaaattagcgggtgccaaaatctcaatagcaycaaggttaagaaaccctaatacatatcatacataaacaagtttacggaaacatcccccattattgaacactgaggtttgtttccactacatataatgctaagataaaagttttcataattaaaaccttttttttataagttaaactattagaaattactaattaaaaaatacatgcatttttgccagttctgaaatggtggcatagaagcaagttggcttcactcactcccacaaaaaataaataaatatacagcacagagattatcaccagcaatacccaagaactcaaatatgaggatgagactattccaggagccagagacatgaaaaatttctgagcagagggaagaaaaccagacttcaatatctgtgaaaccccaacccccaatctgcccagcagaaagtaaccggaaaatttcctctgactcataatttc

SEQ ID NO: 821035 - DNA, 622 bp, Homo sapiens
aacatatcttaggccagaaaacaggtctcaacaaatttaaaaaagtagaaataatatgaagtatcttttctgacctcaatggaataaaactagaaatcagtaacaaaaggaacctcagtaaatacgcaaayacgtggaaatttaaaaacatgctagtgaacaaccaatcgaagaaattaagaggaaaatcccataggtttaggtatgttgtatttctgttatgatttgtttcaataatttttaaaatgacaatactactcaaaaattacaaattcaatggaatccctatcaaaatatcaatgccattcttaacagaaatagaaaatataatgctaaaatttatatggaaccagaaaatattccaaatagccaaagcaagcctgagcaaaaagaaaaaagctggaggcatcatatactacctgatttcaaaatgtagtataaagctttagtaaccaaaacagcatggtaccagcataaaaacagacacatagatcaatgcaacagaacagagaacccagtaataaatctacgcatttgtagccaacttgtctttgacaaaggtgctaagagtatacaacgaagaaaggacagtctcttcaataactgctgctgggaaaacagg

SEQ ID NO: 821036 - DNA, 530 bp, Homo sapiens
ataaaatctgtcatggtaaacgttaaaaaattatctctttctagttcaattaatggatatggwtaaataattgtatgccttaaagcaaacatcttatttaaatgtttaaagcacacgttatttaaatgttaatacaattctgatgaagaaatgtataaattctagcatacaagaccaaaaagactagaatgtatactcagcaacttaagagttaggccaattggtcatagcaccatatgctttatgtattccaagaacagaatatttactttcttgtatgattttcgatagcatataatagccaaaagatcaatatatataatattcccattatatttaccacctgtaacattcatttggcacctgttactaattttttaatcacaggaaatagatctccctgaaatagatttaaaactttatatacggtatagtctactttatagggtaaaaaaagctatgtatacatgtaacttgattattaaaaattattgtcaacaatttttaaatctaaactttgaggtgcttca

SEQ ID NO: 821037 - DNA, 459 bp, Homo sapiens
ttcagctgtaagcaaaggaaaacttgtgaccaaagatgaattgscctaatcacaaggatatttattgctttcttaactgaaatgtaggcagctctagggctgattcagcagcttaactttgtcattgtgggctctttctgttcctcttttacactccctcagtctgtttggctttttgtcctttgtcctattgcctcatgatctcaagggggctgctgaggttccagcattgcatcaacatttaaaagcaaaaagcagagggtaaaggtttgctcctcatgtggcccattgaacttgagtattgagaagcttctcaggaaacatccttttatatcttgttgaactgggtcactggctgtgagttgctctcaggaaggcaagggaagcaactttttcagcctctagggaggaagagaaacaagagaaaagaatgttggaatttttgaatagccaacccca

SEQ ID NO: 821038 - DNA, 529 bp, Homo sapiens
cagagcagtcgaacggggcagaatgccaaagatcttcagcttctctggagggtgtctgtaatctttctgtaggtcccacctgccctgcgtcaatgcaaggtgctatggggcccccaagcagatccaccagggcaggggttctcagccctggctgtacttagaatcacctgggggatcttcaaaacatgcttaatcaggtccccaccctagacctactcagtcagaattggtggggggaagcagtgaggcagacatgctattttatttttaattcccctatgtgactctaatctgatccagggttgagaagcactcactggagccttgctcctcaaaatgtgggtccaatgcccagcagcatcagagcagctgggagcttgttagaatctcaggccccatctcagatctacagaatcaacatctgcattttagcaagacccgcaggtgattcgtgcatctatcagcttttgagaagcattgcacaggtggatccmctagaaagtttcacgaggacagggacgtttgtttt

SEQ ID NO: 821039 - DNA, 593 bp, Homo sapiens
gaaaagtgagagaactaaatatgaatacaaccatggagatggggaagaaagaccctcaatatgaagaaataccccttagaacaattcaggagcagccttctgggtggtgaactagggaaaccaggctctggggcagtttctccacacttctgatttcctcaccatgcaatgaggacaactacactgtccccattgtagtggtaacaattaaatcacacagtgccaaagcctgtgcagcatatagacattagactataaactttgttatgaaaggagttatttattgctaagcactgaaacagtatccaacatagtgtggatactttagctgaagtagtcacatgagtctttcagtctacagcaagcagccacttactgaaaatgtgccattgatgctgttactctcttggaagggacccaacatgatgcctgaaataggatacaggttagccccacttcaggagtttcctgacacgctgggtgtgttctctttaaaacatggctaaggcacttagcctaatgacatacatatttgccccaactttatatgaaaracagtggagggtggtagaaaattctggagtttggatgaa

SEQ ID NO: 821040 - DNA, 616 bp, Homo sapiens
aattattattattgtttttttagagatggagtcttgttttggtccccaggctggtctcaaacttctggctkcaagcaatcatctcagtcctctcactcctcccaaaacctgggattacaggtgtgagccacatcgtccagccagagaagcatttttgcaatgacataatcaagtacaaaaaaaattgtaaatatttgtaatctgaacatttcttatttcttgccttttaaatgctgataaaagtttgtgttatttgtactacgattcaacataggaccatttttaaactcaatggactcttgatgtcacttcatgataataaacacttcttttagaatccccagttttcaagtgaggatcaaaattcagtaccccatcagttaggaaacttttttctgtgaggggtcagataatagttttgaaaatattgtatgggtagtaatataacaaatgagagaacagatttccctaagatttttattggtgaaattcaaataataaaaataaaaataaaactttttttgtaatattaggtttactaataaggaaaatggaatccattttttgaattaacattttatttattggaggttcaaaattgatgttccttaccatc

SEQ ID NO: 821041 - DNA, 486 bp, Homo sapiens
tcatgaatcactgcaaagaaaaactaggcacaacacatagtaaaacttcagaaagtaaaatataaaaataaaatattgaaagtgactagcaaaaaaagactttttaatcataaaagaaaaaataaggaaaacaattgacaatagaaaataatggaagctaaaaacaatgaaatatgatttttaaactgccaaaataactgctaactttttattctattctcacagagcttcctccacaataaaggcaatataaacataatatatggcaaacaaaagctcagagatttgattggcagaataattatattaagagcattagttaggaagttctccaggaagaagtaatttgtaggcagaaacaaagaaatttaagaactaatacatagccctaaataagataaggaaaattactgtagactttataaaacaataaaaatgtgkttcaaggcacataaattatatgaattattaaaatacatgtaatca

SEQ ID NO: 821042 - DNA, 623 bp, Homo sapiens
tccttctctgcctctcttagcaggagctctttcagagaatgggaaacacaggtccagagaggttcagacctgccctcctgacacacacacagcaggtccataaccaaaccaggctctgtcttaggtacgatgatcccagaccaggggctcctccctcttcaccatgtatcctgggcactggagaatgcagacctgctggcccactgcttccagagcccctgtttacccctttcaccaggcaaaggtggtgaattcacacatgggtgcatgtgtacacacatgcctgagtcatgccttttctatccagaacaaaactagcaagcaggctgcctttttctctagaacacaaatgaacacagaactgagaagtaggtcatgaaggcccttagggtttattaatcccttcattgattcaacaaacgtaaaatatttacagtccgtgtattaaaactcttgtgcactttgctcatagaaagcccactctagggctattaactgccagtttacaaacaatgttgacaagctgctcacctgcccccctccacagaaatgtaagcgccctgaccctgaccctggatagagtrtggcccactcctactcctgggtggcctggtcattccagt

SEQ ID NO: 821043 - DNA, 598 bp, Homo sapiens
ccattctgtagcttatctgtttactttgttgatagtttcttctgctgtgcagaagctctttcatttaatttggtcccatyatcaatttttgtttttgttgcatttgactttaagaatttagtcataaattattcctcaaggtcaatgtccagaatggtgtttcctagttttttttctaggattcttacaaagtcttcacttaaatctttaatccatcttgagttaacttttgtatatagtgaaaggtaggagtccagttttattattctgctgcatatggctagctagctatctcagtatcatttattgaataggaagacctttccccattgcttatttttgtcaattttgttgaagatcaggtggctgtgtccctttatttctgagttctctactctgttctgttagcctgtgtgtctgtttttgtacatgtaccatgttcctttggtctgtatatagccttatagtttaaagtcaagtaatgtgatgcctccggttttgttgtttttttttttttgcataggatttctttggctatttgagctcttttttggttccatatggaattttataatttttttctagttctttgaaaaaa

SEQ ID NO: 821044 - DNA, 598 bp, Homo sapiens
ccattctgtagcttatctgtttactttgttgatagtttcttctgctgtgcagaagctctttcatttaatttggtcccattatcaatttttgtttttgttgcatttgactttaagaatttagtcataaattattcctcaaggtcaatgtccagaatggtgtttcctagttttttttctaggattcttacaaagtcttcacttaaatctttaatccatcttgagttaacttttgtatatagtgaaaggtaggagtccagttttattattctgctgcatatggctagctagctatctcagtatcatttattgaataggaagacctttccccattgcttatttttgtcaattttgttgaagatcaggtggctgtgtccctttatttctgagttctctactctgttctgttagcctgtgtgtctgtttttgtacatgtaccatgttcctttggtctgtatatagccttatagtttaaagtcaagtaatgtgatgcctcyggttttgttgtttttttttttttgcataggatttctttggctatttgagctcttttttggttccatatggaattttataatttttttctagttctttgaaaaaa

SEQ ID NO: 821045 - DNA, 552 bp, Homo sapiens
tgtatatagccttatagtttaaagtcaagtaatgtgatgcctccggttttgttgtttttttttttttgcataggattkctttggctatttgagctcttttttggttccatatggaattttataatttttttctagttctttgaaaaaatgatgttggtagtttgataggtatagcatttaatctgtagattgctttgggcagtgtggccattttaacaatattgattcttccaatccatgagcatggaatgttttccatttgtttgtgtcatctctgatttctttcagcagtgttttgtagttctccttgtagagatctttcaacttcttgtttagatgtatccctaggttttttcttttgttttttgttttttggttttttttacagctactttaaatgggatttcaaccttgatttgagtctcagcttgaacattactggtgaatggaaatgttacttatttttgtacattaattttatattctgaaactttattgaagttgtttatctgttccagcagtattttggtggagtctttagggttttctagg

SEQ ID NO: 821046 - DNA, 600 bp, Homo sapiens
tggaaggcgggatcatccgagcttgattctggagcgaccgctaagtaggcagagaacaccttggctgactaagaggagaagagcaatgaactttttcctctgcctcaactcctctctcttccctagagaggatctcagaggagccccccactaccacccagagctgcattgaaagcaccgccctgttgcagtgggggactctggaagacatcagtgtgtccatttccttatctacccatatctcgtattcatggcccacccggccaaacaagaccactgtcgctagaaggctgaacctcatgctccagtgtatccttctatcgtcggctcgtcacaggtcatggaatatttactaggagtctcacaggagacgcgcctcgtacctggcactggctatacattccaaggtggtctcactggatccagccaccacacttctgttgcccgggggaaccacaatggttggggccatggtttcaggtgtgccaacatctcctgtggcagagaaaagagaaatgtccatgaaactctaagtacaggagcacccccygccgttatctgaggggacacgttccaagacccccggggatacctaaaacc

SEQ ID NO: 821047 - DNA, 635 bp, Homo sapiens
ggtctaaatgccattgggaagcagtttcctccactttttatggggagtgggaagcgacagggcatgagatctcaccgcgctggggacaccacatctaactccatgtcccgcgcagcgcagccaggcagtaaccagcaaggactgccgctgctgcagagaggaggttgtgctgacccaggaataacagctatgagctgatgatgtcagtaacttttaagatagcttatttaagaatcttttcagtgacctcagctacacttaatgccagttagctcatctggacataggcaggaaatgttagaaggttgggtgacaactggaactccaagcagctgttatcctaagaagctcattttaggaaagaacttgtctgaacaagtcggagactgaagataccctcggtatctagtgaccatgatgtagatatagatccagtgtgtccccagccatgcaagtctgcagaaaatctagcatcacaagaacagttacacatggtatttctagcgctctgcccatatcttctgtgatggcaactctggtgccctttctgggtctcctgtgtattttggagattctgtggatgactcacatggattcatgggcttaattctatcmgtcactgtgggtttcctcta

SEQ ID NO: 821048 - DNA, 620 bp, Homo sapiens
caatttcaaagtcaaaagccctgagtgatgatggcagttaataatctcagctattcctgaggttgaatattaaatgttaggtttaaaagggattctggcaatcatctagtgcaacttttcatttctagctctgagaacatgtctttcttttcttatttccaggtatttttaaaattttttattaaatagatttgtctatgtatttcactaaaagtatattctaaattttaatacatagcagagtcatatgttactcattcatttaataattttcccaagttattttaaaagttaagcccacagaaaaatgaggaaactagtaccattattcatatagcctttacctagattaatcaattgataatggatgggcacatttgctttgtctctccctatctctgaatttctgtataaataaacacacatatcatattaggttgagatagttgagagtaatttgcagacatcacgctacctcactccaaaatacttcaacatacatcttccaagaaaaaggacattttcctatataatcacaatgccattatcacatctaagaaatttattactrataaaatgaccttatctaatacaccttttacattcaaatgatgccagat

SEQ ID NO: 821049 - DNA, 498 bp, Homo sapiens
actactgtttacttgaaaaaaaatttttaaaggacattttaaagtttattgtttcctatttayttattattattttttatttatttagatgtagtcttgctctgtcacccaggctggagtgcagtggtgtcatctcggctcactgcaacctccgcctcccgggttcaagcgattttcctgtctcagcttcccgagtagctaggattacaggcatgcgccaccacactcagctaattttcgtatttttagtaaagacagcgtttcaccatgttggccaggctggtctcgaactcctgacctcaagtgatccacctgcctctgcctcccaactatctattcttattctaagcaataattcatttataaaactgtcttagaccctagtccatggcaagcattctctaagacaagaagatacagccacgtagacaagcgtactggagggacaggcaaaaatcctgccctactgcagcttcctttccagacaggagtctataa

SEQ ID NO: 821050 - DNA, 615 bp, Homo sapiens
ggttctttatttgatttgtgatgttttaaatcttgtcacagtattggccaggttattgccttttagtcttcagcagaactctgacttagygcttgatgaaaaacagttcaggctataacttgtggtactgttggtaggtctggctttgtgtatgtatataaacatatatatatatacacacacacatctgtattataaatataaatatataaatatatattataaatacaaatctatattaacagaaagacagatagataggtagatatcaggagcaacccttgatttatattatgagcagagggaaggtacccattagaaactattagaggttactcattaaacgctgttgctatacaaaggtgagaaatttagtttgcctgtaaactatgaaagaaaatgtttctccttaagtgttttacctatttcttaaaaatatatatatacacacagtcatactatgtatctactctatcaatactatgtatataactgtgcaatgaattatcctataatcataccttgtttgtatgtttgaaagccacatagtcaatttccttagaacacgaagaaaacagagatttcatggcttgcagaggagggtggagcaagtgg

SEQ ID NO: 821051 - DNA, 641 bp, Homo sapiens
gttaaaaacatacacgcacacacacacacacacacaaacccaactctcatcttttagaggttctattgaaatatttatgaactaaggaataacaatttttgagatttgctcaaaaatataggcaagagtgaaattgcatgggaatgtgcgttggtcatgaattggtaattcttatagttgggtgatgagttcagtctactttttcatgtttgcaattttccataataaaaagttttcttaaatcaatttataggaatctctatgtttattgcccactaagtgacttctactgtgtctacttggtaagaatgaatgatctgagagcaggtgtttgatactagaaaggggcggaacatgagggcacgcggtgtaaaaaaagaaactgaagggagggaaactgaaaagctaatggtaatctttaactgctataatttatcagtcagttgactatgccccagataaacccagagatccagaatccagcagcatgccaagctgacaataggttctccactactaccgtgtagctgagaggtggcagaaaatctacccaacaccrtgttgttactgccaccctggctgcctggtccttatttttagagagtgagatttttacaaattgcaaaagccaatctgtcctg

SEQ ID NO: 821052 - DNA, 646 bp, Homo sapiens
gtgtgtgtgtatatatacacatatatataaatatatatgtatgtatatatatatgatacatcgatataaaagcatgtgtatatatatgtatgtatatatatacttatacatataaatatacgtgtgtgtgtrtatatatatatatatatatataggctcaaaaagaccttgagcccagctcatttaactccccatttcatagatgaggaagctaaggatgacaaggaggaagagacttagttgcccccaagccacactgtctcaactgcagaactgacaccagataagaccccctttccagtgctctttccctacccagaaagccacttgccccctattaactcttctccattacagtgaagagaacaaacagcgtgaacagaaggaccctgggctaagagccaagccactgtcaccctagacagccatcccagagacacctcacacccacctccaagcctcagccccctctgtgaagtggggtcgtgccacctacctccaccgtggctgggctccctcaggaacacagggacagtgcctgcagggtgacaggcacacagcagggcctcacaaaatcagtcactttcccttttttttccccacaccactggttgtgttttaggttttcctgcacataggtttggaa

SEQ ID NO: 821053 - DNA, 573 bp, Homo sapiens
tggatatttctgatcaattcatcagggtgactactaagaacagaacaaaaggaaatttatttaaataaaaataaacatttttaagcaaagcacagtggcacatgcttgcagtcccagctacttggaaggctgaggtgggaggatcccttgagcccaggagttcaaggccaacctgggcagaaaagcaagaccttgtctctaaaaagtaaaataaataaattaaaaaaaaatttagttggatatgaaaaataatttcttgaccacgaagagaatcaattcaggaaaaattaatttatcattatggagtcattctctgatccaccatcccctgtctataatttacattaaacttcatgggccagaagacaggggctagaccaaatggttgttcatcctttcttctagtttagtttctttctacgtttattttcttatattccaagaagtagtaatttctaaaagatttgggttacctggttaatcttatttaacttttgatcctccccatcacaagcaaaacaagatcartctttgcagaagttttgagtcagggctgctaagtctaatgttatt

SEQ ID NO: 821054 - DNA, 653 bp, Homo sapiens
tgctagtatcttttcgtgtgcttattcattgttctttttttttctagcacaaaatctttatttctttcttaatcttcttcctttctttcatccttttttctttctttctttctttctttctttctttctttctttcttctttctgacagggtatcaaattacccagctgattttttatttttttgtagagatggggtcgcattatgttgcccaggctggtctcgaactcccgggctcaagtggtcctcccacctcagcctccaaaagtactgggattacaggtgcaagacaccactcctggccaaactgtacactttaaatacatgcagtttattctatgtcccttatacctcaataaagctgtttatatattttttaaaatcctcatctacataaaaaggacacattttaaagtttaaaattgaggggtcaggaaataacaatataagcatgatttttagaaatatgaagctaagcaccagaactgccaaaaaaaaaaaaaaagaaaatgtttaggagtagtcacctttggtagccagaactggggcaagacagttagggagtgggtggggagcagagacaagagactaatgtttttcattatggacyttttggatgtgtttgatttttaaacaatgtgcaggtactacttg

SEQ ID NO: 821055 - DNA, 632 bp, Homo sapiens
cctccctaactctacacaggtaaattttcatttaaaggctacacaaacagaaaaaaataattctaagacagtatttatattatgaaagcagaaatggtaaaagccacagccaaggctgcctttcccaagatacctaaacattccagtgggggaagagtccctgtcaagagttaaaaacaatcccctcagtccacactcccagtcacatggagctggaagagctggaagaaccgccgccaccactcattcctctttcttcatcatttatttttatcttcatccagcatttcctttctttgtgataccaccagtagataccagctcaacaacatgctatcccccgctccatgagttctcccgagggaatgaactatatacgcttatataaaacagatgtggtctcttatttgagaggaaaaactaagggtaccataactcttccctttatctttgtccctagaacagtaatccattttctctgagcaagtgaacaactgaagtcttcagaactcaactgcgaaaagctgcagacaaggcagctaatcctctgttgtcagcyttcactgatggcaacccctcatatgtctcttccatttgcctcccgagtttttacagtaggatccctatggccc

SEQ ID NO: 821056 - DNA, 530 bp, Homo sapiens
tcaggctgaaatgcagtgacacagtcatagctcattgcagcctcaaaatccttggttcaagtgatcctctggcctcagcctcccaagtagctgggaccacagsctcacaccaccttgcccagctaatttttaaaaaataattttgtagagatgaggtcctactatgttgctgaggctggtctcaagctcctggcctcaggcagtgctcctgccccagcctccaaaagtgctgggattacaggtgtgatccacaggccaccatgcccagcctcattttaattattttatcataaacatttctatattttaacctttttattatcattattttaatacctacatagtgttcttaaggttcatagtcatcatacttttccttgctgtgccccttttgttcagcgtttagtttattatcaattttgactattaaacaaaatttaaacaaaatttaaatgtcagtcatgaagcttttctgtttttgatttcttccttagtataaactctttggagagcaacattaagctcaaagg

SEQ ID NO: 821057 - DNA, 617 bp, Homo sapiens
ttttataggaagtaacacacgcttaggttaaaaaataaaattccgtgacccaaatcgcaacagtaaatgggattcaaactcaggctaaatttggagttcaakctgttaaaggataactaaaagaaacaaacaaaaaggtggcactgtgtctctcatgcaaatataaaatcaacacctctatctataactctaattagggaacaaataagatgttccaattggttcaaatgagaatccaaagagcagacacatacttaggcaatgggaaatactgaaatgaatttccttaacagataaaaaactggcttcttccacaaaagagaaaaagaaaaccattgtacttccaacaaacatcctttgcatgtaaaagggcaagaataatttgtattattgttattcacaacttacaaggttgtaaaatacatcaaaaacaatgaaagctacagactacagagtagtaaccaagaaaattgctctagccagcacctgggttccactgaagatattcagtaatccttttgttaggtttcagactttcacaaattttccttacacagatctgaactgctacacttttttttcttttagataaggatccacagctccaagatctctga

SEQ ID NO: 821058 - DNA, 617 bp, Homo sapiens
ttttataggaagtaacacacgcttaggttaaaaaataaaattccgtgacccaaatcgcaacagtaaatgggattcaaactcaggctaaatttggagttcaagctgttaaaggataactraaagaaacaaacaaaaaggtggcactgtgtctctcatgcaaatataaaatcaacacctctatctataactctaattagggaacaaataagatgttccaattggttcaaatgagaatccaaagagcagacacatacttaggcaatgggaaatactgaaatgaatttccttaacagataaaaaactggcttcttccacaaaagagaaaaagaaaaccattgtacttccaacaaacatcctttgcatgtaaaagggcaagaataatttgtattattgttattcacaacttacaaggttgtaaaatacatcaaaaacaatgaaagctacagactacagagtagtaaccaagaaaattgctctagccagcacctgggttccactgaagatattcagtaatccttttgttaggtttcagactttcacaaattttccttacacagatctgaactgctacacttttttttcttttagataaggatccacagctccaagatctctga

SEQ ID NO: 821059 - DNA, 520 bp, Homo sapiens
agtggagaaggaaggccataacgtgaccatagagggagagattaatgatgtagccataaaacaaggaatgccatcagccaccagaagctagaagaggcaaggagcagattctcccctagatcttccagaggtggtgtggccctctgacaccgtgatcttggctgactgataatgatttcagaattctggcctccagaacgctgagaaataaatgcctgtcattttaagccacgatgtctgcagtagtttgttatggcagccagaggaaactagtataaatatctccccatctccaagtaaatatgtatgcaaaaggcatacatatttgactagtctgaagtacaaatacaaaagagaaaatcagatacaatttcagagttcctcattcaaaatgagaacrtaacactcctaaatttttttacagttaaagaaagtatagataaaaagagaaataaatacggctttagaaattatatccaattatatccactggatccaattatatccactgtatactcag

SEQ ID NO: 821060 - DNA, 596 bp, Homo sapiens
aaggtgttcctggatttggtaggttattcacacgttattttaagtggttcattcattttagatgtaatgcacccactgtaaaactgacttaagcattaaagcaattccatttttttcctcactgggccaaaaacaatctctggttcttttgtctttagtggatctgctatggcagatgactttattttaatctgtttttaaaaaatattactctgaaagagaaaataaactgttctcaaggaaatggatatatagtatctgaggaccacagcattgaaggatatgaattaatagtttagtaactttttattgcaggtagtacttgtgatttcggccagaaactggtctgtgctgataaagtacttcacattgactgattcattcatattcatgtagtaagtattaattgaatatgtaggttcgaagcattcattatgctaggtgctggtactttctgaacttccccaatctataactttttttaaaaaatgtttttatygcgcttgtataatataatattaaagttcctggaaatgtttattttaaatggctaggaatacaacatgttcattgtgtgttggagaagtagggatatt

SEQ ID NO: 821061 - DNA, 618 bp, Homo sapiens
tcactcttccgcctcatttgattcccgccccatgcccagttagatgcctcccatgagatattgtccttcagtctctctggctggaaaacacagggttaactgatggtgtcttgctggtgtggggstgtctctttccaacattttgtcccagtagcctcattggggagtcaatatattgttctccttcactgtctttccagggatgagttcatgctaacacaggaataaggcccccccctcccaggggcctccaggtagacggtgttatactagagatgtaactgagagagccaagttttaaggaggggagcaggtttggctgtggaagcccaggagcctttgcttcccctttcagcatcaggaaagcctgggctgagccccttccagtccccctcacaaccaatgtgccctacctgaccccctttcatgtccttcatgttcatggcattcttcatgcctttgcccttctccttcttgttcttcttcttcttgcagcagcatttcttgcagatgcagaagcagcaggtgagaagcaggagcccagcaaccacagcaatggcgatcagtgcccagggtggtactgcccacacagagaagatcccagggtcagcagtgcca

SEQ ID NO: 821062 - DNA, 536 bp, Homo sapiens
taattttgtatgtaaagcatatttaaatgcatgcatgcatttcatttcaatgaaatgggtaattaagcactgttaattgtaccacgcttatactmggatttaataaggccttggtgtctactgaaaatgcaagtgctggtgccccacctctgacacatgaattccaactctctgtgaatgagcccagagatctgtgttttagaaaactcttcaggtgattctgatgcatgctaaaatttgaaaagcaggttctagaaagttaaaatccagagaagctcactgtatgagtgaaatccaacatgtaaattaaaggagaaaacttagtgtgctgtaagtcaaggattatcagagtttaaggaaaggggaagaaagtgttattttatacaagaaggattcagttataatgcatacattgcttaggttttagtctcacaaagccagctgatgtccttctgctggagaaaaaaatagaatcctcatgggacagggactttaacagtgtgtttgttattacccatctgaacaagactgaaaaa

SEQ ID NO: 821063 - DNA, 493 bp, Homo sapiens
aataagttgaaattttagtttactgttgttaatttttttcttgtttaataatgaagatcattaattttccttggagtttagctcaatgttctgttttgagatgcagtaacrtcatttttattatttatttaccaaaagggaccattttgtttgaatgtttaatttccaaaaaggtaagacttttttaatgttttgaacttttacattagtttaaataaaatatgtttcttaaaatgtttaattaaatcttttctttcaataattattgctaatatttattctgatagtccatatcttcattaaaaagaatataaataaaaagcagaggagagtttacttccggcaaagatggagtaacagggacccaccttaaacaaacagcaaggcagacaaaataaatcattttcagatagcgagcaacaagcagcttctattggtgatccctaggagacagaggggaagcaaacaaggacagcctattccctgtgattgc

SEQ ID NO: 821064 - DNA, 486 bp, Homo sapiens
ttcataggaacacaggagccagcctgaataaacttccaaagggaaaaattggaataattcatgcaacacaataatgtagcactgggctataatccaaagtataaaataaacataactaagtccatgactattaaataattgactaaattaataaatgggaggaaagaggcaaatcttccttacagaaggattgcaaatgacataaaattttatataatttaagggttgtcttaggagtatacacatagtctataagaaactttgggtcatttataataccccatggttagaaaagattatgcctatatccaagggcccatgacaaatccatgatatatggatttgcaaagctccttagttacccaagcttaatgaagccagggaaraaataaaaattatctttgcagttcctgggcaggaggatgggaaaatgacagctcacctgcatcagccctcctcagggtataatatcaaagaacagaagaa

SEQ ID NO: 821065 - DNA, 486 bp, Homo sapiens
ttcataggaacacaggagccagcctgaataaacttccaaagggaaaaattggaataattcatgcaacacaataatgtagcactgggctataatccaaagtataaaataaacataactaagtccatgactattaaataattgactaaattaataaatgggaggaaagaggcaaatcttccttacagaaggattgcaaatgacataaaattttatataatttaagggttgtcttaggagtatacacatagtctataagaaactttgggtcatttataataccccatggttagaaaagattatgcctatatccaagggcccatgacaaatccatgatatatggatttgcaaagctccttagttacccaagcttaatgaagccagggaagaaataaaaattatcyttgcagttcctgggcaggaggatgggaaaatgacagctcacctgcatcagccctcctcagggtataatatcaaagaacagaagaa

SEQ ID NO: 821066 - DNA, 668 bp, Homo sapiens
ctctcagatccagaaggccgagctctgacttagattttacctccttcctgatcaytttcctccctcaaattagcaatcagcagagaaccagttgcttcaggttccagaaaccaagatctaaaaattggggtcagatgtattaaaatggtataacctggagaataatgcttttccttattaaaaaaaaagttttcctatttattttacaaagaaaacttggtttttagactcagctatagaaaagatatattttggttttatttctagacttcaaattaaaaacagaaattctatattttcagatttcagtagaaatagaaattgcttattatccttgtttctgttttcattcctttatatttagcattttcagttgctctgaggatatttcactaaaacagcaaaatgattactgaaccacaagtgtgtagtggaatattgtttcatgcctatgcttttccttttacataaaaatgtacctttagaaaattagaacaaacaattgtgtcaactaagaaagtgtaggctatgctattggaaatatttgagaaagtatcatgagtgttacattggtactctgctagaggaaggtgaaacaattggtattcacatcaactctctcttcacatttccaaattctggccacattatattgtatttaagagcaa

SEQ ID NO: 821067 - DNA, 615 bp, Homo sapiens
gaaatattttaagtaacattttcatctaagtaaaaactgaaaatttttttatttcagtatgaaataaatactatgaaaatagtattaacatcctrtagtgggaaaaggcactggtggccttgctgagctactcatttatctttgggtaatcaagttaatcttcagatgcccgtcaaatgtgaaagtggatgatcttaaatacagagaatcctttccctctactcaagcagtctttgattatgagacatgaaagtttccaaaaattttccataggtcattctggaaagatggctatagcagccatctttccagatattaatttaataccagcctggtattaaaatttctctgaattcccacataaaaataaacaaagcacttacacagtaaagcccaaagcttggagacaaggtgtgccattgaacaacaaaatacaagcaggtaagaacaaaccaacatcatccataagatctgagtggcatcagcttggggagaatcagaggaaaacaaggctgatgtatctgagaactggaaaacccctaaaaaaccaaaaggaattcacaggaaagtaaggatgcccaattggagaatagtagctaaaactaggaggggttt

SEQ ID NO: 821068 - DNA, 616 bp, Homo sapiens
aaaagcctatcatccaaaaagcaacacttttgagaatgaaggtaagtgttatgagttttggggacaacaggcataagtcagstgtgctaccagcaaactgggttatatggtcaccctaaatattatgtgtgggacatgggacctaattttgcatggtataatcaggccagagaacaaaacttctctttccaatggctttccccaagctactcagtgaggatgagcctgacagctgaagtggagctgcctgattctaatcatgagagtcaagaaaatcagaaccatattaattttcaccttcggaaaatatgaaagctgaatagggcaatttggatttctggaatccagtcatctaaattgctgcatatgtgacaggcagacaggcactgagcattaaggggaaaaaagcagcagagctcattttttagatggtctccttgtacagttgacccatttattttcttgttgggtcttcctcctctttgcctcccacttccccgaaagctgtactggcagacagatgcttatgtgctagcaggccctctttcaggagcagcacagaactctgacaaatgacgctgtgaaagacaaaccaaggatcaactgaggtatcttt

SEQ ID NO: 821069 - DNA, 616 bp, Homo sapiens
aaaagcctatcatccaaaaagcaacacttttgagaatgaaggtaagtgttatgagttttggggacaacaggcataagtcaggtgtgctaccagcaarctgggttatatggtcaccctaaatattatgtgtgggacatgggacctaattttgcatggtataatcaggccagagaacaaaacttctctttccaatggctttccccaagctactcagtgaggatgagcctgacagctgaagtggagctgcctgattctaatcatgagagtcaagaaaatcagaaccatattaattttcaccttcggaaaatatgaaagctgaatagggcaatttggatttctggaatccagtcatctaaattgctgcatatgtgacaggcagacaggcactgagcattaaggggaaaaaagcagcagagctcattttttagatggtctccttgtacagttgacccatttattttcttgttgggtcttcctcctctttgcctcccacttccccgaaagctgtactggcagacagatgcttatgtgctagcaggccctctttcaggagcagcacagaactctgacaaatgacgctgtgaaagacaaaccaaggatcaactgaggtatcttt

SEQ ID NO: 821070 - DNA, 628 bp, Homo sapiens
cgggacatacataatgaccccaaaatcaatttccataaaaacgcatctcaatrgtacaaaagagaggaccaaggaagttattgtaagcaaggacacacacaaaggtcatctattcatgatagaaaaataatcaaaaataataagtttttgaataaattgtgtggcaggaatagaataatcctaagttgtcaccaaaacagagaaatatataattaacttagcaatcattatttcccacatgtatgactcatttcctaagttctttcatgttggtttccaattgtcccccacagatcacctattctcccccatccactttctctttcctccttttttcctgtaacccttagtatgacctgacatcatatcctaacatttttttttgttgactcactgcccccataaaattatgagttccaagaaggcagggatgtcaagaggctggggaaatagctcatgaacaagaagaactgtacctggcacatggtagaatttcacgcagtatttgttgaacgggtaaagttagcaaattagaaaatacagataaaggaacattatccttacctcttcccaccaccactatgagatgatatcacctgcaaatatctgtcagacatttctgtaagtg

SEQ ID NO: 821071 - DNA, 624 bp, Homo sapiens
tcccccatccactttctctttcctccttttttcctrtaacccttagtatgacctgacatcatatcctaacatttttttttgttgactcactgcccccataaaattatgagttccaagaaggcagggatgtcaagaggctggggaaatagctcatgaacaagaagaactgtacctggcacatggtagaatttcacgcagtatttgttgaacgggtaaagttagcaaattagaaaatacagataaaggaacattatccttacctcttcccaccaccactatgagatgatatcacctgcaaatatctgtcagacatttctgtaagtgtaactacacttaagatagtttatgcaaaacaatttttaatatagtattatttttagccaaaatatctaactagaaagaagtccaaaaatacatgtaccaaaatgttaacaacatccccaggtaatctctgtgtagtgtgattacagatgattttctttctcaggtttattgtattttttctataataaacatatattagtattatacaatttttaagtgttttcttgaccctatttacaaagtcttatgaagaatacaaataaataggtaatccttgctctcaacaagctcccagtgtat

SEQ ID NO: 821072 - DNA, 572 bp, Homo sapiens
ataaccctataggaacagaggtcaacaaggattatttttattaraaatatcaaaagaagagatggacaggtataagtaaagtggttaagtctgaaactgtagaacatagaacttctgggtaaaatccttagagtccactgatggaggtatgttagaaggctaacagcttcaacttcgcatctccaattctataattaccaactgaaatagatgggcaaaccaccttaactttgtataaagtactcatgacacacactgtgcagtgggagaagtaaagaaaatgttagcctgagagtaactttgtatttgtctacaaacccaaatcttatctcctccaccttttaactgaaagggtcaagagagaaaaggctgcaaaggcaccagggaagctggggaaatcctgaaggataatgaacaaccacaccacgttaggccactccacgtggagacagcctctgcacgatggttcaaacatcaacttaatgaagagagagtgggcataaggggttgaattcatccaactttggatcctgactatctaagctgtctctaacatgaggtcccaattctct

SEQ ID NO: 821073 - DNA, 542 bp, Homo sapiens
atgcgttggctcatgcctataatcccacagcactttgggaggccagggcrggtggatcacgaggtcaggagtttgagtccagcctggccaacatagtgaaaccccgtctctactaaaaatacaaaaattagcccggcatggtggcgcatgcctgtaatcccagctactcgggaggctgaggcaggagaatcaccggaacccggtaggcggaggttgcggtgagccgatatcgcgccactgcactccagcctgggcaacagagcgagactctgtctcaaaaaaaaagtgcctctgctactgaggagaatgaggcaggaggatcatttgaggccagcaggttgaggctacagtaaggtaagtatgatcatgccactgcactccagcctgggtgacagtgagaccctgtctttaaaaaaaaaaaaaaaaaaaaaaaaggccaggcttagtggctcacatttgtaatcctagcactttgggaggccaaggtaggtagatcacttgggctcaggagttcaagccagcctgggcagtatggcgaaaac

SEQ ID NO: 821074 - DNA, 705 bp, Homo sapiens
gatggggaatccagagatctsggatccaaagtccagcttggccatagctggctgagtgaccttgggcttgtccattcccctctctgggcaacagtttccttgttggtcacatgaggggcttgcgtcactgacaggtgatctgtaacattcttcctggcattgggatgctcttatttctgagactctaaattgcctggcctgtgagagggcagctgagggctgtggacagagtctaaggtgaagagtacaaagatcctggttcagacttgggccccacttagtacctctgtgcccctcagagcttcatcgtcctcatctacaggatgaagaaaagtcattcttgcccaaattactttcctaagtgaataaaggaataaaagatgataaagctgcagaaaatgtaaaatgtttactcttattaatcatttgtgagcatctgctgaatcggggcattgtggtgagaaccttacacactttatctaagctcattactgagacctggaggtaagaactatccccagggttgtgcagggaaatgcttagcagccagcccgccggggaggaaggtcccgatttgtagtgtttgcccatttctgtggtgtcaatgcttccactttagccctttccaagctaagcggcctcatgttacttaatgcagagctggggagaaatgcatacaattgactttctggagtggaagagtca

SEQ ID NO: 821075 - DNA, 239 bp, Homo sapiens
  misc_feature 222, 223, 224, 225, 226, 227, 228, 229, 230, 231, 232, 233,234, 235, 236, 237, 238, 239: n = A,T,C or G
ggtctctaagctgataggataagaatctagtgctactggtgaccaagaaggcttcttgccatgtggagagaaaatgtttgatagatggcatgagacagagccccagggatttagtttgaggcacaagatccagccatagataatgccaagtagaaacratcaggtgaaggagagagagacttagagaaccctgaggacatgttgagctactggatccagccnnnnnnnnnnnnnnnnnn

SEQ ID NO: 821076 - DNA, 239 bp, Homo sapiens
  misc_feature 222, 223, 224, 225, 226, 227, 228, 229, 230, 231, 232, 233,234, 235, 236, 237, 238, 239: n = A,T,C or G
ggtctctaagctgataggataagaatctagtgctactggtgaccaagaaggcttcttgccatgtggagagaaaatgtttgatagatggcatgagacagagccccagggatttagtttgaggcacaagatccagccatagataatgccaagtagaaacgatcaggtgaaggagagagagacttagagaaccctgaggacatgttragctactggatccagccnnnnnnnnnnnnnnnnnn

SEQ ID NO: 821077 - DNA, 600 bp, Homo sapiens
tcaacagcttgaatatttaagctgtttttagtattcagtgtcacatgtctagaaaggactgtgaagaataatttgtttattcttctggtctctagtggagctgcatgtaaataatctcgtattttacatattccaaatttttattatttccttaaagattttgtgtccttggctcctttattaaaacaaatttcttgggtggatcacctgaggtcgggagttcgagaccagcctgaccaacatggagaaaccctgtcagtactaaaaatacaaaaatagctgggcgtggtggcgcatgcctgtaatcccagctacttgggaggccgaggcaggagaatcacttgaacctgggaggcagaggttgtggtgagccaagatcgcgccattgcactccagcctggcaacaagagtgagactctgtctcaaaaatcaaaaacaaaaacaaacaaaaaaaatttcttccttcccttttktagcatttttttggatgaatgttttataggctttagagttgaatataaagtcagtaaaacatacgtctctatccttaaaaagtctttattagagatgaaagaacaagatatacacaagagcaatgac

SEQ ID NO: 821078 - DNA, 563 bp, Homo sapiens
ctggtgtacaatcattgacaagacaacatccatgccttagcatctctggggccttgcccagsgtctcggctataggaggttcccagtagacattttgcagaatgggagggaagatggggagaggtgaggatccccaagcagcagacaggtttgagcgccttttgtctgagacactctcccggctttgcctaagtcatcactggctgttaactgggtctaagaaagtggcagagtcaaattgccacagatgattcctcatctgagggagacagtaagaccgggagaggcagatcgctcttctttcttatcctccatgtgcagtagttccctctccccactcatgtcagcaactgaatttagctcatgcgtcaaaagctgtctccccttgagggagtgtcagccagcgctgtaggaggggtcataccacagggaaccctccagaaccaaatcatgtacttttcttctttctcataaaatccagtaaacagttgtttttaattggaaaatatagaaaagaataaatttaaagaagaaaaaaagtcacccataatcccatgacttag

SEQ ID NO: 821079 - DNA, 537 bp, Homo sapiens
ttagcagattctctgcttcaaaatccactcccatactttcattgtctgttatggcagctacctactctactattaaaatggcatctgtcatatattgctgtgtaacaaattaactcaaatatcttcttcaggggtcaactggggttgtaaatattctaaggctgcacggggaaagaatctgctttcaagttcattcaagtagttgttggtaatgtttagttccttgctggctgatggccagaggcttccctcacctctcataatatggcagctggcttcactgaagatcatgagagatacaagagagacagagattagagtaagttaaaacaagacagacacaatattttgtttccaaatcttagaggtaccatctcatttcttttgccatattatggcatgactamcgagaggaacaaatattgggtggaagttcagaatctgcctaccagttttcctctgataactaataatttatgccccttccacatgaaaaagccattcagttcctctaaaacctctacaaaattatcatcc

SEQ ID NO: 821080 - DNA, 650 bp, Homo sapiens
agacagttatgccacctatatgcatgtttacacaaacatttaagtaaaaagcaaaatgctaagttatagcttaaaaaagcaggatacaaaatttcatgcttagtatgatttcaattttgaaagaagatagggctagaaaaacaccttctaaccctaagttatccatgagtgattgaattataatgctgctcactatttttaaatatttctgcattttcaaaacttttcttaattttgctgtgattcatatattaaatttttttaaagggctggataacaaaaactctgtctagcattctagactccattgtcgcaacacttcttttttgctatgtagtaagtagtttcttaacctggctacatatattaaatacaaaattagggaaaaagttttgccattactttcttttggtctttttactttttatatgtgcaaaaaccttaaaaataatttttaaatagattttccttaggagtgtcagcacattcgtcatggttttctgccactaaaatatctttcacaatatccctgactgttttcagttrtaaactatggttcacccttcaagcagaagtgcctctgcgaacagctgggcacagatgcctactgcatctggcctctgaaaaagtaatcatcagagcccagattt

SEQ ID NO: 821081 - DNA, 602 bp, Homo sapiens
cacatagctctgtggtaagaagaggaaagtgtattgctacccctgccaagtaaaagcaaatgttgtcaggcaatctttactcatcatcaccaaagaaaaggaacattttccaaattgatagcagtatgccaggcccatgggatatgtttaattactccagaagaaaccataactgggacaccagctaaaattggaatcatcccctgattaagttgcatgattcaagtatcattttccaaaattgacttttcttttacacaggccaaacagatgaatttataaacataattatacttgtatcttatgtgtttggtattaatatttgaaactatctcaaaatattcagcaggacaaaatatgacttttgagattaataaaaaaagtttttccttacaaagcctagattttaagacatctaactatagatccaaaagactaactctgaaactcaaggtacaataaaaatacaaagataatcttattgttcaagaaatatattttcttctcttccytaagatttaagtcttttattgaaaaaaatggcttacatacaagaaagatacagatggtgataaaaatactcctgttaaaatcacttcctc

SEQ ID NO: 821082 - DNA, 362 bp, Homo sapiens
acctggaacagatatacaatgtcagcctaggatagccagttacactaaataacatggaagctatcaaaggactgtgaaaaaaggagtcaagccaattgaatatgttcccattgtccaaagatgggacgtgaacattaattacaataattacttcaatacattaatgacatccatggattgaaacataccaaatatgtttaaattcatgagttcaaaatcatactaataacactaattagtcatcaataaaccacatcattattttaaaaaayagtaaataaaaggtaaagaatcaagcacattaatcttgccatttgtgtcaactattccactaagtaaccatataataggtgaggaaaagt

SEQ ID NO: 821083 - DNA, 590 bp, Homo sapiens
tctacattaaaggctctttccttcctctggcttctagaaatgatttttcttcttagctttgaactgggacaatttaactatgatgtaccccagtagagcacagacttttcctctttagaattctatatctgagtcattgagcttcttgactctgtgacagtttcttgttttctggatatttgaaaagttgtcagccatcatggcttcaagtataatttctgtcacagtatctctttcctctccttctgtgacatgcttaacatgtatatgaaatgtttggatgttttcatagatgtcgttgaggctctgttgattagttggttcagtctttgtgtgtgtgtgtgtgtgtgtgtgtgtgtgtgtgagagagagagagagagagagagagagtatgtctatcctgtggtttgtctagtttctattgaattattttctagtttacttttactattgtaatgtctaaggtgatgataaggccatccagtgagttcttccttacagattgycttttctcagttctttaatttctatttggctctttaattctttttctttctcttgatattctgcaattgtttctctcatggtca

SEQ ID NO: 821084 - DNA, 606 bp, Homo sapiens
cagcagagtatctgtagggttagtttatgtgtctgaagctatctcctctgcagtgcaggcatgcagtgactgctgaaatctgagaatcgattaggaacactgagaaaactcctcaacatcccaggccccactctaagcaaaatatattaatagtagcccatcactggaggaatttaaacccttggtgcacttaagataaaagtagcaaacccaaatcccaaattcagctcaaccagtgactacattgactcaattacccacaatgtatatttgcaagagaagaagggtgcccatatcaaagtataaataatacttactgcaatctctactgttcttccatttataatgtctagtgattgattaaagaatgacaaggcacaccaaaaatccaaggggggaaaaaggcactgttgaataataaagcaatcaagagacccagactcagagaagaccccatctgacaactatcagattgaaattgtacgatacttacgttaatatgttaaaggattttgtggtaacagtggacagtatgcatggataggtagakaatttcagcgaagagacggaaactatagaaaagagtaacatgaaaatgctaggaag

SEQ ID NO: 821085 - DNA, 479 bp, Homo sapiens
ccctaggagcagcacagagcaggagtctgcctcrgcatagggcccatggcttgtcacgtgagagtctcagaccctgtccacatctgaaaacactcagaactcaaggctggagactgtaaatctctcacttagctggcagtctttggtgtgattcattcatgccagattctcaataagagtattcctaggccccatctttctgggtgcccaggaactatgtgagtgtgaggctgggacacgtcagaatatttcaggccaagcttcttcacgtcccctgcggtctgccaggtcaggacgcgtctgttataggtcatcaccatggcttgtttatgaactggccaagtgcctcagtcacatgagggcaggtgtgtgggagggtattctgattcttttatctgggaactgggtttgctctcattttttctttggaagacaaaaaaaaaatagggaaaacgcatttgtgtgaagatactccttgc

SEQ ID NO: 821086 - DNA, 610 bp, Homo sapiens
tccccaaagctgcacccactgaggatggggtggagagccagtcctgtctacaatggggagaaccattaamaaggttcagagaaacgagtcccttcctcctggggtggggatgccggcagccacgctccagcatcctaatgcacacctctccctacacagcaccttctggctgtgttcctgaaggcttggttggtagttcaatttttgttaaataaatattttcctcattgtcttacacattcagaactgctttcatttctgactcatctcaagttggcaaccttcccttcctcatacttgagcttcttacactctttctacccttcctccccgcaagaaaaggaaaacagaggaagacagtgagacaaacagaatgcactaagacaaagactccagattcagggcacgggcgtgggggcacaggcaaagacagcggaagataaaggagaggaaggaatgaggaggggccggcggctcagggagaggtgcaggaaggggccaggggctcaggacacaatgtcaggcaggggatccaaacttcaccagccctaggactggcctcatacttttggccctattggtgcctttgtatctatgtcaaaatgcgacc

SEQ ID NO: 821087 - DNA, 610 bp, Homo sapiens
tccccaaagctgcacccactgaggatggggtggagagccagtcctgtctacaatggggagaaccattaacaaggttcagagaaacgagtcccttcctcctggggtggggaygccggcagccacgctccagcatcctaatgcacacctctccctacacagcaccttctggctgtgttcctgaaggcttggttggtagttcaatttttgttaaataaatattttcctcattgtcttacacattcagaactgctttcatttctgactcatctcaagttggcaaccttcccttcctcatacttgagcttcttacactctttctacccttcctccccgcaagaaaaggaaaacagaggaagacagtgagacaaacagaatgcactaagacaaagactccagattcagggcacgggcgtgggggcacaggcaaagacagcggaagataaaggagaggaaggaatgaggaggggccggcggctcagggagaggtgcaggaaggggccaggggctcaggacacaatgtcaggcaggggatccaaacttcaccagccctaggactggcctcatacttttggccctattggtgcctttgtatctatgtcaaaatgcgacc

SEQ ID NO: 821088 - DNA, 564 bp, Homo sapiens
tttgccaccagcaattaaaataggccccattccctaaaacaaaattcgggccagggagtagaaaagatccagttgggaaggacatacctgataaacgctttaggctgatgtmcccagcttcttacatgtcactctgcttaatttgggattggaggtagcaaggaataagccaataatccccagttctcaagggaaatctgataggctgcaggacggtgccatccaatttttcaaaaagtggttttaaaagttgtttcttaaaataaattttaaaaaagggccacctctcatttctgcagctctgaaagcttttctttcatctttgtaaagttctcgacataaacatgtagaaataccaccatcacatatctaggtcagaagaaagggctaactttacctatcctacagttactaggccatccagacagctctttcctttatgtaggggtgccaaggggtgtctgagcagaaaggtgaagaaggcaggttggtgccaaagagacccaggctattatcacttgcaggtgagaacctttgatcagccgctgccacccccacccccac

SEQ ID NO: 821089 - DNA, 531 bp, Homo sapiens
aaggtgtataggaaacataaatgaactttgtgttcagacttggatcctatccccaagatatcttattatgtatatgcaaatattccccacccccccmaaaaaaattccaaaatccaaaacacttccggttccaaacattttggaaatggaatattcaatctgtgtaagcgaaatccaaactatgaatctttaatgaagacatcctacatggattttctcaaattcaagaaccgatgcatcaccaatatatttctaaatgcaaaaagaatgtatggtgttctcatccaaaaagttattcatcagaaaggactacatggtgcaatattctacaataagaatttgaaccataccattttgctaaaatggcctgtaacaaaacttcatatggttgttactggattgcaagttgacacatgttaaccagagtaggccgggcacggtggctcacacctggaatcccagcactttgggaggccaaggcaggtggatcacctgaggtcaggagcttgagacaagcctggccaacaaggt

SEQ ID NO: 821090 - DNA, 579 bp, Homo sapiens
ttgcctggagccaccacttaagacagtcatgtccaaaacaagcaggcagagcaatggtgtctgggaaagagtgaattagattaagaaactggaggtaggagcactcagagggtggagacaaggagcagtgacaactgtgttcaacagtgtgaagagctgttctaagagattcgattagttttgtatggcccttaaggataggacccatgggtgaaagtgttgaggagggagagtttgagtctgaatggaaataagaaccttcaaactactattaactgaagctttgagtgctaatgactttttcatcacaggaggtgaccaagcaagagttgaacagatacttgtcctggatgttaaagtggaaattcaagcaacacaacagaaggtgaataaatttaaggtcctttatgatctttatattccatgagattctgaaagaaggaatccttgtgcttctcatgtcagttctagggrcaactctttctccgtcttctataaaactcatttaattttaataatgtatgtgttattaatcatataatttgttttatctcctaacatttttgctgttatttatat

SEQ ID NO: 821091 - DNA, 640 bp, Homo sapiens
atatgtagtgttaacaatcaaaatttcaaagaaaagacccacatttatgacatttttggtcattattatacatgtgacagttatgatgatattttctgccagttattctacttagtattactttgatatagccagaccagttttaagttctccattctttttgttcgtttttccagcatccataaataccattaagacaagttgtcaggactcctgaagggggcctcttaaataaaaccctctgtcctccctggaggaaagaaaggaaagaggagccctaaaagagaggaggccttttggagccagtgactgagaacacatgcctgaaaacagtagatcaataagctatgcaactcactgtttacccacctgactctctctgcttcagggctcccacccaaaggtaaatcaagcctcttccaagtccacatcctactatgtgcagaaaagctagaaaacttaatgctgcagccttctagcttgtaacttccctctaagttatgggggttaggaggacagatgcctatattaaagatgtaagtggcttttctcttacctttctctcccttttcagagagctcaatacccaactaygctattcaccattcctcttctaggaaagaaagactgatgtggcctt

SEQ ID NO: 821092 - DNA, 650 bp, Homo sapiens
gaaagagggcatcattttctaaaactggaagtttatgccagaataatcagacaagagaaagaaataaaagtgatcctaattagaaggaagaaggcaaatcactcttgttagcagatratatgaccttatatttagaaaaccataaagactccagcaaaatattcttacaactgacaaatgaattcagtaaagtttcaggatataaaatcaacatacaaaaaccagcaacatttatatatgccaacaatgagcaatttgaaaaacgaatcaagaaagcaattccatttaaaataggtacaaggcatataaaatatctaggaataaacttaaccaaataagtaaaatatctttataagaaaaacaataaagctgtgatgaaagaaactggagaagacacaaaaaatgggaaagccattccatgttcatgaataggaagaatattgttaaaatgtaatacccaaactgatctatagattcaatgcactacctatcaaaataacaatgacattcttcacagaaatagaaaagacaatccgaaaatttatatagaattacaaaaaccccaaatagctaaagcaatcctgaccaaaaataacaaagctggacacatcacactacctgacttcaaaatatactacagagttatagta

SEQ ID NO: 821093 - DNA, 476 bp, Homo sapiens
ctgagttgtgtgagatgctccagcaaattaattgaacctgaagaggggtcatgggaaccccaatttgaagccagtcagtcagaagttctggaggcctggacttgcagctggtgtctggggttgggaggcactccaggcctgagccttcagcctgtgggacctgataccatctcaaggaagatagtgtcagaattgaactggaggagacccagctggtgtccactgcttggtgtgtggggaaaacctcccccacgtttggtcacagaagtcttctgtgttgatgattattgtggaggtgcaagaatagaggaaaaatacggtttgagagttttttggaagcaggtttacagtggttgtttaatagatggtagggactattattttgcagaggtcttgaattccagagtgaaaagtttatattttctttgctagtttatggaaggtctygcacatggtaactacgttgaaataatctt

SEQ ID NO: 821094 - DNA, 610 bp, Homo sapiens
aattttaaaatatttcttagagtaatggctttaaaatgagtcttcagtgaattcagttggcccttagtacaaaatacgttcttataaatattgatcagaaaataatctgtaataatatgtactactgtctctcccaaaaagctcttaaagataaaacaaatttccacttaaaataaaactttcttgatttcattctgcatttattttggaaaaggtgagaatctcataatcaacagtgggagaggagtttgggagaggaggttcttcataatgtcagaaaagatatcaaaggcacattctgttgatttttttccttgctaaaatgttttataatgtcatccaggcaaggttatcatgataattttttagaatgaatgaaaagatattctagaagttgctctgttttgttctccaaccctttggatagaaaaggcaacaaaataagtgcaattttgttccttttttgccaacttgaaatcttactttgacctctagattcaccagccttatgtttctgggcaaccccccacatttccttgggagcctctcaaactgctatcatttacccarcaacaaggacagttctaggcctagacaaatggcatttgca

SEQ ID NO: 821095 - DNA, 627 bp, Homo sapiens
cccagtgctgctagctatgaggagctgcgccttttcctcttggtttctctaatgctgcctgcccccacccacctttgtaagtagcctctttattaaattgccttcaattatctagtttcagggtaccatttccaattcctgctggaaaactgactggcacagtgattaagctagaattgtctggaatgcaccacagcacatggaccctggaagggaggttgcacattaggtgcattcacctgatctgaatgacctgattctaaccagtgccccaactacacctcatgtatttttcattgtttcttcaagacagaggactagttactccagccttgacatgaagatggccctggattggatgttgctacaggcatagggaacaaatgtctcctttccctacagcactctttccccaaagaacattgctctctctttctcctcgtctctgtctctttctctctctctctgtgtacgtgtgtgtgtgtatgtgtgtayagccacatatatgtgtgaatacagaattctttttttctgaaccaactggataagttaccttatggcactttacctttaaatacttcaatgtgtatttctaagaatagggatattttcttacataactatagt

SEQ ID NO: 821096 - DNA, 631 bp, Homo sapiens
aggctggagtgcagtggtgcaatcttggctcactgcagcctcaacctccagggctcaagtgatcctcccacctcagcctcccaggtagctggggctacaggcctgcatcaccagtcccaggtaatttttgtatgtatatatatttttctacaggtagggttttaccatgttgcccaggctggtcttgaactcataggctcaagttatccactggtcttggccttccaaagtactgggattatagtcatgaaccactgcgcctggcctcgtggtcaaatttttatggactcataaaattcacatagatacagggttagttaagatgttgggctgcagttgacccaaatacttgactgaaagtaacgtcaacaatagaaatgtattcattaaatatataacatgtaataagaaggctggagatgacagttctaggattgacagcagtttagcagagtcagggctttggattgacttctcttgatcttgccttcccggcatagtcacaggatggctctaccagcttcagtyataacttcctcagataactatgttcaaaagcttgaagcaaggaaatgagctgcttctcttcacgtctctcttttcaaggggaaacaatatgcttcctaggaga

SEQ ID NO: 821097 - DNA, 546 bp, Homo sapiens
tttccttaccttgcccaagctccacatgagcattatcaacactggtacctccctttcactaggctaatatatgtatatgtatagagtggaggtttagtcattgtttcataaaatgggttcayagtataaacacctgaatcttgcttttcttgcttaatatgtagtacagatccttctaagaaaacaggcatagatctaatttcagttcttttaaagcctgcataaactacgctgtgtatgtaacacattttacttaattatatccttattgctgaggattcactcttgtttctagttttttccactataagtagtgttgttatagatattcttcttttacatttgtccttatatttggaagtttatttagattatgcagatggtgacctactgctcagttaaggggaatattatcatacatatgcatcattttacagaaactcagaaatgctgttataaatccgcatattctccatgagtatagaagagttccattttattagcatctgttctagtggtcagtgtttgttcattgcatgtttgttc

SEQ ID NO: 821098 - DNA, 485 bp, Homo sapiens
catttaagtagaagggagtgaattcaagagcagttgcacattctgataaatggagaaactgtaagattaaaaagaagattcaggctgggtgtggtggctcatgcctgtwatcctagcactttgggaggcagaggtgggcggatcacctgaggtcaggggttcaagaccagcctggccaacatggagaaaccccatctctactaaaaaaaaaaaaaatacaaaaattagctgggcctggtgctgtgtgcctgtaatcccataatcccagctacttgggaggctgaggcaggagaattgcttgaacccgggaggcggaggttgcagtgagctgagatcaagccattgcactccagcctgagcaacagagtgagactccgtctcaaaaaaaaaaaaaagaagaagaaggttcattgaagaaagaaatacagaccattttattagactggaactggcttcagcaatttgggttctttaagcatctgcta

SEQ ID NO: 821099 - DNA, 659 bp, Homo sapiens
gaccctaacccagcagtgctagaggaattaaagacacacacacagaaatatagagtgtggagtgggaaatcaggagtctcacagccttcacagctgacagcctcaaacagagatttacccatatatttattgacagcaagccagtcataagatttgctaaaagtattccttacaggaaataaagggatgggctctggctagttatctgcagcaggagcatgtccttaaggcacagatagctcacactattgtttgtggtttaagaatgccttaagctgttttctgccctgggtgagccaggtgttccttgccctcatgtttgtaaggaagagttttaaattaagtttattattttaaaaattatatagatgtgcttacaaatacatacagactatatttatcaaaactactttacttcttcaaaatcattttagccatctaatttaaagcttaataatctaagtacatatcagctttcatgaataaaaacatcttatttttcatgtattttatcctagaagtagatatataaatcaatgttcatgtaaaagcaaatttggtaaaattctttctgggtgtgatttgtgatattgtgaggtaataagaagtacgtatttgatttctgcccctggatccsagcacagagctcctaaaactct

SEQ ID NO: 821100 - DNA, 589 bp, Homo sapiens
ccaggatgcatagcatgggtttatgaattccctatctttgcagcacatcctttatttctggcttgcatgggacttgaaagcctaaaacaactaaatgctaagaaaaattatttttaaaatkatgacaaaaatattttctatttcagatgtatagatctgcaatccagaaactatgaatttttttcagttgagtagtctgtttgccaaaaaataaaaaaaaataaaaaataaaaacttgcctaagtttcttctcttacattttatttaggatttgcccttagacattatttagtgcttttctgaccctgtagggacggtgagaataattgaaacactagtttcttaaaatttctgttaaaattggttaaaggccatagaattttttttttaagctaagcatgttatagagaggtatcctataagaagcaaggggcaggtaaagactttagagatgtatagtccagtgtgttaattaaaggatactacctacttctaattcggtatgtattaatcttttctgatatatctgttaaagtactcttcgcatatttttaaaaaattggcattttaaagtatagtctttgatggt

SEQ ID NO: 821101 - DNA, 526 bp, Homo sapiens
aaaaaaaatgtttaaaatcacaaattggtataaaacaagtggaaaactctacaaactagggccataagttatattaaattascaaattaaactaggaattagggattacagaagaatcaaccaaataaattgccatggttcttttttctttaggatcaaatagcacctacctgtcaggaaataaacaagccagtgaaagaatgtataaaaagtgggatagtccatgaaggtagggggtggagagtgagttgatgagtttgccagggtcatgaagaaaagcttactttaaaattgagtgttgtaacttagggctacttgtttccagggctccaaagttcattgctaaaaagacatgacagggttatacaccatagtgttcatcttgtgggctttttcctcttttttcttaaaagaacatggtatcatttcctcttctccagcccactctgaaacagaaacaaatattcaaatctgaatggccatttttaataaagttttatagtttaaaacttatatatataaagtc

SEQ ID NO: 821102 - DNA, 540 bp, Homo sapiens
acacatcatcactcagttctaagcgtattttactttctacctttgatttcttctttggaccatagattattcagaagtgagttttagtcttcaaacgtatttctatttttcagttgtttgttcttggttcctaacttaattgcatcatgtatgtagttaattgcatcagtcagaaatctgctgacttaggccgagcacagtggctcatgcctgtaatcccagcactctaggaggctgaggcaggtggatcacctgaggtcaggagtttgagaccagcctggccaacatggtgaaaccccatctctactaaaaatacaaaaattagccaggaggtagtggcacacgcccataatcccagctactcaggaggctgaggcatgagaatcacttgaatctgggaagcagaggttgcagtgagccaagatcgcaccactgyactccagcctgggcaaaagagcaagtctctgtctccaaaaaaaaaaaaaaaaaaaaaaaaaaaaaggaaattgctgacttgcctgctttgtggttaatttttgc

SEQ ID NO: 821103 - DNA, 626 bp, Homo sapiens
taatggtggacgtccctccccccatcaagctcaagtgtcccaggttgacttcagactgctgtgctgtcagsgagaatttcgagctagtggatcttagcttgctggtcttaatgtgtgtgggatccactgagctagaccacttggctccctggcttcagcaccctttccaggggagtaaatggttctgtctcactggcattccaggcaccactggggtatgaaaaaaactcctgcagctgagctgagtgtctgcccaaacagcgcctagttttctgcttggaacccagggccctggtggtgtggtggtgtaggcacctgagggaacctcctaatctgtgggttgtgaagaccatgggaaaagtgtagtatctgggccagaatgcaccgttcctcttgggacagtccctcatggcttctctcagctaggggagggagttccctaaccccttgtgcttcacaggtgaggtgatgcctcacactacttcagctcatcctctgtgggctacacccattgtctaaccagtccctatgagatgagcagggtacctcagttcaaaatgcagaaatcacctgccttctgcgttgatcttgctggaagccacagaccagagctgtttctatttggc

SEQ ID NO: 821104 - DNA, 561 bp, Homo sapiens
acattttaaactactagcttattgggcatttkatttttgtttggggtgaggtagggatccaactttattttcttccagaaggagagtcaatattctacttttttttttttttgagatggagttgcgctctgtcacccaggctggagtgcagtgacacaatcttggctcactgcaagctccgcctcccgggttcacgccattctcctgcctcagcctcccaagtagctgggactacaggcacccactaccacacctggctaatttttttgtatttttaatagagacggggtttcaccgtgttagttagccaggatggtctcgatttcctgacctcatgatccacctgccttggcctcccaaagtgctgggattacaggcatgagccacctcgcccagctgagagtcaatattcttaaagccactgattaagtactaagtctcttccaccaaattggaatgctacttttataatgtaataaaatatacactttaatcagcttcttgactctctcttccctctcattgttctacctgcttattcatggaccaaaattgtgctct

SEQ ID NO: 821105 - DNA, 540 bp, Homo sapiens
taacaaccgtcacagtatttattctatagcctcacaaactcacaaatcgggaatccatactttaggatttttcccagctgcatgttccaagcttatgttctgtccacagatcaggagaaaactgtacatttacttttaacttctcagactcaattcactctccgcctatcaaataaactgtttgctcccctgtgccaaagagaagtacaagttacatcctcaattctgtaggaaattgctttgtgttcttttatgtgatggtcagtcaagagtggccacaagaggagacaggagaggctcaggaaagaagaaactttattatattcacagatcctagagagaggaggcacagcacaccgtgtagtgctatgtgggaaagacaccagggtgagcaggaggcagaagacaggagtgaggggaaagtttagacaagagcctttaactgagattttcaagggaaagacaaggcaatgcagcataaagagtttcasattggctagtttgaatagttttggtgggctctaagctataatggtggtc

SEQ ID NO: 821106 - DNA, 614 bp, Homo sapiens
ttcatgtattaacttgggattttcacaattcttttataatattaatttggactacaaatttgtgygaagatcgaagtagaatttaatttgttgtaaaaagcattttctcccccaactgagtcccattcagatggctacttcacttggagtatttttgtccctatatgggggcattttctcttattattaatagtagcttttcaatagtccccagattttgcaagtatctacttgaaattcaagtataagcttaagacagtaactagtctcttatctcctcttctcttatgggtatttaaacctcaaccatttcacattcttcttttcatgctgagaaaattatcttacacccagtaaatatgcagaatctttaaaggactgaaaaaaatagggaaatgtttaacgtagttatcaaggtaggtacctcacacaagaaactgcttgatgatgaacatttaagtttcaaagcaggaaagatagcccttgtgatgaaggcgattagaacgtgatacaaatgactcttagtttttcagtggaccagagcaacagttactggttagttcaacaggtgagactcagtcacaaagagtttacggatctcgctgaaaataatg

SEQ ID NO: 821107 - DNA, 626 bp, Homo sapiens
tttttcatttttgttttgtgtcccatcaattttttcttgcattattgcattaacaggaacttctagtaatatgcgaaataacagtggcaagaatagagattttggcttgttcctcatcttagggggaaaacattcagtctttcatcatcaagtagaacaagctgtagagttgttttcatttatgcttttcagtagaaactctttataaagttgatgaagttcccttccgttaacatttttcagagaatttttaacatgaataagtgatgacttttgttaaaggcttttttctgggtcaatcgttaagagcatatgcttttcttctttagcttggcttgttaatatgctggattgcattactggattttcaaatattgaacaaccctgtccctggaataaacccacttggtcatggtgggcaattctttccaatattgctaatttttacttgttaatatcttgttaaagattgttgattgtagtgcttatattctggagggatattrgtctgtagtttttgtgtactttctttctgagtgttggtatcatggtaaacctagcttcataatataaattgggaaatgttttctcctccattatttactacaaaagatggtatagaattg

SEQ ID NO: 821108 - DNA, 592 bp, Homo sapiens
cctgtgttcgtggtgatgcttgtgtacacagacttactgcactgccagtcatataaaaatacagcacatacaataaggtatagcacataatrcctgacaatgataataaatgattaggttactagtttaatatgctatagtttttattgttattttagattgtactctttatgttaatatattattaaaaggtcagttgtgaaacagcttcaggcacttccttcaggagctatccagaaaaaggcattgtcatcataggagatgccagcttaatgcgtgacgttgcccctgaagaccttccaatggggcaagaaatgtaggtggaagacagtgataatgatcctgaccccgtgtaggtgtaggctattgtgtggtttgtgttttagtttttaacaaaaaaatttaaaaattaaaaaattaaacaatataagagcgcttatagaatacggatataaaaagagacaatatttttgttcagctatacagtggatttgtgttttcagtggagtgtaattacaagagtcagaaagttaaaacaaagtgaaaagtttatactgtaaaaaaagttatagtgggctaaggttaattcatt

SEQ ID NO: 821109 - DNA, 547 bp, Homo sapiens
cttttgcttctgaagaaactgctgaggccttcacgttggggtattgttttctgagtgccaacaatgatctatgtattggtttattacgtaaacaggtycatgagccaggcactgttgcaaggatcgaaaagtcaaatgttagaggaaaatagatgctgcctggacctcagagaccttgcacttcaatgagggagagaactgtcctcaatatgaagaaaaataaatgcaaattgcaaaggtggtgagtgctgcaaggaaggtgtcccgaagccaacagaacgacgggattgttagacgtgatcatgaaggcagtggccaaggaaaacaggagccgaagcagcagtgctgagtttaacaaccccatctccattctctgcattcttccagtcttaggggaaactaaggaaatgggaagaaactaggtggggggaaatgagtcactaggggaagaaacaccaccatggtagcctctaaaacaaaggagggtgtgctgagtagacagtggagccaagcaggtgacttaggcattcatattcatggattgaca

SEQ ID NO: 821110 - DNA, 547 bp, Homo sapiens
cttttgcttctgaagaaactgctgaggccttcacgttggggtattgttttctgagtgccaacaatgatctatgtattggtttattacgtaaacaggttcatgagccaggcactgttgcaaggatcgaaaagtcaaatgttagaggaaaatagatgctgcctggacctcagagaccttgcacttcaatgagggagagaactgtcctcaatatgaagaaaaataaatgcaaattgcaaaggtggtgagtgctgcaaggaaggtgtcccgaagccaacagaacgacgggattgttagacgtgatcatgaaggcagtggccaaggaaaacaggagccgaagcagcagtgctgagtttaacaaccccatctccattctctgcattcttccagtcttaggggaaactaaggaaatgggaagaaamtaggtggggggaaatgagtcactaggggaagaaacaccaccatggtagcctctaaaacaaaggagggtgtgctgagtagacagtggagccaagcaggtgacttaggcattcatattcatggattgaca

SEQ ID NO: 821111 - DNA, 547 bp, Homo sapiens
cttttgcttctgaagaaactgctgaggccttcacgttggggtattgttttctgagtgccaacaatgatctatgtattggtttattacgtaaacaggttcatgagccaggcactgttgcaaggatcgaaaagtcaaatgttagaggaaaatagatgctgcctggacctcagagaccttgcacttcaatgagggagagaactgtcctcaatatgaagaaaaataaatgcaaattgcaaaggtggtgagtgctgcaaggaaggtgtcccgaagccaacagaacgacgggattgttagacgtgatcatgaaggcagtggccaaggaaaacaggagccgaagcagcagtgctgagtttaacaaccccatctccattctctgcattcttccagtcttaggggaaactaaggaaatgggaagaaactaggtggggggaaatgagtcactaggggaagaaacaccaccatggtagcctctaaaacaaaggagggygtgctgagtagacagtggagccaagcaggtgacttaggcattcatattcatggattgaca

SEQ ID NO: 821112 - DNA, 473 bp, Homo sapiens
catcacattccttctgtccttgcccttacattccattctcaacagggcagccagcatgatcctgttgacacacaagtctctgctcaaagccctgccaagatttcccacctccactgtagtcaagggcaggccctacactggcttgggctgattgccctctgcctatctgtagcccttctgaatgttgttctgcctcatcctctggcgcccttgccatttctccaaactgccagctgcaacactttccaaactaccacccagccgttgtcttgttggtacactaaaacaatgcctgatggaggagctctgtaaaatgtgttaaaggcgaaaactaaagtatgaatgaataaatgtccctagttttctaaccatcgatctctaattttttcgaactcttycgtataaatgcaaaacatctcttaataaggtgaaacacattatgcaatctatcaaattcatttttccctctcagg

SEQ ID NO: 821113 - DNA, 555 bp, Homo sapiens
agctagccattttctacaccacgcgccgccgggcttgtacatgcccgtgtgcctgtgacaccgaggcaattgtttctccttaaaaagggggttcgcgtgggttaktttcgtttctgatctggaatctcagtaactacaacaagaaaagtttaaaactcgacccgccaggttcttccccatcggattatctccgttccttagagatagcaggaagggcagcattttcttccatccacccacttccagccctagtctggctcagcgaggaatgcataaaattagtggactcctctgagtgacgttccccggctccaatcagcgggcgcgcaggcgccccgcggggcccgccccactgctgactctctttggctgattcctgcagggagggaggagagaagggcggcagtgggagggggaggtacctggaactgggagtgatgtcagctcccagctcggtgcctgcccggattcctgacatggtgtagtgcaggcagggtggggaaaggacggggaaggactcgtgtgctgcgagctggcggccgggccggagtgctg

SEQ ID NO: 821114 - DNA, 500 bp, Homo sapiens
tttaggatattcctggtaaacttcctgcttgctttactagtttgttctgtggagataattttggtgtgcgggtttaaatcttctgatggaaaatgttttgactatcaaattcccaaaacctgttttgatacgtgagacatgaaacgttttggttttcacatcaagaagccctatgtttttctagccttggattttaaacaaagcagctttccccactgtttactgccttacctgcctatctgtgggagtagaagggtggagagctagctgctggatttccatctattgtttattgtggatttatatttgaaattgttacactttttttgtaattataaaggtaatatatgtatcttatagaaaatttgagtaacatagaaaaaatagagaagacacagttaaaaaaaargcatcagtaatactttcacatgaaggtataattagctttggtgtgttggtgtgttttcttctttttctattcctatattttttccatagat

SEQ ID NO: 821115 - DNA, 555 bp, Homo sapiens
tagtaaacattgtgaggaggacagctggsggggtggagatcaagagggcactgtagacctactcctctctgcccatttaaaccacataaggtttttaaactccactttttaaaacaggatattaatttacttatttgttgattgtgcacacttgtttatacatacatatgcacagaactgcaattactttggaatttggaatctcactgttaatttatggattcagccaattattatttatccagcccctctatttctacttgtgagatataatatgtgaggtgttattcacccagaaagaactcagtacaaggatagcagatgctccctgggactggggaagatctcagtgttctccctttagaaaggagtagtgcaggcccaagctctggcccaaaggcataataacagcctctgtttggattgtgtggcttgcagtttgctaaaggaaattatcaaagtggaccacatcttagacagatcggatgatgaggatgacatttcctccgaaaaccctcaaactgacttccttcacaaggtagacactgaaaattg

SEQ ID NO: 821116 - DNA, 555 bp, Homo sapiens
tagtaaacattgtgaggaggacagctgggggggtggagatcaagagggcactgtagacctactcctctctgcccatttaaaccacataaggtttttaaactccactttttaaaacaggatattaatttacttatttgttgattgtgcacacttgtttatacatacatatgcacagaactgcaattactttggaatttggaatctcactgttaatttatggattcagccaattattatttatccagcccctctatttctacttgtgagatataatatgtgaggtgttattcacccagaaagaactcagtacaaggatagcagatgctccctgggactggggaagatctcagtgttctccctttagaaaggagtagtgcaggcccaagctctggcccaaaggcataataacagcctctgtttggattgtgtggcttgcagtttgctaaaggaaattatcaaagtggaccacatcttagacagatcrgatgatgaggatgacatttcctccgaaaaccctcaaactgacttccttcacaaggtagacactgaaaattg

SEQ ID NO: 821117 - DNA, 591 bp, Homo sapiens
agagaagaacttcacgccacatatctyaaagtggtaagaaaatatctgagggttttcttctaattggtgcagaacttcaaagcttgaaatcaggagggaggcagggaatatggcattgttcccactggatgctgctgttaccacatgaaggacttactagccttcccatgcgaacaaaaaagaaaaaaaagtgaattatatgttatttttgtcctcgggaatttatgaaataactgtgacatttctcaccttcgagcaaatcaccatatgaccaaatcaccatatgaccataccccctcctcacagattatcttccagtagaattcagctattcacccctaatgcagcctccaggagagaatccttcttcaggcttctgggactccaggccttcagtggcttgtagctacataactcctggtctcttgtcttcatcctcacatggtcttctctttgtctgtcttctcctcctctgtctctcattaggatgtttgtcattggatttaggaacccattcaagtaatctgagacgatcttatatcaagattcttagtttcatctgcaaagactctttttccaaataagataata

SEQ ID NO: 821118 - DNA, 618 bp, Homo sapiens
acccagtgggaggtaactgaatcatgggagcrggtatttcctgtgcttttcttgtgatagagaataagttcacaagatctgatcgttttataaaagggagttcccctacacaagccctctcttgcctgccaccatgtaagacatccctttgctcttccttcatcttccaccatgattgtgaggcttccccagccatgtgggactgtgagtccattaaaaagtctttccttcataaattacgcagtctcacacgtctttactagcagcatgagaatagactaatacacatggtgaagtcccacgatacgctgtctggaagctggggaaagagagaagccagtagcatggctcagtccaagtccaaaagcctcaaaaccagggaagccaacagcatagccctcagtctgtggctgcaggcccaagagcccctggaaagcaactggtgcaagtcccacaatccaaaggccaaagaacctggaggctgatatccaagggcaaaaggagaggaagcaagtgtccagcatggcacaggaagagagagagagtgagcagactcagcaaacaagctgcttcttccccttttctgcctgccttgttccagctgtgctggcagccgat

SEQ ID NO: 821119 - DNA, 596 bp, Homo sapiens
tgccctagacccagactagagctgcaacacagaacaggcmcccaggcatgaagcctccacccgatccaggctgtgctcctactagcttttgccagtaaaatcgtggccacagatcatgcccagtttctgcaccactggctaagagacactcttccaagtttacatgttggcttaagcaaatttactgacatgtccatattcttatttcatttaaactttattttctgttctgaaacagaaaaaagaaaaaaaaaaactagcagtgctactaagacacgcctttaatagcttcaaatatcccattgaattctaatcattataacatgtaaatgtttacctttgatctacatagacaaattttccattcactgcaaaccgggttataaattcagttggtttcacattaatctctccactgttctgtggaacaatatatggctgtaatcttccaatggccacaaggcaggtaaaattactgttgtctttcttactgttcctttcttcttccattccaacaatatttggaggccagcttctcaagtaaccagtgcaatggatagtatagaattttctgtgctctaattcaaagattttta

SEQ ID NO: 821120 - DNA, 505 bp, Homo sapiens
gagtcattggtctttttcttattgattcaaagccattctttatataatctgaatattaaccctttgttgtttatatgtctaacaaatatcttttcccagtttgtggcttgtggtttcattttctttgtagtgtctttcaatcaacattaacttaaagattgtcacatttaacaatcttttcctttattgtttttacattttatgtcttgggaatttctttctatgaaataaaaatactctccctcctttagagttttcttagtccattgatgctgctataacaaaacaccttaggctgggtaatttaaaacaacaggtagttatttctgacaattctagaggctgggaagtccaagatcaaggcacgggcaacttcattgtctggtgagggctgctccatctgcttctacgatggtatcttcttgctgcatcctcacttggcagaagaggcaaaggaatggamgggacaaacttgtcctctcagcccttttacggtggcactaat

SEQ ID NO: 821121 - DNA, 624 bp, Homo sapiens
agaatatttttttctattcctttctctggtcttgtcctgcattccatatgcaaatattggggtgctaaatggtgccccatgttgatctgagaccmtgcttccttttctttcttctttctgttctttagaatgcataatctctcgttatctctctttaagttcacaccgattttttcctctgttagctcaaatctactacggagcctttctagcaagtttttaagttcagggttgtacacttcaacttcaaaatttccatttggttcatttttataatttctatttctatgtattcagtcattgttgtcattctgttgcttaattctttaaacatggttttctttagttctttgaatatattcataatagctgctttgaagtttttgtttgcaaagttcaacctctggggccttccaagcctgttttttgtttgtttgtttgtttgtttccctttcctgtgcataggtcacactttgttatttgtttgcatgacttagagctttcttttgagagctggacactttagataatacatggtagcaactctgtgtactgatccttccctccctcttctccctcccgtctgagtttgttgtttggtcatttgtttgttcgtttagggac

SEQ ID NO: 821122 - DNA, 564 bp, Homo sapiens
catcaatcatcttagctagatattttggataacttgctgcagcttctccatcagcacctgctgtttcaccttgcactgttatgttacagagayggcttctttccataatcctcatgaaccaacctcttctcacttccagcttttattgtgcagcttccttacctctcagctttcatagaatcgaagagagttagggcctggctctggattcaattttggccaaggcaatgttacagctgtttgatcttctatccagaccactaaaactttctccatatcagcaataagtctatttcactttcttatcatttgtgtattcactagagtagcacttccaatttctttgaagaacttttcttttgcatttacaacttggctatttggtgcaagaggcctagcttttggctgtctcagctttttacatgccttcctcactaagcttaatcatttctagcttttgatttaaagtgagagatgtgtgactcctcttttcacttgaacattttgagaccattgtaggattattaattggcctaatttcaatactactgtgtttcaggtaat

SEQ ID NO: 821123 - DNA, 564 bp, Homo sapiens
catcaatcatcttagctagatattttggataacttgctgcagcttctccatcagcacctgctgtttcaccttgcactgttatgttacagagatggcttctttccataawcctcatgaaccaacctcttctcacttccagcttttattgtgcagcttccttacctctcagctttcatagaatcgaagagagttagggcctggctctggattcaattttggccaaggcaatgttacagctgtttgatcttctatccagaccactaaaactttctccatatcagcaataagtctatttcactttcttatcatttgtgtattcactagagtagcacttccaatttctttgaagaacttttcttttgcatttacaacttggctatttggtgcaagaggcctagcttttggctgtctcagctttttacatgccttcctcactaagcttaatcatttctagcttttgatttaaagtgagagatgtgtgactcctcttttcacttgaacattttgagaccattgtaggattattaattggcctaatttcaatactactgtgtttcaggtaat

SEQ ID NO: 821124 - DNA, 622 bp, Homo sapiens
taagaattcttctgaacaaaatatattaaaatgttttcccaatacactgtcatccaaggttgcatgctttgagatactctatttacattatgaatgcagaccagaaatatatatatatattatggtcattacactaatgatcattatactaatatatattataaatatatataatcatatatatctaaggttttgtggagtcttgagggtttcatatatatacttaaggttatacggttatatctggagtctttagggttatatgtacatacatatttaaggttatatttatagattaatcctaaaaacatgtatgtatatataacatttatgtatatatacacacatatgtatttaaggttatatttatatgtttaaagttatatataaaaatataactttaaatacatgtgtgtatatttagggttatatttggtatatatacataatttatatatgatataaaatcctaaagacttcacaaaaaactgttagaactaataattggtaacgttgtatacaaactgaatttataaaaatcagtagtgtttctatgtgccaatwgtgaactatatgacaaagaaatcaagaatgtgtctatttactataactacaaagagat

SEQ ID NO: 821125 - DNA, 601 bp, Homo sapiens
tactcctgaactctctggacttccagaagtaacccactcctccctgtaaaaatctagcatttcccctgtgcttgaagatgatatagaggcccctatcttgcaagacagcatggatcccctcagaacattcccccaacctgtctccctggttattcaaccattatctagtattaagtcacaacaaaacatagtttatgttgagctgggcctgctgagcagacagagacaatatccgcaaagagctgcagaatctagacaacatgtaccaataggaggcaagaaagtacatatgggcttggatgctgagagtgctggatcaaaggaggtagaacatgaagttggataaatgaaaagttacttattttgaagccctcattaggattatacatcctggcaaagaccctggaaattcatattagcacactactgagatgatcctttgaagtttagagaaaacaaagtctagtaaagaatgctccaattgccatggcagatggtagaagagggatcaaagggcttagaaaaatgggtatactagcatacatatactaagtaagwccagaaaatccaccagctagctttggcctgctgcaaggcccag

SEQ ID NO: 821126 - DNA, 601 bp, Homo sapiens
tactcctgaactctctggacttccagaagtaacccactcctccctgtaaaaatctagcatttcccctgtgcttgaagatgatatagaggcccctatcttgcaagacagcatggatcccctcagaacattcccccaacctgtctccctggttattcaaccattatctagtattaagtcacaacaaaacatagtttatgttgagctgggcctgctgagcagacagagacaatatccgcaaagagctgcagaatctagacaacatgtaccaataggaggcaagaaagtacatatgggcttggatgctgagagtgctggatcaaaggaggtagaacatgaagttggataaatgaaaagttacttattttgaagccctcattaggattatacatcctggcaaagaccctggaaattcatattagcacactactgagatgatcctttgaagtttagagaaaacaaagtctagtaaagaatgctccaattgccatggcagatggtagaagagggatcaaagggcttagaaaaatgggtatactagcatacatatactaagtaagtccagaaaatccrccagctagctttggcctgctgcaaggcccag

SEQ ID NO: 821127 - DNA, 451 bp, Homo sapiens
agaggaacatagccaccagaagtaaggtgaacactcaagattggaayggcagcctggagggtctgactcacagagagctatggagacgattaatagaacgtagcattcctaagggaaatatagatgggatggcaacaagggtactgctcaattcacataatcaaaagaaatcagagatggatgatcaggaggctgtgggcacataagaaggccaatcccttgcccagtttctgtacctaagccagttttgagacccagaactgactgactgaaggagatgctgggtccccaggaggaaggctctgcaacaccatggcaagtacacatggtaatgattccccagttcaaaagggacctatagccatttactcaggcaaccatatactggggacagggtaatttcaaatattttgaagactgttggatccagcgtccatgctgacatttatac

SEQ ID NO: 821128 - DNA, 549 bp, Homo sapiens
ttttattacattttctgtattagagattataatatgcttctaaacacctgataaagaataagaaaagggagcagttaaataagtgacctaaaatcaggactaaattaaaaacaagcttaaaggtttgctgtgaacaaaaaaaatttaaaatttagttgctccacctagtggtgaaccgttatatgactttagtgaagagattttagtttttcacgttgaagattctattcaaattttgttctggtaggtagaaaaaagtatttaatggacttactatcttattgtgccatttaaaataacaaaatttacacaacatggaaagaaaaccactacttaatgaatctaaataaacgtgaagacacatctgtaaccaactcaaatttcatattatgtctttctcaatcagcctaggaattagcatcaacatttatacctgtagctatacccaacctaaaattatatatcaccctgaaagtttaggcctggcccgagttaataggagataaatgttaatagggagatcaayccctctgcagttaagatcatggg

SEQ ID NO: 821129 - DNA, 627 bp, Homo sapiens
tgttactattggatactcctaatcaactacttataaaatgcaagagtttgggtgactgtgcatgtgctacttttgaatatttttggcaaactaatgartataatgagattggctgattgcttctaatgttactagacaaattgggtaaagaaaaggatgaggtcagacatttgaattaccagctcaagtactgcataaatgacctgaaaacttccatgtgtgccccaaaggagagccttatctcctgtattgtcagggctgagattattgaaaatcaaacccagaacctcatcctgtgactggctgaattacaagacaatttgaactcccagccttgtagagtgtctgttgttaaagtcagagcattgattggaaagggagagtgatatgatatggatctgtttcaccatcctaatttcaggtagaattataatcttcaatgctggaggtggcgcctggtaggaggtgattggatcatgggggcggtttctcatggttcatggtttaacaccatctccgtcttggttctgtcatcacaatagtgagttcttgtgcaatctggttgtttaaaagtatgtggcacctccccctctagtgggactctttgtattttggaggcaacatatt

SEQ ID NO: 821130 - DNA, 488 bp, Homo sapiens
atactgtagattttacgttatagcagatatttaaatgaaatatttatcctataacattgctttcaaccaaagtgtattcttcagtgatttgtggaaacagatattaacattaagaaagaaaaaaagtkcatgcgtcttatcattataccaatctaactggaactgtctttctcttcgatttccccttctcattacacaaactgattctatctgcaaatattatgcaaaattttttgggttggaaattaggagcctccaaaagctagtattacagaggtcagctaagtataaagtttcttgtgactagtaaggatttattttggcaaaccttcaaatcagaactgacttaaagaatgagtatgaagacccctcactgacacacgaaataaaaatttctgccaaaaggtgatttatgtatagcttatctatttcacttacttaggaaaataggcccacaacttatagcactcatgagctcgaattttcat

SEQ ID NO: 821131 - DNA, 610 bp, Homo sapiens
ttttttcataaaagtaaaacaaaattgcttattaacccctctaaatatatgattcatttatcataaagatattaatactttttttgagacagagtcttgctctgtcaccaggctggagtgaagtggcatgatcttggctcacagcaacctccacctcccaggttcaagcaattctcctccctcagcctcccgagtagctgggactacaggcgtgcaccaccacacccagctaatttttgtatttttagtagagacgaggtttcaccatggtagccaggatggtcccgatctcttgacctcatcatctgcccacctcagcctcacaaagtgctgggattacaagcgtgagccacggtgcccagccaatattaatactttttatatcaagattttttgacgattaaataatattatgcaggcaaaatgcttaatacagttcctggcacatcataagtgttaaaaaactgtgagttgctcttatcctccttcacctcctcytcctcatcgtcatcacctgagttatttaacattatcaactgggcaaggaaaaattagggctcagataaaggatgtgatattgagggggaaaatgaaagaaaaatgtgtggag

SEQ ID NO: 821132 - DNA, 540 bp, Homo sapiens
tggtgagaggtaaagaatgaagagtgagttgggctaagaagtgagtgtcactttccaggtagaagaactaacatgtccgggagggattgaagtagtaaagaggcgaggaagtttatgacactagaaaaaggccagtgttgcttgggcacagagaagaggaaaagtggcttgagttgaggctggggccagaaaaatgcaagtccttaggccaccttgaagagtttggataatgtccacaaggccaaaagaagccattgaatgagttgtgcagaggctttagcaaaacagaaagagcagctaactgggaatcagtggacctggattctagtgctggctgtgatactaatgtgcttcgttacttgggtaagtgaataaaacttctcagcctgactttttttaaaaattcacattatatatatatatatwtttttttttcatatttatttttatatttgtatccattagattgctttgtctcttaagccctgtaataggttgaattgtgttgtccagaaagatgtgttgaagtcctaaccccta

SEQ ID NO: 821133 - DNA, 660 bp, Homo sapiens
ccatttaaaaaaaaaaatttttttttaatttttagtcttgcactgtcttgcactgtcaccagtgcaaatatttcaacatgtattcagtacaaaaaattattgagctattttagattgttttttcttcctcattgaaatctagtgtgtatattatactttcagcacactggctacgtttctaatgctcattagctacatgtgacatcgagacattgtcatggcatgtgtcagaatcttaacatccaacaggccaacaactgtggtgaggtgccattgattatcagatgaaacctgatttcaaaatgttaaaatgcaggtggtggggaaaatgtgtgtccctgaatctacaaccgtcttccctgattctgttttcagtctgtggtcagagagatctgagttcaaatcccagccacaccacttcccagctgtaggatgtattaattgaggtaggctgagatttgctgcaatccctcaatctcagtgacttcacgagagaaaagttcctttggcgtcatgcaaatctgctacaggtgtggccacgtagcaatgcgaggaaccacttggaacttatggttccaggacctcaacacagcctcrtctaccaccatcagggcaagaaagagaaagagactggataattacagaaagtctcttcctgct

SEQ ID NO: 821134 - DNA, 592 bp, Homo sapiens
catgtggaagctggttctgggaggactgaagggtgtttgtcagaagcaccccagggaggcctttccttgcccctccatcctcagagggcagcccagtggtctcccgtgggcccccaggtgggacgtgcaccttctgataggcacagccacaggggtgatctgcgggactggggagaaccagcggtgcagcactttccaggtgccagggagcaacagttttctcagggaagttggggatacaagaaataggcttgctgatgagtagagagggcaaacaggccaaccactaagaggggacacagagaccccctctcaagggcttggtcacgtgcatccaatgaagcgaagcagcagccccttcagggagcagctgtgatagtggctggcactgctgccctcctctcagtccctgcactcatggaggctcaaagggctccaggaaactaacaaggaaatgcaasaaaggcaggagcatgatgtcaaaattaaatgtgtctcactaacatttgaatgccatatacatgtccctggcttttccctcatttctgccccctccaccgtattcccttcgagagtctgtctacaatttaca

SEQ ID NO: 821135 - DNA, 407 bp, Homo sapiens
catgtttcagagagcacagggttgggggtaaggtcacagatcaacaggatcccaaggcagaagaatttttcttagtacagaacaaaatgaaaagtctcccatgtctacttctttctacacagacacggcaaccatccgatttctcaatcttttccccacctttcccccctttctattccacaaaaccgccattgtcatcatggcccgttctcaatgagctcttgggtacacctcccagacgtggtggtggccgggcagaggggctcctcacttcccagtaggggcggccgggcagaggcgcccctcacctcccggacggggcggctggccaggcrgggggctgaccgccccccccacctccctcccggacggggcggctggccgggcggggggctgagccccccacc

SEQ ID NO: 821136 - DNA, 501 bp, Homo sapiens
ctggagcgaggtagtgtctcattgtggttttgattggcatttccctgatgattagtagtgttgagcattttttcatatacctgttggccatggtacgtcgtcttctgagaaatgtctgttgaggtctttttcccttttgaatcaggttttttttttttttttctgctgttaagttcctgatatattctggatattaacgctttgtcagatggatagtttgcaaatattttctcccattctgtaggttgtttcttcactcttaattgcttcctttgctgtgcagaagtttttagtttgatgtcatttcatttgtccatttttgcttttgttaccagtgcttttaaggtcttactgaaaaaaacacttgctcagcccagtgttgtgaggcatttctcctrtgctttcttctagtagtttcatggttttggattttacatttaagtcttgaatccattttgagttaatttttgtatgtggggaaaggtaggggtctggtctcct

SEQ ID NO: 821137 - DNA, 587 bp, Homo sapiens
acaacaggaatgaatgccgacttagcatttttgccttcacagcgctggcaactaaaaggctcacagatactctgatctttaagcagataatcatggaattctcaacatcatatccactaggttaggctgagggttcatctataaaagtatttttccaaaaataatgcttaaaagagacttctagaaacagtgggactgtatcaggatcaacagaagacttcttgacccaaagattcaaatatagaactaggaattgattttcacatgtagtttttaggtaaaggacatctctttcagttgattcctacagccaagactagctttgatcctgggagattcagaaacctcaagatgggtagctggcttgagtaacatcctagataatagtcccagtcaaaaaccccattgaggttgaaggactggaaactgacctgtgtgaaaaagagctatcagtgcaggaaaagactcatgctgattttgaccttcctctgrcccttttccctcaactgcttggtggggagtagcgaggagaaggagcatgtggcaccctcattggaggctggagcactgctgcagaaagtgatctc

SEQ ID NO: 821138 - DNA, 438 bp, Homo sapiens
tgatcactacacattctatgcatgtawtgaaatgtcacatctacttcaataatatgtacaaatattatttatcaaaaagcaggcatgtaggtgagttgattttcttccatgtcttcaaactcctggtaatacttgtccacaaaatttctctataataaccggaacatgtcatccatgataatgtgtactatatatccaaccacaacatcaaattctgtatcagaggcagaagagaaggacagcatgaagctcgattcctccaactgtcctttggctggtggccctccaccctgcccacagcccggccagctcagccccgtctctgtcccatacagagccacagccacagtgagagcctggcagcctgcccggaggaggcttcttggcccagcccggtcaacacccacatgcaccaccaccaactttttgctattgtga

SEQ ID NO: 821139 - DNA, 495 bp, Homo sapiens
ataacccaaattcatttcttgctgttaaattccgtgtcttatactagagtaaataaagctgaaaatctcattagataacacgagggagttaaggttacactgggaaacagcactgcccsattttcttggcttttgcttaaatgtaacctcagtacacttgtatccaacctccagctattcccagaagcctggaaccaatcactgtgttcagcagtcatcagtttatggctggttttttattttaaatcagtggcatgatgaataaaatatacatgtatatatgtgtatatatatgtgtgtgtgtgtgtgtgtgtgtgtgtatatatatatatatatatatatatatattttttttttttttttttgagacagagtctcactctgtcgcccaggctggagtacactggcgcgatctcggctcactacaagctttaaagagcttttgtgacttagtttctgctttcaaaggattttaagtttgcaaaagctataaca

SEQ ID NO: 821140 - DNA, 529 bp, Homo sapiens
catgacacgcctacgaagaatgctgagctaggatttctagatgtactgttacatggtgatttactggtctggaattgctgccttgcaggaggtcaggtgaaaacactaccagcaaaaccaagcatttatggagccactcccttgtaccaggtcctgggctgggatgtctgactgcatcagctccacggtggtaactgtggctttagcctgcccagcattcagacccccttgcttggtaacagtgcctacatcttagcttctattgtggaaactacctttcccccactgcatgcaggtctggtgggcatggggatggaggcaccttgctctccatccatgaggaaggcagcacatggtccagcctcatctagtctgacctctcttcctggaagttgagtgtcaagcagggagccgcagaactgaaaacaaccggagctgcttcatgcagtcaagaatcccctgaagaaagaaggcagttacctccctattctygagatctcttcagctggcctggctctcatcctttcca

SEQ ID NO: 821141 - DNA, 491 bp, Homo sapiens
atttgttgcctcttccttctccagagtgactactgcattccgacctgcmcccccacccttttttttttcttttgagacagagtcttactctgtcacccaggctggagtgcagtggtgtgatcttggctcactgcaacctccacctccctggctcaagctattctcatgcctcagcctcccgagtagctgggactacaggcatgcaccaccacacctggttaatttttgtatttttagtagagactgagtttcactatgttggccaggctggtctccaactcctggccccaagtgatctgcctacctcgggctcccaaagtgctgggattacaggcctgagcctctgcgcccagccccctcttctgctttctaagtgtccattctccttgtagtgagtgggtggtggggggatatacacatgtgactctggttagtacataggcagccatgaagtccacaaatgtacagggagccacagctttcatgctaca

SEQ ID NO: 821142 - DNA, 492 bp, Homo sapiens
cctcttatcggctatcaatttaagtctacagaygtaaacgtatagtcagctttgcctgcctggatgatagatgaggccctccatagaagttaccaaaccctcagctgagttctagatcattcccatggacacttcttccttcatgtctgcatataaatttgtaagaggaaaaaaacacagaaacgtgaaaatgtaccagatgaaatcaaaatcagttaacttattatactacattaatttcttaattttgtataaggttctgtaaaacgtaacattagggccaagtgggtgaagggcatataagaatactttgtactgtctttgtagctcttcatcaagtgcaatattatttcaaaatacaaagtttaaaaaagtaccagatattgccatttaacacaaatttaatatattttgccaaattctatatactttttttctatcaatttccttaatattttatcactgccatgttaattttggctcaggaagtgt

SEQ ID NO: 821143 - DNA, 492 bp, Homo sapiens
cctcttatcggctatcaatttaagtctacagatgtaaacgtatagtcagctttgcctgcctggatgatagatgaggccctccayagaagttaccaaaccctcagctgagttctagatcattcccatggacacttcttccttcatgtctgcatataaatttgtaagaggaaaaaaacacagaaacgtgaaaatgtaccagatgaaatcaaaatcagttaacttattatactacattaatttcttaattttgtataaggttctgtaaaacgtaacattagggccaagtgggtgaagggcatataagaatactttgtactgtctttgtagctcttcatcaagtgcaatattatttcaaaatacaaagtttaaaaaagtaccagatattgccatttaacacaaatttaatatattttgccaaattctatatactttttttctatcaatttccttaatattttatcactgccatgttaattttggctcaggaagtgt

SEQ ID NO: 821144 - DNA, 559 bp, Homo sapiens
ttcctagggaaaagcattgcttttttgtttccctaaatgtatttgattacaccagtatgtaactataataacagaaatcatttaagcagtataaaaktttaagtcatttccattttaaatgttgaaatatgtaactataggaaatttattctctacacttctcacattttgaagtaaggtataaaggcaaagacagttacattttggggacagataacttgaattctagtatgattgatgaatcagattacaaaaaaatctaaacatactgtagttttcatcaccatgatgaactgaaaaccaaacctacatgaaagttcaaaaacacttcataactgattttattcattctattatttctacagttcttgattagtctaacgccagagtcactatttccacaattgtgtaagacaagcttttgggctgactaaaattaggaagctgagaaaagtctctggccaaaggctgttttccattgactttattttactgcagttttttgtacttgaaaaaccaacaaagagaaaatcctctttcatgagatttccagattttt

SEQ ID NO: 821145 - DNA, 594 bp, Homo sapiens
acctagagagggcatgacagctctgcacccatccctcatatcttgccttggcatctcttccatctggctgttcctgagttgtatccttttataataaaccagtaatctggtaagtaaacttttcttgcgtgatgtgagccattctaacaattattaaacctggggagaagattatgtggacctctgatagacagtcaatcagacagcactggacttggaactggcatctgaaataggggcagccttttcagacggagcccttaacctacaggatctgatgttgtcaccagttagctagcaccagaattgagtttaattgcaggaaactgaagaaatacctggtatgaaaaatactccatatctgatgtcagaaatgaagtatagagtgtagtactggcatgaatttcacagacaggaaaaaagagtttcatttctattatacacacttgcccatctgattcctcaggtaattgtgacatggaaaaatctatttgtttacgaaagggagaagctacctttaaaaaataattctctgtcatccattrgatatcaaggaagaaataatgtctatctactcttagaaaatagggctgg

SEQ ID NO: 821146 - DNA, 609 bp, Homo sapiens
accaggctggtgcagtgtggggatttggatgcagcaggytgagttttcttaagctatttatcctgcacagaactgggcaggggggttaggtggaaatgatccttctattttaacagctctaaaaggacaattaaatttaatctgtggaagcaagaaaggtgtgggaaagaaaaaaaaagctgtataattgaggatgtgatcaattgactgaagagggcctaatagtttagcaactagaggtaggtctcttgtagcattaataaatgcagctgtggctgggcacgagtggctcatgcctgtaatcccagcactttgggaggccgaggtgagcagatcacgagatcaggagattgagaccatcctggctaacatggtgaaaccctgtctctactaaaaatacaaaacattagccgggcatggtggcaggcacatgtaatcccagctacttgggaggctgaggcaggagaatcgcttgaacccaggagatggaggttgcagtgagccgagatcacaccactgtactccagcttgggcgacagagcgacactccatctcaaaataaaataaaaataaaaataaaaataaatgcagctgtagaggactgactga

SEQ ID NO: 821147 - DNA, 609 bp, Homo sapiens
accaggctggtgcagtgtggggatttggatgcagcaggctgagttttcttaagctatttatcctgcacagaactgggcaggggggttaggtggaaatgatccttctattttaacagctctaaaaggacaattaaatttaatctgtggaagcaagaaaggtgtgggaaagaaaaaaaaagctgtataattgaggatgtgatcaattgactgaagagggcctaatagtttagcaactagaggtaggtctcttgtagcattaataaatgcagctgtggctgggcacgagtggctcatgcctgtaatcccagcactttgggaggccgaggtgagcagatcacgagatcaggagattgagaccatcctggctaacatggtgaaaccctgtctctactaaaaatacaaaacattagccgggcatggtggcaggcacatgtaatcccagctacttgggaggctgaggcaggagaatcgcttgaacccaggagatggaggttgcagtgagccgagatcacaccactgtactccagcttgggygacagagcgacactccatctcaaaataaaataaaaataaaaataaaaataaatgcagctgtagaggactgactga

SEQ ID NO: 821148 - DNA, 578 bp, Homo sapiens
  misc_feature 194, 398: n = A,T,C or G
ttttctttccctccctccatccttccttccttcttttttttttaccgaattcatagttatgagctacaccaggcattcacaacaaragcaaaatggcactgagggagcaaacattgtttcttatgtgggtgaaataaattgtactaatttttggggtaaaccacagatatacatatagtacataaaaagatatncaacatatctgtggtattaagatttcagggagggggagtaattaggaaaaaaaatgtctaaatagtattttcaagggggcagtgggagaatgaaaaaaaatggctgggaaacactgagctagataatgattaccatgtgggagaaaaaaacagcaaaaagtaaaagcatcacgggagcctcaccaacctcaccatggtgaggtnttcatgacgcttttactttctgctgttttttttcttacccacggtaatcactggggaagaaatgagaaggtcaaggaagtttgggtacttcagtattcaaaaccaggactgagactatttggacaggttcatgtgaaggactttgtcttatcagctccttctgcattcaacacatcccag

SEQ ID NO: 821149 - DNA, 578 bp, Homo sapiens
  misc_feature 194, 398: n = A,T,C or G
ttttctttccctccctccatccttccttccttcttttttttttaccgaattcatagttatgagctacaccaggcattcacaacaagascaaaatggcactgagggagcaaacattgtttcttatgtgggtgaaataaattgtactaatttttggggtaaaccacagatatacatatagtacataaaaagatatncaacatatctgtggtattaagatttcagggagggggagtaattaggaaaaaaaatgtctaaatagtattttcaagggggcagtgggagaatgaaaaaaaatggctgggaaacactgagctagataatgattaccatgtgggagaaaaaaacagcaaaaagtaaaagcatcacgggagcctcaccaacctcaccatggtgaggtnttcatgacgcttttactttctgctgttttttttcttacccacggtaatcactggggaagaaatgagaaggtcaaggaagtttgggtacttcagtattcaaaaccaggactgagactatttggacaggttcatgtgaaggactttgtcttatcagctccttctgcattcaacacatcccag

SEQ ID NO: 821150 - DNA, 629 bp, Homo sapiens
caaacacacaaagacccactatttgcacaaaactattcttgctggtttggaataggctgccatgtgtttttaatgttattgcagcatgtatattcattacagaattcagataaaatktgcctatgttctgctattgtttgatctaatcttaatcacagtgagctcttcattagcacaatatgtggtttgccccaagtgtgcactatttaatactttgtaatatgccaccaagagtactgacatttagagttgtttaaaggccgagaactggaaacagcctttccctcattttctgtgtattggtgatgggagtaataacattttgggggagctttttaaatttcacagaagaggaaagttgcctgctctggcaggtatgtgcaagatagagtgtgtttcatttgttctgttgccaagaattagtgctgtactattgtagttcctttaggatttgtatgtgctctgggctcatgaagatattgcatcatgagctgcagcagttgtactcttttttgatgacctaaaaagggcttatttctgaggaatgaaaggttcccatcattgactatggatgtggaaaacctttcctagcttagagcatttgtatctatattttaaagtcagagttc

SEQ ID NO: 821151 - DNA, 601 bp, Homo sapiens
catgttacctgttttaatcacatgactgcatgtcccagtacacaaaagggcactggttggcattcttcttaatgtatttagtaaagatcagaagaaatcctttaagagtttaaatgtccctggaacasgcatacaggctctagtcaagaatgaattagagtgaaggaaagctgtgtgacacctggcattcctctgttcatggagcttctttgaggcttgaagattgattttaccatctagaccactctgcctattcttcaaccaccttggttactttgacataggaattgacttcttttccttgaatggaaaacactttgaaataataataaacattgttataaactaatatatgtgagagtgcttagttgaaacaaaaaggagttttagtagacagtattatactatctttgaaaatcaaggagaagtttatgcaacttaaaatgtgtacaaactgcagtgcaatctactgttggtgaatgtcagtgtattatcaggaaacatgtctatacaatcacagagttatatttcctcacaaacttctttgtgaagagtgaaatgtgtttctgtacctctgggtttcacttacgggcatattttg

SEQ ID NO: 821152 - DNA, 590 bp, Homo sapiens
taatacgactaagaacattttgaattgcacctgtggctccattggtgtcctgggcaggtggctctgtgctgtcyacacaggttgtctcctgtgtcttcgtcttcgctgcgtgtgactttttggttcctgtggcacgtggggtcctgtatgggacattggttctacagcagatttatagtaaggatgtacctactaaaaaatacaaaataaaaagaatagacacaaacatagaaataagtatcacctcacaaaacttttggaaagtagaaaaagaaaaatgcattcgcagctttccagtagccgatatccaggctgtcttcatcagcatggatcatgtgtccctctcctgcatgggtagacactgttttctcaccttaagtgtttgtgagtgaaggattcttgatgtgttgacttggcagatgcagttgttgaacagtagtttatctaaagatcgtaagagacttttggagacatttcatgtccttttttcccttggaaaacgtgggttggagaaatcgctgcttgccaaaaataagccgtgaaatgtatttcagagtagatcgttatttacatgctggcgaggagccaca

SEQ ID NO: 821153 - DNA, 691 bp, Homo sapiens
tcaggaagagacacccagttttgtatcagatgtgtagagcgtgggatgctgttcattgacggagggaggaggaggaggaagaggtatggcatggggaggaggtagctgagctctgtcgtgaatgtcatttgaagtccccagggaaagccaggccggccagcaccttcactgcttcagccagctctcagggtgtctgtgctccctggccctctcagctcctgcttcatagctgtcagctgcagtgggagacagctgcacaagggcccagcatgtctgtgtgtttacccaggggactgccgcatggcccatgccgagcagaaactgatggacgaccttctgaacaaaacctgttacaacaacctgatccgcccagccaccagctcctcacagctcatctccatccagacggcgctctccctggcccagtgcatcagcgtggtaggtgcagagggtacctgtggctcaggctcaggtgaagaggcagctcatgcccaagccctaagcagtcaatgtccagaggaatgaaatgactagagttgacttagactcaccggtacacggtggggaggctggaggagggtccatgaggtttataggtgtccagtatttaatgaggycatggttttgttaacaaagaagaaatgagggtgggagcgagatcaccactggctaggcagccaatgggcctgca

SEQ ID NO: 821154 - DNA, 563 bp, Homo sapiens
agtttttcccagacaccagattggctagtaccttggtcttagatttcccagaccccagaactgtgagaaattcctttctgttgtttataagccaccaagtctatggtattctggtacagcagcccatttttgatatttatttaatgatatttaacatgcatgactgatgaaatttaacaaagtagttatagatatgtccttaccatgattaaaaataactcttaaattgatgcatacttttattatctagttctagccaaagccataagatgaaaacacaaataagaaaccacctatatggcacatgtatacctatataacaaacctgcatgttccgtgcatgtatcccagaactgaaaatcatattttaaaaaaatttatttatatagaaaaaaagagagcaaatgataatatttttcaaaaactgataatttaattayggtaagttctgtgtgatatgtgcctgatatgtgtgatatgtgtctgatgtgatatgtgtgagatgaaaaacactaagggggtatgtgattttgagcattcatgtgcccataaatccttgttag

SEQ ID NO: 821155 - DNA, 563 bp, Homo sapiens
agtttttcccagacaccagattggctagtaccttggtcttagatttcccagaccccagaactgtgagaaattcctttctgttgtttataagccaccaagtctatggtattctggtacagcagcccatttttgatatttatttaatgatatttaacatgcatgactgatgaaatttaacaaagtagttatagatatgtccttaccatgattaaaaataactcttaaattgatgcatacttttattatctagttctagccaaagccataagatgaaaacacaaataagaaaccacctatatggcacatgtatacctatataacaaacctgcatgttccgtgcatgtatcccagaactgaaaatcatattttaaaaaaatttatttatatagaaaaaaagagagcaaatgataatatttttcaaaaactgataatttaattatggtaagttctgtgtgatatgtgcctgatrtgtgtgatatgtgtctgatgtgatatgtgtgagatgaaaaacactaagggggtatgtgattttgagcattcatgtgcccataaatccttgttag

SEQ ID NO: 821156 - DNA, 563 bp, Homo sapiens
agtttttcccagacaccagattggctagtaccttggtcttagatttcccagaccccagaactgtgagaaattcctttctgttgtttataagccaccaagtctatggtattctggtacagcagcccatttttgatatttatttaatgatatttaacatgcatgactgatgaaatttaacaaagtagttatagatatgtccttaccatgattaaaaataactcttaaattgatgcatacttttattatctagttctagccaaagccataagatgaaaacacaaataagaaaccacctatatggcacatgtatacctatataacaaacctgcatgttccgtgcatgtatcccagaactgaaaatcatattttaaaaaaatttatttatatagaaaaaaagagagcaaatgataatatttttcaaaaactgataatttaattatggtaagttctgtgtgatatgtgcctgatatgtgtgatatgtgtctgatgtgatatgtgtgagatgaaaaacactaagggggtatgtgattttgagcattcaygtgcccataaatccttgttag

SEQ ID NO: 821157 - DNA, 517 bp, Homo sapiens
tatgtgtgtgtgtatatatagttacagttttggccaggtgcaatggctgacacctgtaatctcagcmctttgggagaccaaggctgaagacttgcttgaggccaggagtttgagaccagcctgggcaacgaagcaagaccctatctctacaattttttttttttaacaaaattagccagggatgatggcatgcacttgtagtcccagatacttgggaggctgaggcggaggatcccttgagcccaggagttcaaagctgcaatgggctgttactgtgccactggatcccagtctgagcaacagagcaagactttgtctcaaaaacaaaatttataattaaagataaatagttatagttttatgaaccttgactgcaactgagggaaaatcccgtaattggcaaaatgaattctgcctgcttgcaaaacttctgactaatacggaatgaataataggaagcccatattagaggatccacatcagttaaaaagtttccaaataagagtgactctgagtt

SEQ ID NO: 821158 - DNA, 502 bp, Homo sapiens
aaagtgtacttatgtctgtaatttattttgaaatgcatccaaaaaataagatggactgatggatagagggatgaataaatagatatatgataaaacaaatagagcaaatgttaattgtagaatatagatggtaatatataggtgttcactatgctcactcagacttttccatgtatttggaaatgatattgtgggggaatgtacataccctttgatccaacagttctggaaatttatcctacagatatcctacatggatgtacaaagacatatatttaagtccactttattacagtattgtttgttacagaagagttgaagtaacttaaatgcccatcagtaaggcgtaatgaaataaattatagtttattcagagagttttacatcctgtagtcatttataaaaaaatgaaataactctctatatgtgctaatgtgraacagtccccaagatataagtcatacaccacacacacacacacgtgggggaatacgtatatgaa

SEQ ID NO: 821159 - DNA, 526 bp, Homo sapiens
gttgtctcctaatagactgcaaaccccttgagggcaaarggtagacttctttatctgcccttccagatcagccagaaaagttcctagaacatagtaaatgctcggtaaatgttccttgtgtcagtattgacagacaatgacttcctattacagctcattgctgactctagcccagcaaggggattgtactaactaggcccatgccattatctaggctcctgtagtgtcaggggcatgattacatcataaaaattacaactttgaggttatctttcatagttctagcatcctcattatactagactcaatgaccagaactgtgcatattcatcttggctcactgctcatacagtacctggatactttaggaattcagttcttaattgtgttttgttttttagagacaaggtcttgctctgtcacctactctggagtacagtggcacaatcaaagctcactgcagccttgaactcctggaatccagtgatcctcagcctcctaagtagctagaactatatgagtgtac

SEQ ID NO: 821160 - DNA, 526 bp, Homo sapiens
gttgtctcctaatagactgcaaaccccttgagggcaaaaggtagacttctttatctgcccttccagatcagccagaamagttcctagaacatagtaaatgctcggtaaatgttccttgtgtcagtattgacagacaatgacttcctattacagctcattgctgactctagcccagcaaggggattgtactaactaggcccatgccattatctaggctcctgtagtgtcaggggcatgattacatcataaaaattacaactttgaggttatctttcatagttctagcatcctcattatactagactcaatgaccagaactgtgcatattcatcttggctcactgctcatacagtacctggatactttaggaattcagttcttaattgtgttttgttttttagagacaaggtcttgctctgtcacctactctggagtacagtggcacaatcaaagctcactgcagccttgaactcctggaatccagtgatcctcagcctcctaagtagctagaactatatgagtgtac

SEQ ID NO: 821161 - DNA, 634 bp, Homo sapiens
aattttgtgtaccctatcaatttgtttcttgtttgacatctgtgtttgtttatatagctttcagaagtggagaattctgttgccaattaatgttgatggtttcgagttmgagagaagagagtttgcttataaatgaaagtttttgttttttaagttgtgttttattgtagctgagtgttttccaaataaatattcactgactttattgaatacttcaattgggtaatggaatcacaggctttcagagaagtagggctcaaatataatttttatttataaaagattcctctgctattgaacaatgggacaacagaaaatacattaaaagaataatttcaagtaaaatattgaccaagtttatgttttcttgtggaggtgaaatcttgggccaaggtaacttctcaaacaactgtaacatagccatttgtaagacattgtttattaaaataggagctcctgacttctgatcttgcaggttggttggagaatcacctagggaccatgttaaaaatattacttcagtaactttgtggttggcactgagaagctgtatttcatgctccttcccaagtgatttttaatatgtagctggatttgggaatcattatgctaaatcacacattgtctcttttaa

SEQ ID NO: 821162 - DNA, 574 bp, Homo sapiens
gcatattgatcaatgagatgaccatccaggccactactggcmtccaaaatggagttagtgctgcaggaagcaagagttctccaccctcagaaagggactagaagcatctgatagttgtgagcattcagccattggggccaccaatgttggacagtgcctcctggcctggaagctggacaacctgggctgatacccggtaggcaaagccctggccttctgagactggggcaaagctcgtcagcatttacaccaccacctcctaccccaccttgggaaactagagaaagccaagccacccctaagctttggaattcctcaggcagacatcaccctgaagaaaaatagggtgcatccccaccctggacatactgagcctccacccccgtattagtccaggtttatttggctcatggtttctgcaggctgtacaaacacggcactagcatctgcttctggtgaggtctcaggaagcttttattcatggcgggtgggaaagggaagcagatgtgtcacatggcaagggagagcaagagagagaggaaggaggtgccagacacattacaacaaccagctc

SEQ ID NO: 821163 - DNA, 614 bp, Homo sapiens
cagcaagcagccacctcctaagaggctgcaggagtggctttccctagtccaggctgaaagcagctcttgcctaatgtgactcccgaccccctaaggctgactcccagagacttttgacagtaactgtgtcctgttaatggaccaaaccacattcccagaagattccaccatcccaggcttggatgcagatgtgccctggctgattgcagccatagcttggcagcattttatcaatgacttcagtggggatgtttatgcctcctggctttcatgctgttcctggaccctgaaacattctcttctcctaccaaatccctgctgtctttctgtagggactgctcttaaatgatttttcttagaccctctgctgttgcttctccgtcttcccacactatcaccttggatgttcctttggaacttctccctaggtctcagttcaaatttcacctcctcaaatgatctcttcccagactactctatctaaaatagccaaactccaacycagcttcttcttagcgcttattccttcctggcatgattttgtatctttttggttattgtctgtccctccttactgtagaatgtgaactccacaagggcagggaactgtttta

SEQ ID NO: 821164 - DNA, 520 bp, Homo sapiens
ggtgccaatggtgtgatgacaagaaatgcatttcggcaaatagtaactgcagtatggttagtatttatgggtaaatggtgctgtagttacaacagactgctgctttatgatcattagcttaccatttagtagcactgtagaaaaaaagcactttacacattaagacatttagaaagtatatagggaatcattcacttcttggcaaattgtgaagttagattggtttgttgttcaaatttgtcagtctagattccattttggatccatcaactttacttcttttcatggatgagactgggaacattttttcaaaactgatattgaaaaagactatagctataaatgttgtcttctgttcctatgaaaataagattatataggtaggtattgaaataattwccattggattcctgtcagacatgcattagtggtcgtgtggtctagtgctttgttttcacactttgtgtgtaagtttaacctgagtttttggtagttgtagtttctcttttaactgtctata

SEQ ID NO: 821165 - DNA, 555 bp, Homo sapiens
aacaaattagataactaggagaaatagatacattcctagaaacatacaactgatcacaactgaatcaagaagaaacagaaagtctaatcagagcagtgacaaataagaagatttactcagtaatgaaaaactttttaataaagaaaaaccagatagcctcacaggtcaattctaccaaatatttaaagaagaattaatgccaattctttttattttttaatttttatttatttatttaagactgggtttcactccgtcacccaggctgaactgcagtggcatgatcatacctcactgtaacctcaaactcctgggctcaagtgatccttctgcctcagcctctctagtagcttggattacaggtgtgagccaccacattcagccactaataccaataatttgaaaatccaaataatagaataaaacattccaaattctttttatgaggctagcatcaccctgctagcaaagccagacaaagatgccagaagaaaactacaggccaatatacccgatgaacatggawgcaaaaatcctgaaaaatattagcatttt

SEQ ID NO: 821166 - DNA, 645 bp, Homo sapiens
cctaccactgaaaaccacagctttggagaatgcttttgtaattgatggcaatgttttgtgtcactcagctgtgctgggaaagaaacaagcttttagcttcatagtaattctgatctaagagctcttctrcaaaaggagtttagccagggcccccacgcatgctgttgttccctcttcctggaaacttcttcctccatttctgtcccaagtcctactcatcctccagatcttcaaaattgtcccttcatcacaccttaaactcctccttcctggaaaacacacacacacacacacacacacacacacacacacacacaaaaaaacatgtaaagttatttgttctcttccctgctagactgtgagttccaaagaaaaattgtgttgtacattccattcccggtcctgagcacggaacttgctacagcaggtgctcaaatgagtgaaaaaattaactcttttttccatatttaatgaaattccctcttttacttattttatcctcccgtccaaaaatggctgaatgtaattcctatgagagctgatatttagtatggggctagaacctgcttaaatgacaatagagtatgtcttgaggtttgtttggtctgaattgcttgggttgaggaatcagacaaaaacaatgtt

SEQ ID NO: 821167 - DNA, 313 bp, Homo sapiens
actacaaaaaatcactggattctggaaaaaaaatcaatatcaaaattagatttattgtctgcttatgtgattaaaaatgacaaagtgttgcctcttattttcataaaaagagagaaggctgaacaaaataatttactatcgagttgtgctcgtttcatttgcctggcaaaacctggaggaggcctgtagggcgtttgtggagtgcagtggcagaaccagaagcccactgcgcaggagtgagctcgctgtcagaggatgtgtgtgctacagtgtctgagaayaatttcctagtccccaatatgtggccacgctg

SEQ ID NO: 821168 - DNA, 647 bp, Homo sapiens
gctggttatagagagagtagaaactctgagttattctttttgtttgccagtacaaaataaataccacttaatgtaatatacacattaatactgacaagagagatatttatctagataaataatcctagtaaaatcacatattttgatttttggtggaaatcaaatttttcttttcctttttggttagcggtggaaaggcccagatagaaaaaataatgggaaaagggcaagaaattggctggaactatttcctaagtagcagggagtggcaggaggtgtgagctgacagacagcagagactgtccttggatagccaccctctctttcatgctctgctcttctactctccctctgtcattttctctttctaagatgtgctgatctgttgaataggaagggaaacatttttgcaccctcccccaacattttgcttgacatacctatggggaaagttttcgacaagtgcttcccaggggtgtgtcccacagtgtcactccctgagaacaccatcaatttgttctacaggaatgattggtgtgggcccagagaactctcattatctacttcttgggctttccatgtgaagacaaggggcctcttggagttagrctatggaaaactgccctgaagctcttggaaacaaggta

SEQ ID NO: 821169 - DNA, 612 bp, Homo sapiens
catgacaaataagcacatgaaaagctgttcaacatcattcttctttatttcccccccacccagagtctcactctgtcacccaggctagagtgcagtggtgcaatcacaacctactgaagccttgaccttccaggmtcaagcaatcctcccaccttagcctgggaccccaagtaactgggaccataggtgtgcaccaccatgcatgcttgtggtcccagccaattcttccattttaatttttttgtagagatggggtctccctatgttgcccaggctggtctgaaactcccaggctcaagcgatcttcctgcctttgcttcccaaaatgctgggattacaggcatgtaccaatgcacctggccatcattagctttagggaaatgcaaattaaaaccagaatgagataccactacccatccactggaatgaccaaaattaaaaggtgctggtgaggagctagggcaactggaactctcattcattactgatgagaacgcaaaattgtacagcctctttgaaaataaatttggcaatttttaacaaagttcaatatatgcttaccttataaaccagcaatcctgctcttaggcatttacacaggagaaatgaaaa

SEQ ID NO: 821170 - DNA, 595 bp, Homo sapiens
aacttcattcttttgtctgtggatatccagttttcccaaaactatttgttgaaaagagtgttctttcccycactgaatagtgttatgggctgaatttttgtcccccaataattcatatgttgaagtcctgacacccaacacctcagaatgtaaccatatttggagatagaacatttaaaaagatagttaaggttaaattaggtcataggggagtaggttgggtccctaatccatgtgactgtctttggagataagtctttacagaagtgactaagttaaaatgagacccatagtataggaccctaatccaatatgactagtgtcgttataaaaagaaacagccaggcgtggtggctcatgcctataatcctgccactttgggaggccaaggcaggaggatcccttgagcccaggagttcaggaccagtctgggcaacataaggagaccctgtcattaaaaaaaaaaaaagaaagagagaaagaaagacactagggatgcataggcacagagaaaaggccatatgagaacacaataagatgtccgcctgcaaccaagggaagaggcctcagggaaaatgaaaccaaatttaaaaat

SEQ ID NO: 821171 - DNA, 463 bp, Homo sapiens
gcagctcacccacagggtggctgaaatgatcgccctgtccttgagcctcttttcgggcatactttgaggactccgcagccctccctttaaagaccgcctcacggggcctgccagcaacgcgctgtgtgcagcaggaagcccacgccaggtcctgacggctgcatcctgtgtgctctccggcctggccgcctcaagacacgccacctttgatgcacacgcgcttccggaggcacaggaaggacgggggcactgggaagtccatgtttagtctcctgacgtcgaccacacaaaccagacggaacggtgtccccggcccaggctgagcggagcrcaccatgagggcagaggctacaggtgactcccacgccccagcctgctcctggagagaccatgcaccaggctgcccggctgcttcctctgaactaatctgggacggtcttgttttggctctgacggatccttt

SEQ ID NO: 821172 - DNA, 552 bp, Homo sapiens
tcccagctgagacaggagaatcgcttgaatccaggaggcagaggttgcagtgagccgagatcgcgccattgcactccagcctgggcaacaagagcaaaactccatctcaaaaaaaaaaaaaaattagccaggtgtggtggtgggcgcctataatcccagctacttgggggagactgaggcaggagaagtgcttgaacccaggagttggaggttgctgtcagccgagattgtgccactgcactgccgcctgggtgacagagtgggactccatctcaaaaaaaaaaagcaaaaaaaaaagcccgataacttcccattcccccctcacactccaagcaacatcaactgtctgtctcaatgaatctgactactcctagcacctaatctcagtgaaattatacagtattgtctttttgtgactggcttatgtcacttagcacaatgtcctccaggttcatccatgccgtagcgtgggtcagaatttccttcccttttatggctgaataatattccattgtayggatggaccgcgttttgtttatcttttcatccacc

SEQ ID NO: 821173 - DNA, 511 bp, Homo sapiens
gctgctatgaatgtgtgtgtatctgtcagagttcctgttttcagtgctttagggaatatacctaggagcggaattgctgggccgtctggtaattctatgtttaactttttgaggaaatgccaaaccartttccacagcagctgcaccatttcacattcccaccagcaatgtatacaggctccaatttctccacatcccttgccaacccttgttattctctctttttaaaaaataatagccatcctagtgggcgtgaggtagtgtctcatagaggttttgatttgcatttcaccaatgattgtgacgcaggacatcttttcatgtttcttggccctttgtgtaccttctgtggagaatatctattcaagtcgtttgcccgtttgttaattgagttgtctttttgtagtcaaatctaatagttccttacaaattctggatactagatacttatcagatacatgatgatatgggttggctctgtgtccccacccaaatctcatctcaaattgta

SEQ ID NO: 821174 - DNA, 538 bp, Homo sapiens
acttctgttttaaaatatttttagagacagggtctctgtcaatgtagtggcataaccataactcactgcagcctcgacttcctgggctcaagygatcctcccacctcagcctctagagtagctgggactataagcatgtgccaccatgcctggctaattttaattttttttttttgtagagacagggtttcaccatgttgcccaggctggtctctaattcctgggctcaagcaatcctcccaccttggcctcccaaagtgctgggattataggcgtgagccaccacacccagcctaacttcgttttttttgttttgtgtttgttgttgttgtttgtttgttttgagaccgcgtctcactctgtcgcccaggcaggagtgcagtggtgtgatctcagctcactgccacctctgcctcctaggttcaagcaattttcgtgcttcagcctcccgggtagctgggactacaggcacctgccaccacgcccagccaatttttgtatttttagtagagacggggtttcaccatgttgcccaggc

SEQ ID NO: 821175 - DNA, 547 bp, Homo sapiens
tcaactccctgacacaggccagatggacatccgggagaaatccatagtactggagctggttcagagccccayggaattaactcggaataaaaccacgagagaaaggtaggcttgtgtgtttattcccccttctccctgttactttgacatgctctttgttttagtcaaataaacagaagccagcattcaatagtgaggagaagtggcccaaggttgtcctcgtgtcccagggcacaggggcaggtggactctgggccaccacggccatcagtctagggccaacagctgatttcactgaaggcgtccacaaggaagctggtggtcctgacttgtgaggtctcctcagaggtgccattcttgaaacctcccccagaagcgggactgcaccctcactttcatggaccccttcctccatagaaagttatttaaaattacattgtataggctgggcgcagtggctcacgcctgtaataccagcactttgggaggctgcaggaatcacctgaggtcaggagttggagaccagcctggccaacatggcgaaacc

SEQ ID NO: 821176 - DNA, 505 bp, Homo sapiens
ttcaaacatttttttaaaataacagaaatgaccctctccttttgtctcagctccatgtcaattttgtttggtacctgggttgtagagagaagttttgaaagtagggtcctgggatagataggaaaaaaaaaaaaaaaaaaaaaaaaaagctaggcatatgatgttagccaggccctctggatttgatttcagttccaatctaggaggatgaaaaactgcagctggatgagctggttgaggacacactctgctggaaaaacccaagcagtattcattcatgggaccaaactacagcttcaagtttcgaagggtgccagtgtctctgactctatctggaagccagcatggccctgacagtagcaacttgggacatttcaraagctaaactctggtcttgcctgcctggtatctgtaatgtataagcaggggccatgatggggctcccctaaatgacttcatgggccacagacattgactagtggatgcccaggcaagggaggaaagc

SEQ ID NO: 821177 - DNA, 616 bp, Homo sapiens
catagagcacaacccatgttcttacctgcaggactttgcgtgatcacctctttcattttgcccttcctcccatcttctatgcttcagcttcactggccttctcgcttttctyggacacaccacactctttcttgtctgagggcctttacgccagctgttccttctgtgacgcctctagattttcagaagatggagtcctctagtcatcaaggttcttatctgcagtgtgaccccctcaggtagcctgctgtggacattgtgtctgtccagcccctctccactggtcaccttctaagatgtcctattcaatggccctcgttgcacttctctaatatttttgccatgatttaattattacttgttttttgttgtctccccgactggaacatcagttctgtaatagcaggggctggggtggaccaatttattcattaggcacagtaggcacagtgcctagaatccatgatactttctggggtccacaaaaatgttttaattttcatttacttaaaaattagaagaaaaaataaatataagaatcacaaatacagaataatgaattcagcctggagtaaatttgtcttcatatgtggtcataaaataattttttttgttt

SEQ ID NO: 821178 - DNA, 632 bp, Homo sapiens
gattgagaatattgattttgtggaagtacgccactgaggtgatgggcttttctcagtgcattatatcagggagttcatagtatcartataatttattagtgatgttgactttcatgacatagtttaggtggtatctgccaagtttctccactgtaaattaatatttccttctttataattaataaatattttgggggagacatttagagactatagagatatcccatttctccttaaacttttgtccatgaattttagcattcatagatagactttatctgcagcaattgttactgtaatgttttgatagtcattttctctttttttcattttgtctacatttgttgactggaattattttgtaaaggtgacttctcccttctttgtttgtttgtttacataatatggacccctggtagcaccaatctgttttccatctttataattttcccttttccatagtgtcatataaatggaataatataatatataatatttggggttatttcatttagaaaaatacatttaagtgttgtccatgttgttattattttgataagttactcctttttactgttgtattatcccactgaaggtatgtaccattttttatccacttatcagttgaagaa

SEQ ID NO: 821179 - DNA, 637 bp, Homo sapiens
aatttttctcttcacattatttgaatactttctctaagagtgttttcaaggtagatctttgcgtagaaaatctgaggcctgatgtgtcactgagtatttgtattacacattcatattttaataacattttagcttgttatcaaattctggaataaagttatttttctttaatacgtacaaatattagtgtattgtgtatctagcattgctgttggtaagtctgatcgcaactttatttttattcttttgtagatgatctgttatttccttctgcatgcttttagaatctctcttggtatttgatattcttaagcctcacttcgtttgatatttttaagtctctattgttaaatccccccacttcttatctgtactgtttaacacattcaaatagaagtctttatcttttattaattttaaaaaaattatgttttttcaaagattttttcttctcttcatatgctttctttctggtactcttatcacgcatatgttggcacttctacatctgtcctttayatctattacttctctttgtctatattttctctttttacatatttaaaattttcttcttggagaattactgaatcaggctttctatctctttaaaattcttcaactgcacccaacctat

SEQ ID NO: 821180 - DNA, 621 bp, Homo sapiens
ggttttggtgggttttagctggcttctttactgcaacctgttttatcagcaagatctttatggcctgtatcttgtgccaacctcstctctcatcctgtgacttagaatgccttaactgtctgggaatgcagcccatttcatctcagccttattttacccagctcctattcaagatggagctcctctgtttcaaatgcttctgacaaaaacattcacgatataaactttatttttaagattagatggaattagagctataaattgacgtggaactcgcccccttaaaatgtctgtggagattgtataggtggtttagaaaatccagtcaagttgaattcactagattttcatctgaatcctgttcctcaggaggccttttttttttcagtaggaagaccaatttttagtgtctgtttttcacagaactcttccagtcagtatttgttctaatagttgaaagagaatgactttagaaagttatttgtggaggctcagaagccacagggaaataaaaagatttgaaaattgttataaaaattaaaggttatggaggaaggacagctctgtaatacagagccttggatacatacacttcttcctggaatcttgacttcatgagaa

SEQ ID NO: 821181 - DNA, 594 bp, Homo sapiens
atgctgagtaatttttcttaattgatggtggagtattgataattcattcttatatttggcttttccactgatatgcaaatcataatggtcaaagaatgaagaaaatcaaactaattaaggatgttatctttatcatagatgactgcatattaagtttctttgtaagttaaaaaactcagtctcactacaattaattatcattgtcataatcatcaccaccaccaccatcaccatgttgtaactaaatagtcaaatatgtcatctttattttaaaacatttttaaaattccagaatcagtttatataataacaaaaattataataaacaaaattagtttattttctgttgaacccaactcagttaatggcaatccacagatatacattacctgcataaattcaggtcgcagattttttaatccataaggttgctgtacagttaaatgcagaaaattacgtccaaaattatcttttatgtctacttgggcacctaaaaaaaamcactatgtaaatataaattctattcatttatttaaagcaatgtttacgtggattttcaacttagcaaaaaaaaatttgactaaaaatattgtc

SEQ ID NO: 821182 - DNA, 499 bp, Homo sapiens
gcaatgaaaaagaaaacaatgtctttttacttttcattgatttcaaatagtcaaaagtatctttttaatttttagaaaaaaatgttcaaagtttgtaggaggtctaccatgcactggtcaccaaattgtgtgagcttagtgaaatagaaaatactcatacacaagttacatgaagtggatttattattcatggatagacagaaaggggaaagggaaaaacaccctagaatccagtgagaactggtcccccaagactcaagaaagccttccaggagagaagaagtcctgactgcccatgctccactttgcacaccacaactgaagaactctgaaaggcagtccataccaagttatatacatcatgtgacaggagtcatgtcacatgctgggcaaagctttgatggacattctgcttccagggraaagaggaacaaagcccaggctttcctgaactttttcctcctaactcaagatattacattccctaagagggtcaaga

SEQ ID NO: 821183 - DNA, 633 bp, Homo sapiens
caaatagcacaagaacgaggattaggattggaccctaaagatgtgactgaattactccaatcttatgataaaacttaaagggatgaaaagttccttcttatggatgataaaaataaktttttttttttatgaatctacttctggtgaagatgctgtgaacattattgaaatgacaaaaaagaatttagaatattccatagatttagtaggtaaagcagtggcagggtttgaaaggattggccccaattttgaaagaaattctactgtcagtaaaatgctatcaaacagcatcacatgctgggcagagaaatctttcatgaaaggtagagtcaatcaattcatcaaagtcattattgccttattttaagacattgtcatagccaccccaactgtcagcaactaccaccctgatcagttagtagtcgtaaacctcaatgcttgacactttatcagcaaaaacattacaactgactgaaggctcagatggatgttagcattttttagcaataaagtattttaaattaaggtaagtacattgttttttagagacaatgccattgcacgcttgatagactacagtatagtgtaaatataacttttatatgcacatggaaacaaaaaaatttgtgtgac

SEQ ID NO: 821184 - DNA, 620 bp, Homo sapiens
aggaaagggggagtgcaccacatcacgggatcaccctgtgagacaaaagaatctgaacagcagcccttgagttccagatttttccactaaaatagtctacccaataagaagaaatcaaaaacataattcaggtaatatgacaaaacaaggttctataacacccacaaaagaccacactagcttcctagcaatggatccaaacccagaaggaatctctgaattgccacataaagaagtcagaaggttgattattaagctactgaaggagatactagagaaaggtgaaaaccaacttaaagaaatgtaaaaatcaagccaggtgcggtggctcacgcttgtaatccgagcacttcgggaagccaaggcaggtcacttgaggccaggagtttgagaccagcctggccaacatggcaaaaccctgtctgtactaaaacaaaaacaaaaattagcctggcttggtggtacatccctttggtcccagctactcaggatgctgaggtggaaggatcacttgaacataggaggtagaggttgcagtgagccaagatcatgcaactgcccaccaacctgggtgacaagcaagaccctstctcaaaacaaaacaaaaagttaaaaaaaaa

SEQ ID NO: 821185 - DNA, 642 bp, Homo sapiens
taagtaggaaaaagctggtagcaaacagtgtggcatggcctaaaatccccgtgttgytgggagtgtgctagtcctcggaagcaggtgtgttatgttctagaacactgcccccctgcgtcgacagcctccggggttgggggtaagtagaagggggtgaggggccagcactagttgactcaaggcaccctggtggggacggagaggttttttcgctcagtggtgcaggccatcaggcaggggtgtccaggcagggcccgggtgcaagaaaacattctgtgtgcgctagtgcgagaggatcttctacagtcacctgccttcatgccattacagacagacgggaagtcactgggttctaggacataaaaagacctacatgttggctagcctaaatcgaacccttttatagtaataaagattcatcaatgttttaaactgtccactgtcagccccctgggactcaggtgaaccaactctctttgggaatctatcttagaagatgaaaccataaagccttcagtttcaatgtcagggatgcacactctatatctggtgaaattatggaggggtgaaaacttctgtacagcaaactgtacctccaaatctttaatgtcgaaataaagggctttttgccatttctgtttt

SEQ ID NO: 821186 - DNA, 524 bp, Homo sapiens
tggaacccagactcctgccttcacttacagtaacaaggtgacatttcccttcccttcacacagggttttacatttgctccctgtgatagccttagatcatgttagggctattgaaccagaggcccctctgttctgttccacacaaaactcacctccctggattcttcagttgattttggatcttgtgatgagaagttgtgagcttctgtgctaaacttaaggacagagaaggactctaatttatctttgcattcatcaaagatgaattatttgagtctaaactacccatagcatttagtgtagtgtctgggcgtataggaacttgatacatatgggttgaactcttgatggaattgttaagagcataagtgtttctggaacattctgtttatctgactttacagtgattaactagacataccttacagagactgacacagacaatgagaaattggaatttctttgtcaccagaactgaaatctgctgagggygatgagagagctgctgtagagaagttctcata

SEQ ID NO: 821187 - DNA, 640 bp, Homo sapiens
caaataatatatgttgcatgtccaggcaaaaaaaaaaaaaaaatgctacaggatcagaatatggtaatatttaaaaatcyaggattctccatgtgcaaaatgtatgtttttaaaaatattttgggacaaactagcctaacaagatgttgcattgcaaaaaaataaaatattataatcacaaattattccccatccctcatttccctccctgatatttcaccttctctacacccaggaacaagagttgatttttctggcttaccattctattgtcctattattttaggctgtgggaacgtaactgtggaaagagagtgaaagaaaactcaggaagtaggctccaaagaacaagcgtgttctaaatagtacaatgctaaatcagaaggatgcacaagggcattagtaccaactattgtgagtcaggacactcatgatcttcatgctctaaccagcttataacaccaaccacagacgtatctgccctctgtcaaacccaaccctgttgggaggcctggaaaccaaagaaatggtgacaataacacctgtgacttggccaggcacggtgattcaagcccgtaatcccagcattctgggaggccaaggcggacagatcacgatgtcaggagttcaagaccagctt

SEQ ID NO: 821188 - DNA, 436 bp, Homo sapiens
cgaagtcaggggtttgagaccagccgggccaacatggtgaaaaaccatctctactaaaagatacaaaaaattagccgagcatggtggcgggcacctgtaatcccagctactgggaggctgaggcaggagaatcacttgaacccgggaggcagaggttgcagtgagccgagattgcgccattgcactccagcctgggtgacagggcgagacccgtttcaaaaaaaaaaaaagaaaaaagtaaaacaaaaatttactctactggccaggtgtggtggctcatgctgtaattgcagcactctggaaggccaaggcagtgggatcacttgggcacagragtttgagaccagcctgggcaacatagtgaaaccctgtctctaaaaaaaattttgtttttaattagccaggaatggtggcgagtggctgtagtcccagctac

SEQ ID NO: 821189 - DNA, 544 bp, Homo sapiens
atttctctgatgcctggcttaatagaagacagttgccttctcatatctgcctctgcattyagtgtattggggtggcacatgtcgttttgcttcggaaaattccactgcattgtatactgaggggataatgcgagatgagaaaggaaaatcacacgttagtgttgttataaagatagtattgactttacacaccctcagaagggggtcagggatgccaggatgacattcactaccctagtgtcacttaccacattgcatagaccatactgtgccgtacagaggcacatatttctgaaacttcctttattcctaatatattttgtagaaatttctatatcaatatggatatgtgttttttattgcagtgtactttattttttcaaataactgttcgtgtgttagatgttgaacggtgataggcctgtgagggatagttggagaggtgagtagaggccttataaaaacacttaaacagcagatgagtgagaatatgctctaaacatgggagtgacagaaggtttttatctaggttgggaagaaattt

SEQ ID NO: 821190 - DNA, 516 bp, Homo sapiens
gcattcttctcaaatttttttggtgtaataatccatttaagcattattatasaatacagggcaataaatgatatgttactggaagaaaaaaagacaacagaaagtcttcctaaattgaagttagtttactactatcacttccttaaacccacagggcctgtcattctgtcatggaaccgttacaatgcgaagcaaaattgaaataatttgcatgcaaacagtaggcaaggttgataaggcatcctgtgttgattctgctgatcaatgctgacaggtgagttaaagtacttcttagtaactccattttattgttttatttattttaataaggcaacaataaaaaataataaaggaccattaataatttagtaatacatttttctggggataagaaagtcttcgatggacttaatttttaaatgacatttataaatcacctaatcgttttattctaactggtgccaagagtgaaaatgcctgtgcttctgcttatttcagtgagtctaattcatccta

SEQ ID NO: 821191 - DNA, 588 bp, Homo sapiens
tgtgatttaatgacggtagggcaagcataatcatggttcttttctttggtaattataaaatagaaattgttttattactgtgtygtggtcttgcagggaggatgacgtgagaatagtgctaccaagcaggcagtgggcgtgctgccaacccacatagagtccaagatcatgccacttgttttgagaaaagaaaggctttattgcaagttgcctggcaaggagacaggaggaaactctcaaatccgcctccctgaggtgggggctcaggcagtttcataggcagagaaaacaaagtgtgatctgattggatcttgcaatggggtgatgctgggaggtgtcatctgactgggttgtgtcacaaggtgatgccagggctcaatctgattggatcatggattatgccatcaggtgtttactccttaatttggcccccgttccttggtctaagtgcttaggttctgcccgtggttacatgcttggttcacctgggcatgctcaagtgacgtaacttgcaacttcaggggccgtggcaattaaacagttcaccattttgatacacaaagttgaactagattgggctggtttggt

SEQ ID NO: 821192 - DNA, 517 bp, Homo sapiens
atgagctgattaagcttattttctttataaattacacagtctcaggaatgtctttctagcagtgtgagaactggctaatccagaaaattggtcrcagagaagtagcgcattgctgtaaagatacctgaaaatgtggatgtgactttggaactgggtaatgggcagaggttggaagtttggaggtctcagaagacaggaaaatgaggggaagtttgaaacttcctagagacttgttgaatggttgtgaccaaaatgctgataatgatatggacagtgaagtccaggctgagaaggtctcagatgaagatgacgaatgtattgggaactggagtaaaggtcactcttactacgaagaggctggtggcattgtgcccctgctctagaaatctgtggaacttctaacttgagagagataatttacggtatctggtggaagaaatttctaagcaacaaagcattaaagatagagccagctgcttcaaacagcatatactcatatgcgttcacaaagagatgg

SEQ ID NO: 821193 - DNA, 610 bp, Homo sapiens
agaataaattgttaggtttttcaattaaaaaaatacaatttaggataaattataggtaagaagggagaaagttgtacatgaaattccctgagcagttatgaagcacagatatttgacaagggagaattgcactttcagaatatgacactacgattctaagaaaattcttagaaaatctcacattggctgtcatcccaatatatacagaatttttgagttttatatcaattccacagatatttatggtgtgtctactaaataaaagcagaaaattgtgctgagtgaaatatcaggtttatacctaggaagcttacacattagcaaaataaatgagatattcccagatagctatcctttaattcaatatgtgaaaagtgacaaacgaattaagtgccagagggaagatagattccttttaattcagtatgacttaagtttaacttttttaaaaaggtatcgactaaactacaaaagattccacagtaccacaggctgcagtctcaaagattgttataagaatctcgtayctaccacagttctaccttcctctttttaggcttcccttgtggatagaatgttcacttgtgatagctcccagcttatgtcttct

SEQ ID NO: 821194 - DNA, 610 bp, Homo sapiens
agaataaattgttaggtttttcaattaaaaaaatacaatttaggataaattataggtaagaagggagaaagttgtacatgaaattccctgagcagttatgaagcacagatatttgacaagggagaattgcactttcagaatatgacactacgattctaagaaaattcttagaaaatctcacattggctgtcatcccaatatatacagaatttttgagttttatatcaattccacagatatttatggtgtgtctactaaataaaagcagaaaattgtgctgagtgaaatatcaggtttatacctaggaagcttacacattagcaaaataaatgagatattcccagatagctatcctttaattcaatatgtgaaaagtgacaaacgaattaagtgccagagggaagatagattccttttaattcagtatgacttaagtttaacttttttaaaaaggtatcgactaaactacaaaagattccacagtaccacaggctgcagtctcaaagattgttataagaatctcgtatctaycacagttctaccttcctctttttaggcttcccttgtggatagaatgttcacttgtgatagctcccagcttatgtcttct

SEQ ID NO: 821195 - DNA, 526 bp, Homo sapiens
tgtagaatggagctaggcacagagtaagcttcaatcaatgtcagctcttcattacccaaccttggcgctgcatgacgaacacctgtggatgrttaaaaactgcactgcaggttacttccctcagagcctctggggtgggacccaggcttccgtatttttttttaagccccttaggtaatttcattgtgtgcacagggctgaaaactgcctgaggctgcagtctctcaagtgctagttcacacagatatttatttatttattttttgagacagagtttcgctcttgtcatccaggctgaagtgcaatggcgcaattttggctcactgcagtctccgcctcccaggttcaagagattcttcttccacagcctgccgaatagctgggattacaggtacgcgccaccatgccgggctaactttgtatttttagtagagacggggtttcaccatgtttcaccatgttgtccaggttgctctcaaaatcccgacctcaggtgatccacctactttggcctcccaaagtgctg

SEQ ID NO: 821196 - DNA, 624 bp, Homo sapiens
ttctccctgtccttcctgttgtaaataaagtattcagtagaaactaaagacttgtaaaatgaaaaaatggctgtggtgtgacccaagacagatgtggcaaatttttattcgttattcatcaaaaaaaatcattattaaattcttacatggtgtggtttataggaccagtatgggatgtggtgagacatacaaaattgagaaactgacagattctaacctcaggaagatttcaagtctaatacatgataaaagacatatattcaaaatattaaagagtatgtcaggtcataatttgtgacctagaagtggtgccaataattattttggaatctcagaagataaaagatgatataaagttgctaccaatgaagaaagaattgtgggctggatataacaacacacaggttgtatgacaaagcctgcaaactgtccttgaaggactgagttagggtcactgctaggagattccatccagaagaaatgaatgaaagtatagttaaactttcaggttttgagagcctactacgagtcaaatattgtgataaatacttcaaacattttctcattamttcttatcctaatactgcaaggaagatattatatctcccgtttacagaagaagaa

SEQ ID NO: 821197 - DNA, 641 bp, Homo sapiens
acatctccatcagagctcttgggagaccaggtacattattaatgaacagtaatattttgaatttttaaatatttagtaaaccatgctgtaaacagatgtactgtcatccagrctttgttgttccatttctagagcacagactgagtagatttagcataattcttaaaagccctgagattttctgaatgataaatcagcattgacttcaacttaaagtcaccagttatattagcccctaagaagaaagtcagcctgtcctttgaatctttgaaagcaggcacaggcactgacttttcctccctagctgtgaaagtcctggacggcatcttttcccaatataaagctgtttcatatacactgaaaatctgttgtttagtgtagtcaccttcatcaattacctttgctagatcttctggataacttgctgcagcttcttcattggcatttgctgcttcatcttctacttttatgttaaggagatggtttctttctttaaatgtcatgaaccaacttttactagcctctaactagtcttcttcagcttcctcacctctcttagtcttcacagaattaaagagaatttgggcctcactctggattaggctttggcttaagtgaatgttgtcactgatttgatcttc

SEQ ID NO: 821198 - DNA, 564 bp, Homo sapiens
tctcagctactcaggaggctgaggcaggagaattgcctgaacctgggaagtggaggttgcggtgagccgagatcgtgccattgcactccagcctgggcaacaagagtgaaactccatctcaaaaaaaaaaaaaaccaaaaactgatggtgatggaaattagaagagcagttattgttatggagtgagggtgggggagtgggccattgacaaggaggaggcatgaaggagcctcctggggtgctagaaatgttctagatcttgatctgggtggttacacaggtgtatacgcttgtaaaactcctttgaatggtacccttttgtatactttacacagcttactgtacatgtgttatacctcagcaaagagcaataaataaatacatccatacacttttacaggggaataatttttcccactaccaagtacatagccagagagagagcactggtgtccagtgaatctcacagattttgcatggggtcaggatgaagctatggacagatgtccatgggtgggagttagcaraggcaattgtgcttggcactccaagcctcttcccttt

SEQ ID NO: 821199 - DNA, 622 bp, Homo sapiens
gattctgaaaaaaagagaaatacttctctgagttggaaattggttaaatttagtgatgtttgagcctcagcttacattggaaatcactaactacttttaaattacttttggttttggaccctgtttcttgcyctgggactacacaaaaggactgagccaagacaggagcaggaatttggcttgccatttatttaatttatattttattgtctgctaaaaattgaatgcgtaagttctagtaccttgccgactcattctaacaaggctgctatattactgcaattagaatataaataaccaattttatatgagtcatcattcttgaagtaaaatctcaaactcaaaaattattgaagaggcaatttctaggtaaaaattggaataatgtttaaaatgtatattttgcaactagatggtaaatgtgaaaaataaaaattaagcaagttaatttaattaaggaattttttagtttttttattttttaagaaaaaaattaaatgatcatgagaagttgtaaagagatgaactctttcatgcaaacacacagtttcttaacaagtcatgttctttttggatggcatgaggaaaaaaataacaaatttactcagattagttcaagtcc

SEQ ID NO: 821200 - DNA, 562 bp, Homo sapiens
gaaagcacagatgcattttaaaaatgtgttttatttggtcagaaatgtgtctagtaagatgtttacagtcaataaaatttcttcaaattctacaagttgaattaagctttgtataatccccattactctgtggccctagccatagatagtttgatttctatgtgcctgatagacaactagatgaaagcatcttactggtagctggaaatgtagaattcaggccaaggaataagtttaaagaaaggaaaaagtgagttcattttgaggagaaaattgcatgtaattatttatccaaagattgtattgcagtgcctggaaaaaagtgagaactacactaataatacaagggtgattatgaggcaatcagcagaaagtcatttgtgattaggaattcagaaccattaaatttatatcttaaaattacttcaaattttatctgttatatgcgtcygtacttttgcttacatagtaactattttaaagttaatatgtataaggccataatcactaggatatatgaatatatgtgtgcatgcatatttacattttttacaaagattag

SEQ ID NO: 821201 - DNA, 616 bp, Homo sapiens
ttggtatatgctggcttttcaccatataaatccacagaaatcaagatacagcaggtaytatgagtgccaaattttacagagggtcagcatagctaggggtccatataacctggaggttgattttggtttcatgttgatagaaaaataaattagtgataaattaaagatgatagaagcctttcagcccaaaatacaacctgtgttaaatttactgcgtgaaacacaaattgcagaatctctggttattttgtgaacctctctatcaaatctgcatcccatgagactccttgccagctataatcttttggagaaggatcactttagaataggctgctgctagatttacctgagcttaacatttatttggaaatattgattactcaaaatctgagtaggctgtcaatatgattgtctgtggttaattttatgtgcaaataatcatggccaatgatgtcacaacatacattttaaaacatgataaggtttgttccttagccatgagcctttctgcttggttcattccttctttttatttttttcttctatggtataaggacatttggaaaaataaactcaaatgaaaaacaaacttacttagtgcagttaatcccaaaat

SEQ ID NO: 821202 - DNA, 616 bp, Homo sapiens
ttggtatatgctggcttttcaccatataaatccacagaaatcaagatacagcaggtactatgagtgccaaattttacagagggtcagcatagctaggggtccatataasctggaggttgattttggtttcatgttgatagaaaaataaattagtgataaattaaagatgatagaagcctttcagcccaaaatacaacctgtgttaaatttactgcgtgaaacacaaattgcagaatctctggttattttgtgaacctctctatcaaatctgcatcccatgagactccttgccagctataatcttttggagaaggatcactttagaataggctgctgctagatttacctgagcttaacatttatttggaaatattgattactcaaaatctgagtaggctgtcaatatgattgtctgtggttaattttatgtgcaaataatcatggccaatgatgtcacaacatacattttaaaacatgataaggtttgttccttagccatgagcctttctgcttggttcattccttctttttatttttttcttctatggtataaggacatttggaaaaataaactcaaatgaaaaacaaacttacttagtgcagttaatcccaaaat

SEQ ID NO: 821203 - DNA, 586 bp, Homo sapiens
ccagagctcaaagacgagggctgagctagagatataaatgaatcctgctggaggtcctagggcagagggagagtggtgggggagaggctgttgagagtctgagaaaaaggygggggagggaacaggtcattactcacccagggaggggatgctggggtacagggattcatgggattcttccttgtgggatttcaaatgctgaaagagggtgcattttgttctggaatgtatataacatgatacaacttacaaagtcccttctggaatatgatcttattgaaagctggcctttttcctcctgtttggttccactgcctgcctagctctttctgctctattcatgatattccttctgttcctccaatgcatcataaactttcttgcctcagtactgtgccttaggagaccaaggcagcagcacattaaaataaatccttaggcagagctgtgttacctggatctgatgccaaaccctgtgacttttctatcacacctcagagcacgctcgagccatcttccctttagcaaggggagctggtcgattgctggatttagacaactggttcctccagggagagtttgagaa

SEQ ID NO: 821204 - DNA, 619 bp, Homo sapiens
aggaggcttcaaccagccttgtccctgggctgctcactctccaaggttcactacactgccatgaccttgggatttcccttcactctaatcccaagaaatcatgcctttgaaccatgttagaytttctgtttcctggacttgatatcttcttcttcttttttgatttatttgtggcttttttttttttttgagagacagagtctcactctgtctcccaggctggagtgcaatggcatgatctcagctcactgcaacctctgtctcccatgttcaagtgattcttccacctcagcctcccgagtagctgggattacaggcatgtgccaccacacccagctaatttttttgtattttagtagagacagggtttcaccatgttgcccaggctggtcttgaactcctgacctcaagtgatccacccacctcagcctcccaaagtgctgggattacaggtatgagccaccataccctgcctttttttcactttgatggaggttcctgagaaagatttatggtagatcagtctttttttagaccttgctgaacatgtaagacagagtaagagaaagtttggctggctattgaattccaggttagataaaatttattttttctcttg

SEQ ID NO: 821205 - DNA, 667 bp, Homo sapiens
cagttgcttctggcttaatcagtggatcctaatagacttttatgatgggcatttgatttttcagcagggaaggtggtgctgacatccttccttttgtttttgcttttgttcctggaggcttcctgaccttggtaccaaagctcaggaagctcactgacaaagtctggcattgggtaattgttggaaaatctgccctccagctagcaccctgtacttggaactgaagggaatcctaggaaaatgtactccctccctttttcctatcacaacctggatgtacagatggtgacgtgctatctatgcttctaaatgttgagattccatcaagaactttaatacaagaacctattactttatgaaataggactgccctaaaaagtcacatataaatctgattgtgttcaaggggagagatgggcagattgagtcaaattggattttaaatgtattagagactctgaatgtttgagagaacactgggtgatgcttagaagagtgaagaattttatgaagagaaaataaccaaccctaaacattctgcttggctcatrtattcatccatttcatcaaaaaaattgccttattgggcacctactgtgtgttcgacattattctagtgactggtgatacaaagataaataagccacctgctgtgcttttgaaggca

SEQ ID NO: 821206 - DNA, 619 bp, Homo sapiens
cagaggcaggaggccatgagaggacagccctgagatgcagcggccaagtgattgcacttcagcagccgattagtgggcaaatgcttttmaattagcaaattttaatttagacctaaatctccattactgctcaaggcttaaggaaaattggtgaccatttaaaattactaattgaagcctgtggggagtcagtggagggtgaaaagcagaaatggtctggataatgaagcgggctggaagatcagggtggaggggcaagaaaggtggggcaacagctggcgacagactgacaaggagctgcggctggctgggaatcaggagacttgtcagggatcctggctgccatgccctggaaacagcttggcagcagcagcaacaccaaaggacctgaggggagatgagtatccagggctttgaaggtaatcccagcggtctggaactggagcccaacccatttccatggggaacctgctatggcagggacagaggcaggagaacaagtcctcaaatagggaggccagtgggcattttcctaaagtattaaagcactttggtgctgtgctttacaaaactgtttgagtggctgaattgattcttctctctcattagactcagaaaa

SEQ ID NO: 821207 - DNA, 621 bp, Homo sapiens
tctctctggcatgctgctacttttccttctttgtagttctttgttgatagaaatggatttaaaatggcataaattcttggagacaaataaaattcattgttggcagaaatgcagtctcatcttattgccttctctcaaacccttatgactatccttttctcctggcttcccttagtgaagccagtggcctttgcatagttccaaccgtttaactgcttctgagcacctctggatgcctgtattgcaggtgttagagcagcagctttgtggagaccattttactcaagcttcatcttcaggcaaacagctatgtcttagaaaagtcctgtttcgctaaccttattccattcatacttccatatcaagggacgaaaaatcagagctgacatcatgtggattatttatatggataaaatcccaccaggctgctcaggatgtacaacaagcacatgctattctgctattctggccctaggaaaaccaactgcggttgacacagtagtccgttgctcctgagaatgtggttcttttaaaagttttcagagactccaaggggaaggccataragttttgagggtccagctcctgggattgctatgacccagcatccctaaagtaaag

SEQ ID NO: 821208 - DNA, 533 bp, Homo sapiens
tctctccctttggaaaaaaaaaaaaaaaggtggggggtgtccaaatatagtatgacaatgttttcaagaatctttcagtcagttgatgcttaattataaagaccccagctaaatattctgtttattaaattaatagcgtgacaagtattggagagctttacaaccacttaaactcatgtttacatcctgtgtaattacaattcataattgggaaagcagtcaaatctaaatgcattctgatcaatggctctcaggctgccaagtagaccccacacaagacattagagtaagtgacttcaaaacaggacttctacacctagaattcaaactaggttaggggagggcactgtggggagtctatcagtgaagtgtttaaagttatatgtaagatttcctatatatatgacattgtttttctgaatagagaaagaaattmtttttttaaatttataaaaggcctgaaagtataagaatgctgctctgaatcctaagattacgatttaccccaactgtggaaagtctcattacataat

SEQ ID NO: 821209 - DNA, 587 bp, Homo sapiens
gagaaactgtaggaagggaagggcccttgagcttccagagcaaggtagctagggaagggtcagaaaygtgttctttgtaggtaggctgttttaagattcttactttctcggtttatcctgcttttgtgcaccttttgtaccttaattttttttgacaggcctagccaggctaagctgtgccaaagataaatagggagagaggttttgtccccacctgtgccagagcattcaaggagttgcagccatttctgggggcagtctggtggcagaggaatttgatatgagcaagtcccagggggaaggtaaaactctgtcagacaatattggatccacttggtaaactatttcttcctgcctggagcttcatcttctagggcaaaaccttggatgttttaataagaggaatgataacagcaatagtatctagacatgaggtctgctagggcataacacccgtgccacgtgcaaccacagcagcacgtggaaatcacatatttgcgtatcctccaggacctggttatatgaacagaagtgaagaaaactcaaaggtggaattattaatatatgtatgaattatttgtcatctc

SEQ ID NO: 821210 - DNA, 587 bp, Homo sapiens
gagaaactgtaggaagggaagggcccttgagcttccagagcaaggtagctagggaagggtcagaaacgtgttctttgtaggtaggctgttttaagattcttactttctcggtttatcctgcttttgtgcaccttttgtaccttaattttttttgacaggcctagccaggctaagctgtgccaaagataaatagggagagaggttttgtccccacctgtgccagagcattcaaggagttgcagccatttctgggggcagtctggtggcagaggaatttgatatgagcaagtcccagggggaaggtaaaactctgtcagacaatattggatccacttggtaaactatttcttcctgcctggagcttcatcttctagggcaaaaccttggatgttttaataagaggaatgataacagcaatagtatctagacatgaggtctgctagggcataacacccgtgccacgtgcaaccacagcagcacgtggaaatcacatatttgygtatcctccaggacctggttatatgaacagaagtgaagaaaactcaaaggtggaattattaatatatgtatgaattatttgtcatctc

SEQ ID NO: 821211 - DNA, 604 bp, Homo sapiens
atttcagggactgaaataagaccgggatggcttgtgtagagaaaacaagggggagaggcatgggatgaaacttgagaagttcaaaaggattagatcctgaataaccctgtaaaccatgatgaaaacattaacattatgcaaaggggaatgagagaacaaagcgttttaagcccagaatgcaacgctttagagagatctctctgtgtgttaagaccagaggcacagggtccagggaggtggctaggcagtgggtaacagtgatgatgacggtgccttagactagaataggggctgtgaatctttagagaaatggtcaggttcaacagatgcctagaagatagaactcacagcacaatgcttgatcagatgaagggaaaggtgagggcaaagacgcaattagggtgattctcaggcttctggctcaagtgatgggatggatggtgacacttcactgagccaatggaccgtggagtaaaggcagatttggggagctgatagaaatatgacaagtttagttgtagraatgtttcatttagaatacctatgcaacatccaagcagaaatgtccagtaaatgatttgatatatagctccggtggtcaaca

SEQ ID NO: 821212 - DNA, 630 bp, Homo sapiens
ggacatgtggacatggagttcacatccgaatgagaggcccaacaattacgatagaaggtaatcagagctcaataagaggaatgtacatgttatttgttagtgaagcccaacatggggagtaagtcttcccagaaaagtgacatgtagttaagcactaaaggatcagtggagctttccaggataggaatcttgggtaaacgtgattgagctaacacactgtgttccagaacttgcgtgtgtgtgtgtgtgtgtgtgtgtgtgtgtgtgagcatgcacatgtgttgggagtaagggaagatgttaaacagcatccagggactagattatgtggtttcatgaatcccaagctaagacattttatgttgtcagggaggaaaatcggaatcatcatatggagaagatatgtgatccatcatatggttttaagcagagaaatgaaaggaacagatttgtttttaaaaagattattctagctactaagtaaagaaaagaatggaatgggttgaaattagatttgatatataaatttaacatygtccaaacacacctttgggaacataggagatttttctcactctgaaatctttgttccttctcttagacccacccacatagggctggtattctatg

SEQ ID NO: 821213 - DNA, 629 bp, Homo sapiens
aaaaaaaatgaaattaatacattccacaacagttcatacaaagaagcaatacaaatattgttgatgtattataattcatttccattgctgagaatttttctcactaagaattctcagaagcttcatgttstacaaaaactttcattggaattggatgtgataagatagaattgctctcagacatactattaaagtagcctctaatatgcttaatttacttctgggaattaaatgttagtaatatttgttgagcatttactacatgctaaggtattagaataaaaagtaaaattactcagagagtaattggctaattttaagttgttttcttacttggccttgcaattataaaacaaaatacatttaaaaaattaagatgagatattaacttaaaaagtctcgtgatggccaaatgttaaaatgtatatgtgcagtcggtaacacactataggagtttagaggccacaaatttcaatatccatttttacaggataacatttttcctcccaaggaaggcagagcacataaaattttgtcccactggagatatgtatggatttgatccggattttcatatgatggctgctggtggttctgagttttagtagtttaacgaagttaggcattct

SEQ ID NO: 821214 - DNA, 624 bp, Homo sapiens
tttgacatataattttcacactataaagtgtacagctccatgaatctttacatatgtgtacacacgtgtatcactacccagatcaagttgtggaacatttccaccaccctagagctttctctcctgctcatcgcagacaatacccacagagataaccgcttttctggtttctattagctcagatttggtttgcttcttctctaagaactcactttgttttgaaaagaaaataaggaatagcatgttatacttttaaatcaccttcagaccatcaccaagaatgatttcattttagcctaaggtgcttctgagattagagaaagaagtgggaaggaaaaaaatccgacgggtgaggaaggtgagggtagagaggggtgggagagctgagaaagagtcctgtcaccagagagataacgattcacataacagaggagggttcacagactggaggcttatacaggccttcaagaatgcttaggcgctctgttcattaactgtatagagatgctcaaagactgtcycaacctacctagaagacagggagatgagttaaagaaagtcctctgggtagaaagtcagtttcaccaactgccttcagagatgaaccttttctgtcatcagacc

SEQ ID NO: 821215 - DNA, 626 bp, Homo sapiens
atccctgagctgttaggggcatgaatcccctagtccaagtcccaactctggcaaacatgaaggtgaatgggatctcccaggaagcaggttttctggcctcagcaattctgtagygagagacaagcgaagcaccatggtggcccagtactaactccctactcaccgttcggaaaggatctggggctcagtgtccctaaaagcctacgctccattcacgtctgagatgtcagaaacacagcactcaaagggaaatgaaaattcaagatatgctggaaggaaaataaatttctcaaataaggcccagtgcctaagactaccaccactgcacatttccaacaaggccttgctcagcgtggagatgtttcctccctaagactgcgtcaccattatgccctgcatggaagaatatctcaactcagcttaaattccagctctgggcctttagtgcagatcctgggaagactaactctgcaattttttttccctcctcagatatccccccaagtctctgctatcatctttgccaacatgacacactaattccaggaacctaattttttccaggaatcgctgagagtgcttttgtttcccaaattttgtgggtaggaagctagtgctataataac

SEQ ID NO: 821216 - DNA, 548 bp, Homo sapiens
aataaatcaattatttaaacatagacaatgtctagattaatttcctacacaaaaatacaaatkctagggttcctatgacaccttttacaaggtgtggtctagtcttcttatactctatgttgacagttttcatttcaacaaaaatttaggtgactgcttagtccgtacatctcagtgtttctggcattgtgttaggtgtgggagacagtgaaatgaaagtcacaagcccagttgtcaaagatctcactctcttgagggcaaagagtaagtaaaacaggattagagaacagtacaatgagtgaaagaatggaggtataaaggggttgtaatttgtgtatagaggctaagggggagggcattaagcttagggaagacagtgcaccctacctggtccagtgggttgtattacatgcaaatgatcaagtttcactgcatattcgattttcacatttcacgtatgtcatgattttatacatactgcaatattcagaacccaatatcttgctattggatttgctgagaatataacaaaagcctacaggaaagag

SEQ ID NO: 821217 - DNA, 537 bp, Homo sapiens
atcacatcatagggatatatcatagtttatttattcattcacccagtgaagaacatctttggtggagtgcatggtaagagtaaatctagttttacaagaagctgccaaactgttttgcacagtggctgtaccattttgcatttctaccagcagtgaatgagttcctgttgctccatgtactcaccagcatttgatgttgtcagtgttttggatttttacaatcctaatcaatgtgtactggtatctcatttttttaaatttgcaattccataatgacatatgatgttgtacatattttcttatgcttatttgtcacttgtataccttctttgattatgtgtgtgtgttcagatcttttgcccattttttaattgggttgttcattttcttattcctgagttttaaaagttttwaaatattttagataatagtcctttatcatacatgtcttttgcaaatatttttctcccagtctgtcacttatcattctcttgacagtgtcttttgcagagcagaaatattaaattttaatgcagt

SEQ ID NO: 821218 - DNA, 538 bp, Homo sapiens
gatgtagaacatagattttcaataagaatgagacaaatgccaagcatttagatgtgggagaggtgagaatggaatacaatagggattggcaaactatggcctgcagaccaaatytgcccaccaccccatctgtttttgtaaagttcaatggaacacaatatgctcatttatttatatattgtctatggctgtttttgtgctacaacagtaaagtcaagtcatccttacagagaccacagggcctgcaaagcctaaaatatttactatctggctagttacataaaaagttgactgaaccctagagtgggaaaatgatctatatcaatggttctcaaactttagtgggtaccagaatcacctggaggccttgttaaaattcagattgctgagtgccctagattttctgactaaaaatatctgggggtagggcctgagcatttgtatttctaacaagttccaatggccacactttgagaactgccgctttaagtttatgctgaccaatgcaccaatttaagcgtgatgtaagacaggagtg

SEQ ID NO: 821219 - DNA, 538 bp, Homo sapiens
gatgtagaacatagattttcaataagaatgagacaaatgccaagcatttagatgtgggagaggtgagaatggaatacaatagggattggcaaactatggcctgcagaccaaatttgcccmccaccccatctgtttttgtaaagttcaatggaacacaatatgctcatttatttatatattgtctatggctgtttttgtgctacaacagtaaagtcaagtcatccttacagagaccacagggcctgcaaagcctaaaatatttactatctggctagttacataaaaagttgactgaaccctagagtgggaaaatgatctatatcaatggttctcaaactttagtgggtaccagaatcacctggaggccttgttaaaattcagattgctgagtgccctagattttctgactaaaaatatctgggggtagggcctgagcatttgtatttctaacaagttccaatggccacactttgagaactgccgctttaagtttatgctgaccaatgcaccaatttaagcgtgatgtaagacaggagtg

SEQ ID NO: 821220 - DNA, 551 bp, Homo sapiens
ctagttttagaatttggtttagaatgtttccttcttaccaagatggctcatatagtctctttagagagtgcttgtaggtttctatagtatatagttaagtatttaatgtatctagaatatgtattttttgtgcatgagatacgttaatggtaatttaggaatctgaaaaccttcttattcaacttccttgctcaaccactttttttcaggccagtttttacaataatggctggaaagctcaatatattatctttcagcaattttcctcacagcccaaaaaataaagttctaatcaaagaattagagagtcacagttttttaataaaatatggcaaaacatagctagcggaaagtcctttttctttttgtacctttcctttatatcttccctggatgactagagtttcaggagccattttgcaaccattgtggtagtcacgtaaatttcctcagcaaacctggagktggaaagccagaaggaaacccattgcttacaacattctagagcatctgcctcagcctagactatcaacttgtaaactttttgcaaa

SEQ ID NO: 821221 - DNA, 574 bp, Homo sapiens
gattaaaattttttcaaatttccattataaaatgcttattcataaagatgtaggtaagtaggtagattttaaaaaggatgtgtttgacagattctattgtgttttctgcatataccatctaaggtcattccaaagatggttaactatttgcagtcaatgtttgtgatagtaattccatgttttaccttagtgtactcactggaatctccaagacaatgttgacaacaatattgtttgttagcatacttgtttatctcctaagtttaactaaaatattttttctttagattttttagaatattttctaccagctgtttttatatagaccttaaataattacattgaagaatatattattaaacattttattttttaacatctatttatattttacaaagtaaaaaacaggctgaattttgtcaaattatctacactcccaccaacagtgtataagtgtttctttttaaaaaaatattttattttatattaagttccaggatacacatgcaggatgtgcasgtttgttacataagtaaatgtctgtcgtgatgatttgctgcacctatcaacccat

SEQ ID NO: 821222 - DNA, 599 bp, Homo sapiens
catcctcatagtttagctctcacttataagtgagaacatacgatatttggttttctattcctgagttacttcacttagaataatggcctccagctttatccaagttgctgttgttgcttttaatcacaaagcratgctgggttttaccaaatggttttactgcatctattaacatgatcaaataacttttgtttttaattctctttatgtgatgtttcacatttattgacttgcatatgtgaaaccatctctgcatctgtggtatgaaacccacttgatcatgatgtattatctttttgatatgctattggatttgatcagctagcattttgttgaggatttttgtatctatgtttatcagggacattggtctctagtgtctgttgttgttatgtcctttcccggttttggtattagggtgatcctaacttcatagaatgatttagggaggattccttctttctctatcttttaaaatagttttattggaattggtagcaattcttctttgaatgtctgatataatttagctgtgactccatctggtcctggattttttttattggaaattgttttattacttatttaatcttgctgct

SEQ ID NO: 821223 - DNA, 599 bp, Homo sapiens
tttagggaggattccttctttctctatcttttaaaatagttttattggaattggtagcaattcttctttgaatgtctgatataatttagctgtgactccatctggtcctggattttttttattggaaattgttttattacttatttaatcttgctgcttgttattggtttgtttagggtttctatttattcctgatctaatctaagaggattgtatatctccaggaatttatccatttcctctagatttcttagtttgtgtgtgtaaaggtgttcatgatagtccggagtggtcttttgtatttctgtggtatcagttgtaatatctctactttcatttctaattgaacttatttggatcatctctcttttcttggttaatctcactaatgatctatcaattttgtttatcttttcaaaggactagctttctgttgcttttacttttttttgtttgtttcatttagttctgctcttatyttttgtatttcttttcttctgttgggtttgggtttagtttgttttgtttctctagttccttgaagtgtgatattagattgtctatttgtgctctttcaaactttttgatgaaggcattaa

SEQ ID NO: 821224 - DNA, 594 bp, Homo sapiens
tatgtttttattaaagtataaaggctcagtgctgctttcctttcctagaggaaggcactccctatatacacatacacacccttgttgattattttaaatgaatgggagccaatgggacctgatttttcaaggtgtctattttaatacttttgtctgaacaagtatttctatgttaatgaaattagatttgagcatttgatagaacatgaaactataagtgttgaatttcagaatttataaaaaagaaaaggcagccttataattgtggtataaggtttgatagttaagactccttcatgtgaaataccagatgttttgagtccttgatataaaggtcagaagaaaagaaggatattggtttcataataaactaacatgtttacagtaatgactatgcagtgtaagctgtggatattttgttatataagaatggcagggggtcctagaactgggggctggaaggcccatttaaaaggtcatcyaatacgataatttttagtctggagcacacaagcagagttcaggtgaactccctggaattatttgcaaaattgggagtattttttgtatgtatagtttgaggggaatttctgt

SEQ ID NO: 821225 - DNA, 408 bp, Homo sapiens
ctgttcatggtaatactgagtttcccttttccatagggaagtmtaggacataaattaataatatttacagcttttagtatacaacaaaataatctttggctttcctcttaacaaactttagacaaaagaacttacaaaaggataaaatgcttgtatcttaaatgacttctatactaatatatctgaaatattctatgcataactaatccccatttgaagtggtatccaattaacaattttttatcatcatttcctttttataaagaaaaaagggggaaatgaggactactctgtccaggagaaaaggcaaagtagtcctcacttcccccatttttactaggagaaatggcatgtttcttggtttgcaaacataaaaaattatataaaaatatatgtacttttatttct

SEQ ID NO: 821226 - DNA, 598 bp, Homo sapiens
tttaaggactatttccagaaataagagaaaatcaagctctaacacttgaaagggctcactgaattcatgggaaaattgtgtgagaaawactctagtaacgtttgtagacttcaagtttaagaaattacattggatctctaggaaaaagtctatcatttaaagagagaagaaacaaattaatttgatagattatgacaaaaaacaaagcaaagcaacagaatatcattttgacagagtacaaagcaagaaatgtaaaaactaatgttttaatagccacatcagatatttttcaagaatcaaggatattttaaaaaccatattagcatggaaagaaggagccagagaagtatggctgaatggaagcctccagtgatcgtccccccaacaggaacatcaaattaaacaactaaccacacacaaaaaatgcacctccataagaaccaaaaatcaggtgagcaatcacagtacctggttttaacttcatattgctgaaaaaggcactgaagaggttagaataaacacccttgcattacctacaccagccccaaccatccctcagcagtggctgggtggcatggagaaagaatctgtgcacttg

SEQ ID NO: 821227 - DNA, 594 bp, Homo sapiens
cagcaaaaagtgacacaggaccaaatctggctagcacccaggasagcgtaattagactagcctgggggcaaatcatctaccccaggagtcagaactttagttttggcaagccttaccaccatgggctaaagaactctggggtcctaaagaaacttgatagtctttccttcaggagctcttgtaagactggataaagaaaatgtggcacatatacaccatggaatactatgcagccataaaaagaatgagttcatgtcctttgcagggacatggatgaaactggaaaccaccattctcagcaaacaaacacaggagcagaaaaccaaacaccacatgttttcactcaagtgggagttgaacaatgagaacatatgggcacagggaggggaacatcacacactggggcctgtcaggggttggtgggcaaggggagggatagcattaggggaaatacctaatgtagatgatgggttgatgggtgcagcaaagtaccatggcacaggcatgtaacaaacttgcacgttctgcacgtgtatcacagaacttaagtataataataaaaaagaagaaagaaagagagagaaagagacagag

SEQ ID NO: 821228 - DNA, 597 bp, Homo sapiens
ataagaaccaaaaatcaggtgagcaatcacagtacctggttttaacttcatattgctgaaaaaggcactgaagaggttagaataaacacccttgcattacctacaccagccccaaccatccctcagcagtggctgggtggcatggagaaagaatctgtgcacttggaggagatagagtacagtgattgtgagactttgcattttttaattttatttatttatttagagacagagtctcgctctgtcgcccaggctggagtgcagtggtgtgatctcggctcactgcaacctccgcctcctgagttcaagcgattctcctgcctcatcctcccgagtagagtagctgggattacaggtgcccaccaccacgcccggccattttagacttcgcatttaaacccattgctgccctgtcacagcaaaaagtgacacaggaccaaatctggctagcacccaggacagcgtaattagactagcctgggggcaaatcatctaccccaggagtcagaactttagtttyggcaagccttaccaccatgggctaaagaactctggggtcctaaagaaacttgatagtctttccttcaggagctcttg

SEQ ID NO: 821229 - DNA, 594 bp, Homo sapiens
cagcaaaaagtgacacaggaccaaatctggctagcacccaggacagcgtaattagactagcctgggggcaaatcatctaccccaggagtcagaactttagttttggcaagccttaccaccatgggctaaagaactctggggtcctaaagaaacttgatagtctttccttcaggagctcttgtaagactggataaagaaaatgtggcacatatacaccatggaatactatgcagccataaaaagaatgagttcatgtcctttgcagggacatggatgaaactggaaaccaccattctcagcaaacaaacacaggagcagaaaaccaaacaccacatgttttcactcaagtgggagttgaacaatgagaacatatgggcacagggaggggaacatcacacactggggcctgtcaggggttggtgggcaaggggagggatagcattaggggaaatacctaatgtagatgatgggttgatgggtgcagcaaagtaccatggcacaggcatgtaacaaacttgcamgttctgcacgtgtatcacagaacttaagtataataataaaaaagaagaaagaaagagagagaaagagacagag

SEQ ID NO: 821230 - DNA, 624 bp, Homo sapiens
caagcagatacaaaccattacatacatgttctcatgataaactagtcctcaaataaagggatttgacagcaccrtttatcactcatagcttttcctaaatttattaggtaattagggttaccatctatggtatctaattggcttatccaaaggaaaaatagacttctcatatctttatgacaggcggtagttttggagcaaggcctcagcccgttaggctctgatcctaccacataaacaagagagagaggcgctgtcttccctgaggggtcttttcctttcaaagagacagaggtcctcaagggctttaagaaagactttcctggtttgcttaactgacaagaggcttatttagcatttaaaaagatttgcatacctttcaaagagacagggaaataacagaattacaagttttctaaagtaaatgctctaaagaagggagggggaagaaatccctttctttacattcaacagagagaattaagcccccttttaaatttgcttttgtctttaacagattttttttttctataattaacattccttttttgttttttactgagctataaatctcattgtctatttctgtatcaatatcacagtctccagatttctctacttttt

SEQ ID NO: 821231 - DNA, 595 bp, Homo sapiens
ccgaaagtcagccagagcagaacaaagctttaatcaattctctgtttcttactgaggttggttttgcttcagtgggcagaaatctgattatctctaacaggctaatagaaaagtttctataaaccgataacagttactggctgcattgcttttcctatttcagtttcctcactgaaatatgacttcttcccttcttccactaaaaggctaaaaaagtgttagatttaactggaaatgagtatcaggatggatatgagcttagaaaatgaaattcaacatttattagttaattccacagaaactatgattgcttatgatatgtcagacattgtgataaacattgaggaatccaaagatatttagagacctctttaacctctagtgcttcccatccagcatgaagacaaatgaagaaaatacaatccagtgctatggcagaaagatgaaacaaatttcttctattttcgcattattttgattttaaaaaaagactacaacaaaaaagtgaygtaaatgacatggtttttccagctttgaaattacagtctctctctttactttttcttctctttattaaagttttagcaaacaaaca

SEQ ID NO: 821232 - DNA, 628 bp, Homo sapiens
gacttcttcccttcttccactaaaaggctaaaaaagtgttagatttaactggaaatgagtatcaggatggatatgagcttagaaaatgaaattcaacatttattagttaattccacagaaactatgattgcttatgatatgtcagacattgtgataaacattgaggaatccaaagatatttagagacctctttaacctctagtgcttcccatccagcatgaagacaaatgaagaaaatacaatccagtgctatggcagaaagatgaaacaaatttcttctattttcgcattattttgattttaaaaaaagactacaacaaaaaagtgacgtaaatgacatggtttttccagctttgaaattacagtctctctctttactttttcttctctttattaaagttttagcaaacaaacataagaaaaatagattaagtgataatattttacacaccatgataaggcaactgtgtcaataatataaggcactggaatcatmaaaaatctctgaagttcaaacatacttcataaaataatgagaggagttacattttttaaaaatagtaacattttctttagggtttatatcttatctgaggtcaataaaatactagaaacatcaaacaagaat

SEQ ID NO: 821233 - DNA, 603 bp, Homo sapiens
tagaaaagggtcttcataggcccagtgcggtggctcacgcctgtaatgccagcacttcagaaagctgaggcgggcagatcatgaggtcaggagatcgagagcatcctggctaacaggttgaaaccctgtatctactaaaaatacaaaaaattagccaggcgtggtggcgggtgcctgtagtcccagctactcaggaggctgaggcaggagaatggcatgaacctgggaggtggagcttgcagtgagctgagatcgccccactgccctccagcctgggcgacagagcaagactccgtctcaaaaaaaaaaaaaaaaaatagggtcttcataagcttccatcattacttgcactcatttaacatattctgttctgtaccaacaaatgctgccttcctcttgaaactataaactgttcatgtagttcactaagatgcttaatttcatcttctctcacacactcaggacacctcyttaacaactctcttattttcaacattatccactctatcctgtgctactcccctcagcacacacctatgctgttattacctccttctcaaaaaatttctctggactttacttacacctccagctacgatctaa

SEQ ID NO: 821234 - DNA, 636 bp, Homo sapiens
ttcacattttcaagacttttaattagatactcctcacataaacttgaagagtcagagttagtcaccctcagctaatagatgaggaaagtagaatatagaaagtcaggggaattgccraagatttgaggccttttagtagaagacaagattgaagaaggatgtagactctgaggattgtgcttaaagccgggtcagtgcttcccgccacaaatctttgtatttcagcctcctcctatcacacaacacacccaggaacagaaacaaagaaacaaaccactgccctaatgtttaaaatttcatatttaattttgttcttatgtataaatgtaagatttaagtgtcatccattcatttgcatttaaaaataaactttagttctgaagttaacttaaaattttagtttaaaatctgctgtctttattcatgtagctggtttgttaagtacaatgcaaaagataaacttaagattctaatttttaaaattgtttcccactttcttataattctacttcatggagggaagtttggggttgttctattttgatttaatttgcttagttttgttttgttttttaatagttggagagatagggaaaagcgtttgcctcgccactgggtctggcaggctcctgtctt

SEQ ID NO: 821235 - DNA, 649 bp, Homo sapiens
agctcacagcaatacaacactaagattaaggcagtagaagaaaaatcaaaaggcaaattgttgagatgcaggataatgtgtgcatgacccaagagtataggtaatttagttattcttattctggccaggggagcctggaggataatcatctcttcattctcactgttcgcattggctagtagagaagtagaataaatagaggagaggacagaattctgagattagtataaaccagtactccatcttcttcgatggtttatattaaccatgcctttgtcttcctcttgtttatatatttcatgtgtaatagatctctgtaaatagtacatactgattaggtttctctgtcatattttaattcacttgatgatgacctttagtttttccatttaaatataaaaatattgaaaacattataattatttaatgtttccacagttagtcacaggttttttttttttttcctgaatctttcatttatgcttaggggatagggttaccaaccagcccacctgaaatgaaagggttttctgggacatgggactttcagtgacaagactgacacaacttytaaggaactaaaaaactgtaccatgctaaaggatttttcaacttttcaaaaaaaactctgagtatgggttctttttac

SEQ ID NO: 821236 - DNA, 469 bp, Homo sapiens
cagtggctcacacctgtaattccagtactttgggaggctgaggagggtggatcactggaagtcaggagtttgagaccagcctgaccaacatggtgaaacctcgtctctactaaaaatacaaaaattagccgggggtggtagtgcacgcctgtaatcctagctactcaggaggctgaggcaggagaattgcttgaacccagggaggcagaggctgcagtgagcccagattgtaccaccgcactgtaccccagcctgggtgacagagtgaaactccatctcaaaaaaaaaaaaaaaaaaaagaatactgcgaagaatagcaactaaatggagcctcagcactattggagagtgacattttattaygtaacaatctatttgaaaggaaataattgacaaatgcatttgtcttctcttttttatttttttgagattcagaaatattttattggaaatgtgatgcaatttcatt

SEQ ID NO: 821237 - DNA, 597 bp, Homo sapiens
gtaattattcacaagtagggacattaaaattcattccataatcatcattacttgagccagagaaagactgttgcaaattagaacatcttttttttttttttgagacagagtcttgctctgtcgcccaggctagagtgcagtggcgtgatctcggctcactgcaacctccacctcccaggttcatgccattctgcctcagcctcccgagtagctgggactacaggcgcccaccaccacgcccggctaactttttgtattttttagtagagacagggtttcaccgtgttagccaggatggtcttgatctcctgacctcatgatccacctgcctcgtcctcccaaagtgctgggaatacagacgtgagccaccacacccagcgcaaattagaacatctaaattcaaaatgtaggacatgcagatatgattataatatctttctctttgacagcttgagtttacgtrtttagataaacacaacatagtattattaaaaaaaatttcctggccagaggaaggattgcatttcaagagtccaatgtgatgcaaaattaatacatttttccggtcttgagatgctactccctgagtggaacttt

SEQ ID NO: 821238 - DNA, 525 bp, Homo sapiens
cttccctggatcaggaagttgtgatttcttgctgaatgtttctcaatatatttcctttagctcccccgctttttttttttttttttttttttttgagacrgatctcgccctgtggcccatgctggagtgcaatggcatgatcttggctcactgcaacctccgcctcctgggttcaagcgattctcctgcctcagcctcctgagtagctgggattacaggtgcccaccaccacatccagctaattttttgtatctttagtagagacaggtttcactatgttggccaggctggtcttgaactcctgaccacgtgatccacccgcctcagcctcccaaagtgctgagattacaggcatgagccactgcacctggccttagctcccctctttatggatatgtttacatctagatataggtttgttgagagacatagtaaagtgaagagtggagaaagaagacaaagaggaagatgctaggcaaaatatcaatgaaaatagaaagcaaagccctaaaaaacacaccaaat

SEQ ID NO: 821239 - DNA, 552 bp, Homo sapiens
  misc_feature 1, 2, 3, 4, 5, 6, 7, 8, 9, 10, 11, 12, 13, 14, 15, 16, 17,18, 19, 20, 21, 22, 23, 24, 25, 26: n = A,T,C or G
nnnnnnnnnnnnnnnnnnnnnnnnnntaaactcttccttggtagctataggctactctttcctcctcctctctcccatttccaactgtctccgttttctggatcctacttcaataaggtggcatgaraaaatagactttactgtgatccttctttccttcctctaccctgctccagaaagatattgtctctcaaccttagaattctacacagtttttatccggagttgttacataagcagttccattaacaactattttgttctaattcttaaaaccaattgccaatcattataattggcaagtccatttatcttcaagtccctttctattttataactactaatcggatttgatagatcttaccatagtacattcctgtggtttttgcttgtttttgctgttttgttacccacttgaggtcctttatcttcacactagactacataatctatattactttttatctccattagatgctaggctactaggaatcgtggaatgtgtttaaatactctttgtattcatataagccatcagagtatctctacgga

SEQ ID NO: 821240 - DNA, 494 bp, Homo sapiens
gggctggagtgcaatggtgtgatgtcagctcactgcaacctccgcctcctgggttcaagcaattctcctgcctcagcctcccaagtagctgggattacaggtgccctccaccacacccagctaactttttgtatttttagtagagacgggtttaagccatgttggccaggctggtctcaacctcctgacctcatgatccgcctgccttggcctcccaaagtgctgggattacaggcatgagccaccgcgcctggcccatccctggccaatatcttgatttaagccttgtgagagcttgagcagaggatcggctaatccatgcccatactcctgatttgcagaaactgtgagccagacaatgatgttattttaagttgcttaatctgagcgtgcagcaatagaaaattaatatttgcctttgcatgatggagcccagtttactcctcaaattcaaactgcaagagctttgggakaattacattgttagctttcca

SEQ ID NO: 821241 - DNA, 462 bp, Homo sapiens
aactccagatttgcctattaaggtagaaatgtcatgaggattattcgaaatgtaaatactgagctagcatgtcagtaaaatcaaacatacagatgacagataaataacaacaaacacaaaatacaactgtggcaatgtgcatctatgtaggaaacagagagggaagtttagtgtctcatgcatgccacgtgggattgaagagaatctgggaaagttaagtcagatcctgcaactacctacttaactatatctatgagtttgctttaatgttcctcctcttgcctagtgccacatgggtgcagaggcagcccatgaggacaacttctcccagccttccacatttatagcagactaaaagctccctccccctgtcaactccctcccccaaccygtgccctctttctcataacataggtaatgatcctcattcactctgttctaaatctgaggggcaagtaagta

SEQ ID NO: 821242 - DNA, 652 bp, Homo sapiens
acagaatagagaaaccatatatagagccaaatacttatagccaactgatctttcacaaagcatacaaaaatataaagtgaggaaaggacaccctattcaacaaatggtgttktaataattgacaagctacatgtagaagaatgaaactggatttgcatctctcaccttgtacaaaaatcaactcaaggtggatcaaagacttaaatctatgacctgaaaccatccaaactgtagaagataacattggaaaacctcttctaatcattatcttaggcaaataattcgtaaccaagaaactagaagcaaatgcaacaaaaacaatgatgaagagatggacctaatgaaactaaaaagcttaagcacagcaaaagaaataatcatcaaagtaaacagacaacccacagattgggagtaaatattcacaaagtatgcatctgaaaaaggactaatatccagaatctacaaggaactcaaacaaatcagcaaaaaagaaaacaaataattccatcaaaaagtgggcaaaggatgtgaatagacagctcttaaaagatgtacaaatggccaacaaacgtatgaaaaaaaatgcctaacatcactaattatcagggaaatgcaaattaaagccacaatgcaataccagcttattcctaca

SEQ ID NO: 821243 - DNA, 601 bp, Homo sapiens
gtgatgaataatttgaggcaccaaacatggctgtatgtgatttatataaatttgttgttttagatctttttgcatgaatttttttaaactttttgtctggaaataatttcaaagttatagaaaatttgcaaaaataggaatagtctaagaacttgtaatttttatggcccagagtaagtaaaccaagaaaaaaaataagaagaaaagtagacaaactaggtggcctatagtaagaaaatgtaggaaaagaaagaagtggggtcgggggagaaagaatcgaaagaaagatcattcatgagagacatatctagaagtgtgaaattcatcttttgcctcaaactggaaaactaaaaaacaaaattaactctttttcttttaaactatacttcacttttgggccttggttgccacttcagtaaagatttttatcttgacttagacacactcatagagatagtaaacctgtcaatggtcctcctgaaaaggctctggctgtagaaacattgagccartttgtttataacaaacccgcccctcctaccaagacttactgctccagctttcctatatacagctgacattggctacgtgggtttgtgtt

SEQ ID NO: 821244 - DNA, 516 bp, Homo sapiens
aaaaattataatagttattaataaattttaacatgcaaatccacataatcttaagaaaaatattatatatcaatagctgcttattatattttttaaaattcttaattggtaagagctaagtgaaattgggaacgttatataaagtaagtaacagtcaacatattattattggtgtttagagcagtgttcatgaacgctgacgagaaaacaatgtccactgttgacttactgaaaggcagatcattttctctgcctggagatgtacttgaccccataagtcttaaaaactctcttcatttgaaaaaagaaatagaagcgaagttattgtgtaattctaagaatcttctgttgctgtaaaattatgtgactctaatgtatagaaaacattagaaatatctaggacaaaagaagcccagatggcacatggtcaagactatgtgacgatgaaactayaatgaggcaaagaggccttttctattttgtcatatgaggtgttgcatagttctgcctttactc

SEQ ID NO: 821245 - DNA, 625 bp, Homo sapiens
aatgcagcaacaaattcaactctatttttatatagttagccataaaatttaataatagaataaaataaaacctaaacttattttaagtgagttgtcataggataatttgataactgttaataaattatggttatgcttttgcatgaattatttgataaaaagtcccaggcatagtttcaccatcctaaaaatcctctactctgtatgatactgtagtggtggatacatatcattgtacatttgtccagattctagaatgtacaaaaccaaaaatgaactctaatgtaaactgtggactttgagtgatgatgatgtgtcaatgtagttcatcgactgtaacaaatgtacagctctagtagagaatattgatagttggggaggttatgcatgtgtgagggcagggagtattttgaaaatctttgtatcttcagctcaattttgctgtgaacctaacactgctgtgaaaaataaagcctacttttctaaaaaaaggttgcaggcataatgatcaagtttatgaagattttwaaaaatgtaattgttgtcttagaaatgaagagataagttcagataataaacagtactgttgatgataaaacaaatctccttactgaaaatataagtc

SEQ ID NO: 821246 - DNA, 612 bp, Homo sapiens
  misc_feature 587: n = A,T,C or G
ttgtctacatataggtcctgtatttgttctatttaatttatttaatgctatttcacatgtatttttccattttcattagaatgcatttttatttgaaatttaaatttgttctaatttatmaaaaatattgatttatatatatgcatgtagtattcagccatattaaaactatggagctcatcataacatgtttatagcaaaatcttttcaaaatatgtaaacataaaatgaagctaaacttattttgctgaacatttagttttttaaatttattgtgttagacctctccaagaccatattgaaaatgtctactgatagttttatttctgactttaatgaaaatagaactgacaagttatcatttagtatgctgacttttgaaaattttgaccaatagtcttcataagtttccattattttttctatattctgatgctatccatttttaattaacttgttttttttgtatattgtgacataaatgttactttaatattcatataagcagataatgtagttacatggaaagtttagaaattacatggatgtgcatgtacagaaaactaaccaaagaaaatacacatatngagaaaaaatttgtatacaacttaa

SEQ ID NO: 821247 - DNA, 618 bp, Homo sapiens
gtggaggaaatgtcctttggcataaaaaggtacattatttcctcaaagaaaagattgaaacatggatgcttgtttatacasagttatagtatagcctaagtgtgcccatggccgaccaacctcaatattaagcagctttttatattatatgactttttcttcacttaactctgccacagtttcctcctcaataatgtatatgacatatacacaatctttcttatgattgtgattaaagtcatataaaacagagaaaacctgtaaatgacaaagatatttataaacaataaaatcacaaataactgttttgataaagaaaaagtgtttagcttatggaggtgggtttttattcaccatttttgtgtgctatagccctattcagaatgacattctaataatgattaactgtaatagttaacggtgtgtggtcctataaaataaaccgaaagacatgaaacatttctgaattgcaatagaactttgaaatctaattcagttgacttatagcagatggacacaggctgagtaatgtatgtttttatagtaatatcatgtgaatatgatgattggcattcgtcttaaaacccagcaatatgtttttacctctactggaattag

SEQ ID NO: 821248 - DNA, 459 bp, Homo sapiens
gtgtcaggttatccctcattatattgtcagacacattgatttcaataacccccacccctaaaagcaattgtctctgaaactctatgatttcttgactttaagaatctatcttgtttagccacagcttttataaacagagataaaagtggaaaacacatcattttgctataggttttgctgaaatgtgcttcattgttaaagatagtccacctagtccatatgactgttgatgccagtgattaatgaggctttacactcaaaactttatgaaaactaaaaataaactgactgaaatgggaagattttgagaatgtagtgactgtgaaaaacttactatrtaccatcccaaaactcacagtcctgttgagagatagagaaggcgataggctatttctacacagtacagtaatttgtgaggaaacgtaaaaaagcatcctgtatgaaggtataattgaacag

SEQ ID NO: 821249 - DNA, 538 bp, Homo sapiens
gatccagtactggcaggatattacctgctgactaaagaacccttgggccctgaataaccagcagcaatacctaggggatatgccatggtccttgggctatgagatgcactggcttcagaggtgacccagaacattcccagctgtggaggatatggtgaaagactccctatattaaagaaaagcaggggccaagcgtggtggctcacacttgtaatcccagcactttgggaggtcgaggtgagtggatcacgaggtcaagagatcaagacaatcctggctaacatggtgaaatcctgtctctaataaaaatacaaaaattagctaggcatggtggtgcacatctgcagtcccagctactcgggaggctgaggcaggagaattgcttgaaccctggaggtggaggtagcagtgagccgagatcaggccacygcactccagcctgacaacagagcgagactccaaaaaaaaaaaaaaaaaaaagcagacggaaaagtaaagggaactttgtcttccactctaggtatcagcttgactactg

SEQ ID NO: 821250 - DNA, 593 bp, Homo sapiens
aaaacaggtacatttgggtgattaccaaagtgagattcccaaacatacagtcagcaattagttggccctgggatttttaagtaataaatattagggtgtctggaattmcctttgctcacgaatttaattactatttattgaagttattccctgagaggaaaggagatgaagaaaaatcaaggataattaggaggttttcttttttttttttttttttctgagaatttacagaaagcatagaaaaaaaatgtgcggtcaagttggcggaagttcatgattacataaatgatatctgcttctttacaatatcagattcagagctcaacgttggcatggtgggtctacctcatgattttagatggtatatgctagagacaggacttattagctgtgagtctattcctgagcatagattctccctctcccttacctcaaactcccgttattgaattatcctgtcctcaaattatctcagctctcaatgacagctgagagtgaatttaaggaataagagtaaacacagagctaagccctgggaaaaatgatcatcacactagcaagagtagagacgtttttctgccctggagggtaac

SEQ ID NO: 821251 - DNA, 629 bp, Homo sapiens
aagtctctaggaaattctaaactttcccacatatttctgtcttcttctgagtcctccaaatggtttccacctctgcatgttacccagttccgaagtcgcttccacatttttgggtatctgtacagcagtgccccactctcggcagtaccaatttactgtatgagttcattctcatgctgctaataaagacatacctgaaacttggtaatttatagtggaaagaggtttagttggctcacagttcagcatggctgtcgaggcctcaggaaacttacaatcatggcggaaagagaagcaataacgtctttcctcacatgacagcagcgaggagaagtgctgagcaaaacagggaaaagccccttataaaaccatcaagtctcgtgagaagccattcactatcacaagaacagcatgagggtaactgcctccttattaaattacctctcaccaggtccttccaatgacatgtggggattatgggaactacaattcaagtgagatttgggtggggacacagccaaaccatatcaatggttgatttcatgtgtcaacaagactgrgctaaggaatcctagaaagctggtaaagcattatttctggatggatccatgagggtgttggtgaaagag

SEQ ID NO: 821252 - DNA, 462 bp, Homo sapiens
aaacatcgcaggtgggaatgcaaaatattaaaaacacgtaggagagtggcttatcagttatttctcatatcaaacacatacctacctctaagactcagtagttctactcaagagaaaacaaaatatatgcccaaggagatatatgcccaaattatttgcccaagagaaataaacaaattatatatatatatatatatatatatatatatatatatatgtatatgtatgttccccaaatgactcatatgatagtatttaaagcagttttattcaatagacaacaagtggaagcaatctaaatgttcatcagcaggacagtggactgagaaatcagagtatattcttaccattgtatactaatcaacaattgaaaggaataaactacygttacaggcaatgatatggttaggctttgtgtcccaatccaaatctcatcttgaattataatccccataaccccca

SEQ ID NO: 821253 - DNA, 604 bp, Homo sapiens
aaaagggctaaatttagaagctgaaattttgatgttggaagttttatcaaatattaaaggtttaaaacacttgatataacaaaacaggaccagaggtcattcattttgccgaagtgataattcagaaaatttccaaaaagcaaaaacctttatgcattgatagaggtgagactcagctttccaaacaagacccaataaagacagaatgaagcaaaacgaatctgtctctcctccctcttccctttttgtttccttttcttgcagtttattcaaaagcaacaacatttttcattatctctcaatattacatgaaaatcttgtttaaaaaagaaaaccagtcgggtgtggtggctcatgcctataatcccagcactttgggaggctgaggcaggtggatcccctgaggtcgggggttcacgaccagcctgaccaacatggagaaaccccatctctattaaaaaaatatatatatatctatatctatctatctatatatatatatatatatttagccaggcatggtggtgcatgcctgtraccccagctacttgggaggcgaggcagaaaaattgcttgaaaccatgaggtggaggttgcggtgagc

SEQ ID NO: 821254 - DNA, 617 bp, Homo sapiens
ggctcacctgagcccagggatgtcaaggctgcagtgagccatgattactccactgcactccagcctaggcaacagagtgagactctgtctcaaacaaacaaacaaacaaacaaacaaacaaaaggtgaaaaccctttggggggaattaaatttccttcatggtctgtcctcacctatattacaacactctttctctactctcatcgcctcccctcccctctgtctttattctagtggcataggtatatacatacccagctctgaatgcttctaatattgtctcaatcccaagtttctttcattttttgctctttgttttattgtgcctgaagtatgtttctctgcctccttcacttctttgtttgagtgtgtgcagattaaatatcactcactagagtgtaaacaccctgagagtaggataatttttaatacatttttgtgcacatgacacctagcaacatgtttgtcttgtagcatgcttgaacactggatttwaaatggatgaaaaactgttggtggagagtcattttatctccagtggtcatttgtttcccccctttattctcaaagcatttcatgcttctttcaaagtttttattgtagcttacttgaattat

SEQ ID NO: 821255 - DNA, 616 bp, Homo sapiens
aatattgactctaactcttacccttagcccaacattaatccttaccctataaaataatatttacatattattatacttcctctcggtgcttgcttttctttctatttctcctcaggagcgaagaaacacttctatgtagggagccgcttgaaatatttactatgtatacttactcaataaaataacttaaaaatagcactcctctactataatgtgtagattataaaatctttagcattactcccaaatgttgcaaccactcttgtgatcaagtacgcagttattggaaagagttttgatattctggtctgaagagcggacatttgggggaagctgcgaaattcagcaatgctccaaggtttccttttattgtgtcccccactaccgctgtccctaggcaccattcgtctgtttttgaaatgctactgtagccagtgcctctaattttagtggaacttcagaatgtaggaagggtcctccaaagcaagaggaatcctgttaggcagttagcrtcctggagggctgctaaaattatgccgcagtagccagcttcccatggtccctatgaatagagtttgcaaaatgaacacattgccttttggaacccaccatttac

SEQ ID NO: 821256 - DNA, 383 bp, Homo sapiens
ccaaaacagcattatactggtataaaaataggctagyagaccaataaaacagaatagagaacccagaaataaagccaaatacttgcagctaactgatctttgacaaagcaaacaaaaacataaagtggggaaagacaccctattcaacaaatggagctgggataattaacaagctacatgtaaaagaacgaaactggaccctcatctgtcaccctatacaaaaatcaactcaagatccatcaaacacttaaatgtaagacttgaaaccataaagattctagatcataacactggagaaacccttctagacactggtttaggcaaagacttcatgacaaagagccccaaagcaaatacaccaaaaacaaagataaatagatggg

SEQ ID NO: 821257 - DNA, 590 bp, Homo sapiens
tgggagctgaatgaggagaactcatgaacacaaagaagggaacaaaagacactggggtctacctgagggtggagggtgggagaaggaagaggagcagaaaaaatagtattgggtcctaggcttcatacctgtgtggtaaaataatctgtgtaacaaacccctgtgacacgagttaacctgtataacaaatctgcacatgcaccctcgagcctaaaatataagttaaaataagaacagaaaaaataaacccagtggtaagtcattttgatagcatgtctccttaatatcatgggatgaaaaaggcactctgcttctggggtcttcctccctaaaacacattaccctagtctaatcatgagaaaactatcatataaatcttaattaggtgacattttacaaaatatctgaacaacattccttaacaatttcaaagtcatcaaaaggatggaactctgtgaaactgtcacaggcaagagaagtcttayacaagatgactaaatgtaacatggtgtgatgtactagataggatcctggaacataaaaggagccttaggttaaaacaaaggaaatctgaatagattatggacctt

SEQ ID NO: 821258 - DNA, 598 bp, Homo sapiens
aaagtcaggctgcagagttatcccatgtgtgaaattcatttagttcatttttccttaacaagctactgtggcaaagaagtagaaggcagaatttcataggrcagtactcgcaaacctgaaagtgcatatgtttcacctggggatcttgttaaaatgcagattgtcattcaggagggctggcctgtcctgggattctgcatttctaacaagttcccaggcaatgccgacaccgctggtccatgaactgcacttggaatagtgagaacataaagaaatacaaaatgttagggttggtattcactttataagaataagatcattgacaatataataaaatcttcaggttatttggtatggatcatgcaaagcattttcacagagagctttgctggtcatcttgtgtccacgtcctaaagagctgtcatataagaagatgtgctgctaattttgctttcacaaaaatacaatattttccaatttctgaccttttaaataatgacaaatagttgttggtagaattctatctagcaggaaataaataaatacatctcatctatttctttatgtaaaagaggcaatttaacaatgaatgggaaag

SEQ ID NO: 821259 - DNA, 614 bp, Homo sapiens
ggaagattaacacagtggtcatgtgaataaaggtaggaaagttagaaggttttgctttagtctcaatgcaaggataatttggaacctagatcaagaatggtggctatagaaatccaaagaaagagaagggggaaaatgaacattttcttttaaaataactatgggtgttataagtgacattagtgatattaaaggttggcattcgtcatacatggacgtgatatgaattgttcaatgtcattcccctgtagatagtaaatgccttgaggataagaactgaatctgacttggtcacattatatgaacccctgacacataagcagaggtcaggaaatatttaataaatgtgtgcctaagggttgacataaataacaagtgggaatggggatggatggaaagtctctaactctctcccagagagtgaagggttgggactcagtaccggacatgctgtgggtgaggtgacatgagctgtctaaggaggcagggcctcyctagtgagtgaaggcagaaccgggctttctgggccaccaacccagggtggaggccagggatggcacaggaagccctggcatccccatagcccagtgtggctgacactagcctcagctttg

SEQ ID NO: 821260 - DNA, 541 bp, Homo sapiens
tgttgggaaattgtggctgggatatttgactgttgtttcccaatatttcaatgtgatagcaagtactgcaataaatatttcagtatatatatttttagctccttattagattatagctccagtggtagcattgctaaaatcaaggtctataaacagctctgtgtagctcttaaatgatgagaaattctcaagaaatagggggccagaatataattattcattattttatgcatggtatctactctaccccatagttttgtttgcctatttttatttccataatgatacaaattaaagcagtttaacatttttaaaaatactgctgaaaagatatccatgttttgtatcagaactctcagtattgttaagatggcagtactttcctaattgagctacagattgaatgcagtgtctgtcacaatcacagcattttatttttttttgcagagattaacaaactgatcctaaactcaagggccccaaaatagccaaaataatattgaraaagaaggaaaaaatggaaagtggaaaaagaaaactc

SEQ ID NO: 821261 - DNA, 628 bp, Homo sapiens
tagaaacaaacatcaaaattgttaacttgctccagtcctatataattgttattcgtgatgaccaatatgtatgtatttctcctcttcatctgcaacgctgtataaagcatgcaagtgaaaggcctcaccgcactaattcataagtctctcccagcagtgggttgaaaggttttccagtccgttcccactgagaagcaacagcagatacagcaaacgcagctacacactgtgggacagagcatgagaacaagtcaaaaatagccgagctcgctccgcattcttttaggaactgaaattttgctgaagacagtaatttacagaattattttgaggagtttcattactttggagttttaatatggctctagcagtgggacatggaaacttggatattcagaatgaaaattactttcagttgcttcctacagtgttattcccaaccatggttttcatcacactctaacagtgctacaaattctctcaaggacttttaaaamaccctcaagtccaaagttacttttaattcatttaaaaatttttaaaagtatgacactccaggattggggaaagagatataaaactccacaacttaattggtgttaagtccactgaggttggaaaatgctga

SEQ ID NO: 821262 - DNA, 425 bp, Homo sapiens
aggcagtttgaaagaggtgggagacctcaagccagtggaccttctctggtgttctttttattcaccaggaatgttagagggttggaataagtcagggttttctgaagcaccagcccagtctcactgatttgatggcctgttagtacatgtcccatgaaaagaggttctgtgttgggttaattgggatatcctgggacttctcccaggctttagttttgcactgtgattctccaaggggaagataagaatatgcaggyatgctatgtttaaccagcttatttgaccaggaaaattcctatttatactgtagcctgtgagactggaagcgttcggtagaacatactttgggaagcagtaggctagataatttgtgagatctcttccaactttcaaatgttatgattctgtgaatatactaaaaacca

SEQ ID NO: 821263 - DNA, 529 bp, Homo sapiens
tttggcttcacccttgctctgctaaaacctggatgaattaaggtccctctcacactattgctgttataagaattagtgattttagtatataagtagatgattcttccaacaccgtggcctcctagctctttgaccctctctactccaattatcttgtcttccattctaccttggccactcacacctagggtcacactctagaccttgtcaatgctaataacaacaaccctctatagtctcaatttcatgcagcaagttatctgatcactagctcctatctttctaattcacctcctctaatatactgggtcctgattcctcaatattctcagtaactccaatttattaattctaccaccttgtcattctccctcacatccttgatgttctctttctctcctttcacagcttaaattctaggccaaccattataatccctccattgcatacactctccattctcttgcccctctcttgtcattagrttttcttggcacaactaagtcctcattagatcacatttaaacac

SEQ ID NO: 821264 - DNA, 564 bp, Homo sapiens
aatattgaaagccatggccttgcccgcagcatgattaatattcataaaagacctgagaagatcctaccctatgattttaactctggctgattgttagagaaaaaaggaactgaatgctaaagcagagacaaagagctccaagaaaggtaaatgcaaagggctccacactaacatgttatatcatcaaactgtcaaataccaaagatacagagagaatcttgaaagcagcaagagagaggcactctgtcaggtaaaggggatcctccaaaagatcaacagccaatttctcagcagaaaccaaggaggtcagaagacagtgggatgacaaatttgaagtgctgaaagaaaaaacaaaacaaaaacaaaggaaaaaaaataaacaaccacactgtcaaccaggaattcgatacctggcaaaactaagccttcaaaagggaaaaaaaaaataggacattgccagataaacaaaagctgaagaaatacgtaactagcaaacstgccctacaaaaaatgctaaaaagactcctttgggctgggtgcagtggctcacacctataatcccag

SEQ ID NO: 821265 - DNA, 594 bp, Homo sapiens
gcagcaaagagtgtgaattctaactaactgttccttcagtctagttcccacagacagcagagcatggtgtacacagcatgaatcagaaccatgtagctggttttgaatcctggctgtaattattccctgggcctctgtgaccttgcacaagtctcctaagctctctgggctcgtctctccatctttcaaatgggcataaaatgtctaacatatcattatgtagaatgtgaattgcataaactgtagcaggttccaaacctcattgggttgttgcaaagtattttttccttgagtctgtaggattcctagtgattccttgggccactccgtagccttttctcaatgtattcaattttcagtcatcactcagtttgattctgttacctaatgaaggtataaaggtttcccactggaggtataggaagcattttgtggggtggggtcaggttgtgggttctgtgtactgtgtgactgtgttacgagcatgacttttgtccttaggctggctagctcctttctggtgtcactgctgtgttaacagtygaggatctgcctataatccaagcactttaggaggcccaggcggaaggatcc

SEQ ID NO: 821266 - DNA, 625 bp, Homo sapiens
cacctgacagctccaccttaggatactcctctacagtcattgtaaatggctgtaagccatttacaatctgcctcaggacaattcatccagaagagaaggaacttccccatcagctcctgtctataagacccactctgggtgttgcttgccctgtacttctgggcatgtatgtgggcactaagtggggctccccagcttcctgtgtctcaacatcaacagggaagccccaggacagaaggcaagaggtctgaggcacaggcaggaagctaggtgctgtctgatggtgaggttggttccagcccatgcatagccagtcaccactgcagcccctgcaaccggagacaggagctgaaatagacataaaaggtgtctgctagagaagtatgaaaaagtcacagatgtaaatggcaaataagattagtagagaagtgtaaggattggtggagagtgaattctttgtcattatgaagaaatatgtccgatccatggttgggacccattgtgtgaagcaatgtccagggagttggtggtttaattccaagccacrtgaaggcagtcagcactttaggaaggagggtacaaaaataagaaatttgtggcaagtcaaatatccacatcctgtttc

SEQ ID NO: 821267 - DNA, 491 bp, Homo sapiens
tccacccccaagatccaaccacctsccccaggccccacctccaacattggggattacaattgaacatgagacttgatggggacatagacccaaaccatatcaccatctcacttgttttgtttttgtttttgtttttaaagaaaaactccaccgatgtagaaataagtttgcaaggatgtatgcaaaatggtatagtggttatctttaggtgagggagattataggagattttaattttatactattttctatatgttctacatttaaaaataatcataactttagaaaacataatatgtaaaaatacacaaaatataatacatataatttaaaatgctgcttaatctaaccagttttccctctcaaaaaatttaaagaaatgaaaaaaaatcctcatcactgaaaaaccaatacaagggccaacttacacagctctatgaaaatgctatatgattaagagtagggaagggaagctcattgggaaaatctat

SEQ ID NO: 821268 - DNA, 575 bp, Homo sapiens
caatagggaaaggataccctatttaatgaatggtgttgggaaaactggctagccataggcagaaaactgaaactggaccccttccttacaccttatacaaaaattaactcaagatggactaaagacttaattgtaggacttaaaaccataaaaaccctagaagaaaacctaggcaataccattcaggatataggcatgggcaaatacttcatgactaaaacaccaaaagcaatggcaacaaaagccgaaattgacaaatgggatctaattaatctaaagagcttctgtgcagcaaaaaaaaatctatcatcagagtgaatgggaaacctacagagtgggagaaaatttttgcaatctacccatctgataaagggctaatatccagaatctacaaggaacttaaacaaatttacaagaaaaaaacagccccatcaaaaagtgggccaaggatatgaacagacacttcttaaaagaagacatttatgtggccaacaaacatacaaaaaaaaaaaaagcytatcatcactggtcattagagaaatgcaaatcaagaccacaatgagatacataccatc

SEQ ID NO: 821269 - DNA, 538 bp, Homo sapiens
agactgtggcaatgagagggagcacaggatccatctraaatgagctactactaggccaagtgggatggctgacacctgtagtcccagctctcaggaggctgatgtgggaggatcacttgagtccaggaggtagaggctgcaatgagccatgatcaccccactacactccagcctgggcaacagaccctgtctcaaaggggagaaaaaaaaaaaaaaaaaaaaaaaggagctactactactcaattcaattctgactgactgatgctctgtgggaattcaagcgcaaggtgaccaatcttatgttttgcaagtgatgtcggaaactgggattttatgtaaaatctctatttcaattatgtaggaaaacaaaacaaaaagagaactataactgcaagtcaggtttgacctatgaaatggtagtttaggacttctgacctagatcatctgtgtggtcaattgccaaataatgacattttaaaatcacagcgtccataaagtctttttaccatagaagagactatgatgcgtgccacattaa

SEQ ID NO: 821270 - DNA, 490 bp, Homo sapiens
aaggcattgaactcagtgctgtcctgttagaccaaactcacttgatgtctacccacagacagagcatttaaaccagctgtagccagagggacatcacagatccctctggacttgagttcccacaaaccttgccactgagggccaaagtgcccccactctctaagtaaacctgaaaggcagtctagaccataaggactgcagctcttaggcaagtcctagagcacttggcccagagacagtggactggggttacatgtgacatactgagacactagctggggcagccaaaggagtgctggcattactcctcccctaagtccagtctgcacagctcagagctccaagagacattctcctgtttgagaagaggagagggaaaagtggggaggactttattttgcatctttgatacyagctcagccacagaagggtagggcactggtcagaatcatgaagccccttttccaggtcctagctcccagatgacatt

SEQ ID NO: 821271 - DNA, 582 bp, Homo sapiens
cagtttttccaacacttatttattgaaagagatgatcttttccccattgtgtattcttggcacccttgtcaaagattagatgaccatatatgtttgggtttatttctagtctttctattctgtcccagtgaccctagtggccgtttttaggccagttccatactgttttaattactagagctttgtaatgtagtttgaaaccaggaagtagtttgaaaccaggaagtggttcctccagctttgtccttctttctcaagattgctttggttacttggggtcttttgcaattccatacaaatattaggattgtttttctgatatctgtgaaaaatgccattaaaattttgataggcatcgcattgaatctgtatgttgctttcagtagtatggacattttaacaatattaactattccactctttgaacagaggatacctttccatttatttctgtcttcaatttttttttttttttttttggtctcactctgtcacacaggctgcagtgcagtggcacaatcatgacttactgcagcctcaaactcctggaatcacgcaatccttcygccccagccttcaatt

SEQ ID NO: 821272 - DNA, 554 bp, Homo sapiens
acaaacctacactggatatgtactgctgcagcagttctgaaaagtaactatacggcactgacagctgcgatagtttttctcaacttaggggcaccatggctgggagggggagaaatgtagttgtaaagagctcccttgtatacctacaacacagcagttactggtaaaaacctcaggctggaagttgaaggatgttagaactattaactccttcgttaatctaaaggtcatcacgtcacctcactgaatgaagattactcaaaaagagacagtaccaaataattcatgcctactactgaactcagacatgaacttgtcaatttccagctgtacatttcaacaggaatccaattttttatcatctcaagcttatatgcctaaatttgtgaaacagcattaacttaactttacatttggctttgaatttactattaatcaagtcaagtaaatcaagtggtggagaagacaaacacacgctaaggtcrgcaaaaatacactcccattaaacattctgtcctctgaagggtaaaaattttatttttgaggaatttctt

SEQ ID NO: 821273 - DNA, 578 bp, Homo sapiens
caaagttagaagtgagattggatactatcaacaagccaagatccctgaaaggcaaamccttaataggcaaatgagaaaataatatatgtccaacaaaaggctaaagtaggaatacttaacactcagccagggcagtgaattgaaaggggaatgtaaaggggaatgaaagaggaatgttgctctaagaatttgttataatagcctttcactcatgtatatttggggctagaagttgaattctacatagcctaaatcattacaaactgaaaagtttagcttaaagaagttgatactggaagtgatcccagtcagcctttacaaagtcaaactttttctggcagacgtcactgtaaacctgatctcaaagaattcccacagataatattctaataaaactgagttcaaaataaaatcataaaacatgtgaggaccaaaccaatataattgaaagttagtacaaacaacaaagttagtaatcagagctacaaaggcagcagatatcagaattagagcttctgcagtctgtgcaaatgctaaggaaggttctttctctttcccttgtttctcaaagcaagtat

SEQ ID NO: 821274 - DNA, 578 bp, Homo sapiens
caaagttagaagtgagattggatactatcaacaagccaagatccctgaaaggcaaaaccttaataggcaaatgagaaaataatataygtccaacaaaaggctaaagtaggaatacttaacactcagccagggcagtgaattgaaaggggaatgtaaaggggaatgaaagaggaatgttgctctaagaatttgttataatagcctttcactcatgtatatttggggctagaagttgaattctacatagcctaaatcattacaaactgaaaagtttagcttaaagaagttgatactggaagtgatcccagtcagcctttacaaagtcaaactttttctggcagacgtcactgtaaacctgatctcaaagaattcccacagataatattctaataaaactgagttcaaaataaaatcataaaacatgtgaggaccaaaccaatataattgaaagttagtacaaacaacaaagttagtaatcagagctacaaaggcagcagatatcagaattagagcttctgcagtctgtgcaaatgctaaggaaggttctttctctttcccttgtttctcaaagcaagtat

SEQ ID NO: 821275 - DNA, 487 bp, Homo sapiens
aacaaggactctctagccctgacctcttaatttagccccaaagttatctgtttagctaactgcttgacatcctcatctatgtgtctataggcatttcagtcttaacttggccaaartatgattgttgatttttcctgtgtagatctgtccctcccacaatcttccccatctcagcaaatggcatcactatgtacgtagttgattaagccaaggactgaaatcagggtgatggggctacaagccaaaaattatcaaaggttaacaacaaaccaccaaaaactaaggaagacgcatggaacaagttcttccccacagccttcagaagtaaccaaccctactgatacctttatcttctggcctccagaactatggaagaacaaatttctgttgtttaaaccacccagtttgtggtactttgttttggcagccctggaaatctaatacaagcccctgttctgccaagttggtaggaggtggaatttcaacc

SEQ ID NO: 821276 - DNA, 611 bp, Homo sapiens
aggcctccactgtgattcatctatgggggcctgccaaaggctccaaacagcatccctrtctgccactgacacctcaagcaccattgggtctcctgggtcatatggcccaagtggcagagcactttgcacagcagccagggcttgttgtagagcctgcttctgttctggaccccactcaaaactggcagcctctcagttcacttgataaatgggccggagtaacacaccccaacgaggaatgtgttgcctccaagatccaaataggcccactaggcattctgcctctttcttggttgtaggaggggccaaatacagcaacttatccttcaccttaggagtatctcaccaggccccacaccactggacccctaaaaattttactgagggggaagattcctgaattttagtcagatttatttctcatcctctggcacgcaaatgtctcaccaataagtccattgtgtttgctacttcttgctcagtggatccaatcagcatactgtcatcaacgtaatggaccattgtgatattttgcggaagcaaaaatgattaaggtctctctgaataagactatgacacggccgggcgcggtggctcacgcctgtaatccc

SEQ ID NO: 821277 - DNA, 481 bp, Homo sapiens
tgtccagaatgtgctgcccttctccttcttagcctctgtattagtccgttttcatgctgcttttcttcccgagactgggaaraaaaagaggtttaattggacttaacagtttcacatggctggagaggcctcagaatcatggtgggaggcaaaaggcactttttacatggtggcagcaggagaaaatgagagaaacaaaagcagaaaccctgataaacccatcagatcccatgagacttaatcatatcaggagagcagcacgggaaagaccagcccccatgattcagttacctccccggagtccatcccacaagacgtgggaattctgggagatacaattcaagttgagatttgggtggggccacagccaaaccatgtcaggccccatcaggttcctgggcttgctaggtgggtggccttgatacaccaaagctgagctctcaagcatcaagccacacacagcctcagccaggagaacaag

SEQ ID NO: 821278 - DNA, 618 bp, Homo sapiens
acattctcacgagattaatgagatcatctgtgtgagatacaaatacatctattgtgtatgtttgtgtttttaatggagaccaatggtatgacagaatgaagtccttttatcagtcagtcaagatctgatgtggctattcaaatataggcaaaactgatgttttccttttttagttaagttaaatgtaatatttaaataactgtgaatatttagaatattcacagaattgtgcaaccatcaccacaatctttagaatattttcatcatctcaaaaagatactttgtagcctttagcacccttcccactgtacccccccccatacccctggccataggcaactactaaattactttctgtccctgcaggttgtcctattctggatactttgtatatgtggaatcataaaataggtgatcttttatgactggcatctttcaagcatgtttttgatattttcatccatgttgtaggatattaaattaactttttgcataggaataactgagctagaaaagcatkggctgaatatgtctgcagaatgtagcatttagaaaagaaagacttccaggagacaaatgaggtagtaactaaaatgtaaataactaaaaattagcttt

SEQ ID NO: 821279 - DNA, 625 bp, Homo sapiens
actcccattggaaataagataactgtggaaaccctttcagataaatacaagctaagtagcgaaggtaccttggaaatatctaacatacaaattgaagactcargaagatacacatgtgttgcccagaatgtccaaggggcagacactcgggtggcaacaattaaggttaatgggacccttctggatggtacccaggtgctaaaaatatacgtcaagcagacagaatcccattccatcttagtgtcctggaaagttaattccaatgtcatgacgtcaaacttaaaatggtcgtctgccaccatgaagattgataaccctcacataacatatactgccagggtcccagtcgatgtccatgaatacaacctaacgcatctgcagccttccacagattatgaagtgtgtctcacagtgtccaatattcatcagcagactcaaaagtcatgcgtaaatgtcacaaccaaaaatgccgccttcgcagtggacatctctgatcaagaaaccagtacagcccttgctgcagtaatggggtctatgtttgccgtcattagccttgcgtccattgctgtgtactttgccaaaagatttaagagaaaaaactaccaccactcattaaaaaagtata

SEQ ID NO: 821280 - DNA, 568 bp, Homo sapiens
aattcagtgtgagaacctggggcaggggtaggggctgctggtgttggwgtctgaaggcccaagaacctggagctctaaagcccaagggtaggagaaatatggatatcccagctccagaagagacagtgaacttgcctttcctttacctttttgttctatcctggcccttgattggataacgcctacccacattaatgagggggatcatctatactcaatctacctattcaaatagtaatatgttctggtaacacacacatccagaaataatgcttattcagatatctaggcatcatatggcccagtcaacttgacacataaaattaacaatcacaagtccctcccttgtcaaactggtactcatatgtatctccttacaccatacttactctccaattaaagataataacaagatcctaattccacctagcaggatgcaactatcctgcaaacaaacaaaaatgaacaaatcctttccctgaggataaaaagtccatgagtgatatttactcttctcctgatatcccataacttaaatactatgaggaaaatacttatacatacttac

SEQ ID NO: 821281 - DNA, 628 bp, Homo sapiens
ctggatcccttccttactccytatacaaaaattaattcaagatggattaaagaattaaactttagacctaaaaccaaaaaaccctagaagaaaacctaggccatatcattcaggacataggcatgggcaaggacttcatgactagaacactaatatatatatacatatatacaggttatatatataattatatattttatatatataattaatatatattaattatactttaagttctagggtacttgtgcacaacgtacagatttgatacataggtatacatgtgccatgttggtttgctgcacccatcaactcatcatttacattaggtatttctcctaatgctatccctcccccagtcccccacccggcaacgggccccagtgtgagatgttccctgccctgtgtccaagtgttattgttcaattcccacctaagagtgagaacatgtggtgtttggttttctgactttgtggtactttgctgagaatgatggtttccagcctcatccatgtccctgcaaaggacaagaactcatccttttttatggctgcatagtatgccttggtgtatatgtgccacattttcttaatctagtctatcattgatggacatttgagttggttcc

SEQ ID NO: 821282 - DNA, 500 bp, Homo sapiens
ccagggataaatcccacttggtcatagtgaatgagcattctgatgtactgttaaattcagtttgccagtwttttgttgaggatgtttgcatcaatattcaccagagatattggcctgtagttttctttttttcatttgtctttggttttggtatcagggtaatactggcctcacaggatgagtttggcagtattctttcctcctctatttttctgaatagtttgagtaggactggtattagttcttgtttggtaaaattcaggattgaagccctgatgtcctgggcttttctttactatgagactttttattaatattatggctttgacctcattacttgttattggtctgttctggttttggatttcttcttgactcaattttggtaggctgtatgtggctaggaatttgtgcatttcttctagattttccaatttattggcatatagttgctcacagtagctactaatgatcctttgaatttctgcagtatcagctag

SEQ ID NO: 821283 - DNA, 637 bp, Homo sapiens
ttcaactccagaatttctgcttgattcttttaaattatttcaatatctttgttaaatttatctgatagaattytgaaatccttctctgtgttatcttgaatttctctgagttcctttaacatgggtattttgaattctctacctgaaatgtcacatatctctgtttctccaggattggtccctcgtgccttattgagttcatttggtgtggtcatgttttcctagatggtgttgatgctagtagatgttctccactgtctgggcattgaagagttcagtatttattgtggtattcactatctgggcttatttgtagctgtccttccttggaaggctttccagatatttgaaagaacatggatgttgtaatctaagttgtttctgctttcaggggcaccctaagtctagtaacactgtggttcttaaaagatgtcttaaaacttaacaagaaaacatactcacaaaaacctgaccttaaaatgtacaaaagacctgaacagagacctctccagagaagatatacagatggaaaataaacatatgagagatgctcaccatcatatattattaggttactgcaaattaaaacaacaatgagatactaccacatatctaacagaatggccaaaatccaaca

SEQ ID NO: 821284 - DNA, 577 bp, Homo sapiens
aatgccaatctgaaaaggatacttactgtatgattccaactgtatgacattctggaaaaagcaaaactatgsagacagtaaaaagatcactggttgccaggatttaggcgggagggaggaatgaataggtgataggtggagcacggaaatttttttttttttttttttttttgagacagggtcttgctctgtcacccacactggagtgcagtggtgcaatgtgggctcactgcaacctccacctttcgagttcaagtgattctccaggctcaggctcctgaatagctgaaaatacaggcgtccgccaccacacccagctaatttttgtatttttatagtacaggtagggtttcaccatgttggccaggctggtctcaaactcctgacctcaactgatccacccgccttagcctgctaaagtgctgggattacaggcatgagccaccatgcccagctgagcacagataatttgtaggacactgaaaatactctgtatgatagaataatggtggatacatgccatcagatatttatccaaacttttagaacgtacaacactaaaagtgaaccctaatgt

SEQ ID NO: 821285 - DNA, 607 bp, Homo sapiens
tgaaaacatattcaaaactataataattaaaatagaatgttttgcctaaagatagacaaatatataaatggaatacaatcaaaactgtctcacacatatatgaccacttaatttaactgtaatctaaatataaaagtaataccacaaatttctaggagataggaaaatattgttatgacttgagtagacaaagattttttaagcaggacagtagtcactaaccataatgagaaggactgatgaactggactacagttgacctttgactaacaagggttcaaactatgcaggcccatttatatgcagagtttttcaataaatgtactggaaaattttttggagatttgccacaatttgaaaaaactcacagatggaccatgtagtgtagtccaaaaatatatttaaaaaaaagaaacggttatgtatgtcatgaatgcacaaaatatatgtagatactaatgttttatcatttaataccataaaatatatacaaatctattataaaaagttaaaatttaacaaaactttggyatacaaacacaagaccttacatggcaatattcacagttgagagaaacgtaaacaaacataaagatacagtattaaa

SEQ ID NO: 821286 - DNA, 491 bp, Homo sapiens
taattctgaactgaggctctcactttttatcgttaaacctgtctatcaaaagctcaaaatttcaaggagcctaaattttgtctttgatgctgtactgatgaattgcaatgtaaattttcagagacaacagaaaaggaccatcacttatacatgtccattttcaaagggtaatttctgcagctctccctcttcactctgagagtctgagtgacagtctatgcccttggttaaccaacctcagggatggttgttagcacttccagttatttactgtcactaaagtgaaagccgtctttaaaaaatgtgtccttataaatccagcaggaaatccaagtttcctattggtcctccttctgattcttctctgatttcttattctgaaaaattackgatagtagtgtactaattaagtttttaggagggagacccttaatgatgaattaagatagcatttttgcagtgttgctaagtggctttagtctacaatggac

SEQ ID NO: 821287 - DNA, 491 bp, Homo sapiens
taattctgaactgaggctctcactttttatcgttaaacctgtctatcaaaagctcaaaatttcaaggagcctaaattttgtctttgatgctgtactgatgaattgcaatgtaaattttcagagacaacagaaaaggaccatcacttatacatgtccattttcaaagggtaatttctgcagctctccctcttcactctgagagtctgagtgacagtctatgcccttggttaaccaacctcagggatggttgttagcacttccagttatttactgtcactaaagtgaaagccgtctttaaaaaatgtgtccttataaatccagcaggaaatccaagtttcctattggtcctccttctgattcttctctgatttcttattctgaaaaattacggatagtagtgtactaattaagtttttagsagggagacccttaatgatgaattaagatagcatttttgcagtgttgctaagtggctttagtctacaatggac

SEQ ID NO: 821288 - DNA, 550 bp, Homo sapiens
tcatatagtggcttctggaataagcactgtattggttttctgattttacaagtatctatagcagcagaaatcctgtggctttgtatctgaatcatatgcttcatttctttggggtgggtaaaccacaaatcaaaaagactttctggatctctagactgaggccaatgcctaatgtctaatttccaattagtgatatttgggtttatattttttgccatttgcatgtcaaactcttaatcatctttcattccaatcataattactgggttccttacttttccagtttctgtatcataacaaaaattttcattatctgtattagaaacaagctatgtgtctggtttgttaccatttttatagtctgatttattttaatttaaatgaagcttagaagataactggtaagtgtatttcagggacctgcagtgagaatggaataaaaagacatttgacatgggcttcctctgttcaggcgctgcctggactgtcacagagttagatcctccagakgcatttttctcctcacaatcagggacatgattcatcagtt

SEQ ID NO: 821289 - DNA, 584 bp, Homo sapiens
agacatacctaatataaatgaccagttaatgggtgcagtacaccaacatggcacatgtatacgtatgtaagaaaccttcacmttgtgcacatgtaccctagaacttaaagtataataataataataaagagtaatgtatggcttgaaaaggtatatttaatagaacatgagttgggtctaataaaaaacttaagaaatgttaatctaaaatctcaatgttaagattccagttgaataatactagaaaatatattgtaaccctctttgctaccaatgacctatttctattttattttctttttaattatggcataatttctcaacataacatatcaaaacttatacaccctttaatattaaaaaataatacaatgtaagcaatattttaaaaacggtatttaattattagatccattaggtttattatattacttataatattccattatataaaaattcatttgtctatttattcagattaaacaactattaaagctgaatgtctcatgcctgtaaccccagcactttgagaggctgaggcgagcagaacacttgagcccaacagttaaagaccagcctgggca

SEQ ID NO: 821290 - DNA, 618 bp, Homo sapiens
ggcaaattgtatgccctgaatggtggggggtatccagcagcttgccctcatccctgctacataataactagctttgcaagtctgggctcctggaaatccagagggataacccaggtgaggccagggaattcctatgcacacccaggtttgtaactccggcatgctgtgttaccagaggaaatgcaggcccctttcctcagcccaccttcacatcaatgtcttcactgcggagaacagggatttgctaaaagcaccaaggcctcagagtaaaaagctcacctcctggatgttctgcttggctggtgtcactccctgctatggaagttgtggcccctgagagagagaaaagaaaggaaggagtgaagactagtttttgagagagtacacactgcgctgtgggcagagtatgtcaatcaaggtgcccatgtccagattttgcatgtattttcagacgtgcctgtcttgtaacttccaggtttcagtgtttttccagagactacaacggtaatacctacaacaagaragagatggtgacactagctgaactctatttccacttcatttctataggaatctcaaatccccacttagaagcaaactattactctgagactcaca

SEQ ID NO: 821291 - DNA, 614 bp, Homo sapiens
gtaatcttacttattcatgatataatgagtcatttttattgtattctctgtcattttgaatattatgttggratactcctcatactgtttaattctattttagaatctaacctttttgtttagatttagcttgtagcttgtgacctactagtgtggactgcagttccaataaaaaaattagttttctgagcctctgaaatgctattcttgtctgcttcattcttccaactgtggtcaaattcttgctagatccctgctggtgccatctacagagacagaagacaattattagccacccagtgccattatgtgggtttggggaatttggacccttggacccatggatgaaaagcattcactctggcctgttttttgaccacctattgtagggggtgttcccactctgtgtctgctgatgccaacataggagagaagtgcctatttaggccaccttttgccacttggtaaagggctgagatatgctgaccctgagttcccttctactatttatcaaagagctggaagactcctggtgttgatcttttgctgcttctaagtagaggacaatatgttttcaagtttggctggctctatgctattggctggaagattgt

SEQ ID NO: 821292 - DNA, 581 bp, Homo sapiens
aaaaaaaaaaattacaaattttatctattccctttcctttaaattatattggactgatgctattaaagcagacctccaaattttaaagtcctttagatttcaacctcaaattactaargggtagagtagctatccacttcaaggtctattttatagtctaaactttatttcattttttctctctacaatcaccacccaatgctgtctgattttctttgaaccattcttagatgatctcattcaaatcatgttctttaaatgttctcaattcacctttttctattacaaccctagaagtgtaaggtgttaaaatcaactctgaagctattctagctacgttcactcagcctaataattcctagattatgctatgcttttttaaagcacacaattagcaactcattgggtagtttgaatcaaagaatttcttagaagttatcacatgtaaatccattggcctgcataagtaatccaaactatatcaatatttttttaagttaagaatattttgagattcctattcatgctgttttttgtctcttttcagtcaagtcattatccctaaaatattgttattaaca

SEQ ID NO: 821293 - DNA, 509 bp, Homo sapiens
ggtgctaataaaagcagctcttgagccatttcaaacagatgatgaggcagattcagatgaggaagrggaagacgagtgtaaaaatcgaacttcagattctgaatgtgaggaacaggaaacggaggaaatttaaagaaaggatatgttttactagcccatcagctccacctgctgaattaagtgaaaggccacttcctctctcctcttaatgggcgagaagatgaattggctacaaaacttactgctcctgtagttgaaacattaaaacctggagcaattggtggtgctacacaaaattctattcaaaaggctagagccgagagagaccttgaagcatggtaattccccgtaactataagatgctcttttaagatgctctgctccccagtttctacccagcttaccccccctgcaatacaatcttcaagccttggctccttgcccagggccttagaactgataacctagtactttaacagctggaactgggtctacaacaacataataga

SEQ ID NO: 821294 - DNA, 604 bp, Homo sapiens
tccaaataagttttttttcccctacattttaaactttataaaatggcatcttccatcactttataagaatacaaagggccaggcaccatggctcgtgcctgtaatcccagcaattttggaggctaaggcgggcaactttcttgagctcagaagtttgagaccagcctaggcaacacagagagaccccgcctttacaaaaaacaaaaaattagctgggcgtggtggtacggtgcttgtagtcccagctactggggatgctgaggcaggaggattgcttgagcttgggaggcagaggttccagtgagctaagaccacgccgctgcactccagcctgggtgacagagaccctgtctcaaaaaaaagaaaaaaaaaaaagaaaagaaaaaggccaggtgcagtggctcatgtctgttatcgcagcattttggaaggccgaggagggaggatcacttgagtccaggaatttgacacgagcctgggcaaatgagggagakacccatttccacaaaaattaaaaataaattagctagacatggtggtacatgcctgtggtcccaactactcaggaggctgaggtaggaggatcacttgagactgagagttc

SEQ ID NO: 821295 - DNA, 600 bp, Homo sapiens
gatgtaatatattgaaaataaaaggcttcaatcaatgacctttaggttctaagaggctaaaaaaatgagcaaagtatatccaaattaagaagaaggaagatgataaagataaaaatgtaaaccaacaacayagcaaataacaaaagctggagctaattaatatacccacaaattggttctttgaaaaaaaaaattttaaataaacaatggctagcaagatttatctcaaaaaaaattagagaagctacattatgtagacaatgggaattaaatagaggatgtaactacagaacctacagacatcaatataattatgaaaaccttaggccaatacatttgacaaataaaataacatgggaaattatttgtaaaactaattcttaaaactgatgcaaaatgaaatagaaaaagtaatagcttctctatgtattgaagaattttttttaatttaaaaagatttctataattacaggctacatggtttcttaggtgaattctatcaaacatttaagaaagtacagagagtcctcaacttatggtggtttgacttgtgctcttctgacttgataatggtgctttcatctgtgtacattaatgatg

SEQ ID NO: 821296 - DNA, 540 bp, Homo sapiens
gcttctggaataagcactgtattggttttctgattttacaagtatctatagcagcagaaatcctgtggctttgtatctgaatcatatgcttcatttctttggggtgggtaaaccacaaatcaaaaagactttctggatctctagactgaggccaatgcctaatgtctaatttccaattagtgatatttgggtttatattttttgccatttgcatgtcaaactcttaatcatctttcattccaatcataattactgggttccttacttttccagtttctgtatcataacaaaaattttcattatctgtattagaaacaagctatgtgtctggtttgttaccatttttatagtctgatttattttaatttaaatgaagcttagaagataactggtaagtgtatttcagggacctgcagtgagaatggaataaaaagacatttgacatgggcttcctctgttcaggcgctgcctggactgtcacagagttagatcctccagakgcatttttctcctcacaatcagggacatgattcatcagtt

SEQ ID NO: 821297 - DNA, 629 bp, Homo sapiens
cttcctcccaaaagtagccctttgtcttctttaaaccccrtttccccagtccatgcatagaaccaagttcaccgtggaagagttttccccctcgggaattttagtccatctagtctttgtgcttccatgactctctggtgcctttgaaaatgtgttcagctttttctggttatcagaaggaacactggtctgccacaatgtactaccgagaagcaaaggcccttttgactttttattatgaaaatgctctcatataggaaagagagaatggaataatgaacactcttctttattcccttggcttaacagttgttaactttttttttagtatctcttgtttttgactgaattgtgtctcctaccaaaatccttatgttgaagttctaacccgcaatgtgactgtatttggagtcaattaccttttaggaggtaactgacattaaatgaggccataagggtgggtggccttgtaactagaggatgagagagaggtccatctctccacatgtatgcactgaggaaagaccatatgaggacacagggagaaggcagccgtccacaagccaggaagagagtcctcaccagagcccgaacatcccagcaccctgatctcagacttccagcctcca

SEQ ID NO: 821298 - DNA, 485 bp, Homo sapiens
aggctagacttgggagttctgtgagattagaggcagagagaagcaggagaggcttagagattagaaccccatcttcagggttgggggccccagagaggagctgcctgcatggggtgttgtctgcgaatcatcactaacctgctgtctctctctctgttccttgtgctccccctggccacgaggcagctccaggtatggaaaccgcttgccgcctgccccctctaccctctgctcccttcccctctccagcagccactccaggggtctctccttgtgatgttctcctgactcaggctctctggggcttgtggctcctgtggatggaccaaggtggggaagagggtgatggggacagcagggtcctaggagccgtctttcctggttcctctgtcacagggaggcaagtccygggaggtcaaggtcctgcttggcatggccacagggcagcccttgggcatgagagggaccagcgttggatgggttat

SEQ ID NO: 821299 - DNA, 516 bp, Homo sapiens
ctttatgtgtggaagccttgcttacctgtagaagaggatccctcaggacttcagaactgtggtttctacagactggggcatgttcaggtcaatgtggaactgaattcaagccttatcaatactcacaaacaacagaggaggatctcaggtgagactatgactacctcccactcatttagcatccctggctactctgtcctcttttggaaagcttctgtctgtctctctgaagtgggtaaaagagacaagggtggtggtggtagttgctctgggggagaagttgctgcagtagcccttgtttcaattgaacaatattatggatttccgtccagcaagtgacctctcactccggacctgtagggtccatgcagtccagtgtaagtaaattggctctatcagcctggtttcacaacccacatcatcccaactctaccctwcccaagagttgctagaagcacctattactcctgtagaaggtgagggagaggtgacccccagtccaaagtgactggagac

SEQ ID NO: 821300 - DNA, 624 bp, Homo sapiens
tatgactgtcactggtttatgtatttattatacatatttttttttttgagacagagtcttgctctgttccccmggctgcagtggagtggtacaatctcggctcactgcagcctctgcctctcaggttcaagtgattctcctgcctcagcctcctgagtagctgggattacaagtgtgtgtcaccacacctggctaattttgtatttttagtagacacgggctttcaccatgttggccgggcttgtcttgaactcctgacctcaagtgatctgcctgcctctgcctcccaaagtgctgggattacaggcatgagccactgcacctggccctatgctgtacttttaaattgttattttagaatgtactcctacttatgttaaaaaaaaaaagttaactgtaaaacagcctcaggcaggtccttcagggcattgctatcataggagatgacagctccctgcgtgttattgcccctgaagattggccagtaggacaagatgtggaggtggaatatagtgatatttttatgatattgatgttgtgcatgcctgggctaatgtgtgtgtttgtgtcttagtttttaatgaagaagtttaaaaagtaaaaaaataaaataaaaacacacac

SEQ ID NO: 821301 - DNA, 626 bp, Homo sapiens
tttttattagtgcaaatgaacaagatctatttctattaaaattatgttcttagttgttctctatcatgagccctttggaacagaaacagagatataaaaatatgtaaatttgttataaaatctttaaaaaatcagagcatagactcttttaaatatagaattaatgttaaaaatgaagacaatgctgaaagcatatttactgcatagaaattaagatgacaaattccataaacatgaaataaatgaatcattccaaaattaggaacaaaattctccacagcattgtaattagctgacctaatatttgcacagggaaaaaaatttggtctcattttagccataagtatttgctgccttagcaactaaatccattcatttagtgattcaaggtttagctcaacttcttggaatgtgtaacgtgtgattttgaaataaaatattaatgttattttattttcagaaaacctgaaaagaagtaaaacagaaaagcaatattatrcgtggagacttaagattccacccaagaaggactttatgagataccgacctgatcaatgtagataggatgatagtaaggtaacattcattttaggactttatctgcatttaatccacaatgtaaactg

SEQ ID NO: 821302 - DNA, 626 bp, Homo sapiens
tttttattagtgcaaatgaacaagatctatttctattaaaattatgttcttagttgttctctatcatgagccctttggaacagaaacagagatataaaaatatgtaaatttgttataaaatctttaaaaaatcagagcatagactcttttaaatatagaattaatgttaaaaatgaagacaatgctgaaagcatatttactgcatagaaattaagatgacaaattccataaacatgaaataaatgaatcattccaaaattaggaacaaaattctccacagcattgtaattagctgacctaatatttgcacagggaaaaaaatttggtctcattttagccataagtatttgctgccttagcaactaaatccattcatttagtgattcaaggtttagctcaacttcttggaatgtgtaacgtgtgattttgaaataaaatattaatgttattttattttcagaaaacctgaaaagaagtaaaacagaaaagcaatattatacgtggagacttaagattccacccaagaaggactttatgagatacygacctgatcaatgtagataggatgatagtaaggtaacattcattttaggactttatctgcatttaatccacaatgtaaactg

SEQ ID NO: 821303 - DNA, 612 bp, Homo sapiens
ttcttgaacttaccagggagctaaagtcacagatatgcaattagcctaaaatttcagaaaggatagatacgacataagtrgaggcccagtttacttaaccggaagcaggatgaaggtaggattgtggtagttctatttttttttttattggggaacctccataccgttttccataatggttgtactaattttcattcccacacacaatttataagagctccattttccctacctcctcaccaacacttgttatctttcatcttttcaaaaaatgctattctaacagatgtgaggcaacatctcattgtggttttagtttgcatttccttcatgattagtgatcttgagcactttttaaattgtacctgttttccatttatatatcttttgagaactgtcagtttagctcctctgcccattttttaattgggttgtttattttcttgctattgttatggttgcttttattttgaatattaataccttatcagatttgtggagtacaaatattttctatattctgtgggttgtctttttctttgttgtttcctttgctgcactgaagctctttagtttgatggcatctcatttgtctatttttgctattgttgc

SEQ ID NO: 821304 - DNA, 576 bp, Homo sapiens
atgttgaggaaatttcacaattctattctgataaaaacagaggcraaatgtaaagtagcaacgggcttcctgggagaactctctcccacggttttaataggctggttaggatgtgctcgacagctacctggctggctggagacatgcttcccacaggctaaccaagtgcatacagtgaaggtggatggtggtgtctgttcatctcggaagagcccaggatcaaactatcactccctagtcaccctgtggtctctgccatgtttccacagatctctaaagttgcttaaccctgatttatgcagtgctgaacatctctttcagcgttagaactgaatattaccacctctgatgatttctcaaggaagcagtagatatgacagtaactgtcattgagatggtgaggcaaaggtgggggtgaggagtgtgggaagaaaattccatggtcctcactggctggggaatagtggctgcagtgaccacctgtctgtggctacccaaaagcacaagtgagatttgagcatcctctctcagtggtttttcatggccagtatttctccaaccttaatgcccatagaa

SEQ ID NO: 821305 - DNA, 558 bp, Homo sapiens
agtgattctgtgttttgtctctgttcagacagtagtctaagactggtggggagactttttttttttttttggaaaaatgcactgaaagaaacaaaaaccaaagcagcttcayaggaagacaaagaaaaaccctgttgctgacagacacctgcatgaaagacaggaagcatctgacagagtcagaccaggcacccctgcaaggaagcagctactcaacggggtatgcttaaaagtgtgtttcattaaggtgtttacaaactgtgaccaaccactggtgggagctgtcctgcagctcagaagcctcccttgatgctgagtgggtgctcaggaagatcaaatcaaactgatttgttatttttatagagtgctgtatgtatgtgtgtatgacagacagagaaagagagatcttccttgggcaccattctcttgcctgcagccagagagaaccatagaactcagctttctagagtagtgcctggttgaagagggagaattctaagtttagagcaagagtttgcaaactttctggaaggcagatagtaaatatttcaggttttg

SEQ ID NO: 821306 - DNA, 566 bp, Homo sapiens
tgtcattggttttgagttttttgtttgtttttgtttttgtggagacagagtcttgctcagtcgcccaggctggagtgcagtggtgtgatctcggctcactgcaacattcatccacctggttcaagcaattctcctgcctcagcctcctgagtagctgggattacaggcatgagccaccatgcccagctaatttttgtatttttaatagagaggggggtttcaccatgttgcccagggtggtctcgaactcctgagctcaggcaatctgcccaactcagcctcccaaagtgctgggattacaggcataagccaccacacctggctggttttgagaagtttaattatgattttccttgaagtcgtttttttcatgtttcttatgcacatggtttcctgtgtccctatcatttttattgtatctcagagatttaagcctttatttcctcaaatatttttttctgtccctacctatttctcctctccccagtggctcaaattatatgtactgggctgcttgaagttgtcccatagttcactrgtgctctcttcttctcaaatctcttctc

SEQ ID NO: 821307 - DNA, 549 bp, Homo sapiens
tgaatatcgagggatgactttattcctccctactgaggaaaaatcctgtgtactttatccaatgycccatgagtcatgaggttttccagtctgtctttcagaaccaagtactacttccagtcctgtgtgtgtgtcagatattgttccctccatttcctgcaggtggtctttccttggctttggctaatttccctataagtacgcttgcatatccagctaaatacctgagggtaatccctgaagatctccagagttttccttctgtgcagctttctttctaggactctgtcctacaaatgctatgcaccttggtttctccaggccttcagctctgtctcccaactgtttctttaactcagggagtctgctgggctgcaagtcagttcattgtccctgcactgcaatctagaaactctctaagacaatgagctgggggaatttaagggcttatctctcaggaatcactgcccttcgttgcctaatgtccatcaacattggtttatatattttatctctagtttgttttttaaggtgagaacactaatatct

SEQ ID NO: 821308 - DNA, 611 bp, Homo sapiens
gcatttaaactgcaaaatctctcaaagattttagtgagtttctctcttactcaggtgtttctacaaaaaattacatgatagagaatagagaaacatcagacttggaggtggtaaatccagttctaatcctaatttttccataatgattttagagaagccatttactttccctggaccccacttgctttcctcatgtttcaattaagaaaataagaagacacgatttttcaggctccttccagttccataacctaatgatgttctgtgatgtcaaactggagtcaataggagatcttcatgcttaacgtataataataataaaatttaaaaaaaaagaagccaactttccatttttgacagtgtggcagactctgaagatgaagaatgagagagaaagtggtagtgtatgttcatctgctggaaacatgcccaggagtctcagaggacaggtgtgccctcagaaaactcaggtagggcacgaagctcttctaaaggtgtccctcatgctccagkatagagtgagacatataaaagaggccagtgtggacttcagttcaagatccctgccctttcccctacccacacgactgctgacctttgttaacttaaga

SEQ ID NO: 821309 - DNA, 629 bp, Homo sapiens
tgggaaaatggggagttagtatttaatgggtacagagtttcactatgggaagaagaaaaatcctggagatggatggtggtgatggctgcacaaygatgtgaacatacttaatgacactgaactgtacacctaaaaatggttaaaattctaaatattaattatgaagtgagcattaactaacataggccatattctagagtattaaaacttaactggaacaggaggccaggcacagtggctcacacctgtaatcccagcactttgggatgctgaggcggatggatcacctgaggccaggagttcgagaccagcctggccaacatggtgaaactctatctctactaaaaatacaaaaaaatctagctgggcatggtggcacatgtctataatcccacctccttaggaggctgagtcaggagaatcacttgaaccagggaggcagaggttacagtgagccgagattgtgccactgcactccagcctgggcaacaagagcgaaactccgtctcaaagaaaaaaaaaaaaaacttaattagaacatacttaatgacactgaactgtacacttaaaaatggttaaaattctaaatattaagtatgaaatgagcattaactaagacaggccatatt

SEQ ID NO: 821310 - DNA, 573 bp, Homo sapiens
atttttgtatagagtacagactatagagagaagaggataaatgcaggtgaccaattggagagggttgcagtaatccagggacaacagatgggggctcagatcagagtaagaggtgctaaaaagtagttaaattctggatattgtttgaaggtagagaaaaaagaacttcttgatggatttaataaggaaaacatgagaaaggggggaatagaggatgactttggcctgtgcaactcaaaagatggaatttcctcaactgaaatgaggaaaactggatggagaaggttccaggaagaagatcaggcgttcagtctaggatacgttcaagcagaattgttagacagttgtgtatatgaatctgaagttcaagtacaaaggtctggagtggaggtttaaatttgggagtcaccagcagatagatggtactcaaagccactggcctggatgattccaacaaragagttcatgtgtggaccaaggactgagccttggcaatacaactttaagtcaggacgaagagggagattaaccggaaaggagcgcccagtgagttagaaggaaagcaaaggatgt

SEQ ID NO: 821311 - DNA, 632 bp, Homo sapiens
cagaagatagggcaaaattccctgatgaaatggcagtgtctacatgattcaacagtatctcattgatttactgatttgaatgggaaaaaataaaaaagcttctactgtgtcatgaaggctatatgattaacagggtaattaatatccatattaatatgtattacaagcaccttgtatactttagagtacaggaaaagtaactaatttttatgttaaaaaatagaggttttcatcttcatgcatatgcaacggggtgtgaaaaataattagtgaatacagtttcgggtgaagagcagatgaaatcagctgtgaatggaaaataaatcttggggcccccaaatcactaagcaaaagggaaaattcatgctgggaactgcttaggggaaaccttcctcccattctgttcaaagtcatccctctgctcactgagctaaatgcaaatttgattgcctccgttggaaaggctagtcagaaactcaaaatgctagccagaaactcaaaaggctagccagaatgcaamcctttttctctcacctacccgtgacctggaagccccctccctttttcgagttgactcacctttctggactgaaccaatgtacattttacatatattgattgatatttcatgt

SEQ ID NO: 821312 - DNA, 549 bp, Homo sapiens
taattcattaattttttcagccatttctctttttttgccaaaccaaggtatgtaaygtttgtttagttccttaaaagtggtttgtaattatgattttaatgaacatattttcatgtatgaaatatttcaaacagattgtaaaatacagagtgtagtatgacaaacactaatgagtatctcaggtagatttaatagatgtatacatttttgttttcacttccaatctctttattaaaacaattatttctatgaatttttaaataccttttcacaaatataattatgtggcataatatataattatataactatctatatagttgcaactgttagattttttacatatttgacttaagaggtatttcaaagttgcccattatctctatgtatatttttaaaaatttattaggtgacataggcttaaatatatatacatgtgtgcatgtgtgcatatacatgtatatatagtattaaacatatttatgtaaatgtatatgtatacatgggattaaatatatgtacttgtgtgtatacacacatgcacatata

SEQ ID NO: 821313 - DNA, 560 bp, Homo sapiens
acgccaggcgaccacacgcttcccaccccgccgccgttcccactcccttcatgcttccttgcagtctcacgtcacacctttgctctggaataytcttcttcctacaaagcctggctcatgggcggcctcaccatgaagccaggcccttgttcttcccgcctccatgtgcccgttttggagcctctttctcctgcacagcgcagttcagcagaaggacggtgggagccacggattgaggccacatgtgtcattttaaattttgtggcagccactttaaaagagatcattccaacatgtaattgggataaaaataattgattcttttttggtacccagcatgtgaaatcctgccgctcacagtcagcttcttcccgcttccgcacacctgttctttccctgaagtttgcagctcctgaagggtgaggcagatgttttcataacatcacttccactgtgcgctggccggaagagctgtcatcaaataccagtgggagttcattgaataagaatcagttgatgaatcaatcatctgattaggtctcatgaatttatatacatat

SEQ ID NO: 821314 - DNA, 560 bp, Homo sapiens
acgccaggcgaccacacgcttcccaccccgccgccgttcccactcccttcatgcttccttgcagtctcacgtcacacctttgctctggaatactcttcttcctacaaagcctggctcatgggcggcctcrccatgaagccaggcccttgttcttcccgcctccatgtgcccgttttggagcctctttctcctgcacagcgcagttcagcagaaggacggtgggagccacggattgaggccacatgtgtcattttaaattttgtggcagccactttaaaagagatcattccaacatgtaattgggataaaaataattgattcttttttggtacccagcatgtgaaatcctgccgctcacagtcagcttcttcccgcttccgcacacctgttctttccctgaagtttgcagctcctgaagggtgaggcagatgttttcataacatcacttccactgtgcgctggccggaagagctgtcatcaaataccagtgggagttcattgaataagaatcagttgatgaatcaatcatctgattaggtctcatgaatttatatacatat

SEQ ID NO: 821315 - DNA, 570 bp, Homo sapiens
ggcagtgtgtgtagccaggccagcaggcccagggggcaggttagggaggttcagagcacaaggaaacaggaagaggaaaaccttacttagcctttcaaaatgtttactgacctcatagaaagccctaaaaaaggcaaatggttagttaccgggctggctgggccttgcgtgctggcatctgttggtttacagcatgactggtatttagaatgacctggaagctcccaacttcgaattgtcccaaacctttccagaccgaaccaatgtataccttatatgtattgattgatgtcttatttacccccagaagttctataggttatacacctcccattttgtcagttgctgagactattgaattgcagaaaatgtacacctcatgtctcgcaaacctatgaatcgtcacagtggttgctccgtggtctttgcctcgtatctgttgtctaaacccaagccccaatggggacatatgttcttatccaaratgtccattttcctcacaaggcataagccagagatctctgaaatccacacagccaagctcctcagggtccatgctcagccatccac

SEQ ID NO: 821316 - DNA, 589 bp, Homo sapiens
tactctacaagaaatgcttttaaagaagtttataagcaggggcatggtggttcatgcctgcaatccaagtgctttgggaggctgaggtgggaggatcacttgaggccacragtttgagaccagcctcagcaacacagtgagaccttgtctctacagaacattttttaaaaattagctgggcatggtggcacacacctgtagtcgtggatattcaggaggctgaagctgtgatcacaccactgcacttcagcctaggtgacagtgcaaaaccatgtctcaaaaaaaaaaaaaaaaaaaagcctataggcaagtgaggaatacaagggaacttcctaaatctaggaatgggtacacacacaaaaacttacagatgatccaattgacccattgtacccaatggtgaatattgaatgccttcccctcaagattgggaccaggacaaagatctccaatgttacgatttctatttagctttgtactgtaggttctaatcagtgccataaggcaaacaaatttttttaaaaaaggaaaggcatattaagaaataaaactattcacagatgacatgactatgatgtaggaaatcgaa

SEQ ID NO: 821317 - DNA, 589 bp, Homo sapiens
tactctacaagaaatgcttttaaagaagtttataagcaggggcatggtggttcatgcctgcaatccaagtgctttgggaggctgaggtgggaggatcacttgaggccacgagtttgagaccagcctcagcaacacagtgagaccttgtctctacagaacattttttaaaaattagctgggcatggtggcacacacctgtagtcgtggatattcaggaggctgaagctgtgatcacaccactgcacttcagcctaggtgacagtgcaaaaccatgtctcaaaaaaaaaaaaaaaaaaaagcctataggcaagtgaggaatacaagggaacttcctaaatctaggaatgggtacacacacaaaaacttacagatgatccaattgacccattgtacccaatggtgaatattgaatgccttcccctcaagattgggaccaggacaaagatctccaatgttacgatttctatttagctttgtactgtaggttctaatcagtgccataaggcaaacaaatttttttaaaaaaggaaaggcatattaagaaataaaactattcacagwtgacatgactatgatgtaggaaatcgaa

SEQ ID NO: 821318 - DNA, 628 bp, Homo sapiens
tcagcattttccaacctcagtggacttaacaccaattaagttgtggagttttatatctctttccccaatcctggagtgtcatacttttaaaaatttttaaatgaattaaaagtaactttggacttgagggtkttttaaaagtccttgagagaatttgtagcactgttagagtgtgatgaaaaccatggttgggaataacactgtaggaagcaactgaaagtaattttcattctgaatatccaagtttccatgtcccactgctagagccatattaaaactccaaagtaatgaaactcctcaaaataattctgtaaattactgtcttcagcaaaatttcagttcctaaaagaatgcggagcgagctcggctatttttgacttgttctcatgctctgtcccacagtgtgtagctgcgtttgctgtatctgctgttgcttctcagtgggaacggactggaaaacctttcaacccactgctgggagagacttatgaattagtgcggtgaggcctttcacttgcatgctttatacagcgttgcagatgaagaggagaaatacatacatattggtcatcacgaataacaattatataggactggagcaagttaacaattttgatgtttgtttcta

SEQ ID NO: 821319 - DNA, 551 bp, Homo sapiens
agtgaagaaaatagagaactcccatccatgttcactaaataagacatcaacaataaactagagatgtcaattcaaacgcgagttaaaattagtcactttacctaaaaaaaatcttcaaataccaaaaaatcctatggcacattattaaagaaattgatagaggttttccaaaatttgacaataattgaaaaatgcatattttatcaataagttatgatgttgacaaaaacttttttaaatttaaataaaaaccaaattccaatcgaccacgctagagaaaagattgaattattttttctattctatgaaaattatattataaaatcatcaaatctagagccaatcagagagtacaaagccacaaatttagagaaaagagtattaaaataataaaaatatattatttttctttcttttgtgaaatttgtaggtgttagctttcttatatctgtaatttgctgtaatttattttcttgttttaaataaatatttacattaatatcttttayggactgtattgcgtatccccaaaattcatacattgaagccct

SEQ ID NO: 821320 - DNA, 396 bp, Homo sapiens
cgtcaatttttgtatttattgcaattgcttttgaggacttagccataaattctttgccaaagccagtgtcgagaagtgtatgtcctaagttttttttatatatacttttttatagtttgaggcrttacatttaaccctttaatccatcttaagttaatctttgtgtatgatgaaagatagtggtccagttgaattcttttgcatatggctcgccatttatcccagcaccacttaccgaataaggagtcaacattttgttaactttgtcaaagttcagatggatataggtgtgcagctttcatcctcagagaaatgtaaatcaaaaccacaatgagataccatctcacaccagtcagaatgaatattatttaaaaagtcaaaaaataacaggtgccg

SEQ ID NO: 821321 - DNA, 528 bp, Homo sapiens
tctagtatgcataaatcctaccattttacccctggttcatagcgcttaccttgtycactcctttcaatcatcaacttatattttactgtctattacaataatcagtgcattatgtatatgccagtcttttttttttcgcttaaagaaacatttctggcaaaacacaagtcatggtttaatttacttttctcctctttctccacatgcagtagcacagctgaatatagctgaagaaaatcccacagtaattttaagtggtctgtatttaaaattatgttccagaacataacgtaaattctttctgctgcctagaactcatcctaccttttcttggttcattttcttgaccactgttttagataactacttcataaatttttatctattctcaaatttacaaaactcctctatcatcaaaaagctcagctgatgattcacttcctcttttactaattagttggaaacagaagaaaatcttaataaatcctgactactacacctgcacacatacccagtggaacctgtatg

SEQ ID NO: 821322 - DNA, 528 bp, Homo sapiens
tctagtatgcataaatcctaccattttacccctggttcatagcgcttaccttgtccactcctttcaatcaycaacttatattttactgtctattacaataatcagtgcattatgtatatgccagtcttttttttttcgcttaaagaaacatttctggcaaaacacaagtcatggtttaatttacttttctcctctttctccacatgcagtagcacagctgaatatagctgaagaaaatcccacagtaattttaagtggtctgtatttaaaattatgttccagaacataacgtaaattctttctgctgcctagaactcatcctaccttttcttggttcattttcttgaccactgttttagataactacttcataaatttttatctattctcaaatttacaaaactcctctatcatcaaaaagctcagctgatgattcacttcctcttttactaattagttggaaacagaagaaaatcttaataaatcctgactactacacctgcacacatacccagtggaacctgtatg

SEQ ID NO: 821323 - DNA, 620 bp, Homo sapiens
acttactcgatagagaaataatgccattaggaatgaggcaaacagaatacctatagaaggcatccacaatggggtgcatattcttttgtgtmtctgcattgatcttgcattctgcctatggtccctatttacctgtccatcatcaggagaaccacatgaccccactgtcttctgtgcgtattcttgcttctctcatatctttcttatgtcctcttagggcatctgcctggaattcttccctcaacaccacccttctttcactatttacagatcacaatccacactttggtttgtcaggaaacatacctaccccattcctccacttactcctagaaagatatagtttgcctacctggtgcttttcacatttatttgaattgtactgtaaaattagtatctatcttgtttgtttaactttaatgccaccaagggtagaaactattacagtttgctcagcactgcatcgcagtgcctggttgcttattgtaaaataaatgcacgtgcacacacacacacacacacacacacgctctgacacaaaataattgttgaatggttaagtgagatgatccatcaatctcccaaaaggccaaaggatttaatgactctaaaagtgttcc

SEQ ID NO: 821324 - DNA, 625 bp, Homo sapiens
agtttacttactcgatagagaaataatgccattaggaatgaggcaaacagaatacctatagaaggcatccacaatggggtgcatattcttttgtgtatctgcattgatcttgcattctgcctatggtccctatttacctgtccatcatcaggagaaccacatgaccccactgtcttctgtgcgtattcttgcttctctcatatctttcttatgtcctcttagggcatctgcctggaattcttccctcaacaccacccttctttcactatttacagatcacaatccacactttggtttgtcaggaaacatacctaccccattcctccacttactcctagaaagatatagtttgcctacctggtgcttttcacatttatttgaattgtactgtaaaattagtatctatcttgtttgtttaactttaatgccaccaagggtagaaactattacagtttgctcagcactgcatcgcagtgcctggttgcttattgtaaaataaatgcrcgtgcacacacacacacacacacacacacgctctgacacaaaataattgttgaatggttaagtgagatgatccatcaatctcccaaaaggccaaaggatttaatgactctaaaagtgttcc

SEQ ID NO: 821325 - DNA, 606 bp, Homo sapiens
attattctcagcaaactatcgcaaggacaaaaaaccaaacactgcatgttctcactcataagtgggaattgaacaatgagaaccttggacacaggaaggggaacatcacacactggggcctgtcatggggtggggggagtcgggatggatagcattaggagatatacctaatgtaaatgatgagttaatgggtgcagcacaccaacatgacacatatatacatatgtaacaaacttgcacgttgtgcacatgtaccctagaacttaacgtataataataataataataataaaagaaaatcaaagctgtaattaaacgtctctcaataaagaaatgcccaggacttgatggttcactgctgaattttaccaaacatttaaagaactaatactaatcctactgaaactattctgaaaaatagaggataaagtaatatttctcaacatattctataaggccagtattaccctgatacccacaccagataaagacacatcagaaaaagaaaactacaggccaatatctctgaagaatattgatgcaaaattcctcaacaaaatagtagtaaactgaattcaacaatmcattagaaagatcattcatcgg

SEQ ID NO: 821326 - DNA, 641 bp, Homo sapiens
ctccgtgctgtcttctcaggatcctgcttcaacctgctgccacttccccatgcctagctcactgtcactttctcccttacctgccctctcagcctcawactgataatttggaaaaagaggcgcctggaaaaaaccacttccagggtacagcaggaaccagcctcactcttctttctctcttttaaaaattattacgatttttactgagatgggttccaagtatcactctccaccacctcatcaccttctgggacctggatggactccagatcactatgttgcctaggctggtctcaaactcctgagctcaagtaatcctccggcctcggcctcccaaagtgttgggattacaggcgtgagccactgttgcctggtctggcctcgcttttaattttggcttcctggaggcttttgctgaggtagagatgcaggccacccttgcctgacaatgccttccaggcaattgagtggctgagccagtgggagaaggtgggcttctctcactcccaggtgtggtggtagtgaaccagcccaggtggtcaacatgaactgggaacatggaagacaaaggtaaaagagctggtaagggaagcaaagcaggtttgggaataaagcttaaaatctggtacagagtgggttac

SEQ ID NO: 821327 - DNA, 635 bp, Homo sapiens
aggtctattacttgggtcttttttaatgagagtattttcggaagcaatttgtatgaataytcaggagacattatgaatgtgaaactaaagccctattcctgtaatgatttggaatttgaatatgaaatgtacagaaatagggaagtattgatctgggaatcataaattaaaataagcatttatactatattgtggtcagtaaaaataaaaaatatctttagctctgtctatatatgtatttttctatcatatccaaataggacaaggtctatggagttttaaaccacttaagtcttttcttactaatacagcattcattaaacttagattttttaattgaaaagaagctacagtttaatttaaagccagaatctgttacttaagttgttagattttgtgtttagcttagttcattaatggatgtggtttaatttgcagtaaactggtagagaaaatattctattttcctattcagatatctataggtggtctgaaagtaaaattaattcctcatacagtgcacacaaattcttgtcaatatgtgcaaaaaatatacttaagatgttaataatttgattgttggttttgtctgcatgtataaattcaccagcagttctctagaattggcaatccca

SEQ ID NO: 821328 - DNA, 557 bp, Homo sapiens
tctgctaatcatttataatacttyacacatttgattagctctttttttttttaacaacgaaaggtactgaaacaataattctgtgggaaagaggaaaaaccgtagaaatcaaaataaagtcatagggcaaataaacagttaagtgggttgttttgtatgcaagcgtgataaataaatttgaaggagacaatatttaaaggctacgttttacgatcgttcaataagtattacgtcctaaacaatatatgttatgaaagcatacaatgagctttttaaaaaaatttggattcaagtcatcatttttcacttaattttatactctaaacactatatgaaaaatatataaaaatatttgaacatgagtaaaatgcagaaataatgagttattaattgctttttcttcttctttttttttttttttttaaattgagacagagcctcgcactgtcacccaggctggatttcagtggcactatatcggctcactgcaacctctgcctcctaggttcacgtgattctcctgcctcagtctcctgagaagctgggattacaggcac

SEQ ID NO: 821329 - DNA, 634 bp, Homo sapiens
acaaacataatttttattttttaaagcaaatcggcctagaaatagccttcaactgaaaggagacactaccataaagagtgcagtgtataatcagagcaattatagtaccatttgttcaataatctggagtatagattgagacggggatcatgctaaagataaggagaagaagaaaaacacagggcagatcttgacagcctgctctatgctgtttaggagtttagattttctccaaactcttgatggttatcgtgtgaattgtgttaccccaaagatgttaaagtcctaatgctcagtacctgtgaatgtgaccttatgtggaaataggactttggtagatgatcaagatgaaatgaaaccattaaggtgggccctaatccagtatgactgcacttataaaatgggaaaatttaaacacagacagaagacatgtatagagggaaaatgatgcaatgacacaggggaaatgaaagccatcttcaagccaaggaacaattgagaataccagaagctcagacatagccatggaacagattctccccttccagccctcaaaaggaaaaaaaaaactctgmtgacactgatttcagacttgtagtctccaacactataaggcaataaatatccattgttt

SEQ ID NO: 821330 - DNA, 564 bp, Homo sapiens
ttctgattgtgttcttttgaacagaacacattgcattaaactctagaaagaaaaaaagtgwctgttttcatatttttatgattggagtcacattcttaagatctataatgtagattacagcaccattttgttatctgctagaagaaatatagctaatcatctctaaattagtaatgttacattttattttgcttcctatttactagtgtggcacattttaatgacagaaaatttccttgaaggcaagagctttacacacagtaggatttcactcagtttttgcatatattgaccattgcagaatacaaacaactgttaagtaatttctcccaaagacaggccataataaagaggaaaaatataaactatatgacactaaaaatcctgttaatcttgatcaatcagtgaatgaaacactaattgtgccaaacaacacattctacctgaacaaaaggaggtaattgcagtatgtttctatgaatacatagcagctgttctatgccattattatcactggtgagtaaagatcatggtgaatcattgtctaatatcttgtgatcttgc

SEQ ID NO: 821331 - DNA, 564 bp, Homo sapiens
ttctgattgtgttcttttgaacagaacacattgcattaaactctagaaagaaaaaaagtgactgttttcatatttttatgattggagtcacattcttaagatctataatgtagattacagcaccattttgttatctgctagaagaaatatagctaatcatctctaaattagtaatgttacattttattttgcttcctatttactagtgtggcacattttaatgacagaaaatttccttgaaggcaagagctttacacacagtaggatttcactcagtttttgcatatattgaccattgcagaatacaaacaactgttaagtaatttctcccaaagacaggccataataaagaggaaaaatataaactatatgacactaaaaatcctgttaatcttgatcaatcagtgaatgaaacactaattgtgccaaacaacacattctacctgaacaaaaggaggtaattgcagtatgtttctatgaatacrtagcagctgttctatgccattattatcactggtgagtaaagatcatggtgaatcattgtctaatatcttgtgatcttgc

SEQ ID NO: 821332 - DNA, 667 bp, Homo sapiens
catctgctgagagccactgccactaaataaatccttgcacctattctccaagtccaggtgtgagccaattcttccagtacatcaaggcaagaacctggggtacagaaagccctctgtccttgcaacaaggtagagggtgtaattgaggtggttaacacaagcctatagacatcaacactaaaaactatgacactcgcccactggtgcttcaggagctgtaaacattcacccctagacactgccgtggggttggagccccacagcctgcccatctgtatcctcctcgagaggtttgagcagcagggcactgaagaagcaagccacttcccctgtcacatgccctgcaagggggacaaggaaacctttcccctttcaggtgctatcacattacctgtataagtagtcattccacaaatatttcttgagctaaatttaatagatttattatgaagattaattggaataaaaaatgcttcaagtataatcacttctttttatctgttatctgggacataaccaaaagttagaagcttaatattaaaaagatgattttcacacaaacataggrtaaacatattttaagattatatacaactcatcaatgagagaaccaaaaagaaggtaaaactggtttaaaagacattttgtggaactggcatataaagat

SEQ ID NO: 821333 - DNA, 518 bp, Homo sapiens
tcatatccagcctccataaggcagcaggatactgaggcatgacatgaaaagtcaaacagagaaacgtgaaaagctatctttgttcattgggcaaggaaatactgaaggaagagtcaattttgtttattacagaaggagaaggagctgaaatattgctgaattttggaatatctataattggagtctatatgcttaactgatgagccaaggatatactctatattataccaagtgccataaaaattattataataaaaataacaacttttgagcataatgatattttatgttaggcccttgtagcattgtatagtagaacaagcactgagataaaatgggagaacaggttctattaccaaccaaatcttttatttttttaatatttattattattttttaaatatatattttaagttccgggatacatctgcagaaagtgcaagtttgttacataggtatacacatgccatggtgacttgctgcacccaaaagcccrtcacctacattaggtgtttctc

SEQ ID NO: 821334 - DNA, 577 bp, Homo sapiens
cgatgcaaataatactagcacagtctgggtgtatcattaacagggaaattgttatatgggcagggataaagcagagaattcctgcaagatctgcctgtcatgtgaccagatctggaaagcactgtacctgtcagacaactaaactgcttgaacccttagaaaagcgagggacttttttcattcctacttggggaacaattgaacatcagaagcaagaagaaggccaagtagaagaaagacctcagctctgcacagggcttagaatagagcccaagctctttctgttggcctatatttgctttcacttttgcatattttccaaagcttattatgtttttagtttctcaaagattggaaactcttctaccccagagactttgcattaatgtctcctctggctagaatttttttccaaggctttttaccatggctggctccttcccctcttacaggtctcagacctgccttgaatatcttctktaaagaggtacctctgttctctgttctcttctccattacgacaacatgtgagcatccttcaaaatgatttgtattatatagttatgcacagacatgt

SEQ ID NO: 821335 - DNA, 633 bp, Homo sapiens
ttcatccatgttgttgcatatggcaggatttctttatttgttaaggatgaataatattcccttgtttatatatcacattttctatgttaatttattcattggtgcaatgggttatttctatgtcttggtcwttatgaataatagtgcaaggaacatgggggtgcagatatatcttcaacatacagattttaattcttctggatatatagtcagaagtagaatttctggatcatatgatagttctatttttaattttttgaagaatcagcatactgaattagaatttcttcacatccttgacaatacttgctgtcttcaatttaattttattttatttttgataaaagccattctagcaagtataaggtcatatctcactgtggtttttgatttgtatgtccttgactattattgatgttgaatatcatttcatatatctgttggctatttctatattatctttagagaaatgtctattcaaggactatgccaattgaaaaaatcaggttaataggcatttttgctattgagttgtaggagctctttatatttttggatatgaccacttatcagatacatagttacatttttactctgttgattattattttttgctgtgtagaagctttgtaa

SEQ ID NO: 821336 - DNA, 602 bp, Homo sapiens
ctgttgtactcaatctcatagagacattttctccttccgctgtttctagagatcatcctttccacagagatggcttggcacaaactactttatctaacttttggaagtgccaatgtccgaaccagagaaatccagtcattgctcagtcattcaaggcacatgctggaaccaattggtcatgaacaaagtgctgtaggacatgcctatacacatacgtatgcacatacacactcacatagacataaagacacaacaacacatgcgcgtgcagagacatacacagatacatatccacatacacatggaaaatgttctcagcagctgaagccctcaatgagagctggaggtccaagacagggacacagactgtgcatagaaataggggaatatctacctagaggaaaataagtgattatatgaaaaagatacctgcacacacatgtttatagcagcacaacttgcaattgcaaaaatatagaaccagcctaaatrcccatcagtcagatagagtggatgaagaaaacgtggtttatatacatacacacacacaaacacacacacacaccagggaatactactcagccataaaaaggaacaaaata

SEQ ID NO: 821337 - DNA, 641 bp, Homo sapiens
tttgctatttgagccgagcatctcccagtctaccttatttagtcacgattttggatatagatatgytgttggttctcttcttcactcaaggtcctaacattttgctgggtgacttcagtacctacttgtctattttataacctggcatattggttcatatttgttattccacctgcttatgtctattattcttcatttctattcatcttcagcctcttgttcccaaaattacacttcggtatgcttcacttccagaagcagttctgaaggccagaagtccaaatccagtttctctaagctgatagtcaaggtgttaacagggctagtttccttctaaaagctttagaagagaatcctttttcttgcatttgccagcttctagatgccacctaaatccttggcttgtgatcccttctccatcttcaaagtcagcagtgtagcaggaatttgactataaataataaatttcaggctttgagaactgaggtgcagagtagatctccatccaggtctcaggctggccactggtttgtgcacacgtgggactaatcagaataacaatgaaaatgctcaacaatcttgaacagacaatggaaccaaggtcacaaaaggcagattagaacttgcatcccaagtgtaac

SEQ ID NO: 821338 - DNA, 649 bp, Homo sapiens
aatatgcagacacaatgcctaacagtctaatacataartctctcataatagactgatggtattaaccatacttagtctctatattgctttatcatttggaagtctcatccatcatttctctccatcatcatgcacttcaaaacaggtattaaaacctttactttataggtaagaaaactgagttcaaatttaagggactttcctaggtgcccctgccattacctggctgagctgtaactcaaagcctggttttctgacaccaagtccagaatgcttttccccagtgcattgcaactgtcattcagagcaggtgtacctctttaaacaatgctagcaagttttgcagctggtgcctggctgctgaaattcacagccatagcagagtgtgtttttgggttacttaaccccaaggcagtgcgccttcaaatccgtatcacaggctgcaagcaacctttaatctctctgctgcccagtctagtctgctgccatcagttactgtatctgccagttcatcatgttcacagtaaagccaaaagacgaagtagcgattgaaagggggcaaactgcaccttaagaaaatggcatttttctggcattgataaaggtatcagctgccagtcagtagagagtggaaattgttccaggttaa

SEQ ID NO: 821339 - DNA, 647 bp, Homo sapiens
ctcaaatgccaaactgtagagctggtttttactctataactacactgtccattacagtccctacgcatggccatgtaggtagtctgaactggcatgggctttgggcataaattgacataggatttctaagacttaatgtgaaaaaaaacctcatgtaaaatacctgattagtaatttttatattaattcacattgacataatattttggatgtactggattagagaaaatatattattaaaattaattttacctttttttagatttattttttaatatggcttctaaaaatttaaaattacatttatggttcacattgtattcctattggtcactgatgggatgcattataaggcatggtgagggtaaggctgggactggctgctgctgggactaaactttccttacacacacacacacacacacacatacacacacacacacactctctctctctttctgtctctttctctctctctctttcttaaccccatattattattttattattattattttcaacctccagcctccttaggaataggccactcaggactctcatcccgctaggaaaaactctgaaataaaaataatttaaccaaactcttttgcaaraaataaggatggatccatttagcacccagggag

SEQ ID NO: 821340 - DNA, 377 bp, Homo sapiens
aatgaagagcttcaccagctgttctgcaggcagcaagtcagggaggaggttctcttggcaacagcagcgagattgtttggatccactgagaaaagctggagggaaataggtttagatattgttttagaggtaaataagtctagtctttgaggacaaagaaaaatttagcagtatatttttgaattgaatccaataactgaatctgaaaagaaccatagatcctgaagtggatgagcagggagctgctggcctcaggccagctcgagtctaggtctgcctgtcttcacccagctctggacatcagctctcctgtgkgtgttagaactgttacttgagaatattttgcaggaatagagttttcatagcatgagaagagg

SEQ ID NO: 821341 - DNA, 613 bp, Homo sapiens
tgacaactgagtcagatctgtttcatttaagggtgaggtgaatactctgaagacattcaaaaactgaagttaaaaaaaaaaacaaaaaacacgcaaatccctgattttaggtactaaggcgctattgctatgggaagaccatattgccaaatcactggaattatcactggaaaaaattacaactacattccaatgatgttgcaccaaaaatgcagtgaaactgattatttggctctttccaagtattgaccatgtatcgtattttccattcatttagaggtaaatgaaagctaaaaaaataaactaatagaactaagtaataacactacatagtacaactaactaaaaacaaatgatatctcttttcccttttagaatgaattcttaaaaagaaaaaattaaaaagaatgctatccatgtaatgtatcagataataaccagggttaaaacaaactttagctgtatacatatttttactttccaggaaaattcccaagtcactttgttcagaaatatttcagcttatattggtatgaactgtaaaatttggtaattttcccacccaattaatacaaataaacattttagyagagaggggaggaggaagggtctt

SEQ ID NO: 821342 - DNA, 640 bp, Homo sapiens
ttaatgtttggtattagctaattggaaaacacctaagttataactagtcacccccgcagttcagggttgattaaacaacccatgacactttttccctctagcctgccttaggaataattataatgacttgcccattgtcttgagttaattagtcctcattttcttctagtgttcctctaggcaaatgtcctaaaatatctcaccatgttgcactattcttctcttatatttcacaatggacacatataaccaggaacgtttaagcattagttggtttggtttggttctttcaaaggcatagataaatcatcacgctacatgatgatagaggaaatgacagtttttatcttttattcaggtagcctaaatttacatgagaccacaaaaagttcctgacaggatgttattgattgcgtttacccagttggggcttgagatgggtcttcctgccacattgcagggcaccctcttcttttcattccagcctgcagatcaaatcccagatcttccaattctcacgaattttcagaatagagatttcaggccccttggcagacttcytattattcttaattcagcttccttctctctgtgccaatcagtaacaatatcctctcttgttggatgctatgaatgacag

SEQ ID NO: 821343 - DNA, 527 bp, Homo sapiens
cctctctgtgattgtagcacttgagtggaacctgaagggcaacaaggagttggccacggtaagatctgagtagaackttcctggcagatgttctcaggcaggaataatcttggcagcttaaaaaaaactagttttggggtatacttcttaatgtatactaaatataaatttttacttttattgatgattcacaccttctgttctttgttaacccatctcctggggttattattttgtggattagcatctcagtggatcatcctcaaagaaccctccatcccttcttgctggtataacataggaagaaccagagaggtccctgacagacaagattgttatatcagtaggctcaatttacacacgtgctccaaatctggggatgggacagcaaagaggaagctatgggccctttgagggttaacctgtatggaccccattcctttctccttgcttggaatttaaagttcagtgcccagttatggatccagatgcttagagtgaacgtcttccacctcctgcttcctcca

SEQ ID NO: 821344 - DNA, 525 bp, Homo sapiens
ctatcaggaaacatggataagacaggagtgcttctgatctttaactagtaatcatgatgctggctgtggagttgaagtgtaccrtgtgtaaactcttgttcagtcaaaatggacattgactatattatgtgggttcctaaggcagtgtattagtccgttttcacactgctgataaagacatacccaagactgggaagaaaaagaggcttaattggacttacagttccacatggctggggaggcctcagaatcatggcaggaggtgaaaggcacttctcagatggcagcagaaagagaaaaataaggaggaagcaaaagtagaaaaccctgataaacccatcagataccgtgagacttattcactatcaggagaatagcacgggaaagaccagcccacatgattcaattatctccccctgagtccctccgacaacatgtgagaattgtgggagatgtaattcaatatgagatttgaaaggggacatagccaaaccatatcattccatccctggcccctccaaatat

SEQ ID NO: 821345 - DNA, 530 bp, Homo sapiens
taccttccatccaatcagcacagggacctgccaatcacactccccaaatgtctcttggatcccggcagcaccwtatcaccaccaccctgctcccgcattccctgcctggatgctggtagctgctcccagctggtccccctgcaagctatgatgtcctccaacccacacctgatcacaaccagctccttcttaaatgactctccattgccctcaagagaaggtgcaaacatccccaagactggcacctgctttcctctccagccttcctctcccacaccccctccccacggactctcagcccttaggaatccactcagagatgtttaatacaaggatacctgtttatgctaggaggttttgttctttttcttatcttccttcaaattggtattctcatttacaaatgccaagtgtctccacccagtaagaagtaaacttctgcaaaataaccataagccatcaggcacatatgatgtagcaggaatcatgcccactaatttacataaaatgccgcattttaggctgaacac

SEQ ID NO: 821346 - DNA, 512 bp, Homo sapiens
tgccagctgccttgaagaagagggaggggcagaaggaggcttagggtcctcaggcrgcccttctgagaaaggaagagggaagggaggtgtaggcgaaggaggtgggcccgtctggaggaaggtaacttctcctcctttagctgggggtggggcagaacatgggattgtcctcagacccaggccctgctcttctctgaaaacactgccagtgtcccctgcatactggctcctgcccaggtctcactcatgggaagcactgggtcaacaggaggtagggtggcacatggaagagcagctacctacacctcctcgttccctctgagtctcctctgtgcttccagctccctggggataacctccctgtcctgcctttgctgggcagcccacctggctctgggccagaggaatagcctgccttggacttgctgctcttgccagtatcttgactgcctcacaggtccctccatggcccctagctcttccatccccagtgcaaccaaatccctgtattc

SEQ ID NO: 821347 - DNA, 609 bp, Homo sapiens
tcatcttaacttcatgacatctgcaaaggccctttttccaaatagggttacattcgtgggtaccgggggttcagatgtgagcaagtctttttggggggaaacatttaacccacgacagtcacccttccctgaaggcaatgggaaaaaagaagcccagcagaggcagctggaatcccagctcacttgcttcctggctgggtgacctgaagctctgagtcttagtttcttcacctggaaaatggatcatgccacaccgtggatgtgtgaattaacggagatggcacatagaaagccagcagtgttgaacttggccacgtagtaaggcctcgataaccggcaatgcagaattacgtttccctaccaattagtggccgaccacagtctacccaaccagcagacagcaacgcgtgaggacttggagggcaacggaaatgtgctaaaggggcaatgagagtcctttctgaatacgcaccccccagttggaggactgggtggatcagaggagagtccaggggacttccaggctggagatggcctgcggttaacccctcgtgccccatygggcaggaggcgggcccttctcccatctctccctccctctctcctgtt

SEQ ID NO: 821348 - DNA, 613 bp, Homo sapiens
gaccttgttttgaaaaaaaataaaaaaaaaamaacaagcaaagattccatgtcacaccgattaggacggctgttctgaaagaggcagggaataacacatgttggcaaggacgcagagaggacagaatccttgtgcacagttggcgggaaaggaaaatagtgcagccacagtgaaaaacactctgaggttcctcaaaaaattagacagttgccatatgacccagcaattccactcttaggtatatacctacaggagctaaaagcagagtcttgggattttttttttctttttctttttcttttttttttttttttgcaatggagtctcactctgttgaccaggctggagtgcagcagcatgatctcagctcactgcaacctctgccacctgagttcaactgatcctcctgcctcagcctcctgagtagctgggactgcaggtgtgtaccaccaggcctggctgattttttgtatttttagtagagacggggtttcaccatgttggccaggatggtctcgaacgcctgacctcaaatgatccacctgcctcaccctcccaaagtgctgggattacaagtgtgaaccactgcacctggacttggagagatttttgc

SEQ ID NO: 821349 - DNA, 589 bp, Homo sapiens
aaagaggagatacagtcacattcgctactgcataaatagctactgcttttctctaattcttgggtaaagtatcctgtcagaggaaacaaacaattcatagcctactaacttcacagtcacsgataagtaagtaaagagaatggggcagacattagtcataaactgaccctgaagcaaataaatttgatgctgactaaataaccatcaggaaattaggttttcttctgttactttaagtagaagcaaatacttcatgaaatatttgatgagtaaaaacattgaaaaatcatgaaaaaaagatgtgtaaaaaatagatatatcctaatttcttatataatccagctgtcagaaaatagatatacatcaattccaaattgatgtatgaattagctgttaaggaatttaagcatattttcggctttataaaagtgatcattattctcatcaataaaataaaatgtgtagcctaccattacaatcatagatactgtggaaaaagcctgacaaaatttttctactgagcaaaaatatgttaagattgtttttattgtattagaaaaatgtcataatattgtgttacagttgtaga

SEQ ID NO: 821350 - DNA, 622 bp, Homo sapiens
tactctaacatttcccccctcaagagttcaagacccaatttgttgggaaaggtcagtcttttgtaactgcttcctgctgacagagaggtggtggtggttgttctgtgggtcttattctcttgctagctgttagggcatggttgcttcgtgggttagtgaaagcagtatccagccaggtccgagagagacaggggcaggattttgcctctgtcgtgtcccacagatgggcagttgaggggtcctctgtagaagtgtgactcaaatattgagaggatattatccctcactgaggatcatctggtgattgatggcccatccctcttgtttcttctgagcctcagccatggatcactggttggttcacaggaataagcagagtcagtctaacttgcagaggaaaaaaactcaaaaacaactgatgagactagaatcaaattacaggtgtaccacaattctcaagacataatttttctctttgcagtcctcattcttattaaaaacaaatyatcacaggactgatttgtttccaaaataaacttcagtcatgttatacttggcctgttatttgcataaagcacagcaagaataattatttgttacataggttcctttttaaattggc

SEQ ID NO: 821351 - DNA, 554 bp, Homo sapiens
gttcacactggcttgtttccaaatgggcacaaatcccctctgcatacccaagtgaatgatcatctccagtgcagtggctgagctacgcgattctcccataactgtcatgttgatggtaaaacaacctgaagaaatggtgagcacaccataaagacttaggaattggcctgtttgtcatgtcatgattacttttatttatagtagaccagctatgtaggttttctgaatgtatcgtatagttgtgccccataatatgatagagataactcatttgtagttcaacacaaggatctccagactgcattttccctccagcaagtcgatttgttttggctagtctcaggaaactatggtgagcagaacagcagctcacactgacatttgctaggactgaagcagtctgaaaaattacctttcaaactctttctggaggactggcaaggtgctggggcacaacctgaagtgctggggagggaaatgcaaatcagctaccttttgggctctgccaatgagragcgtgcagtgttacgttatatttcagatgtgctttctaa

SEQ ID NO: 821352 - DNA, 644 bp, Homo sapiens
tgtaacaaacctgcacgttctacacatgtatcccataacttaaagtaagataaataataataataataatgataaaagagaaaccttgcagacttycaggtgggaagagcctcacctgggaaccaggaaggctggtcttcccgcctgtcattcacatttcagtgcttgtaaaaagagcactgttgggagaaggcacctggattctgtattttctttcagttgtttgcagggaggaaatttattatttactttgtccctcctaagcagggtagaaaccaaggactcattttcctttatactgtcttttattggtagccacattttcacatgtaaataagtatgaagtaacttttcttcagccatattttaatctcttcaggacaaaccttgttgtacctcttttattccccaatgagtacaattctggcagaacttcatctcaataaatattgactcattgattaagggatgaagagcaagtgtcattctaaataacaacaacaacaacaagctatgaaccattttaaaggagaagtaatattacattttaccacattgaataaggtaacccattattaaggaaagtgacaatttagagagtttctgtgcctgcaatttggaggagataagagtttgggggtttc

SEQ ID NO: 821353 - DNA, 641 bp, Homo sapiens
ccagggttgacaactgataaaagaccctgaatgggagctgtgacctgggttctagttctaattccagcgttatccacaaaaaccacataacttctaatatcacaaccagactactctggattttaatactcccgtggtgtggcactttttccacgtttacccttgtgtcttggtcaaattccaagttgggtaattactctctgcttacctaaattcctcctcctattttagatgtgtaggttattttccacttctaaaacctgccttccagtgttcctggctctaagaactgccatatcccttttcaaaggtagctatgtgtcagtggtcagtgtatatatgctatttgaacacaccgacctgctgtaggaatatttaatgaatcactactcgtaagatgttttaaattttctcacagatttttttctcctactttgtttaaaagtcatactgttattacaatttttgcaaaaaaaaggcagtaaataattcatgttttaagtacagttgttttcaaaattccttttctatgtggtttcaggcatattttaccttctctaatacagaaatttctgaaaatgtagtatgaatccataagytttttatgttaattcacttattttcccattgactcactttat

SEQ ID NO: 821354 - DNA, 522 bp, Homo sapiens
agttcacatatcataaaattcactcttttcaaatctggtttaatgggttttagtatatttacagagttatgtgaccatcaccactatctaatgttagcacatttttatcactccaaataggagccccacatccattagcagacattccccattcccttctccccttggccctggcaatggctaatctactttctatttctgtggaattgcctctcttggacattttacattatttgaattatactatatgtgattgacttcttttgtttagcatagtgttctcaagatttttccatatagcactgtcatgtattagttcattcctttttattgctaaaataatataccactgcatgggataccacctaagcatcagtggattgacatataggctgtttcactttttggctattatgaataacrctgctgtgaacatttatgtacaggttttgggtggccatgttctttcagtttccttcagtttatgtctaggagtgtaactgctgggttatgcagtaattc

SEQ ID NO: 821355 - DNA, 574 bp, Homo sapiens
actgcacctgatagcacagaaagatcattaggcactattatgaacaattacacatgaacaaactaaaaaacctaaaggaaatggataaatttctggtcacatacaacctactataattaagtcagggagaaatagaaaatgtgaacagaccaataatgagtaataatattgaatcaataacaaaaatctaccaacaaaggaaagcccaggaacagatgatttcactgccaaattctaccaaatttcaagaaaaaaaatcctaacatcaattttctcaacctatttcaacaaatagaaaaggagggaattctccctaattgattcaacaaatcaagaattaccctgatcccaaaaccagacaaggaagcaacaacaacaacaagaaagaaaactacaggtcagtaaatctgttgaacatagatacaaaaattttcaacaaacttagcaaactgaatcaaatagcacataaagaaaataatatgccrtatcaagtgagatctatcctaggaatccaaggatggtttaatgcatgcaaatcaataaatgtaatacattaatgaaatgaaggacaaaa

SEQ ID NO: 821356 - DNA, 464 bp, Homo sapiens
aactcaaagtaagagaaagagtcaaagaagttaaaataggtttcaaaaaagtattggtttatagatttataattttttttacatctaggaattagagtttgtcaagcctctgagcccaagctaagccatcatatcccctgtgacctgcaggtatacattgagatggcctgaagcaactgaagaaccacaaaagaagtgaaaatagccaattcctgcctttactgatgacattccaccatcatgatttgttcctgccccaccctaattaaccagttgaccttgtgacattccttctcctggacagtgaatctcaggagctccccactgagcaccttatgacctgcccctgcctgcaagagaaaaaacccctttaactgtcattttccactacctacccaaatcctataaaactgccccacccctctctcyctttgctgactcccttttcggacttggtctgcctc

SEQ ID NO: 821357 - DNA, 640 bp, Homo sapiens
aacatttgatgttattttacttacatttcttaaactgctgtctgatatctggaaacattcctgtgccttttatcttatttttgcctgcggtaatatgtacttttgacagaraagtgtgtttgagagtgcattgcctcattaaaaagagtactgctgcatgtatacgttttccactcagcaataattattgccaaatagagcaaggcttctaattaacaagcaaattccaaattccaaatggtgtaccagactacttaattagatctgttgctttttaattccctcactgaaagtctcaggcatggctttaactctattttgtcagttattttctttagcctaaccctggtcttactgtaagtcatgctaattattctcactaatttatttgcttactgtagttagaggctctcttaccctacacagttcagggaatgtcaaaatctctgtgacccataactctggttttatctcccagacaacaagagcaatacctgacaatggttttgtttgtttttcagatctaggtgtttttttttttccctctctcttgcctgcaacctctacatttgttacacaatagaatatttcaactcaaacaaatggcatggaaaaacagtacgtagcctggttttactag

SEQ ID NO: 821358 - DNA, 645 bp, Homo sapiens
tagagacagggttttgctatgtttgccaggctggtctcgaactcctgacctcaagtgatctgcccacctgggcctcccaaagtgctgggattacaagtgtgagccaccatgcccagccctccagtacattttgaagtactggaggttagggcttcaacatatgaattttggggaaacacacttcagctcatactaggatcaccactaaacattgggaaacactctccttgtctgtactcacaataggtctgtgatacagattttcaaaagctgtaaatttgcaaaatcattgatagggaatgcatggcttacagatttgttgatcatttgtgactgcccagcttctccatttttttttttttttttttttggtcccttgtctagagtcagggcagtttgaggtcagttccatggagtctttctacaaagatctttcatgtcaagcaaatacttcttttagggcactgtaggaggtgagcaggcagccgtcaaagaccttggaagagtcaataagtagggtacccgcmagtgaaaatttttctcattccacaataccagaaggccgatttcttaggaagtttcagtttcttgtatgtatcaggcactatgctaggtgctggctgtacaatgataaagtttcctccg

SEQ ID NO: 821359 - DNA, 492 bp, Homo sapiens
gcgcccgtgacacagcctcaggaagtcctgacaacatttcccctaagtagctggggcacagcctggttttatacattttagggaggtatgagacctmtgtcaggcttctgagcccaagcctgcacttatacatccagatggcctgaggcaactgaagaaccacaaaaagaagtgaaaatagccagttcctacctttactgatgacattaccttgtgacattccttctcctggacaatatgtctccagctctccccaccaagcaccttgtgacccctgcccccacctgcaagagaataaccccctttaactgtcattttccactacctacctaaatcctataaaactgcccccacccctatctccctttgctgactcctttttccgactcactccgcctgcacccaggcgattaaaaagctttattgctcacacaaagcctgtttggtggtctcttcacacagacaccgtgacaacatcaatcattatatgta

SEQ ID NO: 821360 - DNA, 465 bp, Homo sapiens
tgtagatattttcccacgaaggacagatgatgtggtttgactgtgtcctcactcaaatctcatcttgaattatagctcycctaatgcccatatgttgtgggagggacccagtgggagataattgaatcactggagtggtttcccccatactgttctcatggtagtgagtaagtctcatgagatccgatggttttataagaaaagagacccaagtggtttcgcttggctctcattctttctttgcctgccaccatgtgagatgtggctttgctcctcctggccttctgccaggactgggaggcctccccagccacgtggaactgtgaatccattaaacctcctttctttataaattacccagtctctggtatgtctttattagcagcgtgaaatcttactaatacaacagagtttattcatgtcttgtgacagtgactgtgtgggctttcttcttgacttttcccc

SEQ ID NO: 821361 - DNA, 621 bp, Homo sapiens
ttaagcataacattaatgttgtttctctgtctacaaatcgctgtctggggacaaacttaatttaaagtcagcatagtcttttgcctgcctgtctgrgactccctttgatttcccacttgcatttattaggggtatctgacaccttatctcactcgtttttttgtgtgtgagttaatattttaatatacttcaatttattttatttagttttagaaaaatagccttcaaaatgaaaaaaattagttttaatttcttgcctttggtgatgtaggccccctgagtttattttttctggaagtgcttcagccatgttcccagggaaactgcctcttcactcttctccaaatcctgccaggacttcttgaatggtccctacacgtggattcctcagcttctggagaagcttctgtcttaatggatgaaaaagactctgaacaacccttgcgtttttttaatgtgatactttataaaaccttttcagtttagatcttgttatggtttattatttgtggagtatcagtatttagtacagagatttcaagaaactcagtcaaaagacagtatgttttagcccaaaggcattattctcatatcagtggaatactttcttcaggaacttgt

SEQ ID NO: 821362 - DNA, 506 bp, Homo sapiens
gttccctcataatgttaagaattaaagtgcttgggacctgtgtgcttgctttgaagacagtgctggcattttggagggggacatgagagggagaaaacaacgagatagagattgaaagatggtgctgccagagaggacaggaagaggtcattctcacaggctttggcaaagacaaagagaggtcagagttgatttgggcaggcaaaacagccctggctctggcactagagtggagatacctttgggatcccctaggatgcaaagagtccttggtgctcccaaaccttgtacttcttctgcccactggcacccacatactttcctcactttcctttgctgcggggctggcaatgggaaaggtcctaggtgttctcaaacayatcctgcctccttgttccattaagggttctcatctcttagaagcaccattttatcgaatctattctctttcagttcctactgttttcaagcttatctactcccaccactcactactttgataaaag

SEQ ID NO: 821363 - DNA, 220 bp, Homo sapiens
tataccatgaaacactatgcagccacaaaaaagaacaagatcatgttctttgcagcaacatggatggagctggagaccattatccttaacaaactaatacaggaacagacaaccaaatatcacatgttctcccttacaaataggagctaaataacawgaacacatggacacaaagaggggaacaacagacgttgaggtctacttgagggtggagggtggg

SEQ ID NO: 821364 - DNA, 587 bp, Homo sapiens
atctctctttcctcaagaacactactctcggccaggcaccatggctcacacttgtaatcccagcactttgggaggccgaggtgggagaatcacttgagcccaagagttcaagactagcctgagcaacatagcraaaacttgtttctatgaaaagtttaaaaattagctggccaggtatggtggctcacacctgtaatcccggcattgtgggaggccgagacaggtggatcacctgagctcaggagttcaagaccaacctggccaacatggtgaaaccccaagtctattagaaaaaaaaattagctggtcatgatggcatgcacctgtagtcccagctgctcaggaggctgaggcaggaagatcgcttgggcccaggttgtcgaggctgcagggagacatggttgtgccaccgcacttcagcctgggcaacacagagagaccctgtctcaaaaaaaaaaacaaaaaacaaacactactctcgttgaaccccaaacagttcactctgacgtgccaatgacatgacatttcaggcttccacacacaccttgtactctgtatgaaattatcttcactacagtataacagaa

SEQ ID NO: 821365 - DNA, 626 bp, Homo sapiens
ccttctcctggcccccatcccctgcaggcaactgttactgagtctcggcaaatagagcgctataggaatagctcaggcaaaccatcagggctgatcaacaggagcaatcacagcagtgggcagagcccagcaatgggaaagcagggtccactacagcagaagccctggcaagcaggccagtagcatctgggaaggcaatcagggctcaggtttaaggacatccacaaggacaccatgagacaagtgccagtcagaagggcactggcagtagtggctgcagaatttcaatgtaggaagaacttacagggagcattttggttggaaaagaactagagaagctgtatttgcataatactctacacaagactgagaaaatgtcgattatccgtgtcaaaaaatagggataccatggatagttgagaggagagctaaagcctgcaggaccaagaagtttcctggattcagaattctctgaggtcatccccaagcagaatggtgcattcagaaaccagaacacactgcacggggcaggctctggctggagaattcagctgcaggtgcwctgtcccagcagacaggaggcagggggacaaggagggcttgttgccatccccagtgcaatgcag

SEQ ID NO: 821366 - DNA, 558 bp, Homo sapiens
tatcaagctaacggggttctgtgcaacaaagaaacaatcaaaagagtaaagagacagcctaaagaatgaaagattgctggccaaggtggcttatgtctgtaatcctggtgctttgggaggctgacgtgggaggattgattgaggttaggagttcaagaccagtgtaggcaacataatgagacctcatctttacaaaaataaaaaattagccaggtgtgatggtgcatgactgtggttttagctacttggtagtttgaggctgcagcgaaccatgattgtactactgcactccagcttgggtgacagagacctgtctcgaaaaaaaaaaaaaagggagaaaatatttgcaaactgcccaacaagggtttaataaccagaacatataaggaactcaaacaaatcagtagcaaaaaactaagtaacctgatttaaaaatgggcaaatgatctgaaccgacatttatcacaagaagacrtacaaatggccaacagataagaaaaaatgctcatcactaaccatcatgtaaatgcaaatcaaaaccaaaatgagatatcatct

SEQ ID NO: 821367 - DNA, 625 bp, Homo sapiens
acagtctgtttttcttatcagctcactgtttgcaattactagaccttgaatctagaggttcctaaagcagttgtgatactcagagaaggttcatcaagaagactactctttgataatatttatttcattattgatctcctgatatttgctaggcactgtcagaggcccaagcatatctaaatttacaatgttttctgcaatttacccccttcctcccatcaatataaaggaaatgtaatacaatattttagcattgtatgcagctatgccttttatatgaaaaaagatgtatgaaagttgattttaggaaaaattctgggcctctaattctttcctctgatttcatagaaagatttctctactggaaggtaagaaatatgaggtctttcctttctttactttttaatgtccctttaatctcactaggtatcaaatataaacaaggacttggactatatgacctaggatgtcaattccatctatggaattctgtcatatgagcctaattaaattcaagatgaggtcagtatcatcaaaaatccttctttttactaatgactatgcacttgcwatataaaaaaggggtcaggagtgagttgtgtgagctaagaaagcacatgttcat

SEQ ID NO: 821368 - DNA, 607 bp, Homo sapiens
catgcatgcttatagcagcacaacttgaaattacaaagatatggaactaatgttaagtgtccattgaccaacaagtggataaataaaatgtggtatatatacaccatgtaatactactcagccataaaaaggaactaaatagtgtcttttgcagcaacttgggtggagctggaggccattattctaagtgaagtaactcaggaattgagcactaactatcatatgttctcataagtgggagctaagctatgagtatgcaaagatataagagtgatataatggactttagagacttgtgggggaaggttgggagtgggggcgagggatgaaagactacatattgggtacagtgtacactgcttgggtattgggtgcactaaaatctcagaaatcaccactaaggaacttttccatgtaaccaaacaccacctgtatccccaagactattgacatttacaaaacaggtacatattatcaaaattacctcttagggaaagaatcacagaatcttattccctgaaaatatttttatcattttaagwtgcatcatattatgtgctactattgccactaaaatatggctataatattttcatttgacattttc

SEQ ID NO: 821369 - DNA, 612 bp, Homo sapiens
tacttacgcaggaactaagcttgttaaaaactatgagaaacatttggactcatccattcagcaaatattttgtggttatgtactatgtgctatttagctatgtacaaaatgaataaagttcctcgccattgtgaaacttctatctcctaggcatgaaagctcaaatggaaatattaacaatggcaaatagtaatgaaaagtgctgtctattcagcaccccttatttcaaactattgtgctaatacagtttttatatgttatttcttatgttccaccagaagatacacttcataagtgaaggaacagtctttgtattcatcattctgtgtccaatgcctcacccatatttggtctcagtaaatatttgttgactaaataaatgatccctccataaattctgagtttggtattattatgcccatttaacaggtggtaaattgaggatcagagaggttaataatttggcccaaatcacacagcaaaaagagcyaggatttaaacctagagtgttttccaatacaccaaaatattacttttgcatatatttgttggaataaagtgttttggagctcatgtcactctataataagttgggtctgtagggatgaatta

SEQ ID NO: 821370 - DNA, 608 bp, Homo sapiens
tgactgctggaaccaatatgttagcagagtaggaacatacctggaagtttacattttgctgggaagtgtcctcaactaaggacctactgttgcaggggtataaatatccccrctgtcctgcctcctgactggatcactctaaagactgacattgtcttcagagcctactttcaggcctttccctgacattgcctgtttacttggtctatttcccttcctggcaccatgatttgtgatgtgagtgctagaagagggttcagaatttgattttaattactcttagtgtcatctcctgaccatggacatcttaagtggtttttgtcagtgtttactttgaaaagagaagtcctgtctctcccagggccactgtcttcagagcctctgggttggtgacaggctgctggggctggggttcccatgggggagatgaggctgagcccagaatgagaatcaaatggccctgcattcaggaaactctcagaatttgtcaccttatatacaatatctgtagtcaaatccaagtgattcatttcctttttctgaagccacagagctatagggatccactctcatgcttcctccctagccgtcttcattttcctagcctc

SEQ ID NO: 821371 - DNA, 475 bp, Homo sapiens
ttttttctcctgattatatgttgtaatttcatgtttcttggcatgcttggtaactttttattggacatcagacattgcaaattgtaccttgttgggtcctggaaatttctgtgttcttataaatattcttgagctttattctgggatgcaattaggtataaaagcagcttgatccttttcggtcttgttttcatctttgttaagcgaaaccataccagtatgttgtccatggctaattttgccccactactgaggtaacacccttctgaatactttccacaacgctctgtgacttatgaggtttttcaccctggctactggaaacagaaatcattcccagtctatgagaggtctagggatggttccctctratacctgagttatttccctagccttggatagtttctttgtatacatgtactgaccagtattgagcagaagatttgagagggactattcacagttctttggagct

SEQ ID NO: 821372 - DNA, 538 bp, Homo sapiens
tggtcctagctggcaaggtaaggaatgaaggaatatttggtgctggtttcaagtgtgataaagcaaataatgacactctaaggaactgtgaactattaaagaaaatttattgcyacatccacttaagcaatccacgtatttccatcttaaatatagtctttttaacagggtttggaagttagagtgttggcatctaccattcacagagagcacaagaggtgagggggtggcaaaattctgccagagtgaagactgaacatgcaggaaaaggagatacccttaaacaaggaatattaagatgtttctcccagctccctctaccttctaggggaaaatagggaattaattctcatacaacattaaattcttgttcagaatttacttgcaatagttggcatgtgattcagtcattgatttgtacataaagctgtgcaacattttgaaatttctagaggagtactactaagattgcaaaatccaggatgcagtgagcttgaatacatttcattggaagattgaaaatattctgttatctgga

SEQ ID NO: 821373 - DNA, 703 bp, Homo sapiens
tttattagattcacatctgtcttccaagctagaaggtaagtaatctagatactgtgtttttattcatggtctgtttccagcacctagtacagagcctggcacataggacgcattcagcaaatgtctgttgagtgaatgactgaactctataccatatgctgacacagtgaatgcaggggtgaatgagggccagtcgctggcctcatgcagtttgcatgaggcagatcttttagtgggaagacagatgagcagaccattaccattcagtgtaaaacatgctgtgaagagtgagagcagagtgcaaaggagacacacaggaggacatcttagccagtctaggctgagggaaggggagaagtttgcgtggggatgggggttcataaaagggactctggagggggtggcatctaagcagagaacaggtgatggcaggaagaaatatgggcagaatcattcttggccaagggagcagcaccaaaacccaaaaagagagttggagaaagacaggcagagaccaaaggagacagacacatggacacgaaggacagactaccaagtgcagtgtagaagcagtgatacttacctttgtttcaatttccttttagcggggtgatatagatattgcatgatgcttgtaaagaaacttattgcacaaaatagacattatctatgaaaccgwttcattaaaaaaagaagcctagtt

SEQ ID NO: 821374 - DNA, 601 bp, Homo sapiens
ttcttagagacttacaaagaaacttagactcccacacaataatagtaggagactttaacaccccactgtcaatattagacagatcattgagacagaaaattaacaaagatatacaggacatgaactcagctctggaccaagtggacctgatagatatctacagaactttccacagaaaaacaacataatatacattcttcttggtgtcacatggcacttagtctgaaattgatcatataattgaagtaaaacactcctcagaaaatgcagaagaactgaaataataacaaacagtctctcagattacagcacaatcaaattagaactcaaaattaagaaactcactcaaaaccgcacaaccacatggaaattgagcaacctgctcctgaataactcctgggaaataataaaattaaggcagaagtcaagaagttctttgaaactaatgagaacaaagagacaatgtatcagaatatctggaatgcagctaaagcagtgttaagagggaaatttatagcactaaatgcccacatcaaaaaactagaaagatctcaaatcgacatcctracatcataactaaaagaactatagaatgaagagc

SEQ ID NO: 821375 - DNA, 658 bp, Homo sapiens
gtaagagtaaatataatgaccttgtcttgttgctcctgcccttctttaagcctgtcgaccggtgccattcacttggccccagttaggattctggccccagtcctccttaagcaagtccttgaatgccagatctaagtattataactcggttcccatgcttttcatctctgaccaagctcccactttaccctgtattttatatccagcaactactcagtcttgtccccgtatggtttgtttgcccctagtggctctgggctgctgtgttaaattactggagcacagagaaaacagcacatgcttcatagaggtcttttgctggttgtctctgctctcttctatcactctttacattagcacataatttttcataatgtagtactttgttgtcataaaaaaatgataatctggggtggttctacttttccttttagaagatttttctgtccttctttatttaatttcctccatcttctcctgcctcatcctcttttcccctttctcttcctcccccctcttctcttcttgcaattattggctccttcttcatgkcaggaggacatgcttcaacaaagagataaaagacatggttcctgctctctgagagctctcagatcaagggggtgggggtgagggattcagaaatgaacatcatctc

SEQ ID NO: 821376 - DNA, 617 bp, Homo sapiens
cctcactgaagggaaacccactcgtctgggctgctcggattcctcagaactgccaggaggaaaggctaagtctgctggtctgcagaggttgtggccacccttcccccataggggctcagtaccagggagatccggttctgtccctgagcctctggctggagttattggagttcctgcagggaagccccacccagtgaggaaggatgggtcagggtcaggcctgaagaggcacccggccacagactgccacagccagtgtattgggttgttggggagaagtcttgggaccaagctgtccaccctccctggctccagcagggaaaaagcacagcctgggctatagagatgggtgctcctcttcccctgccagggagcttagtgtgttaggcagttgcaagtcccagtgctggctactgccccttccccaaggacctcaaatggcttagacagcaggtagcagcagctgcggtggtggttgccccttccccaaggacctcaaatggcttagacagcaggtagcagcagctgcggtggtggttgccccttcccctgggagtttggtagrcttaagcggattccagctgagagggtgttaagagtctacatgttctggggtt

SEQ ID NO: 821377 - DNA, 658 bp, Homo sapiens
cccggccacagactgccacagccagtgtattgggttgttggggagaagtcttgggaccaagctgtccaccctccctggctccagcagggaaaaagcacagcctgggctatagagatgggtgctcctcttcccctgccagggagcttagtgtgttaggcagttgcaagtcccagtgctggctactgccccttccccaaggacctcaaatggcttagacagcaggtagcagcagctgcggtggtggttgccccttccccaaggacctcaaatggcttagacagcaggtagcagcagctgcggtggtggttgccccttcccctgggagtttggtagacttaagcggattccagctgagagggtgttaagagtctacatgttctggggttgggatgctaggcccaggggtatggtttcatgagtgggatcttccgatccatgggttgcacagttttgtggaaaaagcacagtttccctggctgggtagcatgctcactcactgcctccctttgctgggcgagtgggctcccccgcgctgtgtggctctcargtggtccaccgcaccacattgttcttcctcctctttgtgggtcatgccagcctcctagtcaattttgataagagaatctggataccttggttgctggtgaaggattcacac

SEQ ID NO: 821378 - DNA, 647 bp, Homo sapiens
tttctactgcattgtcaagctgcaaagtttctgaatttttatgctgtgtttcccttttaaagtggaatgcttttaacagcacccaagtcacctcttgaatgtgttgctgcttagaaatttctyctgccagatatcctaaatcatctctctcaagttcaaagttccacagatctctagggcaggggcaaaatgccaccagtccctttgctaaaacatgacaagagtcacctttgctccacttgcaacaagtttcctcatctccatctgagaccacctcatcctggaccttattgttcttatcactatcagcatttttgtcaaagccattcaacaagtctctaggaggttccaaactttcccacattgtcctgtcttctgagccctccaaactgttccaacctctgcctgatacctagttccaaagttgcttccatattttcgggtatcttttcagcaacaccccactctactggtaccaacttaacatactagtccattttcacacggctaataaagacatacccgagactgggaagaaaaagcagtttaattggacttaaaattccacatggctggggaggcctcaaaattatggtgggaggcgaaaggtacttcttacatggtggtggcaagagagaatgagataa

SEQ ID NO: 821379 - DNA, 635 bp, Homo sapiens
ggaaaagttttcccttggcccctaaacaacctatatattatgttactaygaaatagaatatgcctcttttctcctctttaatctagtgtgacaaatcataacattcaaacaatatctttttcttttaataaaactgctctactacacagtggctcacacctgtaatctcagaatttgggaggccaaggagagaggattgcttgaggccaaggggttccagaccagcctggaaacatactgagaccccatctctacaaaaaaagttaaaaattagctgggtgtgatggcacacacccgtagttctagctaccagggaggctgaagcaggagttctgggctgcagtgagctatgattgtgccgctgcactccaacctgggagacagagcaaggccctgtttcttaaaattaaaaaaaaactgctctactgcacttcaacaaaaggatgagcctagctaccaaagaaccctatagctgtagctagaccttagtacaagcccttacttctttataagctgtgagccattgagcaagtcatttaaaatttctgaattctctcatgcatgatatatgaatataaagccccatctacctcatgcagttcttgtaagattatttatgtgaaaatacccaacaa

SEQ ID NO: 821380 - DNA, 647 bp, Homo sapiens
gccaaaccccaatttcattcctcctaagctgactactctgtccccatcattacccttactattcagcattgtaattcctacttcatttgtctatttccacctctagackgtgagctgctccaagggaggggacttagccaggtctctctgtctccagaaccatcttatattcctagtacccagcatggtcccaggcatattggcagaggtccataaaatatttgttcaataactggcaaagaagaatgcaggtagtacttgccatgggccctgggtaagactctgagatgtgctggcctcaggtgtaacccagcacattcccagctgtggctgctttggggagaaactccttctgcttaggaaaagcagaaggaagagtaaaggggactttgtcatgcagcttagataccagctcagccacggtcgggtaaagcaccaagcaggctcttggagtccctgattcccagccttggctgttggatggcatttctggcctttcccagggccagaagggtgcccaatgtgctaaagaaagagacacatgcctggaaacattcaccacaagctgagtgaagagcccttgggccttgagtgaacattggtgctacctgccatagtcctggggcagtggtggctgtggggagaga

SEQ ID NO: 821381 - DNA, 647 bp, Homo sapiens
gccaaaccccaatttcattcctcctaagctgactactctgtccccatcattacccttactattcagcattgtaattcctacttcatttgtctatttccacctctagactgtgagctgctccaagggaggggacttagccaggtctctctgtctccagaaccatcttatattcctagtacccagcatggtcccaggcatattggcagaggtccataaaatatttgttcaataactggcaaagaagaatgcaggtagtacttgccatgggccctgggtaagactctgagatgtgctggcctcaggtgtaacccagcacattcccagctgtggctgctttggggagaaactccttctgcttaggaaaagcagaaggaagagtaaaggggactttgtcatgcagcttagataccagctcagccacggtcgggtaaagcaccaagcaggctcttggagtccctgattcccagccttggctgttggatggcatttctggcctttcccagggccagaagggtgcccaatgtgctaaagaaagagacacatgcctggmaacattcaccacaagctgagtgaagagcccttgggccttgagtgaacattggtgctacctgccatagtcctggggcagtggtggctgtggggagaga

SEQ ID NO: 821382 - DNA, 615 bp, Homo sapiens
atgataaatcaaatattaaaagggaaaactaaaaaacatctccaggcttaaaaataaacctctccctggaccagaaatggtacagaaatgcaaattgttgattgcatgtgaagcaacaggcctgctgggcactggctccagcaacaggcagtggcggctgggaattggccctggcagatccttccaaagccaaaaggacctaagccacgctgactacttaatgccagggattgaggtagggcacacatgctcatgaaaacaggttgaaaatagctagcgctccttgcttcctgggaaagtcagtaagtggcagggtagaaatttgaacccagcagcctggttccagcacctgtgctttcaatcacaatgccaagcatagtgtttacagtctctgacccagaagttctacttcttgatataaccctgggttaactccctacgatgcaacagaaaattgtacaagaatgttcgctatggtattgtttgtacaggtgaaaagagaaaattaagtgcttttaagcaaaggacaaagaaactgagaaatatgtrtataaaggaatattacacagcaatcaaaacaattgatctcaccactagattctaacactgcataca

SEQ ID NO: 821383 - DNA, 382 bp, Homo sapiens
aacctaagtaagcttcaacaaatacttgcaaacaaacagattaactctgtaacaacagcawattcacctgcagataatgcatggctgaccatttaatttcctcttctcaaaaaaatcaaatgtcctatatgctatcttcaaatcctataactaatgctgttgcttgaaatagaatctacatgtttgccaccttacaaaaattttggctttaccacttaccattaccaatgccagatattcaagacatctaaaatactacttttcaaacacccaagagccaagagactgagatgactcaaatgtaatgtgccgctcggctgtcgtctggttatttggagttcaattccagattcagtcctctctgagaaagacagtatttaaa

SEQ ID NO: 821384 - DNA, 602 bp, Homo sapiens
ctgttatggctgtctcaatctgctactggtatttgtatacctattaacgtctctgttggaagctccttgcaagctaagtccatgtctgattaatcakgatttacagtatctagcactaaccagagctttaaaaaaataataataaaataaaaaataacttgttaaaaaaaaacttgttgaaacggatgaatgtgtttaagagagtaaggagacaaaaaagaaccatcattaaaacttggagaattgcggttgggcgcggtggctcacgcctgtaatcccagcactttgggaggccgaggtgggcggatcacgaggtcaggagatcgagaccatcctagctaacacggtgaaaccctgtctctactaaaaatacaaaaaattagccgggcgtgtggcgggcgcctgtagtcccagctacttgggaggctgaggcaggagaatggcgtcaacccaggaggcagagcttgcagtgagccgagatcgcgccactgcactccagcctgggcgacagagggagactctgtctcaaaaaaaaaaaaacttggagaattgcaacaaacatccaaggttttgctttgagcactacatcttgccaattcaac

SEQ ID NO: 821385 - DNA, 673 bp, Homo sapiens
cctagattttgttatcttcttataaagcttttggttaaaactgtacattgtatgtaacatattgtggccactctggattctatttttttcttcagataattatttgactggcattttttgttgtttgtttctttgagccaagttctttctctgtcacccaggctagagtgcagtggcaggagcatggctcactgcagctttgacctcctggattgaagcaattctcctgcctcagtcttctatgtagctaggatcacaggtgcataccaccacacctggctacctggctaatttttaaaatttttttgtagagacggggtctcattttgttgcccagtctggtctttgactcctgggctcaagtgatcttcccacctctgctcccaaagtgctgagattactggtgtgaaccaccatgcctgtttgactatttgtttttaaatgaagtaaacttgccctgactccctgtctccttagtagagtgaagcagtttatattctgcttcgttcttagtttagtgaaggatttggccagtgtttatacttagattgygggggttacacccatctgcagttgccctaattatcagtctttccttctaaattctaaactgctttggcagctctacttctattcgctgttacctcaaataagtcttcagctttctgctacc

SEQ ID NO: 821386 - DNA, 631 bp, Homo sapiens
tataaaactgtgtacttaaatatatatataaatacttaagatataaggcacacagtaaaaatgacatttcattatgaaaaaaataggcgtgtgctgtttgcactttggtgggccattccattttcayatggcattaggatggagccatttgtttgggaggggacagcgctcttctcaggaaggagaccctggtctgcttagtgaggccaaaccccttagcaggagctgagcatgtattctccttggcctctcacctttgttaatttatttgtttggtgaatttgggagaaggaagtagaaaagctcagctcagcacttacgctcttcatcttttgggatctgcctgtttggcagggagaatgtgttctggtctacgatgtgttcagtatagggagggaagagtttcatggctttctagctgtgccagaggtgagtatgttaaattggtgggtgaagtattggcacatgcctccaaatctaaagctatgttcttaaaatgttgtatcagtaataaaggtaccatttttgatctaaaaaagaaaaagctttcattaaaatcttaaaatatcatctagccaaaaacttttcagttctaatttattatgccttaagtatatagatatgtatcacc

SEQ ID NO: 821387 - DNA, 579 bp, Homo sapiens
tgtaaaagcacaaagagagctgttaaggacccacttgaagctcatgtggccagcatccaaaaggtgcttagtttctgttcttaatccctgaacgtgtgtatctgacggtaacactgtggttacagcagtatctacatttgagatgtgataactgccattagtcctgattcctcctttcagtttgtgtgtttagaacacccctttctctaagaatgcaaagtaagaaagtaagatgtaaaaaaaaaaacaaaagaaaaccttaaagtgaaattactcaaaacacacacacacacacacacacacacacacacacacacacacacacacacacactctatatcaaataccaacatgcatttgggttaagggaaggagactaagtcaaatttagtcaaatcttcctgtttggagctaggcttggtcctgtagtcccagctacttgggaggyttacacaggagaatcacttgaacccaggagtttgaggctgtactgcactatgatcgcacctgtgaacagccactgcactccagcctgggcaacacagcaagagtctgtctctttaaaacaaacaaacaaca

SEQ ID NO: 821388 - DNA, 614 bp, Homo sapiens
aatataggaaaaatatagatagccgatagataatcgatagatattctatctgatgatgtaatctttattgctggtatctattttccgaaacatttaaatctgatgaaatttccaattggctctgatttaggttacaattgaatgctagatatgtaatttccccagtggtcatattcctctgtaaagaaaataagcagaaagtcccctaaatgaccctaccgtggtatctgtaaggtattctgaatatttcatattatggtggctgaatacaatatggcaacaaactgccaagtctcgatctgcaggccagctctctctctgtgctttacacctgtgtatctaactgcctactgtgcatctctgataacatgcacactaggctacaatatgctcagcaggctaactgtttattactcttcccctttcccacaaaatacaaaatatctgatcttcctcttatattccccatctcaatttccttccttgccactgcatattagaggcctctgattccctagttcttaacccctawacatcctgttatctcttgattacttcaattgactgtcatccctaatgccatgcttagtttgtgccatcattgtctcttgcct

SEQ ID NO: 821389 - DNA, 614 bp, Homo sapiens
aatataggaaaaatatagatagccgatagataatcgatagatattctatctgatgatgtaatctttattgctggtatctattttccgaaacatttaaatctgatgaaatttccaattggctctgatttaggttacaattgaatgctagatatgtaatttccccagtggtcatattcctctgtaaagaaaataagcagaaagtcccctaaatgaccctaccgtggtatctgtaaggtattctgaatatttcatattatggtggctgaatacaatatggcaacaaactgccaagtctcgatctgcaggccagctctctctctgtgctttacacctgtgtatctaactgcctactgtgcatctctgataacatgcacactaggctacaatatgctcagcaggctaactgtttattactcttcccctttcccacaaaatacaaaatatctgatcttcctcttatattccccatctcaatttccttccttgccactgcatattagaggcctctgattccctagttcttaacccctaaacatcctgttatctcttgattacttcaattgaytgtcatccctaatgccatgcttagtttgtgccatcattgtctcttgcct

SEQ ID NO: 821390 - DNA, 637 bp, Homo sapiens
gtccaggctgtctgcaccaggaagcacctgcaggcccataccaagccaccctcagcatccccagcccatctcccatgctcgttggtgctcaaagtccagaggcagccaaggcagcagtgggctggtgtgtcagcacttccctgagtgcacacacacccagccaggttgtgacagtcacaactttgctctgccctgaagtgggtgccaggagcaggaagagtcagggagcaagagcaagcactttcaaggttgcaggggcagggggtttcctgggtccccaagagctcagggatgctggggtggctgtggctgtgccagggagcacagactcctgccccgccaactcaggaggcagggctctcgcctgttcccagctcccactggttccacagagtacacagccccacttgtgcctccccgactgcagccagtatcctcacagtggccgctccatatgggccattgtcaccatcactattgttgaagttcataaatatacaattcttgaaaaaagcaattgtagttttgatattttcattaacttctttgtactagataaaatgtgaattaagaaggtgctatgatttgaatgtcccmtccaaatttcagctcatgttgaaatgtaattgacattgta

SEQ ID NO: 821391 - DNA, 672 bp, Homo sapiens
acaaaaatctgtaaactcttaagtttagaattttaataggagaacgaaactgtggcctcatagtctttaaattgaacccytgccttgattttaagtcagtaataaaagcagctataaaattatatccttacttttgccatgataatcactcacatggattcaaaatgcttgctttgtaccaagctgtgaacacagatcaacaagatcttaaagagaaaatggatgtgttaacttgcttcaattggccagtggtttcaacaaactgaaaatacataaaattgcaattattctaaggtttcattatgtttaaccataaaacactaaatttatcaatatttaagctttgtgtaaaacatagacagtttcatatctatgattaaaacaaacaagtttcatcgaacaccaatttactaaaaatctcttcccagaagaccttttgtgaagtatttttggttatttctgttgcttagatttgtattttaatttatttgttgcatggttttgttgcttcctttgaaagcgtttttgagttgttttgcagatctcatttcacaagtagttaatgactggatctcaacaataaatgcctttgtgaatttgctactgtgatttttgcagattgttacctcacctcttaaagtggctcattttccttttcttctttcattctca

SEQ ID NO: 821392 - DNA, 541 bp, Homo sapiens
agaaaggatcccaaaaagcagttgtttgtgtgggaaagagagtttctggggtgccagttgagttggtctcccctgtgtgagacacccatggggagccatgggcggcctctgaggagaaaagtctcctttttgctttcatgtctttatgccccgagagcataaccgctcagcggcattccgcaggtagctcagggagataacactcccttgaagcagtggagtataatcaaacatcttggctcctcctgaaacctgctcccacccgttttaagtagtttagacacatggctttgctcaaggaaattcacagaaaccgccactgctatacatcttatccaatgactcacgagttctcctccactgattaatcattttcctcatcctttcctccccgtcccatgtgccctaagaacaaagagcttgtaaaccaataaattgggcggagcctgagakctctgggccctgagcaagcctccgacactccggtcccctggacccgcgttttaaacgtttattctgtctccttctaactcctttgtct

SEQ ID NO: 821393 - DNA, 643 bp, Homo sapiens
aacatgtccttttatgtctttatacaactgttctgatattggggttttaaatatcaacataaaccttgccaaattcttgaggcttatgtgaaggcttcagttcagccatttgttgttcgagtatcttcgtcctgtctggcaccttggttttagaaatagacacggcagcctcagaaaatggaatatccataaatcacttatgatgatggagtgtgactttattttcgtgatcatttttgcccaggtgcctgttactgtgttgctaaaacagaagtagacactattccactgtttggcatggaatcttgacaaagaactatttgcagaggaacaggcttagaatcttagtttgtttcattatcaccaagagtttcaaggtttgaagtgtgcatcctggtagggtaaagtgtttgggaccaagatcaactaccttgctgagagtccagaggaggaactgcttatttctcataatggtcttgaagtagagtctaccatgggctgtctgttgacacgcagcatgcacaataaagaaccttcagttttaattcttggtggcaaagtcacgtcctattctttkgttcttttcaaatccagattgagaagtctggcttatggaagagcctgcccaactcgtgcacttcca

SEQ ID NO: 821394 - DNA, 601 bp, Homo sapiens
aagtgaaaggaatcaagattaaaagtcatatattcagaatacgggcagtataccatagaattcatccttgctccgaaacttacygcctggggcagatgccttactctgctgtgtctaatcagataagccagtgatgtatctttttgcttcagtttcttcatctgggaaatgggaagaccgtgcctacatcatagattgtaatgaggatgaaatgagttaatatcggtgaagtatttagaacagggactaacacataataatcactcaataactgttagctctttatcatctccactacaaaaatacaattaaaaaactagggagaatatatccaaacattattatctacctctgaaaagggctttcttcctctttatagtgtcctgtgctttctccaaattttgtctaacgcccatatactactcagataataaaaaaaataaactttttcaaaaaattagctcagttggtaacttttaacctgaaataatgtttgccaaaagcccctttaatgatgccactctagattcataactgcatcacttttctactgctgccgtaactacttaccacaaacacagtggcttaaaatgatacaaac

SEQ ID NO: 821395 - DNA, 564 bp, Homo sapiens
ccccttaaaattttgaaaataaaaaccaggaggaaattagaaaggcaggaagataaagtttcctttttaaaaaaaaaaaaaaagaagataaagacatttttcagtcaaacaaagctaaggaaaaaaaaccmccccagaagcttcccactaaaggaaatccctttttttttttttttttttttttttttgagatggagtctcgctcttatcgcccaggctggagtgtagtggcaagatcttagtgcactgcaacttctacctcccgggttcaagcaattctcctgcctctgcctcctaagtagctgggattacaggcgcccgccatcatgcccagctaatttttgtacttttagtagagacgaggtttcgccacattgggcaggcaggctggtctcgaactcctgacctcaggtgatctgcccaccgtggcctcccaaattgctgggattacaggtgtgagccaccgcacccagccaatactgacgtattctttaagttgaagaaagatgacttctcaatgaagcaaggagatgccaaaaggagtaacaaccaatagaactagtg

SEQ ID NO: 821396 - DNA, 564 bp, Homo sapiens
ccccttaaaattttgaaaataaaaaccaggaggaaattagaaaggcaggaagataaagtttcctttttaaaaaaaaaaaaaaagaagataaagacatttttcagtcaaacaaagctaaggaaaaaaaacccccmcagaagcttcccactaaaggaaatccctttttttttttttttttttttttttttgagatggagtctcgctcttatcgcccaggctggagtgtagtggcaagatcttagtgcactgcaacttctacctcccgggttcaagcaattctcctgcctctgcctcctaagtagctgggattacaggcgcccgccatcatgcccagctaatttttgtacttttagtagagacgaggtttcgccacattgggcaggcaggctggtctcgaactcctgacctcaggtgatctgcccaccgtggcctcccaaattgctgggattacaggtgtgagccaccgcacccagccaatactgacgtattctttaagttgaagaaagatgacttctcaatgaagcaaggagatgccaaaaggagtaacaaccaatagaactagtg

SEQ ID NO: 821397 - DNA, 607 bp, Homo sapiens
taatgttttattgtcttaaactttctcatcccagaataagatggttagtgtacctttgtataacccgcaggccaattaacaacaacaaattttttacttaagaarggatatatcatccttttatatgaaaaacttctctcagttttgaaataacattagcctgcatcctcttcctaccctcacctacacacttgcacccaccatcacacattaaagccattggcttaaaccaatatgggagtctagtttactatacgcccagaccagcatgtggaacatgcccttatattctgccaagatatattttagctatagttttccaaatattagcagaacatatttatttctttaaaaaatagtgaaataaaaattttgtgaatgtattttaaacctcttatttttaaaaaatgacatagtagcaatttgttctagatttaaagtatatcaagacaaatatacggatgcctagaagctgaaaccctcactgtatcagtatttctaaacattggctgtacatttaactatgtgaagaagttttgggaaatactgatacctgagacctatcctcagcaactctgatttatgcagtatggtgtgtccaaagcat

SEQ ID NO: 821398 - DNA, 606 bp, Homo sapiens
atgaaccaatcaccagggcagggagatgggttgtgggtgaaacatagctaaggcaagtgtcaacatggtagataatgggctagtgtcactaagaagggcaagcagatgccaaagggctggaatatgtcatcycctctcacacagggaagggtaaaaaggacttgggaaaagccatacaatctaccatgctactcactgttcaagtacattaaagaaattatgttgccatatattgttttatactgccttatttatgtgattcacgttagccagtcctgaagccgaaagtgaggtcaacctaccttgatagtgtgggctgagtggagagattaattatccaacaaaggaaatgccatgtgttatttgcaagtaagaaagatactgggggttttggagaggggtgaggagaagagcaattctattatgcaacgagatctacaactgaataagctattcactttagcctgaccagtgtatttttcccctaagcaagctagaaatgcagagataaattgacagatttttttctctttttggtagacaattagattgaaggaaaggtgttgtaagattcaaatattatgtagcagcaaccgattgtatttt

SEQ ID NO: 821399 - DNA, 552 bp, Homo sapiens
tttgatttaatctatattttgtctagcattatcccaacattagaagtagttaatgtatccataggcaattgttagatacatatgtaagaaagtgaaaaaccracagacagacaaaacccacctaagtcaataatattggcaataggatttagaatgctgttatggcacatgagatgctccacatcctacctacatggaatatggggtatgtgtaaagaatattgtttagccctattttttcgtttgtttcttttgaactactccgttttccttaactctccttatctttttctgaatgaccttaaactcaaggtagtcgttgagtgggagggatgatttttagccatctttttcctccaactcaggtagataggatttaccagcttggccttaatttcctcctttctgttaacattgaaaaccatcatactaactgtaaaaatcaaatactgtaataagagtgagggagtgcatgttttaaagtctgtcgctatattagctcataccacatatgtggcaagaagcagatactgtacaaatcagttcaataat

SEQ ID NO: 821400 - DNA, 605 bp, Homo sapiens
atttttcacaatcttaagactcctttgaggtgtgcaggcagatagtgggctgaatttcagcccttacttgttctacacaatggtaggaggtgsccgaagtatctgaaatcaggtaggcattcattaaatatttgtttaataaatgaacttcagggggttggttgtgtccattttcatcagtggagcacgctctccctggtctggatgcagcaaagagactcagcagtgaaccggtggtatgctggtaaatgggtaacaactggatcttcagaagaaacaacaacagcaacaacaacaaccctgatttgtggtttttgtccatttgtagtgtttgtggtataaataatcaattgaatactactaacatgatgttaattgatcacaaaattcctgaaactttaacaattgtctcttaagagctggtacaagccagttacaaccaatcaaactctaccccagtgttgaaccctgggcacctcagattctcagtcagagggaatgacaaatgctaaaattccttgcagcagaggcaaagattgtttatatactgtctgttggcatcttatcggtctgaggatcaggaaatggcttatcttccaagtgga

SEQ ID NO: 821401 - DNA, 557 bp, Homo sapiens
aaagttgcctcaaaggccagaaggcacagattctattgcatacctctgcacatcactrtattaacatatttaaacttggctgaactctcattaatcagtctctactagttattcagtttatctttcaaggcttcatagcatcagttcatctgaactttccagatcagacttctgctattgctcagctgtaatcctactgatatggattaggtgtgtatccacacccaaatctcatgttccattgtaatccccaatgttggagagggggtctggtgggaggtggttggatcacgggggcagatttctcatgaatggtttagcgccatcctcttggtactgtcatcccaatagtgagtgagtgctcatgagatctggttgttgaaacgtgtatagctccgaccccgttgctcctgtgctagccatgtgatgtgcctgtttccccttcatcttctacccttattgtagtttcctgaggcctccccagcagctgagcagatgccagcaccatgcttcctatacaaactgcagaaccaagagccaattagacctcctttctt

SEQ ID NO: 821402 - DNA, 537 bp, Homo sapiens
gtccaagtgtcaccaataatttagaagacgttccaaaaatatagcctgaagagacaaagcaatcatcaaaaccaaactcagatatgacacagatgttggrattatcagacagagaatttaaaaataactaacaattaaaaagttaaaggctctaatagaaaaggtagacaacatgtgtaagagaaatggctgcacctcagtcaggagtaggccaaagcagccttccaaggcagcgtgactcagcgggtttggagtgcaggcacacgaccctgcacagtatgtaaccatgccatgcaaggcacatgagatgaccactcacatgagctcatgcttggcttggagcccctatagtctgtaaaaggtataactaccctgctgatgctgtacaggcagtttggctcacgaccagagagagaataaagccatgtcaagactgcctatgattccacaagtgtttttccagctacaccccacctgcccaccaactcccctcagacctcactttgggctagaatctgacaacatgcaagaccacat

SEQ ID NO: 821403 - DNA, 537 bp, Homo sapiens
gtccaagtgtcaccaataatttagaagacgttccaaaaatatagcctgaagagacaaagcaatcatcaaaaccaaactcagatatgacacagatgttggaattatcagacagagaatttaaaaataactaacaattaaaaagttaaaggctctaatagaaaaggtagacaacatgtgtaagagaaatggctgcacctcagtcaggagtaggccaaagcagccttccaaggcagcgtgactcagcgggtttggagtgcaggcacacgaccctgcacagtatgtaaccatgccatgcaaggcacatgagatgaccactcacatgagctcatgcttggcttggagcccctatagtctgtaaaaggtataactaccctgctgatgctgtacaggcagtttggctcacgaccagagagagaataaagccatgtcaagactgcctatgattccacaagtgtttttmcagctacaccccacctgcccaccaactcccctcagacctcactttgggctagaatctgacaacatgcaagaccacat

SEQ ID NO: 821404 - DNA, 566 bp, Homo sapiens
ctattgatgttcattgatgacattccactgatacgtgaaaacgtgggaaaatagattatcagatgagttattcacaaagtcaaatgcattcacytggaagagctccctttccttctcagattatgacttctaagcttttttggtggaatactgctttttcttttttaaatgaaataatacctttaataaataggtttgtttgtctactttacaatgtgcttttttaaaattttgcataataaaaggccagtttttctgtgctgcactttcaaagaatttaaagtttttcattttttccccctaggtttagaaaattctgggataaactgcttgtagtaatttccttgaaagtgtttatggtatcacagctgtcactagagattttaaccaaccatctgaagtgaattattctctaaagataatgctgagagactagtattaagccatttgctgaattaaagatagaaaaattttgaacggatgaaagctaccaatgtatggagcttctgaaagccatgattaccaggggctgctgtggcttctgtagtgttattggaaacttcatc

SEQ ID NO: 821405 - DNA, 629 bp, Homo sapiens
gtgggagtgtaaattagttcaactattgtggaaagcaatgtcatgattcctcaaagagttaaaaacaaaattaccattcaacccagcaatcccattactgggtatatacataaaggaatataaattatcctaccataaagacacatgcacacatatgttaattgcagcactattcacaatgacaaagatatggaatcaacctaaatgcccatcaatggtagaatggataaagaaaatgtggcacatatacactatggaaaactatacagccacacacacaaaaaaattagatcatatcctttgcagtaacatggatggagctggaggccatcatccttagcaaaccaaggcaggaacagaaaacaaataccacatgttctcatttgtaagtggaggctaagtgatcagaacacatggacacaaagaagggaaaaacagacaatgaactctaccttaggatagagggtggcaggaggtagaggaacagaaaaaaataaccattaggtacgaggcttagtattcsagtgacaaaataatctgtacaacaaacccccatgacacaagtttacctacataacaaacctgctcatgtacccctaaacctaaaataaaagttaaaaaagtgtata

SEQ ID NO: 821406 - DNA, 574 bp, Homo sapiens
taattgatctgctacagggaggggagaatttggagcaggaaagctctcatctaggaacaactgagccagagtcagaacaccttgcgagacagctctgggtatggatttgagccctgccactcatgagctctgagcatattccttaacgtctgtgccttgggttcctcatctataaactaggactaaccgttcacctcacagagtggctgtgaagattacaggataaagtgtatataaaaagccctataggctcagagcaatggcttgcacctgtgattccagcactttgggaggtcaaggcaggaggatcactggagcccaggagtttgagaccagcctgggcaacactgcatgaccttgtctctaaaaataatttaaaaattagccaggtatggtggcgcatgtctgtagtctcaactactcgggaggctgaaatgagccatgatcacaccactgtactgtagcccagtccacaaagcaaggtcccaccccacaaaaaaaaaaaaaaaaaaaaaaaaagccctaaagccctacasaggcctagtacatgaaagcacccccaaaatggcaacca

SEQ ID NO: 821407 - DNA, 538 bp, Homo sapiens
ttttaatcattgatccatttcattgtaatctatttcccacacttagaccaagaattatcttctctaaattagagatgtctagctcctacaatcacattttgcacattagtgtactactcccttcactatcattgttgctttcttctgactatacttaattatcctgcccttataatgacagtaataagaacaggacacatcctccttgccctagagtactatccgtttccacctggaaaaatttaagactcaattcttcctcccttgtccctcccttccaccctctcttcctctctttgctccctctctgaagtgatcattgagaactatgtcccagtcattgttctagaatgagttactgcacaaaatgttcttgtcattatggtgtttacattctagcagcctgtgatttaaaaccacaaacaaaagcwattgcatattatgggagataaaaaattctatggaataaaaacaaagcaaggtaaaaaggctaggtgtttgatatttatagtagtttctattattgctttaacaaatc

SEQ ID NO: 821408 - DNA, 612 bp, Homo sapiens
attattaccatgacttccaatgtaacatataacctaytgagtttgaaaaattaacccaggcttctaagggcatgctctaattagtataaacccttggaacctagttgcatctgaagataaacaaaaatgtttgcttcagaggagacatgtcaggaaacccagttttcctctttttacaatggaaaatggatcaaggaattcaaagcaatcaatcaaccttagtatataggccaactttttttttttaggtcaacgtcttcactgtataatgatccttttgaccttgccatttgaattttcatgaaatgggagagttaacccctacttggaggtttagctctgctacaggctttgaggccaatcctattacttttcagtgggaggattatgagtttattttagaagctcagaatgctcagaatatgcattcccagtctcccagtaattgcacttctaaggagtttctttttctttctttgaaggatttagagtagctttcttggaacactgttaatgtcattcttctaaaagcatcctgtctatcagacttggctgaatgaaaccatcgcaaaactgaatctacagaaacacagtaaacaaacatatagcatc

SEQ ID NO: 821409 - DNA, 604 bp, Homo sapiens
ttcctttcaaagcattttaagattgaatatcttttttaattcttattatattctagatttgatttgaagttattttactatgtttatagtaaaaccacagtactgttattttgtgttttctgaccgctagcttgtgtggttatttttctagatggattatttttcactgtatggactatagacagcatggcccaatctagaatgacataactgtttctctcagtaataattatgaacatcggagtgtaatgtactttcagtcagttccttctgaatgttcgacaagactctccaaaccctgcttttcatgttatgctcataatctgcctatggaggccaaatgtctcatcagtaaagtcttccttgacccccaaaagagttaggcactctacctttcttctctcagaacatcttgcacacaatattgacattgggaattcaattatagttctatgtcatatttatctctgtattctcagtacctagctcagtaaatgtttgttgaatgaatgaatgaatgaatgtacaaatgaacatgcgtggtatgctttgttgtgccaaactggwactttatttaaaggccattccacctgactgctgctgg

SEQ ID NO: 821410 - DNA, 612 bp, Homo sapiens
acactatctgacttcaaaatatatcacaaagctctagtaaccaaaacaacttggtattggtataaaaattgacacatggaccagtgaaacagaatagagagtcygaaattagtccatgtatttacaaccaactggtttttgacaacagtgccgagaatatatattcaggaaaggacaccctcttcaataaatggtgctagaaaaaattggatatctgtatgcaaaagaaggaaactggacccctatctctcaccatctacaaaaatcaactcaagatggattaaagacttaaacataatacacagaactataaaactagtagaaaaaaaacatagaggaaatacttcaagacctcagtctaggcaaagattttgtggctaagacctcaaaagtacagataactatttttataaatagacaaatgggactatattaaactaaaaagcttctataccacaaaaaattgttcatcaacagaataaagagacaacctgttgaatgggagaaaatatttgcaaactattcacctaataagggactaatatccaaaatatagaaggaactcaactcaacaaaaaacaaataatcccatttaaaagtggactaaagaca

SEQ ID NO: 821411 - DNA, 534 bp, Homo sapiens
ggcatacaggctgatttcaaggaactcacacaaaagtggcagagacagttatgaggagcccagaactacaaagagtacagacagggttataatggaggtaagtagaggaaatgtgattgcaaarggggctctcccgagacaatattagtggatctaaggtttacctgaagattcttgatctcaaccttaacaagcaagagtaagccaagtgaaagagaaggataaagatgttcgggggatatgcaatggccccatggcaaaaaaaaaaaaaaaaaaaaaaaaaagaaagatcatgatatgggtcttttgatacggctggcagtccagtgtatatggggaaataaaaagggatgagtcctaggtattttattctctttgtaccaattgtgaatgggagtttgctcatgatctggctctctgtctattattggtgtataagaatgcttgtgatttttgcacattgattttgtatcctgagactttgccaaagttgcttatcagcttaatgagatttggggctgagccaatgggttt

SEQ ID NO: 821412 - DNA, 649 bp, Homo sapiens
tgtatagttatatatgcagtatgattccatttacataaatttcaaaaactgagacacttgtttgcaaatgatcactttagcatgtgaagaagagatggctagtcagagccattccttcattagcccttgttttgttggtaggcaggctactaccccttaaagcagcaccagggactggtttcatggaagacaatttttccacagatgggagacagatagtttccggatgaaactgtcccacctcagatcatcaggcattagttagtctcataaggagtgcacaacctagatcccttacatgtgcagttcaccatagggttctcatttctatgagaatctaatgcccctgctgatctaacaggaggcggagctcaggtggtaatgctggctggcccctgctcacttcctgcagtgctgcccagttcctaacagcccgcacactggtatctggccatggcccacaggttggggagccctgccttcaaggcaggaagttggcccctcacttcctatcctattttatgggctttcttccactacctgtattgaaccacatggttcattgtctatttgcctgtgrcagagtgaaaactgaggtcaaacctgtagtacaaaacctatcaccaattcagtgggtagaaagtaaaaa

SEQ ID NO: 821413 - DNA, 472 bp, Homo sapiens
cattcgtaacaaaacaagaaatacaacaattacagtcctcgtttctgtagctggtcacatggtggttgctggtattcatggttgcctctttccactacccattctgtattcccttkgcactcatctcgcaagctgatcgtggtttacctggtggggtgacccaaaccttcattcttcaggggtgtgggccattcatagtcctgtatggattgttgtcatttttatcgactgtaatcacagggcagggtacagagatgtcctaagggatctccttaagccagacatactcctccttacctccattgtgtagcagttccagttcctcttgggcaggatcaattaccccagccaacactgtaactcccttccttgcctattgattcagaggtgtgaggagcccaaagtggctgggtggctgtcttaacttccagttcagtggaatgattgtaatttttcatcctctaaataatga

SEQ ID NO: 821414 - DNA, 537 bp, Homo sapiens
gaacactgacgccactaaatgctggggtggatgtggagcaacaagaactctcattccttgctagtggggatgcaaatgggacacacaytttggaaggcagtttgggagtttcttacaaaactaaaattttttttgtaagaaaaaaattcattcggtcaccatagagatgtcaaaaattgccaatgctggccgggtgcggtggctcacacctgtaatcccagcactttgggaggccaaggtgggcagatcacttgaggccaggagttcaagaccagcctggccaacagggtgaaaccctgtctctactaaaaaaaaaaatacaaaaattaggccaggcgtggatggctcatgcctgtaatcccaggactttgggaggccgaggcaggtggatcacctgaggtcaggagttcaagatcagcctggccaacatggtgaaaccccgtctctactaaaaatacaaaaaaaatagctggacgcagtggcacgcacccgtagtcccagctactcgggaggctgaggctggagaatcgcttgaac

SEQ ID NO: 821415 - DNA, 528 bp, Homo sapiens
gataatctttaaaaaattgtcaggtttctgtgaggatatagaattttcatcaactgtagatttttccagaaatacttttaacattaatcatgaatgaaatgatttgtgaattattttaaagaatgccataaactaagaagcagagatgttaaaagagttttaaatatgagtgagcaggtgccaatttttaggttgtaaaatctaatcaccatttctgtgtgcctttcgttgttcaagccaccatactccaaaaaacacaatttagatacttttgtttattattttccttgacatacagacaaagaaacttcaggacttattctgtaattcatatttgtgtttcttttgccaaatgaatatttgagttaatagactgaagatctcttgaagtgttctttgatcagytgggtgcaccattcctctttcaagcaccgttaagccagtgtgcttctgacgtgggtagggcagatctgggaggctgtgcacatttgcatctggtgtatgccttgagagaatgctcacaagtgt

SEQ ID NO: 821416 - DNA, 628 bp, Homo sapiens
ttctgaataaattgtgtttggaatttaggtttgtttttttggtttcagaagtggttaataaaaaaaaaaaaagaacggcaagttaaataaacttttattttaaaatttaaaatggtgagggttatcacaatacagtcagaagtaactgaccaaaaatttaagtaacattgatagaggactgtttccttctatttctcagatctgccttcttttcttggtgggagttttaaagcaattgggggccatattgaaaaccccctcctccttgtggtggctccttagaaagtcctggcattcgctctgattagaccaacgtggatcatgtgtctatttatgagccagtcactgtgaaaattgttcagattgacttgggcttagatggcatacatttatctgaagttctgatggagcatggattaaagtcatggagagatgctttaccaagaaaattaaggggttgtaatcagaataaagggaaaatgattgttgttattaaatatgaaagaattctgctyacatcatcttaaaataggttaatatgaactctgtagaaggtactgtgcaaggtactgagcattcagagttgaattagacatggtcctacttttgagaggtttatagtctactg

SEQ ID NO: 821417 - DNA, 617 bp, Homo sapiens
tccaaaaattggaaaaaattaccaccaccaattaagattctagggtcacatcaagacacacatatgaaattacattctttagcacattagggtaaatagaggaggctgtctggaaatagccagaaaaggaatcccactgccttagacccagaccattccctcccagatgcaaagacaatctcttactgagtgtttaccaaatttttcttccgtcctcattcccttcctccatccttctctctctttttctatcttctctcttgtcttttccgttcctttcctcacagttgtttaagagtagtaatcttaaggaaaaagcaccctcattgcatgaaagccaagggcagtcaaggagagctagaagccagccaattataacattaatactagtagaagccagatatacctaactggtagtttgacatgcgaattacaactcttcttatatattccttaaaagtccaacagacttttatactaggcaacattagagaatggtatagtgttgcaattacttgcctacttttctaataaataacagtctctwcgttaaaccatctgtttctcaaatgtatcctaattaggctaaaccataacagaaagaggacaattttctg

SEQ ID NO: 821418 - DNA, 632 bp, Homo sapiens
ataaaacccctgcattcgtccttcaagttcrtgtgcaacctgattcttcctatatgcttggtacctcagtaccaagaggacactgagctggttaacacttaagctgtctgtggatggcaaggctaaaagagctcaccgtagcacaagcctacacaggctttgggagttacaggcgcccactcctagatgctaccatggggccagagccccaaagcacttgccccagctccttcacctgcccatctgcatgctccccctcccataaggggtttgagcaggtgcagtgtctgaacagacaagccacacccctgtcgcacatcctgcgaggggtgtcagggaactctcgcatttcacaaccatcttcctggcacacctttttgccacctgccctcagaccagctggtattattcttcttcttgctggtgagaggaaccaaaacctccgactcacaaacactgatggggagcagtgatatgcattgctcttagcctaggtctactgagtggtctcactcctttggagctacctttgcctgggctatgtggcatccacgtgcttttcttcttacgcaaggcctcatggactacatgttagaggtttttcataatttattatttgttacttactgatt

SEQ ID NO: 821419 - DNA, 632 bp, Homo sapiens
ataaaacccctgcattcgtccttcaagttcgtgtgcaacctgattcttcctatatgcttggtacctcagtaccaagaggacactgagctggttaacacttaagctgtctgtggatggcaaggctaaaagagctcaccgtagcacaagcctacacaggctttgggagttacaggcgcccactcctagatgctaccatggggccagagccccaaagcacttgccccagctccttcacctgcccatctgcatgctccccctcccataaggggtttgagcaggtgcagtgtctgaacagacaagccacacccctgtcgcacatcctgcgaggggtgtcagggaactctcgcatttcacaaccatcttcctggcacacctttttgccacctgccctcagaccagctggtattattcttcttcttgctggtgagaggaaccaaaacctccgactcacaaacactgatggggagcagtgatatgcattgctcttagcctaggtctactgagtggtctcactcctttggagctacctttgcctgggctatgtggcatccacgtgcttttctkcttacgcaaggcctcatggactacatgttagaggtttttcataatttattatttgttacttactgatt

SEQ ID NO: 821420 - DNA, 443 bp, Homo sapiens
tcacacaggataccctgggcctccaagccagattatttgatgtttgcttcttcaagggaggatttttcttcctgtcacttccagagttctcatggttttataaaagacctggagtaaggcagttgacaactagatgcctggcccaaatggctaagatatccagcagactgtgtgacctagagcaagtcacttcccacctctgaaactttctaccctcagttctaacaggaggagctagcaagaagaagcatgaatgtttcttcaagatcaagtgttctatgcatctatgaagcgcaaaaaaaaaaaaaaaaaaaaaaaaaattgtrgttttatgcacaaatactggggtcaaacaaaacaagattcaaatcctgattttaccctttccttgtgactgtaagcaacttttctgagcctcagttttcttaacgggggggcgggat

SEQ ID NO: 821421 - DNA, 443 bp, Homo sapiens
tcacacaggataccctgggcctccaagccagattatttgatgtttgcttcttcaagggaggatttttcttcctgtcacttccagagttctcatggttttataaaagacctggagtaaggcagttgacaactagatgcctggcccaaatggctaagatatccagcagactgtgtgacctagagcaagtcacttcccacctctgaaactttctaccctcagttctaacaggaggagctagcaagaagaagcatgaatgtttcttcaagatcaagtgttctatgcatctatgaagcgcaaaaaaaaaaaaaaaaaaaaaaaaaattgtggttttatgcacaaatactggrgtcaaacaaaacaagattcaaatcctgattttaccctttccttgtgactgtaagcaacttttctgagcctcagttttcttaacgggggggcgggat

SEQ ID NO: 821422 - DNA, 583 bp, Homo sapiens
agagggctagccaagatgtagctgctggtctcctgcttccttaccaaagttcatgatttctgcttcctcccctggctgcagtggaggagcagccagcatccaggctgtttgactcctcagggcctttgcacaggctgttccctctgtctgaagtatatatatatattttttttttgagacagagttttgctcttgttacccaggctggagtgcaatggtgcgatctcagctcactgcaacctccgcctcccgggttcaagcaattctcctgcctcagcctcttgagtagctgggattacagtctcctgccaccacacccagctaattttgtatttttagtagagacaggtttcaccatgttggccaggctggtcttgaactcctgacctcaagtgatctgcccgcctcagcctcaccaagtgctgggattacaggcatgagccaccgtgcccggcctctagtatttttttagtgttcccytaacaaattatttcttatagtttcagtctttgctcctcatgtgggctgtcctaagaagttcttaagacttatcataacttgcatttattctctttatctagca

SEQ ID NO: 821423 - DNA, 215 bp, Homo sapiens
ccattgtgtttggtaatatctttatgcctattttataggtaagaaaatttttagcaagcatgcgcatttcayctcccagaggggaggattctggggttcattcttcctggactggaataccctacataatttccaggtgtcagcatttttccctgcagcccattctttctctgctattgttccactcccaccaagtcaatgctgatgcccaaagc

SEQ ID NO: 821424 - DNA, 611 bp, Homo sapiens
gtttttatggatatgatcaaaatggggtcatcggggttgaccctaatccaatatgactggcgccctcattaaaagggaaattttggatactgagacacatgtasggggaagacaatgtggaaagacacagggagaagacagctgactaccagccacggagagaggcctggaacaggccctacctcacagcccttggagggaatcaatccttccctcacaaggaaacaggacaccttggttctggacttctgacgtctagaactatgagacacaataaatttctgttgtttaggctcctgtgttgcttaagctgatctagaaaactaatacattggctcataagctgaattttaagatcctgacacattcaaattactttggacacactaataaatgaaactactatactagaatatctagcattacacttaaatccaaaaattcaactttattagtctccagtcttcaaaatagagttcctgcatgtatatgcatatatatgtatattgatcatcatccttttttcactcaattcctattgagtgttgactatatgagtaaaagtgctgtggcattatagataaaacaggtataatgttatctatctatct

SEQ ID NO: 821425 - DNA, 628 bp, Homo sapiens
gtggatactgccaaatgaattaaatagatgttgatctacatattcggtttatctagagtttatgagaccttcattgtgagatcagtgtaacaagaattcctaagtttttaatgcattcagatcatgatgttatgtgctatagggagtattataaggttttatgtcccttgaaatcaacagctgggtctcattctttttggatctccccatactgaatagtgcagtgttaatcatttagtatgcacttgataattatgttggatttaaaagagtataataggaaatctaaaccagaatcctacaggcaaggaaagctacagaatattgattcaggcttccagacacttatatagggagagcttagattgacaggaatggcattgaatagcagcagatattagcacctcatgtcacctttcctacagtgtgtatacgttttgaaattcattctagctgcctagctagaactagctggaaagatggtataattcataaagctaataacctttttggcacatagtgtgtgacatggcacctggattctaaacacctatatgatttgtgctgccaaaggtgactcagtgrctgggaactttttattcatcttacagtaaactggaggaatttg

SEQ ID NO: 821426 - DNA, 584 bp, Homo sapiens
actggtgaaaattttgtgggttttttgtgtgttttttcctctgttttatgaaatrttacaataaataaccttgcatatgaatcccctctcaattgtgtgaatgtatttataagacatatgcctagaagtgtgattgctcagcaatcttagtatgtaatatctaaaattttagatattaaaagaaaacggctaatttctctttaaagttacactaatttatgttgccaccaagggcatatgagtgtaaacatttcaccacatccttaccagcaccagacagtatcaaccgtttcaatctttcccaatgtgataagtaaaatggctttctattgctttaatttgcatttattttatgatgagttaggtttaaccttttctaatattattaatccttcctgtaaatttttctctgaattttatcctcaggacatttggcattgttcacgatctcatttacttttcatactcatcctataatatgatatgggtatattattatgcacattttacaaaaagaaaccttggtcgcatgatactaagtataacgccctatattatctaactgataaatggcacaggcaaag

SEQ ID NO: 821427 - DNA, 615 bp, Homo sapiens
attatcataaatttaataaggtggtgattcaaagtacagttaccgttccagatgtgatttcttttttctatttttttttttwaattttgagacagagtctcactctgttgcccaggctggagtgcactagcacaatctcagctcactgaaacctctgcctcctcagttcaagcaattctcatgcctcagcctcccaagtagctgggattacaggtgtgtgccaccatacccggctaattttgtatttttagtagagacagggtttctccacgttggccaggctgatcttgaactcctgacctcaagtgatctgcctgcctcagcttctcaaagggctgagattacaggcatgagccactgtgcctggcccggaagtgatttctttactggccacaactaagctttgatctggcaaaagaactttttttttgattagcaaaaacttccaaaagtagtttgtattcacgtgcaaagacagtagtatattcttttaagacctctcaaactctgtgttttaatagaggatgcaaagaccttgatatttcaccattccttgaggtatctatttttttgcttattaaattgatggcatcgtgtttatttgacctttaaata

SEQ ID NO: 821428 - DNA, 628 bp, Homo sapiens
taacttgttcaaatttctcttcaattaggactgtactctgagcctgggcaacatagtgagaccctgtctcttaaaaaaaataaaaataaaaataagccattagttgggcatggtgactcactacctattgtcccagctactcaggagactgagatgagaggatcacttgagcctgggagtttgatgttacagtgcactatggtggcaccattgcctctagcctgagtgtcagagcaaggccatgtctcaaaaaaaaaaaaaaagccgaagattgtaccttgtgtactctgatctacaatggccagaaacatggttcctattgaaattataaattattggtaattatttatacatgaataatctccttaataggtaaacattttcattttcttgctcaaatgtccttacattttattggaacaatacttttgttgcatattttgcaataaattttgacttagaaaaaaacactttgctaaaattttttaaaatactttttagcccttttaaaaaygaaatagccaaacttagatctatttgaaattttttgttaattttttggtaatattattagtaacacgaaacagttcacttcaaataactgtggatagcatcaattaaaaattaa

SEQ ID NO: 821429 - DNA, 628 bp, Homo sapiens
taacttgttcaaatttctcttcaattaggactgtactctgagcctgggcaacatagtgagaccctgtctcttaaaaaaaataaaaataaaaataagccattagttgggcatggtgactcactacctattgtcccagctactcaggagactgagatgagaggatcacttgagcctgggagtttgatgttacagtgcactatggtggcaccattgcctctagcctgagtgtcagagcaaggccatgtctcaaaaaaaaaaaaaaagccgaagattgtaccttgtgtactctgatctacaatggccagaaacatggttcctattgaaattataaattattggtaattatttatacatgaataatctccttaataggtaaacattttcattttcttgctcaaatgtccttacattttattggaacaatacttttgttgcatattttgcaataaattttgacttagaaaaaaacactttgctaaaattttttaaaatactttttagcccttttaaaaatgaaatagccaaacttagatctatttgaaattttttgttaattttttggtaatattattagtamcacgaaacagttcacttcaaataactgtggatagcatcaattaaaaattaa

SEQ ID NO: 821430 - DNA, 651 bp, Homo sapiens
ttatgtaaattaaggggctatgcatgttattcctaaaaatagtagayaattataggcatttcttccccatacaataattataggcttcctgtcatcttttctattctgtataaggtcacagtagtattatacaaaatttacagtatgttacaagttaaaaacacaataattagcaactgtgcatcttcagcaccagtgatgaatgttcacagtaaaagttttaaaaaaaatgcattatttgtttcatgtggacagtacacacttaaatttaatcatcaactcctgctacccaataggcaatattctctcactattataatgctatttgccaagttcatagtacaccctagggctgaattcatccttaacgaagagacaggaagccaaatctctcaccgtcatctcaaccaggtgcaccatattattttaaatttaataattctgttgaacatattgaatgataatgagcaagcttagagaaagtaccaaggattattttgaccattatgatcaacatctgattcaggggaaaaaaaaatcttctcactaaataatgtagggagttcacaggattgcttactatgagtgttattttttttcctcctgcttgtttatatcattcattcaaagggaaaaatgttagggatatta

SEQ ID NO: 821431 - DNA, 673 bp, Homo sapiens
ccaccttgacctcctaggcccaagggatcctcctgctcagcctcccgagtagctaagactacaggtgtgcgccaccatgmctggctaattaagaaaaaaattttcttttagagtgacggggtctcactatgttgctcaggctggtcttgaactcctgagctgaagcaatcctcctgtctcagcctcccaaagtactgggattacaggcatgagacactgtgcctggctgaagcctaaatttgttcctaccatttattttctgtctctaagccattctcttgataaaagagatatcattctttcctccccctcaagtttcatggtgacttaacctttcaaaaaagcctttcttagagaactttgtcaaaagctctttaaaagtctaagtgggttataggtttttcctcattatacctactcctcctttactttcttaaagaattccactaaatgcatgtttcatcacctgcatctgcccacgcccacattttctttgtgacccaaggcaattcccacctccttcaagaagccttcctggacactatgcctcagcgactccctctccactgaacttctccagtatttattgcctggagcagtcaatctggcatttacctgctatttacttcttgcttgcacctcacgttcccaataagatgatcatcccttaagc

SEQ ID NO: 821432 - DNA, 563 bp, Homo sapiens
aggacaggccgagtgtgagcagagggctctgagaggggtgtgtctgtggtgctgcctggacccaaggccaggagccgcctctcttgctagcacttggcttcccgtttgtagcraggcttcgtgcctgacctccctctggtcctcacagtggggcctcacatgcagccccaggcccggttttcccaccctgcagggcgacggagatgctctctgcaaatggtgtgtcaggaggacagtggctgctgccacccgtggcacctttttgtttgtgtttttctgcggcgttccatatgagagaagtcagagtgtgtgtggccactcatctcctcttgtcactgttttttgtccctctctagtaacttcaggtctgcattagcaggggaaggacaagctgctgtggcactacctgagtagacatcatttatatggggatgttcaggggagcaaggggggcatcccagagaggggtgttcctgagcagctcgtctctcctaggcctgtggacacccatgcaggttctggggatcctgaggaccccctgctcttcctctcccctgtgctac

SEQ ID NO: 821433 - DNA, 533 bp, Homo sapiens
tctcttttcttcctttagagtaagtattttttattttattccattttcactattggtatattatctataaattctttgttgttgttccattttagtgggtttacaatataaatctttaacttatcacagtctgtcatcaaataatggtataccccttacatatgttttaggaaccttacagtggtaaaaatatcagttccccatcctgtacttgttgctattgttttcatgcattttattctgtatatattataaactctacaatctatcattattactttttgtttaaatattaaattctttaaaagagatttttaaaaataagaaaatagtctttcatattttctcatgtatttgccatttttattgttttttttttcttccatatttgagatccaaatttctatctggtatacttttccttctgyctgaataactacctttagtatttttttgtagtacagatctgttggcaatgattatctgaacttctgtatgtctgaaaaagcctttagctaatttttgaaagtttt

SEQ ID NO: 821434 - DNA, 598 bp, Homo sapiens
agaaaagagaattcagaaatagactcacacatatataggcaaatgattcacaacaaaggtacaaagacaatttaatggagaaattagtcttttcaataaatagtgctggaacaatcagttttccacatattaaaaaaaaatcttcaatctgcatcttataccatatacaaaaattaactcaaaatggaccatagacccaaatgtaaaacctaaaactataaaacttctagaagaaaacacataaggctatgggttaggcagatttttttttagatataacaccaaatgtccaatccacaaaataaaaaaaaacataaagtgaactttataaaattaagagcatctgctcttcaaaagactgctaggagaatgaaaagacaatcacagactgggagaaaatatttgcaaatcatacatttgttaaaggatttgtatccagaatatatatagcactctccaaagttactaataagaaaacaaacagtccaataaaaaatgtatsaattattaaacagatatttgaccaaggaagataatgatagcaaataaacaaaagtaaagacacaacataactagacactagggaaatgcaaattaa

SEQ ID NO: 821435 - DNA, 515 bp, Homo sapiens
tattttgatggaaattatttgaaggcaytggaatacaaatctgtgtgaagtgagttaaatctccgcaaggccaagatacactgtgtttaattacaccttcatggaaactcaattatatccttcttgctgatagaaaactgaattccttaaaaattaaatgaattaaaatttgtgtatgacaggactattatacccataacagttccactgcaagtacatgagactgtcatggcaataactgaaaaactaaaggagatgtctatgtagacagctgctcatttactgcctgaggctcagaatcaatcataactccaggtgaactgaatccctcagagcaccaagggaaacctgagaagcattccaggagacctccgtttgactggcttttcggatatatataacacaggctgaagtgtgctgtcaaaactcatcatttaagtattgtaaactccattaaaatattcctttaaaagagaaagagctgcagacttgatacaggaaggatctcttccatg

SEQ ID NO: 821436 - DNA, 626 bp, Homo sapiens
ggattacatggcgtaaaacagccccatcttcacttttgcaagttggattcctatcttagaaatacaaattgggaaaccaayttagagtattatgtgttgagagctataccctatcaccaggatacacaattggccctgccttgctatccttagctgcccctaacacagctcccagagtcaaggaaggagtgtaacgcagtatcatttgataacttggccactacttaaaacaataaccaatgatgctcagtttcagcctttattatagatggtacctctacatgtttaggaaataatgctcagccaattatgaactattgccttctttccttcctcagctttctagaaggcgtacacaacagtgaaatgagaaccacttagtttcctaggaaatggcccagtgaaatttttgcacatcaaaacttgaatgacccaagccactgatttcaggttttcatttttgtttttgactgagaaagctattataatagtcttaagaggggcagtatctctcatgaagcttcatttcctcaagatttttaattataaaaaatactatatgggagattaatattttaatataaatttctttatacctatatccacatatagaaaaaaatacaaaa

SEQ ID NO: 821437 - DNA, 626 bp, Homo sapiens
ggattacatggcgtaaaacagccccatcttcacttttgcaagttggattcctatcttagaaatacaaattgggaaaccaatttagagtattatgtgttgagagctataccctatcaccaggatacacaattggccctgccttgctatccttagctgcccctaacacagctcccagagtcaaggaaggagtgtaacgcagtatcatttgataacttggccactacttaaaacaataaccaatgatgctcagtttcagcctttattatagatggtacctctacatgtttaggaaataatgctcagccaattatgaactattgccttctttccttcctcagctttctagaaggcgtacacaacagtgaaatgagaaccacttagtttcctaggaaatggcccagtgaaatttttgcacatcaaaacttgaatgacccaagccactgatttcaggttttcatttttgtttttgactgagaaagctattataatagtcttaagaggggcagtatctctcatgaagcttcatttcctcaagatttttaattataaaaaatactatatgggagattaatattttaatataaatttctttatacytatatccacatatagaaaaaaatacaaaa

SEQ ID NO: 821438 - DNA, 611 bp, Homo sapiens
attctggaaacgacaaattagagagcaagctaaaaagataaaagaccttctgaagattatttacatttcaaatttttgacatggaccattytgttcattgatgagataaagaatctggccagcttggaagattaatttccttcaaagagttcacttacacttattttacaaaagtaaggcattgaaacttgtgctaaagaatgattttgtccatttaaatggatctgtgcagaaaatttaatacctttcatacacttggtaaatcttatctttaatagaaatttttattgcatatactaaaaatagttgaaacatggactcataaataaagtttaacatttctggtatgaaagagaatgagaaagttcacattagaagttgagcatgcaaataattcatgagttcattcaacaaattatgattaagcaatggctatatgctagggattatattgcaccataagtatacattggagaataaaatggggattaaaaaaacttatttttgcttgagtacagttggaaatataaataataaataaacatgtatataataatgactcttgaaaagtgtatgaaaaactactgacacaataccataaaggaagagca

SEQ ID NO: 821439 - DNA, 601 bp, Homo sapiens
acagtaatgtgagaggtgggtgcttgtggacacttgagtattctggcatttgtaccaagcccacaggggccatcttgaaggagaagcttgtgtctctycttcccttagggatctatctgaacattaagaggttatcactagtgccgttatgggctttagatgtttccactgatatgacatttggatttcaatggcagttttatggctctctttatagctgtgatcagagcggaggtggtgtgtccatggttgcactgcctatcaggctagggacagttgtctgttggtccgaatgggctgggaaccacacaccctggttctgctcctggctttgccagtcacctgctggatgccactgagtaagtcacataagattacagggacctccctttcttctgtgcgcagactaattgcctgtggcaaatgttgcctgcaaatttcaagggcaattgagtcctgtgtgcttccccacttggcttctcttttttcttctccttctttttttcctctctctttttttaaggccatgagttgccaattttatgtgcaattgagttgtgcataccccaagctaagtagggcacctcaattgcactttaaa

SEQ ID NO: 821440 - DNA, 628 bp, Homo sapiens
aacccctgcattcgtccttcaagttcrtgtgcaacctgattcttcctatatgcttggtacctcagtaccaagaggacactgagctggttaacacttaagctgtctgtggatggcaaggctaaaagagctcaccgtagcacaagcctacacaggctttgggagttacaggcgcccactcctagatgctaccatggggccagagccccaaagcacttgccccagctccttcacctgcccatctgcatgctccccctcccataaggggtttgagcaggtgcagtgtctgaacagacaagccacacccctgtcgcacatcctgcgaggggtgtcagggaactctcgcatttcacaaccatcttcctggcacacctttttgccacctgccctcagaccagctggtattattcttcttcttgctggtgagaggaaccaaaacctccgactcacaaacactgatggggagcagtgatatgcattgctcttagcctaggtctactgagtggtctcactcctttggagctacctttgcctgggctatgtggcatccacgtgcttttcttcttacgcaaggcctcatggactacatgttagaggtttttcataatttattatttgttacttactgatt

SEQ ID NO: 821441 - DNA, 628 bp, Homo sapiens
aacccctgcattcgtccttcaagttcgtgtgcaacctgattcttcctatatgcttggtacctcagtaccaagaggacactgagctggttaacacttaagctgtctgtggatggcaaggctaaaagagctcaccgtagcacaagcctacacaggctttgggagttacaggcgcccactcctagatgctaccatggggccagagccccaaagcacttgccccagctccttcacctgcccatctgcatgctccccctcccataaggggtttgagcaggtgcagtgtctgaacagacaagccacacccctgtcgcacatcctgcgaggggtgtcagggaactctcgcatttcacaaccatcttcctggcacacctttttgccacctgccctcagaccagctggtattattcttcttcttgctggtgagaggaaccaaaacctccgactcacaaacactgatggggagcagtgatatgcattgctcttagcctaggtctactgagtggtctcactcctttggagctacctttgcctgggctatgtggcatccacgtgcttttctkcttacgcaaggcctcatggactacatgttagaggtttttcataatttattatttgttacttactgatt

SEQ ID NO: 821442 - DNA, 545 bp, Homo sapiens
aattctgttgccaggccacacaaaacatccacagataactccccatagtggccctaaagactttcccatatactgtcctcgctggcatcatcttcaaatgtttctgcatgttcacttaaaatatcattccacaaaaagtctacaaaaacacaatcttcacatatgtggagaaaccaagaagtacatttataaaaatgttaagtggggaggtctacatgtgtaaggattacagctgatttttgttaccttttatgtttttctttttttcccctctaattgtgttttacatttgaggcatgtaataatgatgacgatgaaattgattggttaggaatgtttgttcaaaaacaattaatatagaccttgggtattaatgtcactgcttaactttaaaagtacactatatatgtaaatattttatatatatatatatatatatatatatatatatatatatatatatacayatacatacatacatacatacatggaagcccacagaatccaaggaaaggttgaccaacctcagaaaggtcaaccactag

SEQ ID NO: 821443 - DNA, 622 bp, Homo sapiens
catttatttcatccatgtgatttataatttatttgtgaatttagttgtcattttaaaaattaaattaaaagaaatgatctccccctctttctttccctcttctgcccagcccaccctctctcactgtttatgctrtattcttttcttttagtggggcttggagggttgactaggagacaaaatgttcgtatcggaaacatgccaatttgtcttcttttgctttcctcctttaccttttatttttttcttgttcatctttaaaaaggcaggtaactggtcttcctatttgccagaaaaaggatgttcacctcaaatgtgtgaattcttctcttataacatgagatccaggaatgttgatagtctctcagcttcccagggaaaggtggtccctgtcattggtaacttggactctttgattcatctctggttttactgacactcgtgcatcagaatccacctcactcaagacagagtggattccgtctcaaagggtaggtgtccccagatttaaatttttcccatctgtagtgtaagcaggctctttaatggaatttgagctttagagaaaccctgtatgtagtaagcatttgatttggtgtggttacaggcatttttctctttt

SEQ ID NO: 821444 - DNA, 409 bp, Homo sapiens
agcatcatgaaaagattaaggctcagtggctggggtgcaaattggtctgggctgtttactgcatgaggaatgccttccctccgtcctcctctcccagtgcaatcccacacacagagacaaataccttgccatgtcccactctcctgcttcccagggcttattctggtgtgggcctggctctggggaaagattcacacctgggcaggaaggacaaggtggagagagggcagagaaggaaatgagctccctgacccaggacctggcctgctataatttttggctcaaatagagtgggttgttattggactaaccacraatttgggcctgcttcagtgatttctgagagatgagaggaagtagtgaaaactcagtgttcactccagcctggacaggtatccttagggccagg

SEQ ID NO: 821445 - DNA, 594 bp, Homo sapiens
gaatagaagcaaagttaagctcccctagcattacagaacaatttgcatcatactttttcttctgagaatatcagattctttccaaatactggctggcaaatgccatctttgtgccatgaatttctgaaagccaatttgtggatctatacacagaaaattattaggaaagaacaccatagtagtctttgttgctagaatctgttcactgagcaatggcaaagctattaacatgcttgatattaacctgctaagtgagtcagagagctgcttccattctgttttaagcagagcttgttttggatcagaaacctgtaatctacacaggtaatgctgaagttaacatcaaaataagagggacagagctgtttctgtgaatgccacacattttcttgagtgaaatatgagtcaatatgactgcacttgggaaacaaaagaagaattaaaataggtctaacagaaggtcaaggtagtctgatgaaagggtcaggaagatgtttcctttgggcrtattctgtggctcatgaatctcctgacatcttctggggctaagagcccacatctttctcattcctccatctgggcactgttaggact

SEQ ID NO: 821446 - DNA, 600 bp, Homo sapiens
aaatagctttacttgagaaaatgaaaacaaataccaaaatataaaaatattttaaaaccgttartcaaaggaaatacatttaaaagcagagtcagagatcttctttcttcttttcccaggctgtgttttttcctacctattctattcttactgtttttgaatttgacattaattcagttaaacatttcctgagaaattagggtagggatcaggaggataaaagatgaataagataatatcctttcttatattaggaaagagatttcttttttacactaacaataatacaaggaggaaagataagtactactaagaggtaaaggtaacatgctgttgaagagaatattcatttatgcatttatatactatttacaatccaaaattgtaggattttgagtaggtcaataaaaagacacaattttagaaaaatattttccaaagaataattttagaatgcaaatctgctacccaacagcattaattggtatgcgaaaacaatggccccctccgccttttttttttaaagtaatgtagaaggccttgtgatgcttctagtataccttttaatatcatggtccaagttccaaacttgtttctata

SEQ ID NO: 821447 - DNA, 598 bp, Homo sapiens
caggtctgggaggtgggagatgaggcgtccagtctcagctctgctcctgccttcagttagccagagaatctcacaggtgaacaagaccctagacattctccaggccattttatttacagctagggcaattgaggctcagaatgggacacagacctctgtactcggcttttgatttcactacttcattctttcactcagcaaacatttaacaattattctacgtcaggtattattctaggagaaactggagctcagagataaatataatgcatccttggcctcgaggagaacacaaattagtaggaaaggcaaaaagagagcccgtgactgcagtcagtgctggtgagaactatgaggaggatatgaaggatttgtgggagggtgggaaggggccagcaaggttggcaggatctgtgggcgaggtgatgctcagtgggaggcacgaggagtgagtaagggagttgacaggttgctggaacagataattgaggcagggactggrgtctgaagggggcaatggtaagacaggagaatggagaaagaggtggatcccagacatggggtctgagctgagctggaaatatcaggggttcagccc

SEQ ID NO: 821448 - DNA, 585 bp, Homo sapiens
ttttgacctattgccataccatgtagtcacactggattctaatttttgatttagaaaatgtggtcattactggattatttcgagaatcaaaagaatcaaagaacatcacttctgtgatgtgctaagtgctctatcagtagaaggcattattcaaaactggcttagactagagaggcaggttcagccacttctttctttgtgcattcagggtaacctgtacgtccttccttcccagcaccaatctcctttctttttaatgtgttttaaggtatgtgcctctcattccaaattgtatctgacacagggcctggcacgcagtctaatttctcagtaaagatttattgaatttctgaatggatggataaatggtgggggcatagacaagtagacagcaaattatgatttaagacagaatgaaatgataattaccaccactaacattttttgaggacttactatatacaaatccaatgctagttcctttacatgcattctctcacatcattctcacagctacamcatgaggtacatagcatcgtgtctcttccagatgaggaaacagaggctcagagaggttaaatgact

SEQ ID NO: 821449 - DNA, 631 bp, Homo sapiens
atactttctgagatctggggaaatgcacatttatcacactccctgcttaaatctcactcagctcttcttagtttccaaaaggagcatggcttccttcttttcttgattttcatgacactatatgctcctgattttcctcctacttctgcatctacttctgattgccttctatggaatccattttcctgcccatcccttaaatgcttctgattttttctcttttcttcctcctcctcaaaatctaagtgatcttatccacgttcacagctccaactattctctgtttgtgatgacttctgagcagctctctgtcctgcatataagacctgtacttacctgccacttgagatctcaactcatgtgttccaaagtcacctcaaaatcaacatatatcagactgaacttatcatgcttgctggaaaggcttcgctcctgtctttccaagatgagtgaatgatgtccacgtgccagaatacttctagaaatctaggcataattcatggyccctttcttcctctccttctacatccagtttcatatcagatgtcattttagatgacatctagatttcaggtgtctttcatatatatatacactgctgctactgcaattcaagcaaccactatctctg

SEQ ID NO: 821450 - DNA, 609 bp, Homo sapiens
ctagaagatttaaaaaaacattttttttttttttttggtagaacragggtctcattatgttgcccaggcttatctcaaactctgggcaaaagcagttctcctatttcagccccccaaagtgctaggattacaggtgtgagccaccaggcctggcccctctacaggattttatcaaatatttacatattataaagcctacaggaggctttgataaaaaggcacaagttttgctgttcccatgtttatctccgttcctgcctcttttctgtctcccaagatccctatgtggcgtcagtagggaaaaagtataattaaactctgcaaggagagtttggagaagattcttcctctagaggggattgaatgatgttctttgtctggagtctaggagggaaggtgaaagggagaagcagtggcataagactccaggagactggtccactctccaagtttctgaataaagggagagaaaatacttggtgtttattgggaaggaaggaagtaatatttgtgaatttcttactgttaccagatactgaaaaactgagttcaggagttcagggattgatgttaggtacgaggtccagtttgaatccagatctccctgac

SEQ ID NO: 821451 - DNA, 528 bp, Homo sapiens
gggggatcagtagctttcccggggtcatataactagagagaggtgaagccaggacttgtcaatggtgaggcttcgatgatgagcttgaatttaagatatgtcagatttgaagccaatggagcatatcaaattagcaaagtgcagtggaaacctggaactcaacctcaggattaggccaaaggtatacatttaagaggcatctctgtagagcagagtcgaagctgtaacaatgtaggagtggtctacagcaactgtgtctgttaaagagctgataactgaagtgtaattcccaaagaccaaggtgatatggcagcgggtaaagggcatacgcagtgcagacaaacatgagtttaaatcctggcttcatatttacttgctgtgttggtcatgggcatttaacytcttaaatatcgtgagatacttaatctctttgactctttgcaataaccctgtgagggagatactacctccattttacagatgaaaactgagggttagagaatgtaggagttgacccaaggtcagggt

SEQ ID NO: 821452 - DNA, 572 bp, Homo sapiens
aaactcctgtcctcaagggatccactggccttggcctcccaaagtcctgggattataggcgtgagccactgtgcctggcctacatgcacaaattcttatcttgacaaactgtgaaatgactctcacacctttttcttttccctgtgtcctctcccacttctctggaagaatatgttgaacaggagatgagggaggaagtcaagtgaccactttcctcagagtccagcttctctgtgggcctggggtttaccccagaaccctactggctgccttacaattctacagtctcagcaagaattttagagtgacgcctgtgactttcagaccatgagcttgctgcttctcagtgttcttaatagggacaggagggatgagtggtactaagggtccatgtagacaattgggcggctgctactctcatctgtattgtcatgttatccagaaagttcagctgtaagtcaatagacggattctaagagggagccaagaatgccatatacttytaaactctcatcataaaaacattgtgaaatactttatattttttggtgcctggattatataagtcataa

SEQ ID NO: 821453 - DNA, 556 bp, Homo sapiens
ttctcctgcctcagcctcccaagtacctgtgattacaggcacccatcaccaygcctgattaattttttgtatttttagtagagatgaggtttcaccgtgttggccaggctggtctcaaactcctgacctcaggtgatccacccgccttggcctaccaaagtgctgggattacagccatgagccagcgcgcccagccccaaataatttaaacagttacctcctcctccaggaaatgaagcttatttatccacccctcccttctctttgaatgtgagttggatttagtgattcacatccaaaatagagtacggaaagaagaaaaacagaaaattcgcaatggagaaacctgcaaaccctgccttaaccaaatgaccaaggataatatcattagtcataattcatgttgatatcatgtgccccctaatatgacacgatgaggaaggacttcacctttatgttattctgccccaacaacctataactacagaaaaactatgagaaaaacatcagacaaacccaaatttcaggcattctacaaaatacctgaccatactcc

SEQ ID NO: 821454 - DNA, 719 bp, Homo sapiens
tcttaagtcccaggatccagggccaggaccctttctcttgcccccactgcactacccctcacstgcatgcacacacacacacacaaccacacacattgtgcagtgagcctcagtcacctaacatcactctattgctttgagaacattcgcagagcaggaagtcaagcttgttaacttagccagggtgagcttgaggcttgttccacaggcgtctgtcccaggctggctggtaatacctcattcacggagactctacaccacctcagcacttttttgtgacaagaaaccaaagcttccaggcttcccaaagcatcaacaggcctgctctttatggggccctttagcctgtgatcagccccgaagtgcagaggtcttttgtgggtaacagggcccaacgtaccttagtcaccttcagtatcagatgtcctcccaggaagggccagcacctcccatccaatcttactctcacctcacatcatgcatgggaggccttagtatgagacttcacatctctgggactttccaccgcaggaggccaatccaaagccaagggtttccttctttcatgttatttcatgacataaaagaaatcacccacccagcgagctagagtctgaaaaatctgcatattcccctacattagcatccctttgatctgtaaggatgcagagggaggcataccgcactagactgtggcagcagcttcatcctttccagtt

SEQ ID NO: 821455 - DNA, 719 bp, Homo sapiens
tcttaagtcccaggatccagggccaggaccctttctcttgcccccactgcactacccctcacgtgcatgcacacacacacacacaaccacacacattstgcagtgagcctcagtcacctaacatcactctattgctttgagaacattcgcagagcaggaagtcaagcttgttaacttagccagggtgagcttgaggcttgttccacaggcgtctgtcccaggctggctggtaatacctcattcacggagactctacaccacctcagcacttttttgtgacaagaaaccaaagcttccaggcttcccaaagcatcaacaggcctgctctttatggggccctttagcctgtgatcagccccgaagtgcagaggtcttttgtgggtaacagggcccaacgtaccttagtcaccttcagtatcagatgtcctcccaggaagggccagcacctcccatccaatcttactctcacctcacatcatgcatgggaggccttagtatgagacttcacatctctgggactttccaccgcaggaggccaatccaaagccaagggtttccttctttcatgttatttcatgacataaaagaaatcacccacccagcgagctagagtctgaaaaatctgcatattcccctacattagcatccctttgatctgtaaggatgcagagggaggcataccgcactagactgtggcagcagcttcatcctttccagtt

SEQ ID NO: 821456 - DNA, 622 bp, Homo sapiens
gttgagtgtctagtgcctgtgaggccttataatagtccaaatggggacacaggcaagaacaaaacaggcataatcaaggttgcgttttaatttgtgtgggtcctaagccctttagcctgtttgggtcccttcctttatttaaaaaacaaatagatttatattttaagactgtgttggtataaagacaaatataatccaggctggatttactctctattattattatattctttttgtaactgattttttttaacaattgaaatgaaaacatttttgtgcaccccaaaaagaatgatggcccaaggcactgtgcctactctgctaatgagtaagctggccccaggaatagttcctgcctcacagagtctgctgtctagtagaaaaggcaatctttcaacagatactcatggtaataaccaataaattacagatactctaggcaaaggaccaaacaaacagaagaggaaaagagcttaaaaggccagtggttgcagcccaacaatcaaaagggtgctccacgagactagagagataaactaaagttgaattaygaaggattggggtcttttatcttaggactggtaagaagccaccaaagtccatgaaaggacacaattatcgg

SEQ ID NO: 821457 - DNA, 622 bp, Homo sapiens
tgtttaaaagaatgaaccctggagccaaattgagcaccttsaaatcccagctctaccattctagctctgtggccttgttaatgcttcgtttgtctcatctgtaaaatgggaataagaatagaatgtgcataaagggctgataaaataatatgggtaaagcatttagaacagcgcttggcacacagtaaacactatgtacaccatataaacatcaatcagcctctgcatatttttcacaatttttaatataaggaaaattaaatttgcaggattttccttaaataatttcctatctctgggcaaaggagagatttacctgctataaatggcccatcagaggtgttttaaatgcttgttgaataaatgagtgcatgaataaacaaataatggattggaatgggatgatgatttgatgtccacacaagctcagaattccagcactgtcttccaatcttgagtccttcctgtgaacctaactttgttttatctggtttttttcctcctggctgttaacccctgagctttccaagaatcattagagtggaacttcaatgaatgcttttcataaatgaaaagattccaagcctacagtcagcaaagctcccagcacatgcaaaagcaa

SEQ ID NO: 821458 - DNA, 622 bp, Homo sapiens
tgtttaaaagaatgaaccctggagccaaattgagcaccttcaaatcccagctctaccattctagctctgtggccttgttaatgcttcgtttgtctcatctrtaaaatgggaataagaatagaatgtgcataaagggctgataaaataatatgggtaaagcatttagaacagcgcttggcacacagtaaacactatgtacaccatataaacatcaatcagcctctgcatatttttcacaatttttaatataaggaaaattaaatttgcaggattttccttaaataatttcctatctctgggcaaaggagagatttacctgctataaatggcccatcagaggtgttttaaatgcttgttgaataaatgagtgcatgaataaacaaataatggattggaatgggatgatgatttgatgtccacacaagctcagaattccagcactgtcttccaatcttgagtccttcctgtgaacctaactttgttttatctggtttttttcctcctggctgttaacccctgagctttccaagaatcattagagtggaacttcaatgaatgcttttcataaatgaaaagattccaagcctacagtcagcaaagctcccagcacatgcaaaagcaa

SEQ ID NO: 821459 - DNA, 422 bp, Homo sapiens
aaaggatctgggagaaagatgaacaatcactgatcaggtatgacacacaaaaaaattcaaacaaatccttaacaaaattttaagtcggtwtgtggagggggtactatggtaaaacaaggcagttgggaagataacttcttatactgtggtctcaaaaacctcctaaagggcagtggcgccttgtttttataatcaatactagcagtaccgtacatttataccaagtctaggatttggaaagtggtttgaggattttccataatttcctaggtttatgggttttgcatctttgcttttatgatctcctgttggccaccacttggtttccttgttaccaagtcactggcacgcagccgccatatttttccggtagagtttcattttacagcagcccattctgcaccaggggcttgaggactgca

SEQ ID NO: 821460 - DNA, 422 bp, Homo sapiens
aaaggatctgggagaaagatgaacaatcactgatcaggtatgacacacaaaaaaattcaaacaaatccttaacaaaattttaagtcggtttgtggaggggrtactatggtaaaacaaggcagttgggaagataacttcttatactgtggtctcaaaaacctcctaaagggcagtggcgccttgtttttataatcaatactagcagtaccgtacatttataccaagtctaggatttggaaagtggtttgaggattttccataatttcctaggtttatgggttttgcatctttgcttttatgatctcctgttggccaccacttggtttccttgttaccaagtcactggcacgcagccgccatatttttccggtagagtttcattttacagcagcccattctgcaccaggggcttgaggactgca

SEQ ID NO: 821461 - DNA, 422 bp, Homo sapiens
aaaggatctgggagaaagatgaacaatcactgatcaggtatgacacacaaaaaaattcaaacaaatccttaacaaaattttaagtcggtttgtggagggggtactrtggtaaaacaaggcagttgggaagataacttcttatactgtggtctcaaaaacctcctaaagggcagtggcgccttgtttttataatcaatactagcagtaccgtacatttataccaagtctaggatttggaaagtggtttgaggattttccataatttcctaggtttatgggttttgcatctttgcttttatgatctcctgttggccaccacttggtttccttgttaccaagtcactggcacgcagccgccatatttttccggtagagtttcattttacagcagcccattctgcaccaggggcttgaggactgca

SEQ ID NO: 821462 - DNA, 619 bp, Homo sapiens
ttcagagggtttgagtaactaatccaaaatcacataatatgaatgatgctaaagggcagttagagttaaaattagatcctttggaagccaagrtctgcaatctttttaaatcacctcaccatctcccatttatcttctggttaaatttggagagacattataaaaaggggaaacacatttataagttttctcattgccatcattaacagtggtgtaataatgacaaaataattaaaatttaattagttcttcctttgctgtcactccattgtgagcttatattctaatcttgcatcccctcaagcctaaatgaatctttgaaatgagggttgatttaaatcgatagtggaactttggctatagttactatttctttttttttttttttaattgaaatggagtctcattctgttgcccaggctggagtgcagtggtgcgatctcagctcactgcaacctccgttcgcaccaccccctgcaggttccaagtgattttcctgcctcagcctcccaagtagctgggattacaggcatgtgccaccatgtctggctaatttttgtatttttagaaagcatggggtttcgctacgttagccaggctggtcctgaattcctgtggc

SEQ ID NO: 821463 - DNA, 599 bp, Homo sapiens
caataagttcctcatctccatctgagacctcctcagcctggatttcattgaccgtatcactaccagcattttggtcataacaatttaaagagcctctaggaarttccaaatgtttccttatcttcctgtcttcttttgagctctccaaactgtttcaacctctgtccattacccagttccaaagttgtttacacattttcaggtatctttatagcaacaccccacttcccagtaccaattttctgcattagtccattctcacattgctataaagaactacctgatactgtatcatttataaagaaaagaggtttaattgactcacaattccacaggctgtacaggaagcatggctggggaggcctcaggaaacctataatcatggtggaaggtgaaggggaagcagacacatcttacatggctggacatggaggaagagaatgaaggggaaggtgccacacacttttaaacagccaggtctcatgagaactcactcactatcatgagaacagtaagggggaaatctgcccccgtgacccaatcacttcccactaggcccctcctccaacactaaggattacagtttgacatgagatttg

SEQ ID NO: 821464 - DNA, 498 bp, Homo sapiens
aagaaaagtaatatcaaaaatcagaacagaagccaaagaattaaatagacaaatgatagagaaaatttaaaaacacaagttagttctttgaaaagtttaatagaattggtaaactcccagcaaagtaatcagaaaaaagaagaaacaaaattgtaaaaattaataattaaagaatacatagtgctagtgattctacagatattaaatggataataaaatataatgaacaactttatgtcaattaatttaataacaaatggaatggacatttcctaaacaactcaacttatccaaactgaatcagaaaaaaaaaatagaaaattgaatgatattcttccctctattaaagaactttaatagtaatgggaaactttcccactgagaaagaaggcagaaagaggaaaaacaaaaagtacamggggaaaaaacacaaaagacaaattggaagcacaaaacaacagcagaaggactttcaaatatattagctaagacaggcca

SEQ ID NO: 821465 - DNA, 626 bp, Homo sapiens
ttttttattttttgataggatgatgcagcatcatcaaaaagttttttctctgtaattaatttaatgcaatcccaattttaaaactagtcttttttttttttctgaagctagacaagttaatgccaaagtttatgtagaaatataaacatagactgagagtggacgaagggaggacacagatgctgggccgaagggggtggaagctggaaaccctgcatgagtctaccatgcactgagactccttcctatctcccagtgactcctggggaactagggagttgagtaggcaatgagcaactcactctcaccacggatctctggaatcctgccagcgggagactccataacccccacagacacttgagctgacagggaaagctgcttagaaaaatagtagggacagaactctagatagttgggagcccaaatagtttggcatgggagcatctgtagtggagcatgcccaggacacccatcccctgtggctcgctttactcctccagaagactttagttctagaaaaactgttgracctgaagagtcaggatggttttgtccatgagatgaggctggtccaacctgggcatcccttgcctgctgacttctcctgaggccccagcctggcc

SEQ ID NO: 821466 - DNA, 609 bp, Homo sapiens
caatcagcttgtgccctcctgtaaaaaggcttccatgaattctcttgtcacaggaaatattgatcaaatcacatttttgatgccacgaagctgagggcagacctgggacagatggtgtctcccactgagggagcggaggcccctgggaggtcagtttctcctgctgctgaacaccatcttccaatcacaacagcaaggaattgggaatgtgtcattttagctgtaaaggaatgtacatgcaaaatgtcctgattaatgattattaaaggaaagaccatttctcttttccccaaacccaacctctttgtcacttcagacccctaagggagcctgtgcaacatcggtgaaggttgctattgacacagggtaccgacatattgatggggcctacatctaccaaaatgaacacgaagttggggaggccatcagggagaagatagcagaaggaaaggtgcggagggaagatatcttctactgtggaaaggtgagatcttgccttcagcctccactggggacagtgagaaggtttcagktgttcattttattattcatcttccgtgtgtgtgtgtgtgtaattgcactcatgagtaggcagtacttaataacagt

SEQ ID NO: 821467 - DNA, 476 bp, Homo sapiens
ctgggtatgcaatcatacacattgttgagatctgggtctgattacacctayggcactatgcagtgtatttcagtgtaaacagagtaagtctgagtttgatttagagaaaaacaaaaaatacgctaaaaaaataaaaactacatgtgagggggaaatacttctcttttggcccctttgctcctgatcggtgagcatttttgcatttttcaaagacatcaaagggttgctacaaggcttaccttgctcacaggactttggatgtatcttctagtgctgctgagaagatgtgtcatgacaaggcacatccaccgtggtgtggtgtgtcaaacttgaatcactggacttgagaaaagaaggcagagtttgtgttctgtgctgaagatagcccatgtatttctctcagggaggaaaaagttttcaaggttaaaaaaattgagaaaatgggtaaagaaaaaaataggcttttaaaaaatata

SEQ ID NO: 821468 - DNA, 620 bp, Homo sapiens
agtaaccccgaggactgctgggagccaccagacgcatagaaagagccaagaggtgcatagaaagagccaccaggcacagggaaagagccaaggagagatttttytccagagtcctcaggagggagcatggcaggctgacaccttggttgcaggcttctggtctccagaattgagagataataattttctgttattctgagtcacccagttttttttttttttttttttttggtaatttgctatggcagccccaagaaactcatgcagtgcaatctgtgaggcagcaatggataacaaatacaattaggtgaccaaattactcttttacaacattcattgacttctcaatgactacatatgtggaaaaaaaaaaaaaacacttgtttcttcaggacacttattatttttccttttttttggcaactttgcaaaatttcctctggaactaccttcttcctcaggacaagaggaatcagatatgctaagatataatacgtcccaagttatgtaaagcacagagcttcatacacagaacctgtggtgctacagctctatgtcctaaaacacagcaattctgatacgtttgattttgccgatctccatcatagaaggggaaggaa

SEQ ID NO: 821469 - DNA, 480 bp, Homo sapiens
gtggagactacttctggggtgatgcacacgtcagttacttgcaccagaatctctgtcttggggtctgctttgcagggwcccccgtgacaacaacgcttcatcctccaccaggtgaacttccatttgctttctgaaaaaccaggttcacgcctggctctcagagataaggagtagctaaggctcttagagatacagtcacaggcagagcccactgtgctgatggggagaggacagctggccacagggagatccctgacagccatggcggcagcacgccaagcctgtgaggaggccagcccctgcgacccctgtgtgccatgaggaggccagcccctgcgggccgtgtgccatgaggaggccagcccctgcgggcctgtgtgccatgaggaggccagcccctgcgggccgtgtgccatgaggaggccagcctctgcgggcctgtgtgccagaggctctgcgcccaccgtaatggctcacact

SEQ ID NO: 821470 - DNA, 631 bp, Homo sapiens
ctcccaccagtactggatttctgaggttgaaaagaatctgtgtataagtggaccctctaatgtcaaacccagttgttcaagggtcagcggtaatccgatatgctacatggcttcacttaaactacatgaagctatataagtttacttagaaaagacaagacggtcagttagctgtgtctcggatgctgtgtctcggatatcatgggcactggtgatgcactcttggggggttttctattctcttctctatgctcatatgtttataagaatatgtcacagcccccgagacagagaggaacatcaaaccagaaaacagtcaccccctactccgccccccaccacccctgagcctctggagggacaatagctcctgctcctcccagccctgtctcagaggcatggggctgtctggggctcagcagctacaggcgcattcaggaggaagaggacgtcttaccctggcccccctcagctgggtcctggccctgccacgggtccaaggttctctccccacacccactctcattgccgacrtccaggcagctggccaggtctgggagctgtaatgagctgttgtacgcaaggtccatgtagctgtagaaaccaggaatcaggaaagtgatattctaga

SEQ ID NO: 821471 - DNA, 554 bp, Homo sapiens
atagccaaagcaatcctaaacaaagagaacaaagacatcatactacctgacttcaaactatggtttaaagccacagtaaacaaaacaggttagtactggtacaaaaacagacaaatagactgatggaacagaatgcaaaactcagaaataaagtcacacacctacaactatctaatcttcaacaaggccaacaaaaacaaactatggggaaaggactcctttttcaataaatgttgctgggacaactggctaaccatatgcagacgactgaagctggacaatttcctttcaccatatacaaaaattaactcaaaatggattaaagctttaaatgtaggacttcaaactataaaaataatagaagaaaacctaggaaatactcttctcaacattggccttggcaaggaatttttggctgagtccccaaaagcaattgcaamgaaaacaaaaatagacaagaaatagacaagtgggacttaatttaactaaagagcttctatacagtgaaagaaactatcaacagaataaacagacaacctacagaatggaagaag

SEQ ID NO: 821472 - DNA, 599 bp, Homo sapiens
tactcctgtatctaaagtaaaasttaaaattttcaaaaaaagagacaaaggagatatctactaaagtgtgctaggagaaaataactgtcaatctagagctctattcccagatgaacaatcatttaaaagttgagaaacaaaacatgttgatggaaggaaagattgagcttattctttgagactcttactaaaagaatcagaggaagatatattctgtttaaaaataaattaaacctctaataaggtaagctaccaaaaaatagcagtgggaaaataaagtaatacagattaggtaagtctaaattaaaactaatggtacaaacaattaatgtaaaagatttaaaaaaaacaagttggaagtaaagtactagaaaaatattatatggattgtaggagaaaaaatagaaataattactctaacatttttgtatcatttgggaggagggtaaatatacttattaacttgaaactttgattaagtgcatatgccaaatatttcagagaatcattgaggtagtagactgtgcaatttcccaaagtgtagaggatgagaaaagaaaactttattcaacatgaaacaagaaaggaggaaggtataa

SEQ ID NO: 821473 - DNA, 553 bp, Homo sapiens
tcagatgataccactgtccaggtaaactccttgtctcccgttttctagagagccctgctcttaaaaaacgtggaaagaactcttggtacttcgttctcgtcatctttccagatgaaaatctgtaactcccattccctattataattagccaaataacgtagtgttattatgtaaatagtgccttatgtaaatgttgcaattctaagttgtcatgtctggtggaaatatagaattgtttctttattatctatatatcttcatctgtaatctatatatacagtactttaagaaaatgaaatccaatctttcttttgtctaaataactcacattctttggcttttccctgaaggctttatttccaaccctttaatcatatatcaatcatattcctgcaatgcttgtcataagtgcacatttctgcgccttattcctcaggctcctaaatcggaatctcaagaaagtggggtcctgggaatctgtagtttttacaagactcctaggtgatttttatrcgctgcaggttttgacaaccaccagcatagtgagttggcc

SEQ ID NO: 821474 - DNA, 614 bp, Homo sapiens
aaaataagcaaaatgaaacaggtgaaactaatcttaataatataatttaattcctatatccaagatagtatttccacatgcacttaatataaaaaatattaataagggatttttatattcttttttcaagyccttgaaatctagcatataatttatcctaacagcatatttcaattcaaactagccacattttgagtgctcaattgccacatgtggctcatgactagtattggatgaatggggtttagcaggcgtcataatcaccttgagagtttgttaaaatatagagtgttggcatccttgccgccctgtccccctctccagcttttgattcggtaggtctggggtgaggcttgagaatttgcatttctaagaagtttcccagtaacactgtagctgctggtctggtgaccacacttagagaactacaaccacagatgtagagaaaccctagaggcttgttattaaaaaatgtggtttgtggagcagcaacagcagcagcagctgggagcctgtaaaaaatgcatagtcccagactctccccaagacatatcaaatctgcatttagtactggaatctatgtttcttttttttttttaaaacaggatccccaa

SEQ ID NO: 821475 - DNA, 611 bp, Homo sapiens
tgaactcaacaggaggaggcaggaagatgggatgggaaaagccagttagcagtgttctatttcttgctgttggtggtaggttcaaaggtgrcgcatacataaatgaaaagatagaccatggatacagccatgataagcatatgccatgaaccatacagacatatccaggttgtgtggatctcaatcccgcagcttagacaatttaggggagatgagaccttctaagaaaaaaatatacaaattacaaatttgttcaaatttacaagactgtggactggcaaattgtttcttttttttttattttttgccacaggatctcactttctcacccagcctgagtgcagcggcctgatcatggctcactgcagcctcaacctgccaggctcaagtgatccttccacctcagtctcccgagtagctgggactacaggaatgtgccaccacgcctggctaatttttgtattttttgtaaatacaaaatcagatatcaaagtgatcattattaagaatgagaaattacacatttctaaaatatgacaacataatcatcacaaaatccagaagaataacagtttttattattagtagcaatagacagtcttacacacctc

SEQ ID NO: 821476 - DNA, 606 bp, Homo sapiens
aagctttttcatttaaagtgaacttgaagactggacttaaatcaaaataatgaagagaaaggaccaaaatggggccaaatcagctgggacaatgtgagctctgaccatgcagagaaaaaaggagagcaattcatatgctgaagccaccgcagactccagtagtggatgccagggcaacgcccaggacctcctcacagtcaccagcccagggtacacccaggaccagcccctccgcagctgaggccagaggttccagagggcacatactgtgtcagtctaaagccccaactctcctgtactgccacatcctgtgtatttttaccgaatgaagccaagcatagctttgaaaatatacattattttatgcaattaaaagttactgaggggcaggtgggcctcctggaaagctgtggctattcccctcttcctccacacacaccaggaatctcaggggaggcagagaaaaaaaggagaaagggaaaaaattattgggrtcaattaaattgtagggtttcttgcttctgttacccaatggatagtgatttgaaggagatccgatcaattactagagaaaaaaacaaaattatatatttctctgaatagtta

SEQ ID NO: 821477 - DNA, 606 bp, Homo sapiens
aagctttttcatttaaagtgaacttgaagactggacttaaatcaaaataatgaagagaaaggaccaaaatggggccaaatcagctgggacaatgtgagctctgaccatgcagagaaaaaaggagagcaattcatatgctgaagccaccgcagactccagtagtggatgccagggcaacgcccaggacctcctcacagtcaccagcccagggtacacccaggaccagcccctccgcagctgaggccagaggttccagagggcacatactgtgtcagtctaaagccccaactctcctgtactgccacatcctgtgtatttttaccgaatgaagccaagcatagctttgaaaatatacattattttatgcaattaaaagttactgaggggcaggtgggcctcctggaaagctgtggctattcccctcttcctccacacacaccaggaatctcaggggaggcagagaaaaaaaggagaaagggaaaaaattattgggatcaattaaattgtaggrtttcttgcttctgttacccaatggatagtgatttgaaggagatccgatcaattactagagaaaaaaacaaaattatatatttctctgaatagtta

SEQ ID NO: 821478 - DNA, 619 bp, Homo sapiens
ggatccccagaaatacattttagtagyttccaagtaaattcttttgtaaatggagtttctctccattcataagttttagagcaaaaatgaagccttagtgggtctagatatctggctaacattaactccctgtgtgaccttaaactggtcgtccccagagctttatgcttttatacaattaacttgaattacagcctctccttcttgcccataagaatgataataccacctgcattactcaacttttacgcttatgtgagacacctagccacctatcagaaggtattcaaatgcaaagcattaagtttttacactttaatgtgaagtggaagaaagtcttgattcaaatgcacaatctctacctttctactgattccacatttgctgtcttttactagtgcagttaagtcccaaattagaaacataagtcgccccaacatgtgacaaatgtcctttgttgccagagaaaggacagtggggctgtgtcctcagccttagcaaccagaagattctgcaagaccaggacattctcctgccagagcctgctttagtgtccagtcctgttctccaaagagatggaaaaaaccaagtggaaaagtttcagtttattcaatataag

SEQ ID NO: 821479 - DNA, 615 bp, Homo sapiens
acctcctccaaagaattccaccttcagccaattttacctcagttccacagtggaacttatatgttattaaacttaggcacctccttagctagataaatcttgccattccactgcaaataccagagtgttagcatacgttaaacaaataagagttccttgggaataggcaggacctcttgttatggtaggaagataaactggctcaaagttaatgcataggactccctgtgtacagacaagggtctaagtgctgatcagtgtccagagacaagattggcgccatttttaaagaataaaaatacaagtctgtgttctgcttggtgtgctaaagagcaagttgatgcattttctcatgtatttgatcagcctagacttggtctgcaattaaactaataaactactattaagtgaattctgaaaataatactggagaacatgtatagttttatgtagaaaaagtaaattaaattaattcctctaatttttctgtgtatttttaatttattttcacttaaaaatgagactagccaactamcctgtgattgtaattttaggtaattaattttactagaggaaggtagattgcacataacaagaactgattactgacaatac

SEQ ID NO: 821480 - DNA, 636 bp, Homo sapiens
ggacaagtaaaaaccacatgaacttggactgagaaatttggattttaatgaatttgctgcccatgcctttaacgaagtcatttaatctcactgggcatctgattcctcatctacaaacttaacgttttggtttctagacttcagtagtttgttctaattttatcttcttaaaaattgctacttgttttagacttaaatttgcctttttccccccaaatagatttctgtgcaaagtatagatttcaagcttcttcatttcattcttttggcacctgaaatgtttattaccagggattatgaacaaaagagcttcccgaagagtttatgttggctttttttattggtcatcctgtacactaaatatgtatctatcacattaggcttattaatattttttctaattctcagtatttatccattttcagaaagtttattctgaccagatagggaaatgtatgttaatatattttctgttttaaagtttggattcaaatggttttgtagttcaaactttgcagttcattatgggacctctattaggttcagtaatgatagcatacttgctgtatttcttctaggttttttgttcttttttttcagttayatgaaataaattttgcagcaaaactcgttttt

SEQ ID NO: 821481 - DNA, 422 bp, Homo sapiens
attagaaactaggttgtttgccacagtttcatgattgttggcagaaaacatgtgactcctgggtcacagaaaaagcataaattattacttataacaatagcagtgcccagtttttcatatttgtgcccaattcctgagccccaattcccatagaatgattcaaggaagattagtgacacatatacatatgtcaggttgtttcacagtaaaaaccctagtttatgtaagtggaatcatttataataaagagcaagcacagctaatgtttgcttttgaggaaaagtatcttactatactgtgaataagcctgccctttgttccagagtgtgcarttacctatcttcactcattgcttactatataaatatctttaaaatacagtttaggatagtggcagtcactgtctcttttcataatttgtt

SEQ ID NO: 821482 - DNA, 617 bp, Homo sapiens
ttctcatttttttctcccctcttcaatcattaggcattgaatgttctataatatcttatcatcaatagattacacataatamttttctatagctaatttcctatcttctatatgttttcaaacatatttggcatattcgtaaattttcctatcctccacattggaaaatataccaggagcacaatgctacattactcgctttcaagctctcaatataaaatcaaagatgtatgaagtaaactaaaaatcactacacaatatatatgcaattactgtatgttagacaatatggtcagagcaaacatatatgcacgggagctctgaagaattggtagactagttcttctatagctacaaatattcaaattttttattgggaagaagtgacaagttttactatgtagttcaaaagagcaaaatacattctgggagatagaagagtgtgaataaagataaagtttagggcgctttgctgtggctcacgcatgcagttctagcactttgggaggcagaggcaggcagatttcttgagcttatgacagttcgagaccagcctgggaacacagtgaaatcctgtctctacaaaaaaatacaaaaattagcccagcatggtgatg

SEQ ID NO: 821483 - DNA, 519 bp, Homo sapiens
atcgcagtgttcaattttcacaaytgatatgattgatgtgtcataacatcatattgtaccccataaatatatacaactattatttgtcaattaaaagtaaaataaaattttaaaaggtgcttggtagagtttaccagtgaacccatctgggcctggtgatatgtattttggaaggttattaatcattgatttaatttctttaatatatgtacccattcagattgcttatttcttcttatgtgaatcttggcagatagtgtctttctaggtattggtcagtttcatcaaggctataaaattcttgggcatagagtactttatattgtacctcgattatccttttcatgtctatgggatgtgtattgatgtacctcttttcatttgtttgtttttttgttttaccatattgcctgggctggccttgaactcctgggctcaagtgatcctcctgcctccacctccctaagtgttggaatgacaggcataagccactgtgcctggcctcatttctgagaccta

SEQ ID NO: 821484 - DNA, 622 bp, Homo sapiens
ttcacatttattatctccagttgaatttgaatggaagaaaaccactttggaatcatatacaatgccactgcttcgttacgtttctggaaaattataggcagcatattttatgattaaacactcaggatctagagtcagaaactatttaatttcatttctgcttcttagataaactttgggaaaaataaatccttcaagactcagttcttttattggttaaaaaaaagagagatgatgatactaattacatgttctgggttactgtaagttaaaattgaggcaaggcttataaagtgttcagcatagtttctaacaggggctacaatacattttagtattactgttaaaaacagaatatcctcttaggctagttcataaaaaaacaagcaaacagcatagatatttatgaaaccatctgggtatatttatgtatagagttgactgcatttgttccaaaacattagcatgtttttgatttctaaatcttcttagtcaactaaatcaaaacttgggttttaatgtgaatgaatatcattatcctaayattctaaacatattctagtattttatgaggtagcataatgaaagaatgggataaatagatcagttcacttttgttgca

SEQ ID NO: 821485 - DNA, 544 bp, Homo sapiens
ttatctgtacattgtatagtgaaaaaattaataaaatatgctaaacttctcccttaacttattcaagcaaacattattttgttccttctctgtcccaggtactgttcaagttcttagagatataatggtgaaaaagacaagcaaaacgcatgtcctgaatatcttacattctagcttgggaggacataataaacatgtgtatatttaaatatatagttatttctagtagtgttaacctctgtaaaggaaataaagctgagtaataggatctgcttgggcagattgtttaaataaataatcatgggaggactctgaagagtttaatataaaaatcttattttttttttttttgagatggggtttcattcttgtcacccaggctggagtgcaatggcatgatctcggctcactgcaacctccacctcctggkttcaagcagttctactgcctcagcctcccaagtagctgggattacaggcatgtgccaccacacccagctaatttttgtatttttagtagagatgggattttgccatgtttgcca

SEQ ID NO: 821486 - DNA, 625 bp, Homo sapiens
ctccataacttttaattcatttttwcagatttgtaatcacaaattaatatagaattacaggcttaggctctctaaagctttataaaataattgtttcatttatatattcatttgtttactttttctctccaaggtagaatgaactactaccaatgtaatgtattattatcatttccataaacataaactatcttaatttattaaaactgtacttaataaaattagagagggtggtatatatactagtatgtcaaatgcaatggacttgacagtcaggaattcagtttctagcaagagctgcattaactcaaatgaacaggatcagtagatatctaattacttacctgttaatgtggtcctatacaatgcactcaaagcaaaagttttcctaagtgcttctaacttcaaggacatctaggagacaaagtagaattttccataaattatgtaggttacatagcatggccctatcaacttgtaaaatgtttagaattcatgaaatatataaatgctactatattagacaggtcatggccatgagtgctcaccacagcctcagatttatctggtaaaagcaatagcagttcattctttacatacagatactatcattatgatatccact

SEQ ID NO: 821487 - DNA, 610 bp, Homo sapiens
aatttttgactatttttggaccatctttattccacaggaaaattktgatttctgcaaaagcagctgcaaagtaccacacatagcagaaagacagaaatttatactggggggttggaagatatggctactgagtctgtaattccatttggaggttcaaaaaaccatttttacattgctattatttgtacagaccaagggacctaaattttgaaacagctagacagtgatataaacaaacatttatctctgggggtagaaaattaattataatacaagaatgaaaatgggcaaacagtatggaaggcacccacacctcctagcaccctttggttttctgatggagttctcacttcacacatcagtgcattggattgcagaaaatattgatattttatttcatcaaaagtgccatttggtatgccactattgaaagcttatcgctgtctttttctccttcagcaagtagaggtcaatgaagcagggtgtgttagttacgcaaattcctataaggcactttacggttttcatattggacagtgaggtacacaggatatatttctagggttcgttgctgttaacaaaaagaagaagaagtagcaccatgttgtga

SEQ ID NO: 821488 - DNA, 620 bp, Homo sapiens
aagctgattccgccatgtccaaattaagagcgaccacaactgtgtaaagtttttactaaattattatttattttcamacctcaatatagttgttttttaaatgattgcctcggagagacagcccccaaaacttactggtggtccggtaaatcctggaggcccaacaggaccttgaagccctggcagtcctggtgggccctagaatgcatgagaaagaaatgagttcagatgcgaactgggagggtgaggtggcacatgttcataatgattcagcaaatgcttactggagtccctgggattccgggaaatcctctttcacctttcaacagcatcccgggcacatggccaagtatctcacctggatcaccctagaggatgaagaaagaaaatagaaagttgcaaatatcgacattcatgtaaagaagctgaaaactctttgatagttggcatatattagtgttacaggactagcctaagtctgggatttagaccccgtctacactggaaatcaatagcctggccatctctcccatcatgattgccgtcttaatggccagcgttaaccactgcctggtcaactgagccgcagccgggactgaatgtagagacggcaaagcaaa

SEQ ID NO: 821489 - DNA, 620 bp, Homo sapiens
aagctgattccgccatgtccaaattaagagcgaccacaactgtgtaaagtttttactaaattattatttattttcaaacctcaatatagttgttttttaaatgattgcctcggagagacagcccccaaaacttactggtggtccggtaaatcctggaggcccaacaggaccttgaagccctggcagtcctggtgggccctagaatgcatgagaaagaaatgagttcagatgcgaactgggagggtgaggtggcacatgttcataatgattcagcaaatgcttactggagtccctgggattccgggaaatcctctttcacctttcaacagcatcccgggcacatggccaagtatctcacctggatcaccctagaggatgaagaaagaaaatagaaagttgcaaatatcgacattcatgtaaagaagctgaaaactctttgatagttggcatatattagtgttacaggactagcctaagtctgggatttagaccccrtctacactggaaatcaatagcctggccatctctcccatcatgattgccgtcttaatggccagcgttaaccactgcctggtcaactgagccgcagccgggactgaatgtagagacggcaaagcaaa

SEQ ID NO: 821490 - DNA, 644 bp, Homo sapiens
agatatcgttgaagataaagccgaagggggcactatgggaagtgctcctgccatmctgtggggagagactttttctaaaataacataggaactgtttgtcagggatggaagagtttggtggtggtggttgtggtcatgtcttggacaccataaaaaaggtgggaggaaaaatctgcagaggacctgctgagacaccgtgggaagcagcctgcatgggggctgccctctgggaaggagcaggctgtgtcgggcaagttgctagctccagggcctgggcacgaggctgtgcaacatgggccggattggactgctcctcacgggaccagcttctcgctcacctggcaaggcccaggcagagaagcctgaggtgggctcccacaatcacagacccagtgcatttggaaacaaacaaacaaaaaacaaaacgccagctctggctcccagatatggatgagatgttactgtcctcctcccacaggcaggtgcagggcttaatccaggtgttctcagacagcggtccctgcaccagcagcatcaccatcaccaccatcacctgggctcttgttacaggtgcagattctggggccccatcctgcaccttgtgaattagcaactctgggctaagccccagcaatctgcgttta

SEQ ID NO: 821491 - DNA, 580 bp, Homo sapiens
tttgaggggtacaaatgcagttttgttacgtggacatactgtgcagtgctgaagtcagggcttttagggtacccgtcacccaaataatatacattgtaggccgaggagggtagatcacttgaggtcaggagttcgagaccagcctggccaacatggtgaaaccctgtcgctactaaaaatataaaaaatagctgggcaggtggtgtgtagtagtcccagctactcgggaggctgaggcaggagaatctttggaggctgggagatggaggttgcagtgagccaagattgtaccactgcactccagcctgggcaaaagagcgagactctgtctcaaataataataataattatatatatatatatatatatatatatatatatatatatatatatatatatatttcattgtgctactactcattaagtaatttaccatccctcatccccctcccacctttccacccttttgagtctccaatgactataatttcacactctataaccatgaagacacttttgaaaaaagagagcaaggtgagggcatctgtgctgcccastatcaaagtccattaaaacaact

SEQ ID NO: 821492 - DNA, 588 bp, Homo sapiens
tctcttcaaacaaacaaacaaacgggaactaacaattctataaactgcaaattggagattcaaattgctatgacaactttatgagaaacctcagcttttttctataaggggacatgatcaagagtgatcccaacagtttctgaatagacaaaaactggtactaacttcaatgtcatcaacaggagaattgatgaatgaattgtgagaacagtgcacaataatgctaatcaagaataaaaactaatggatgtggatgaattttacaaataatatttttaacagaaaacatcattcagaaagatatacatagtatgttaccaaaaatgctttaaatagtccattaataacgtataaattgtggtcaaaagaatagataccaacttcaggttagtggatagatggggagacaggcagagagggagagggataggtgaagggacacagaaggaatttcaatttaattttttaatttttaactttttaaagacttgaaggacctgtaaaataratttgctaatctgggattgtgatcacaggattttcaactgtgtgtgtgtatgtatttgtgtttgtgtgtgtgtgtgtatg

SEQ ID NO: 821493 - DNA, 541 bp, Homo sapiens
ctttttgctactattaaatgatgtaaaatatgtgttctagttagtattatggttaattgcaaccaacagaaaaccctagtacagtagcttcaaacatacragcttttttttttccttctctcatatggagataggcagtgtgggctggtaagataattcaggatgttacgttcatcaggtacattctgggttttgcccgaccgttcttgttgacttctgtcctcatgatgccaagatggttgtctcacctcaggcctgatttactgctttcatcaaattaaggggagagcaaaacatcacagagagggactgatgaaggtgcatacctgctgactccatctttttaaacgtttcctgggaagcctaacctagtaacttccactcatattttattagccacaccaggatatttggccacttctggcctcaagagagtctgaggagaggggtgttttaactgggcacatggctaccctcagcaaaacaagaattctgttaatgaagaagaaggggaaaatggattggtatagtcaactaccat

SEQ ID NO: 821494 - DNA, 629 bp, Homo sapiens
caggtaagaggccttctcttccagaagcccatgccggcagaacacaggataacagaacccaacaggatcccctgatatcccttacctcggagctgggactcttggcctctgttcgtggaatccccagttccaagagtgctgctggtactgctcacttccttgcccacaaccctggggcctttgaaggacaggtcctgggccagccttgccttggctccggacacctgcctcaggcttgccttggctcctgacacctgccccaggcctccttctttcactcttctccaaggcagccactcagtatggtatttaaggctcaaatcatcaaactgcccttgtgaaagccaaagtcctcaacataccgggccaaatagggacattcttttatggggacatcctagagctggggtagggcagcaggtttagcctcccacatgcaactactttgaaatcaccgttaagagtcattcctgatgggatatgacccacgtgaagctcatggaggcaggggccaagcagcagctttcaaggagaggccgtgacccatgctaaagctggtatggagagctgggggccaaatgcctctccacractcacacctaaatcttttcccttttttttgagacagg

SEQ ID NO: 821495 - DNA, 528 bp, Homo sapiens
taattcacagtggatccccttattgatattgggaattcataaagttctactgaacccactaatttctctttcccttgactataatttatcactggattgtgtaactgcattattgataataactgctctgggagaactttccagtatatctgaaatgagataatcataatactgcttaagaaaaaaagagtcataaaattttacacctataatttttcttcagcaatggtgtagatgtaagtttttaaaaataataattggtccccactgagaaaaatgccaattaactgcatactgtcttttgatgaaatgcaatcttccttcttgcttctttaataaagctgcattttttccttttagttaacatttggttaaccttgaaatgaaaatgtatcagtagacttaaaatagtgcgaaaggagaaagtactgtatgactatttaaagcaggaatataaactttgctttgaagtaaagcatttctctatggtccataaaaacmtgaatgctcaatgagggcactgaggct

SEQ ID NO: 821496 - DNA, 641 bp, Homo sapiens
aaggtctctttgtcaactcttgtaggaagtgcctcagagcatttattctgtattcagctgctagataaagggtttgtgggcacattgctggaccgattgtactagaacagaaggtcagtaaaggttcttttcattcatctgatgtgatttattattaggcaggtatttgttatccttctcaagggaaaaaaatatccaaatatggtacttgtttccattttttatctctatgtcttcctccaattccagagaagaaaattagacaccatcttcaacttcattttttgggaagagtatagagtttgaggctctgggaagcattttcagctagttcttcacagaacatatatgggatttatgaagctagtatgatgtataaaatacaataaaagttttccaataaaaatggaaaacttcaactattcctggaatgggaattattagtctatggcttagtataatcccattcatattatgacactagataattagaagagaagctcatgaactttaaattggatggatcaaaataaacctgtaggtaaaactgattaagtagagacaaagtgaagcatgcctattaactgcacttcttaaatttttaaaaaaawtatttttttgatacataaagttgatagaat

SEQ ID NO: 821497 - DNA, 586 bp, Homo sapiens
ggatattggcctgattgttgttggtgtataggaatgctagtgatttttgcacattgaattgtatcctgagactttgctgaagttgatcaccagcttaagaaatttttgggatgagacaatggggttttcttgatataggatcatgtcatctgaaaacagggatagtttgatttcctctcttcctatctgaacatcctttattactttctcttgcttgattgtcctggccagaatttccaatattatgttgaataggagttgtaagagagcattcttgtgctggttttcaaggaaaatgcttccaggttttgcccatttagtataatattggaagtgggtttgtcatatatggctcttactattttgaggtgtgtttcttcaataccagtttattgagagattttagcatgaagggatgttgaattttattgaaagccttttctgaatctattgagaataatcatgttgttttttttctttagttctctttatgtaatgaatcacatttattgatttgcgtwtgttgaaccaaccttgcattccaggaatgaagcctacttcactgtggtggttaagctttttgatg

SEQ ID NO: 821498 - DNA, 633 bp, Homo sapiens
gcgtaacaaaattggcactcatttacctaccacccaacttaagcactakaataataccaaaatctttgcatccacctatgagtttcttccctgtgcctttccattccctcttgatcctcaccaggctaacactctcttgatctcataatatattctgttccattctgagctcaagtttccagcagccttgaaaagtaaatggaacctgccagcctttaacagtttatatactctccctaacctgagataaggagcatgtttaaaaaaagaaatgaagctgatcctgccctcagaaagtttgaaaagaggcatgatgacagcagtgcccatgtgtaggcaggacagccccagggctgagctgaggagcacagcatctgttccagttccttgtgtgcctgcacaaatgccataccccagcaaatgctttccgaataactttgccccttacccttctagatgaagctagtactgtctaatggaaaccgattgtaagcatcaaacataattttaagttttctgggagccacattttcaaaaagtgaaaagaataaagtgaaataaatctattttatttaatcaaaaatatccacaatattatttcaacatatacaaattgaaatcttattattttac

SEQ ID NO: 821499 - DNA, 604 bp, Homo sapiens
acaaaattggcactcatttacctaccacccaacttaagcactataataataccaaaatctttgcatccacctatgagtttcttccctgtkcctttccattccctcttgatcctcaccaggctaacactctcttgatctcataatatattctgttccattctgagctcaagtttccagcagccttgaaaagtaaatggaacctgccagcctttaacagtttatatactctccctaacctgagataaggagcatgtttaaaaaaagaaatgaagctgatcctgccctcagaaagtttgaaaagaggcatgatgacagcagtgcccatgtgtaggcaggacagccccagggctgagctgaggagcacagcatctgttccagttccttgtgtgcctgcacaaatgccataccccagcaaatgctttccgaataactttgccccttacccttctagatgaagctagtactgtctaatggaaaccgattgtaagcatcaaacataattttaagttttctgggagccacattttcaaaaagtgaaaagaataaagtgaaataaatctattttatttaatcaaaaatatccacaatattatttcaacatata

SEQ ID NO: 821500 - DNA, 582 bp, Homo sapiens
taacaaaattggcactcatttacctaccacccaacttaagcactataataataccaaaatctttgcatccacctatgagtttcttccctgtgcctttccattccctcttgatcctcaccaggctaacactctcttgatctcataatatattctgttccattctgagctcaagtttccagcagccttgaaaagtaaatggaacctgccagcctttaacagtttatatactctccctaacctgagataaggagcatgtttaaaaaaagaaatgaagctgatcctgccctcagaaagtttgaaaagaggcatgatgacagcagtgcccatgtgtaggcaggacagccccagggctgagctgaggagcacagcatctgttccagttccttgtgtgcctgcacaaatgccataccccagcaaatgctttccgaataactttgccccttacccttctagatgaagctagtactgtctaatggaaaccgattgtaagcatcaaacataattttaagttttctgggagccacattttcaaaaagtraaaagaataaagtgaaataaatctattttatttaatcaaaaata

SEQ ID NO: 821501 - DNA, 521 bp, Homo sapiens
ctgtataactgtttgaggaaggtaaaattttttccattgaaagatactaaatctgaggatcagaggagagtaagatgtcccagatcacaaaacattcaagagagagagccaggattcaaactatggtcagaatgatggggttgggagattctttatcaatatccaatctgcattccccaattcccaacacatttattttctgttttgctgttgttgtaatttacttttttcctagtgggggcagtcatttttgaaaaatatgtattagtagatgattcaatgtcacttatcttcagtttataaaggcagaattatatgtttggaagagtttcgtagagttttgtttgtttacagtcctcaatatctgctcatcatcctaattgtatttggtttccttttgaaaacagtagctccatctttcctgctgccatttctggtgattggtgctttcatttcagatctttctctctgtrctttggaagaagtgaagtgatcttaacatggctaattggattttcttt

SEQ ID NO: 821502 - DNA, 458 bp, Homo sapiens
tcacaatcactcaatacccaccaacaaggaaagtgtgatggtgaggaagtcagagtgaaaaagacagtgatttcaactgattatagttaaaatgtcttacttttcacattttacaaagacatgtgaccctggaaagccaatgttagcacccatcctaaggctgtgaaggtggtgggggatactgaagcttatttagtttcattatctttctggagcatctctcttctctaatagccattcttaaaaacatgcaaataaaaaacatcttaataatgtaagaattttgaaaattgagtgaggaaagaattcaaattgtattaatgctcctacagtatttttggggtacacaaatgggacaaggtaaactccatccttctaaaatctacaatttcccacagaatgattcatgttycttttttttttaaagcttctctaatgaaacaatttattctaaatgc

SEQ ID NO: 821503 - DNA, 524 bp, Homo sapiens
tatcacatgccagatcttcacctgggagagctacggaagtggaatgcagaaggaaaayagaacatcgataaggtggtaaatgtaaggtgtctgataggaagggccactggactctgcttttgaaatctgtaaagcagagttaactaagccttttgttaagaactgcctgccatggggacagaaaggattcttagatgttatctggattaaaaaaaaaaaagtccagtgaggcgaggaactggccccacatcacacaggaagtcagtggtacagaagagaacaaagtcaggtcctcttactcgtgatgtttggtcctccaatttcatcatacagtctagtttatcaatatccagacatttactgagccccctttacatgcccagtactgttgctggtgtggggaacgtgctgttggggaatgctggaatataataatatcccacacttttattatcctttacaacttacaaagcacttaatatacactgcttatttaaattttggtcctcaaataaatcagaaat

SEQ ID NO: 821504 - DNA, 524 bp, Homo sapiens
tatcacatgccagatcttcacctgggagagctacggaagtggaatgcagaaggaaaatagaacatcgataaggtggtaratgtaaggtgtctgataggaagggccactggactctgcttttgaaatctgtaaagcagagttaactaagccttttgttaagaactgcctgccatggggacagaaaggattcttagatgttatctggattaaaaaaaaaaaagtccagtgaggcgaggaactggccccacatcacacaggaagtcagtggtacagaagagaacaaagtcaggtcctcttactcgtgatgtttggtcctccaatttcatcatacagtctagtttatcaatatccagacatttactgagccccctttacatgcccagtactgttgctggtgtggggaacgtgctgttggggaatgctggaatataataatatcccacacttttattatcctttacaacttacaaagcacttaatatacactgcttatttaaattttggtcctcaaataaatcagaaat

SEQ ID NO: 821505 - DNA, 543 bp, Homo sapiens
ttttgagttctgagcacaggctgcctggaaccacaatagctgctgctaatggaacactgtgggtgtgagatctgcctttccaagtgagtggcagcaaggtggggcttactgccacctgctaaccccactccccttgcagatccttttgtgcagcagaggcagctgtgctcctccatggaacatcacaccagtagccagataattgccctccaattccgattacgcccattgctttcacccccaggtggggagccagagcatagattgcctggcccagcccccgcctggctttgcccctacaccctccctggtagcttaacacaacggacagggacttttgggaactccatcgccctgcccactgccagagtacttaccttgggtaacgtaaggcaagcacaaatctcaccactaccaccgcagctggctctcatttgcaagtttcacctcttggcgggaggccagcggacacagtccattacggcatctgcagcacartaactgggcccaagaaggagaaaacttttgtgcaaccgcagctgt

SEQ ID NO: 821506 - DNA, 593 bp, Homo sapiens
ggagagggagaaaaagcgttacaaggtgtcacttgatttggattgaattaagtcagctgtgggtgctccacgactccttacttgaagtgtgtgtgtgtttgtgtgtgtgtgggtgtacatcatttgtcagtcttcatgtgaatcaacaggattaagttcagacgtgatgtagctgagaatgcaaaaacagagaccaaaggatatgcttatttttgagggtccacgtataccaggtattctaaagctgatttattcaatgtaaggccactgagatgctggcatgggatgtttcttcattagggtttgggacagtactgtggaattgtcctgaactacttatgccagaaaggaatacagaaactcccttgctatttctctgcacggtggagtcatcatttccactaccttcaatcatagacacagaagtcaaaattcccctaggctattctgcctacactgaagtraatttccctggaatctccctacagaaagcagacaggatatttcttgaaaatccatttgatttttctttaggtttgtccatttatttctttgctgcatgccatcttggaagacaaaatcccatcattgtg

SEQ ID NO: 821507 - DNA, 606 bp, Homo sapiens
ctacagaaagcagacaggatatttcttgaaaatccatttgatttttctttaggtttgtccatttatttctttgctgcatgccatcttggaagacaaaatcccatcattgtgtactacccttctaaggaaggacaaagtagtgggcaggaaagaaatgtgaactttttttttttttttgagacggagtctcactctgtcgcccaggctggagtgcagtggtgggatctcgggtcactgcaacctccgcctccagggtcaagcgattctcctgctccagcctcccaagtagctgggactacaggcgcacgccaccacacctggctaatttttgtatttttagtggagatggggtttcgccatgttggccaggatggtctcgatttcttgacctcatgatctgcctgcctcggcctcctaaagtgctgggattgcaggcgtgagctgccgcgccyggccagtaatgtgaactttttaaacaagttaactatttactttggagaaaaatattttaaacattaaagacatttttaaaaatatatatttaaaaaactgctaccactcttttggggggggggttgtctaaacgcttcataaatatttatttat

SEQ ID NO: 821508 - DNA, 603 bp, Homo sapiens
aaaataactctccatatctcactccctaaaattatcactattctgaaacttctatcactataaattggttgcttattgttgggcttttttttttttttttgagacagggtcttgctctgtcgtctggctagctagagtacagtggctggatcatggctcactgcagcctcaaccttccaggctcaaggaattctcccacctcagcctcttgaatagctgggactacagtaggtgcacgccatcacacctggctaattttagtattctttgtagagacgaggttttaccatgttgcttaggctggtcttgaactcctgagctcaagcaatctgcctgccttggcctcccaaagtgctgaggttacagatgtgagccactgtgcccagcctattctttagcttttataaatagattcataaagtatatactgtttggttttggtttctttcattcaacataatgttttttagatttatacatgatggtgagtttattcttttttattgctrtatagcatttcattgtgtaactatattatgctttatttttaccatttgttcgtgatcatttgggttgttcctagtttttggttataaatacatt

SEQ ID NO: 821509 - DNA, 631 bp, Homo sapiens
agtttgttgtaatcttgtaatcctccatttcatcttccttgcactcccctttattgccataaggaagattttatattgagaaaacagaatgagtttatgggcaaacaaacctgtgtttgaattccaacacctccacttgcctgttcatgagcaaagttcttaacttctctgagcctcggtttttccacctgtcaaatggggtcatcaatgctccttcctagggtgtctatgaagactgcctgggactgggcctattaagcaccttgcagggtgtttcatatagagtaggcccttaggcatggtaatagggttttcacttctggacaagataaagtaacagggacctatttaccctcccacctgaaacagccaaaaaaaagaaaagaaagaaaaaagaaaagcacaaaatatttgaaacaatgctttcaaaatacgttagggaaggactatgacccccaagagatgggaaacaaggtgattccctacatgtgccccagctgactgcctggagaaagtttgcaggctgtatgcaggaaggggagacccaggtggagcccgttggactctgtgagttgaagagacagagctaaaagtccagacagaycaaaacatctagagtctgcagggtagc

SEQ ID NO: 821510 - DNA, 600 bp, Homo sapiens
agcacttactcttactgggcactaaacctggggaaatcctcaaaacacctccacaytgcagaggaggaaacggaggttcagccgggttggtggaggacctgtctgaccctgacccccagtcatgagctcacacaaaacttctgcagcactgccctttcttaggatgctgccatcctgggtacctgctacagcccagctccattccacaccttctgctcacttgatcccgtttaattctcagagatctgtgagggagatgccactaccccatttaacagagagagaaactgaggctaaacttgtcccaaagtttactatcactaagcagtagtcaggattaaaaccagatctgtctggggctaaaacctgtgaggtttccatgacagtcttacaggatctcggatttattatgtaatgggtgcttatctttttacgatttgggtgagttctgggtgtgagacatctgactagagacatgtcagtagaaatcattgtcgctgttgctgttgttaatctcctttattcccctggacttagctgaggcttccagaccatccggtgttctgggagctgttcccaagacggatcattctttgcaaa

SEQ ID NO: 821511 - DNA, 573 bp, Homo sapiens
catcatattaataaatgaagaaagagaaaaaataatcatctcatggattcagaaaaagcatctgacagcattcaatattgcttcctgataaaaattctcaacaaaccaggsatacaaaggagcttctttaaacctgtgaaaagccatctatggaaaactgaaagctaatatcatactttatggtgaaagactaaaagctgtttccctatgatcaggataaagataatgatatttattctcaccacttccataaaacactttcatggagtcctgcctggtgtaataaggcaagaaaaagaaatgaaagttgttcacattggaaaggaagaagtaaaactgtatccatacccaacataattgtttatgtcaaaaatctgatgaagcctgcaaaaatctactgaagtaaaaaatgagttattattgttggggaaaatgaaagctctaaataaatgaggagttatactgtgttcattggtcagaagacttattattgttaggatgtcaattctccccaaattgatctatgcaatcccgatcacaatcccagtaggcatttttctgttaatagaaatt

SEQ ID NO: 821512 - DNA, 549 bp, Homo sapiens
tggggaagatagggaaaccccgtttctactgaaaattaaaaaatagcaaaaattagctaggcatggtggcatacacctatggtcccaaatagaggtcgaggtgggaggctcactggagcccggtaggtagaggctgcagtaagccatgatcgcaacactgctctccagcctgggccacagagcaagacccaaaaaagcaaaacaaaacaaaacaaaacaaaaaaacaaaaaaaaaacattaaatcgcaaaaatctactgataaataagttatagtaaaaacaaaggttaaaaagtattcaaaatatatcatttcctaacttaatgtactatgacttcacgtactatgtcttaagctctggaggttactgacatccattgcatccatgtggtgcaaacactatggtgcatctcttctcagctscacatgcaatgatgtcataaaatgggccatggagggggagggcatttatatcactgaagttagcaaacactccaaatccaggtactttatagttttcagagaccccattgttaaacaccaccaaaac

SEQ ID NO: 821513 - DNA, 607 bp, Homo sapiens
taagttagaagcaggtcttgagcccacatttgattgattacaaatcctgcctgcttcccactatacttgtgacttgcaaattaactcatgtgcaaacccccttcaccaattttgtcccagtagcaaaggaactacctatagtatttttaatttaacattttatttggccagggtcatggctcacacctgcaatcccagcactttgggaggctgaggcaggtggatcatttgaggtcaggagtttgagaccagcctggccaacatggtgaaaccccatctctactaaaaacaaaaaaaaattagccaggtgtggtggtgagtgcctgtaatcccagctactcaggaggctgaggcaggagaatcgcttgaaccggggaggcagaggttacagtgagccaagattgtaccacttccagcctggtgacaaagctagactctgtctcaaaaaaaaaaaaaaaaaaaaaaaaaaagaaamctttttatttacattgattcacatttttaaaacttaaatgcacttatttcatactaatactaaaaaagccttttgtcacaatagaaacaagaaaatccaatattgaattttcaaatgaaccaatgaaaggta

SEQ ID NO: 821514 - DNA, 607 bp, Homo sapiens
taagttagaagcaggtcttgagcccacatttgattgattacaaatcctgcctgcttcccactatacttgtgacttgcaaattaactcatgtgcaaacccccttcaccaattttgtcccagtagcaaaggaactacctatagtatttttaatttaacattttatttggccagggtcatggctcacacctgcaatcccagcactttgggaggctgaggcaggtggatcatttgaggtcaggagtttgagaccagcctggccaacatggtgaaaccccatctctactaaaaacaaaaaaaaattagccaggtgtggtggtgagtgcctgtaatcccagctactcaggaggctgaggcaggagaatcgcttgaaccggggaggcagaggttacagtgagccaagattgtaccacttccagcctggtgacaaagctagactctgtctcaaaaaaaaaaaaaaaaaaaaaaaaaaagaaaccwttttatttacattgattcacatttttaaaacttaaatgcacttatttcatactaatactaaaaaagccttttgtcacaatagaaacaagaaaatccaatattgaattttcaaatgaaccaatgaaaggta

SEQ ID NO: 821515 - DNA, 607 bp, Homo sapiens
taagttagaagcaggtcttgagcccacatttgattgattacaaatcctgcctgcttcccactatacttgtgacttgcaaattaactcatgtgcaaacccccttcaccaattttgtcccagtagcaaaggaactacctatagtatttttaatttaacattttatttggccagggtcatggctcacacctgcaatcccagcactttgggaggctgaggcaggtggatcatttgaggtcaggagtttgagaccagcctggccaacatggtgaaaccccatctctactaaaaacaaaaaaaaattagccaggtgtggtggtgagtgcctgtaatcccagctactcaggaggctgaggcaggagaatcgcttgaaccggggaggcagaggttacagtgagccaagattgtaccacttccagcctggtgacaaagctagactctgtctcaaaaaaaaaaaaaaaaaaaaaaaaaaagaaacctttttatttacattgattcacatttttaaaacttaaatgcacttatttcatactaatactaaaraagccttttgtcacaatagaaacaagaaaatccaatattgaattttcaaatgaaccaatgaaaggta

SEQ ID NO: 821516 - DNA, 555 bp, Homo sapiens
cctgggatgacctcttatcattgtctaagcaagttgtagtgccacggtgtgtttcagactatgctatagaaaatctttagcactcaccttaaaagtttaaagtagaaagaacaacctttaacaggaycatagaaaatgttccatcagatcaaaacaaacaagcaaacaaactgaagcaggtcatttttctctttttggcactgtgcaggaccatatgcttccagagatgggaatttaaaaatagcctgtcacacagctcacattgtaatgctgggacatgatgcgggtgggaaagattgcctcacacttaataatagtgacacttcacatttacaccaacctctttgcagagtaaccaagagtatttctcagttctttttttcctttaaaaataatatgatcttcttgataccctgtaagtggaacaggagggagtacaattcttcccaccttacagagaaggcgattgaggcctccaaaggtaaagtgactcactcaggattacagagttacccagggatcaacactgtgctgttcaaaatacaccaggctgcc

SEQ ID NO: 821517 - DNA, 621 bp, Homo sapiens
tgtgcacacacaaacacacacacacacacacatacagatagacaacttttctctggcaaaattattgttcttaaagatattttaaaaaactgaatacatgacttaaatgagtccccaaattttcagtttccagttttcttttgaaccaaattccagagcccatctatgattcttttttcaacttgatgatttccaagttatgatccctgtctaggtttaagttttccaaataaaattatagataacagagctgcaaagatgctttttgaattcctgtccagtatcgtcttttcacagatgataaaaataggtcctaagaaggactgatttgttcacattcacacacttagtaggaaattcaaaagatcaaaaatcaggtattggtttcaagaaaaatgcacattctgtactctattttgccaaattaatcagtattttcttttacctaaaattttagtatgaaatgtacattcctcagtccattgagaagcagaacttamctcaagttcaatcaaggatttaccaatatgctgctttttacaggttaaggttcctagcagctattttaatagcagaagatttctatttgtgtttggtctagccgagatgctggttttaaag

SEQ ID NO: 821518 - DNA, 586 bp, Homo sapiens
catttttgttacaccttagcaaagagcttgattgtattktacccctgccctagggatctgtggaactttgaatttgagagagatgatttagggtatctggcagaggaaatatttacgcagcagagcattcaagatttgtcctggctgcttgtaacaacctgtgctcatatgtgtgagcaaagaaatgacctgcaactgaaacttacatttaaaaggaaagcagagaataaaagcttggaaaatttgcagcctggccatgtggtggaaaagaaaagcccattttcaggggaagaattcaagctacctgcaaaaatgtgcataactaaaaggaaggcaagtgctgatagccaagacaatggggagaaaacctcaaaagcattttcagagacctcccagtagcccctctcatcacaggcccagaggcctgggaggacagcatggtctcctgggcaagacccagggcctcactgccctgcacagcctcaagacactgcctccggcatcctagctgttctagctctagctgtggctagaaggggcctaggtacagcttgggccactgcttcagagggtgcaagctgtaagc

SEQ ID NO: 821519 - DNA, 586 bp, Homo sapiens
catttttgttacaccttagcaaagagcttgattgtattttacccctgccctagggatctgtggaactttgaatttgagagagatgatttagggtatctggcagaggaaatatttaygcagcagagcattcaagatttgtcctggctgcttgtaacaacctgtgctcatatgtgtgagcaaagaaatgacctgcaactgaaacttacatttaaaaggaaagcagagaataaaagcttggaaaatttgcagcctggccatgtggtggaaaagaaaagcccattttcaggggaagaattcaagctacctgcaaaaatgtgcataactaaaaggaaggcaagtgctgatagccaagacaatggggagaaaacctcaaaagcattttcagagacctcccagtagcccctctcatcacaggcccagaggcctgggaggacagcatggtctcctgggcaagacccagggcctcactgccctgcacagcctcaagacactgcctccggcatcctagctgttctagctctagctgtggctagaaggggcctaggtacagcttgggccactgcttcagagggtgcaagctgtaagc

SEQ ID NO: 821520 - DNA, 639 bp, Homo sapiens
actacctccaattggtggtggacactatctttccttaggaaagggattaagtgtaaccttggatccatttctatgtacaggatgtgactatatctcacaacctctcttactaataacttggtagtacaatacaataacttatttcctggattactgcaggattactgttaagtgtattatgggagtaaaggaagggaagcaaataattgtgaccaagagaggagcttaggaaatcacattatttttcttgagcactctctcttgcatcctttaggaggataatatatccctaacgcattgcaccgtgacccacttggtcaataaaatgtcagtagaaagggtgcatgccacatctaaggaaagctttgtcttcctgccacaatcagatcagctttgcctaggtaggggctgttccttcagctctatttccagactgaagacaaataacaacagaaatgcatcgaaaacataacgaggaatgcatgagataaagcttacttgttctaagccactgatatgtttgcagttctttgttaatattgtgaaagctgactgatacaccttctccttcttcaaacccggtttytatttctttaccaactagggtgaccaaagtttcggagagccaacctgggatat

SEQ ID NO: 821521 - DNA, 621 bp, Homo sapiens
acagagccagattccatctcacaacaaaaacaaacaaacaaacagaatattgaactaaaaatagaccattataccaatgaaacagaataccagaagaaaattttttgacccaaattcacataatatataaaaaaaaaatcaattccacgtgaattagagctctttatgtggactaataaagttcctttaaaaaaagaaatcatgatatgagttggctctgtgttcccactcaaatctgatcttgaagtgtaatcctcacatgtcagggagggacctggtgggaggggatggatcatggggatggtttcccccatgctattctcatcacagtgagaagttctcatgagagctgatggttttgtgtccagaattggtgggttctcggtctcactgacttcaagaatgaagccatggaccctcgggtgagtgttacagttcttaaagacagcgtgtccggagtccgttccttttgatgttcagagtttcttccttctggtgggttcctgrtctcactgccttagaagtgaagctgcagaccttcacagtcagtgttacagctcataaaagcagtgtggatccaaagcatgagcaatagcaagatgtattgcaaagagctaaaga

SEQ ID NO: 821522 - DNA, 621 bp, Homo sapiens
acagagccagattccatctcacaacaaaaacaaacaaacaaacagaatattgaactaaaaatagaccattataccaatgaaacagaataccagaagaaaattttttgacccaaattcacataatatataaaaaaaaaatcaattccacgtgaattagagctctttatgtggactaataaagttcctttaaaaaaagaaatcatgatatgagttggctctgtgttcccactcaaatctgatcttgaagtgtaatcctcacatgtcagggagggacctggtgggaggggatggatcatggggatggtttcccccatgctattctcatcacagtgagaagttctcatgagagctgatggttttgtgtccagaattggtgggttctcggtctcactgacttcaagaatgaagccatggaccctcgggtgagtgttacagttcttaaagacagcgtgtccggagtccgttccttttgatgttcagagtttcttccttctggtgggttcctgatctcactgccttagragtgaagctgcagaccttcacagtcagtgttacagctcataaaagcagtgtggatccaaagcatgagcaatagcaagatgtattgcaaagagctaaaga

SEQ ID NO: 821523 - DNA, 599 bp, Homo sapiens
gttcaatatcaggaatctaggacagtgtctgttcagtaaatcagagagttaatgttaaattttatatagcaaagataaaaaaaaagctgtaagaaaaaaattataaagtgttgggagaaagcagkagtgcagttctcacacaaaaaaaataaacttgagagctgaaaatcttccactagctatcttgtgacaatacagtgaagcatgagccccaagcgagggacctgctttggtagtaggctaatgagagactcagaaaacaggtatcctagtgattaaaaggtttctcataggtgattataattgtttttacatgtttgaagtcagcctggttttaatcccaacagaaatttctaatgaatactgcattttctgtggaagcaacaattcataatttccctttattcttgtttgttactacaaaagactctgtctcagagggctttgattaagatgatgagacaataaaacaaatagagagtccattaaatgcctgcctgaaaccagagctgcaccacttaatatgaaagactcttcagaaccaataatgaaataatcatcctttttccatgactgataagaaaatgaaggctagatac

SEQ ID NO: 821524 - DNA, 645 bp, Homo sapiens
acataccactgcctcactcatagactttttagcaatctcttctctggatcctttacaagtttctccttttaaaattgactacttaatgttggatttcctccagacttggtcctaggctccttcatcctcacactctaacctctctctcttggagagctcatcaaccttgtggctttagattccacctatgcacagatgaaccctggaatccaacttcgccttggtctccagttctttcactccttcatgctatttgttctgccagactaccaggtctctccttgaatagtctggtcagaggtcccacatccatcataccccacagcctcatacagatgtcttgagatcagaatggctgggaattccaaaaccagttcacctagcatccagcagttcttctgacctcatgctgctggagaacatcctgtaacagagctcattcacttcaacctccctcagggccatggtttgaatgtgtccccaaagttcatgtgttggaacttaatcccaaacctaacagtgttgagaggaaagacttttaataagtgattaggttaygagggctcggtcctcatgaatggaaatgtcattactgagggattggcttccttattgaatgagtgtttttgttataaagtgagcttg

SEQ ID NO: 821525 - DNA, 532 bp, Homo sapiens
cgtaacataaattggttttctaatttctggctgtttaacattaaggttttcatcttcttctctctctccctcctcctttttctctttcttcttctttttcttgtttggttttagtattataaacagcactgggagagagtaagccccatttttgcacaaatccttgattattattagcataaattcttagaagtagaaatccttcatccttgtgtgtgttaggctattcttgcattgctataaagacatacctgaggctgggtaatttattaaaaaaagaagtttaattggcccacggttctgcaggttgtacaagaggcatggcactggcatctgcttggcttatggggaggcctcgaggagcttttactcaaggtgacagtcaaaatgggagcagctatcccatatggcagaatgggagcatgagtgagggaagtgctaaacactraaacaaccagatctgagaactcgctccctatcctgaggccagcaccaagctatgagggatccgcccccatgacccaaacatctc

SEQ ID NO: 821526 - DNA, 557 bp, Homo sapiens
ataacttgaaaatcaacctattatttctgataggattgtgtgatatcacagacatcacaacagaaytgagatatagataatataaatgtgagcaataataaattttcacattatcataaaaaaagaactgtcattcactttatgtgaattcataaaatggtaaacctctaacaaaccacattttataaagtaaattatggccggcgcagtggttcacacctgtaatcccagcactttgggaggcttaggcaggtggatcacttcagcccaggagttcgagacagcctgggcaacatggcgagaactggtctctacacaaaatagaaaaattagccgggcatggtgggctgtgcttgtagttccagctacttgggaggctgaactaggtgggttacctgagccagggaggtcgaggctgcagtgagctgtgattacaccactgcattccagcctgggcaacaaaatgatactctgtctaaataaattacattatagcatctgaagtgaattttatgagatacaaaaaaggtgtcttacaaaaaatatgttgcactagg

SEQ ID NO: 821527 - DNA, 572 bp, Homo sapiens
ttaaattctcaggcatgtgtttataagttgatttaacgagggacaatttaccaagtgatggggccgggttaagaacgcragctgggagcatctcctctgaggggcgaggggaggaaatgtgcgccaggctctgcaaggatggggaggaaccaccagcttcctccttcccaccctctgatctcctgccagggcccccatgagtggatcccaactagaggtcagaggccggggagctgggaggatgcagagtgggaaaggacggacgtggactcctcatcagagccgggaactccagcgggaggggagctgcttcagaggggctgtgactggggagtactttgggaagaagcgacatgttcttgtttgtgtctagaaaggccagctggccgccgtggactttaagtttgtggcgacgggaacaactacaagacagttgggaggctggggaccgtggtcattcgggagaagtggaggtgtcccagttgggtatggagagggcgggcaggcaggagagagacctgggtggaagtggaccggggggctcgctggtctgggagcatgaaggagaagct

SEQ ID NO: 821528 - DNA, 572 bp, Homo sapiens
agtgggtccaccacagggctcccgccccgggggtctcagtgggatcctccgagcggccccactttakcagcctgggctcagtggcagcactggagagaggggcactggcacctccgtcatcactcctggagcaaggcagagctggccctgttctctgagatccttggcccaccctggccttcttatggtttgtccagagccaggatctgtccagacactggggctgcagggatgcgggtatgtggggaggccggccacagtgagggaggataggccaccataccagggtgataaacacgccccaggagccacaaacccacgtgggacaggcctcctgggggatgagcctgcaaagcaaccgcctctccccagggccgctggctgtgcaccaagcgaccactgcctgcctgccgcccagactagcatcctcgcctctccatctcctgcctggacgtgagtcttggcagaggccacaggatggcccggaaatgggccaagatagcagggccgaggtgagctgaggcggagccagcctggttgtccacgggccacacgtggagggcagggcagac

SEQ ID NO: 821529 - DNA, 561 bp, Homo sapiens
tccacttggaatttttcactttgcgatgaagggctacattaaaaccacgtgtttgccagtaatgtcagactttcaaragctcatggtttgctttttgacgaaatgtaaacccctggaaagggtcaggcccgggcccagcatcgacagtaaaagggcccagctgaggcttcccttagctttgtgtcctcatcccggacacgaaaatgacctggccccaaatatgtgcccagggtcgaggctggtggtccaggcacctccggctccctgtagtgatacgtccagctccggaactactccatcctgccccagagcacctgcccctccccacccactgtgaccccacgtccttccccgtcagggctggtcatgctctggtccacctaggcctgaagacagagctcccctctgccctttcctcaccaatccctggtcggcatcctcccccttcccccacacaagggctctggggcctgccagtcccaggtggcacccacagccctgaggccctgggcccccctcccccgaccctggacacaggagatgaatgaagtcaagtggtgt

SEQ ID NO: 821530 - DNA, 645 bp, Homo sapiens
ctcttcatcttccctctcccccaaatcagccttctcagtctctgttatctatctttccactctctacctccatgtgatcaacatttttagttcccacctataagtgagagcatgcaatatttgtcttttttgtgcctggcttattcacttaagttaatgaccttaagttccatccatgttgctgcaaatgacgtgattttatactttttaattgctgaagagtattccattgtgtatatataccacattttcttcattcatctgttaatagacagtttgattccttatctttgctattgtgaatagtgctgcaagaaacatgcaaatgcaggtatcctttgatgttttggtttcatttcctttgagtatatacccagtagtgggattcctggattgaatggtaattgtgtttgtcgttttttgaataatctccacactgttttctactagcgtgttaccactaacagcgtataagctttttcttttctctacatcctcaccaacatgttattttgtctttctaagactagctattctgwccggggtaagatgatatctcattgtggttttggtttccatttccctgatcataagtgatgttgagcagtttttttgtatacctcttggccatttgtatgttttctt

SEQ ID NO: 821531 - DNA, 645 bp, Homo sapiens
ctcttcatcttccctctcccccaaatcagccttctcagtctctgttatctatctttccactctctacctccatgtgatcaacatttttagttcccacctataagtgagagcatgcaatatttgtcttttttgtgcctggcttattcacttaagttaatgaccttaagttccatccatgttgctgcaaatgacgtgattttatactttttaattgctgaagagtattccattgtgtatatataccacattttcttcattcatctgttaatagacagtttgattccttatctttgctattgtgaatagtgctgcaagaaacatgcaaatgcaggtatcctttgatgttttggtttcatttcctttgagtatatacccagtagtgggattcctggattgaatggtaattgtgtttgtcgttttttgaataatctccacactgttttctactagcgtgttaccactaacagcgtataagctttttcttttctctacatcctcaccaacatgttattttgtctttctaagactagctattctgaccggggtaagatgatatctcattgtggttttggtttccatttcmctgatcataagtgatgttgagcagtttttttgtatacctcttggccatttgtatgttttctt

SEQ ID NO: 821532 - DNA, 636 bp, Homo sapiens
ccaaggtatttttttaacttgttttatcaaaatccatttagagatcracagcttttcttgcaacattggtgaaagctctttcagaactctgttactgtagaagcttgccatgtgaaaaattcattagcagcaagtttgaaatcttaaaagccagtgtgtgttttagaggagtagctagcccatcagtaaaaagagtagagtaaaaggttcacatcaaaagagaaatcttcacagcaccgatgttatcaactctctccagatgtgcagtttcctatgttgcactcactttttcatgtgtcattagcaaccttatatcttaacatggaatgcttgaatggagtccttattaatgaagtcgccaagcccaatctattcatcaaatatggtcttggggttagaacattctggaatatgcagggaagaatgcccagaattgtggacctcccatactgccaatttaccaggagagttttgccaggaagtggggcacaggtacaattggaaacaagctgtgaatacatttttcaagagacaggcataggttttcaacaccagtaaaagatttctgaacaaaagcaaaaatcaatgtaagttaagttttaatgggaaataaaaaaaataattacttataaaagt

SEQ ID NO: 821533 - DNA, 531 bp, Homo sapiens
tatgaatttgtaaaaacctgttttttcttcctaaattaaataaatattttaaaatctgggatactctaaaatatcacttttgtttttcataaataaaaaaatttaaatataaataatgttaaacatgaaaccactgggaatgcatcacccattccccaacagtatttataactagtcagagaacaatggaggtgtttttcatcaaaactttcctcagaatatctacatgcggttcttatagctattataaaataatgaacactgatatcagctcatttagaaagtggattataacataatgtttttaagtggattataacataatgttaacaggaaaatgtttaaattctaaaattttccctaaattattggaataggcttcaagaaaataatcatgyttcatagtcacatattaatatttgtacatagcatattttaatcatgtttatacaccccaatattttatttataaaatagtgtgaacaaaataaaaggtctgccatcttacaaaaaaaagtcatttaatattgg

SEQ ID NO: 821534 - DNA, 542 bp, Homo sapiens
tgcgcctgtgcccataggtgtaaaaatgtctccaagcactattgctgtcagaggactccatgtcaataagcatcstgataagagcactgtgagctcttgtgggtcttttgagagtcatcctctcctcctttgatctcatcaagcatggtctccttttggaaatatcagacagcatccaatttagaggatgcaagaggtccagaattcccgagctgggaggcttagaagagttgtggtgaccaggtgactgccgccacccacgtcatgtggagagctgtgtcgacacctgcagccaggctctctgggcacccttgtgtccaaacaccagctcagaggcagcaggaagacgctaactctgcgttccggaaatgtcacgtgctcagtgtgtgggaagggaaacctctcaagatctaacggggtgatcaggtagcacactctattcagaagaagcaacttgcagctgttgcccacaccccctacaggggaggagacatttgagatgggtgagataagaagagtcctcaaggtagttaaacccagtc

SEQ ID NO: 821535 - DNA, 499 bp, Homo sapiens
taagttgagtctctccttatagcctgtggtgggatgcasgtctgactcaaatcctctcacgggtatcataaggaccccttgaaccccactccatgggatctccaaggaggaaggtcttatcccgctcatgccactgcagcaaagtaccatgaactatatggctcgtaaaaaatacatatttatttctcaccattctggaggctagaagtctgaaaccagggtaccacagaactctctatggcccctttttctttaagacactctcactccgttttccaggctggagtgcagtggtgcaatcatggctcactgcagcctcaaactcctgggctcaagccatcctcccacctcagcctcccaagtagctgggactacacgtgtgcaccaccatacctggctaatttttgtattttctgtatagatggggtcttgccatgtggcccacactggtctcaaacttgtggcctcaagggatcctcccacctcagactcccaaagc

SEQ ID NO: 821536 - DNA, 499 bp, Homo sapiens
taagttgagtctctccttatagcctgtggtgggatgcacgtctgactcaaatcctctcacgggtatcataaggaccccttgaaccccactccatgggatctccaaggaggaaggtcttatcccgctcakgccactgcagcaaagtaccatgaactatatggctcgtaaaaaatacatatttatttctcaccattctggaggctagaagtctgaaaccagggtaccacagaactctctatggcccctttttctttaagacactctcactccgttttccaggctggagtgcagtggtgcaatcatggctcactgcagcctcaaactcctgggctcaagccatcctcccacctcagcctcccaagtagctgggactacacgtgtgcaccaccatacctggctaatttttgtattttctgtatagatggggtcttgccatgtggcccacactggtctcaaacttgtggcctcaagggatcctcccacctcagactcccaaagc

SEQ ID NO: 821537 - DNA, 611 bp, Homo sapiens
ttaagatggcagtacttcctaaggtgatctaaagatcaattcaattccygtaaaaatcccagcgggttctttcaaaaaatgcataagctgattgtaaaattcatatgaatatgcaaggaaaccagaataaccaaagtattcttgaaaaagtacaaagttgaaggactcacacttcctgattccaaaacttagaacaaagctacaataatcaagacagtatcttattgaagtaaggatataactatagatctgtggaacacaattgaaagtccagaagtgaaacacatacttttgtggccaattgatgtatgaaaatggtgccaaagcatatcatgggagaaaaatcattttttcaacaaatggtgctcagtatccacatgcaaaattatggtgctggaccccttccttacggcacacatacaaaaacagagaatatgctcagaattatttcaaatatttgatacttactgagactttttatgacccatcatatgattgatcttcatgaaagttttatgtacacttgaaaaggacttgtcttctacagctattgggaggagggctctatatgtgccaattacttcaagttggtccatagtgttgaaatcttc

SEQ ID NO: 821538 - DNA, 505 bp, Homo sapiens
attatcataatcataaagtgacaattcgtcaagaagatttagcaattaactatgtgcatgtgcttaatacacagccttagatacataaagcaaaatgaaaagaaccaggaaatactgacaacttcacaattataactaagaattttttaatatatctctttctgcaattgatagaacaaattgacaaaaaatcagtaaagacagggacgatctgaacaacacaaccaaccacttttatctcattgctatttatagaacactacattcagcaactgcagaatacacattttttttccaatgcacgtaatacatttgctaacacagacaagctggtggacataaaacaagcctcattaaaagcactgaagtcctgcaaagtatattttctgaacacaatggaatttatttagaaattagtaacaagatatctagaaaaacmctttaaatatctgacaattaaagaacacacttctaaatagttcataggccaaaaatgaaatcaagg

SEQ ID NO: 821539 - DNA, 480 bp, Homo sapiens
tataagttgtaaatgatacataatatattaaatatataattatatattagaattaaakattataaatgtataattctgctgttataaaaagtcagttatagttataaatatatttgtaatgtatatatttatataatatatttatatattaaaatacttataatgtatacatatttatataaaattaaatatataaatataaacataaataaatatattttataatataacataaatatatgtaaatatataatatagaaatacattaattaattaaatatatttaataatattaaatatatgtaaatatatttaaatgtattatgtaaatatatttatataattatatattataacaacataattctgctgttgtaaaaatatcagttatagacatttcacaaacgaatagacaagactgtgttttcataaaacttatttatacaaccaggtggcaggatgtggcccaggggccatagt

SEQ ID NO: 821540 - DNA, 480 bp, Homo sapiens
tataagttgtaaatgatacataatatattaaatatataattatatattagaattaaatattataaatgtataattctgctgttataaaaagtcagttatagttataaatatatttgtaatgtatatatttatataatatatttatatattaaaatacttataatgtatacatatttatataaaattaaatatataaatataaacataaataaatatattttataatataacataaatatatgtaaatatataatatagaaatacattaattaattaaatatatttaataatattaaatatatgtaaatatatttaaatgtattatgtaaatatatttatataattatatattataacaayataattctgctgttgtaaaaatatcagttatagacatttcacaaacgaatagacaagactgtgttttcataaaacttatttatacaaccaggtggcaggatgtggcccaggggccatagt

SEQ ID NO: 821541 - DNA, 622 bp, Homo sapiens
tcctgagaaccgagctatagtgattgttttctctcttctggatttagccacccagcaagtctaccaggctctgggttggtactgggggttgtctgcacagagtcctgtgatgtgaaccacctgtgggtttcatcagctgtggataccagcacagtattggggtgtcgcctgggttctacaggagccatctacttccttcagggggtctgtgagtcctctcagcagggattttaagtttttctctttgaaatgtgtatgttcatttcacttggcctacaagagtatatcctaatgtaatatgcagcgaatattaacgcgttttttttttcgagatggagtttcattcttattgcacaggctggagtgcaatggtgtgattttgcctcaccgcaacctccccctccagagttcaagtgattctcgtgtctcagccgcccgagtagataggattacaggcatgtgccaccatgcctggctaattttgtatttttagtagagatggggtttcttcatgtttgtcaggctggtctcgaactcccaacctcagatgattygcccacctcagccgcccaaagtgctgggattacaggtgtgagccactgtgcccagcctaaaacttttt

SEQ ID NO: 821542 - DNA, 623 bp, Homo sapiens
agataggtaaacccctgtaacacatgcagggttgtaaaagtcatgataagaaatttgggaactcattgagtagttttcaggaaagaaaaagaggataactgaagggcctaagacacagtaataagtacggaaagacctgttgggtgttggcattcatctccatgaaagatgagagcacatgttggacacatggagacagaaccaagaggaggattgggatcattcaggaagttgattgaccaggtttgcttggaattggatgtgaacctgaaaacaaagggggaatttgtgtgcaatggctaggtttaactgaatgaatggtgccctgtgtactgaggaagggtctgggtgctggccgtacatttcaaagagttttttttcagaaatgctgagtttgagatggcagtgatatcacatcagttggatataaaagtttgaagcttggaagaaagtctgggctagagattaactttagagttcatggcataaagatgataattaaattcctaggaaaaatgagaaagcttargatcacaaaatatttagggttcaaaaggggaggagaatctcaccaagaagacagacgaggagtaactatccaggtgaaaggaaacccagaatag

SEQ ID NO: 821543 - DNA, 609 bp, Homo sapiens
tggatttccttcttaataacctagagaaagaatactacattaaacccaaagtagagaaaagaaacamtaccactaaaagtggaatcattgaaatagaaaatataaaagggagaaaattaataaaagcaaattatggttccttgaaaaatcaattaaaactgataaacctctaactggatggataaaacaatgagagggaacactcaaatttgtaagaataggaatcaagaagcaacatcaccagagtccctatagacattaaaaagaataagagatttttatggaaaatctaatgtttctaaattcaataacttagattaatggacaaattatttaaaagatattagttaccaaaagtgactgcagaagaaacagaaaatccagatagcttcatatctatttagaaaattaaaatattaattaaaaacttttccacataaaaaacctccagggccaaattgctttactggtaaattttataaagcattttgtgagagcagcacaccttaataacaaaaattgacaaagatgttaccaaagaaaaaaaaaagccatatctacatcccttaggaatttggtaaccaaaatccccatgaaaatgttagcaaa

SEQ ID NO: 821544 - DNA, 609 bp, Homo sapiens
tggatttccttcttaataacctagagaaagaatactacattaaacccaaagtagagaaaagaaacactaccastaaaagtggaatcattgaaatagaaaatataaaagggagaaaattaataaaagcaaattatggttccttgaaaaatcaattaaaactgataaacctctaactggatggataaaacaatgagagggaacactcaaatttgtaagaataggaatcaagaagcaacatcaccagagtccctatagacattaaaaagaataagagatttttatggaaaatctaatgtttctaaattcaataacttagattaatggacaaattatttaaaagatattagttaccaaaagtgactgcagaagaaacagaaaatccagatagcttcatatctatttagaaaattaaaatattaattaaaaacttttccacataaaaaacctccagggccaaattgctttactggtaaattttataaagcattttgtgagagcagcacaccttaataacaaaaattgacaaagatgttaccaaagaaaaaaaaaagccatatctacatcccttaggaatttggtaaccaaaatccccatgaaaatgttagcaaa

SEQ ID NO: 821545 - DNA, 609 bp, Homo sapiens
tggatttccttcttaataacctagagaaagaatactacattaaacccaaagtagagaaaagaaacactaccactaaaagtggaatcattgaaatagaaaatataaaagggagaaaattaataaaagcaaattatggttccttgaaaaatcaattaaaactgataaacctctaactggatggataaaacaatgagagggaacactcaaatttgtaagaataggaatcaagaagcaacatcaccagagtccctatagacattaaaaagaataagagatttttatggaaaatctaatgtttctaaattcaataacttagattaatggacaaattatttaaaagatattagttaccaaaagtgactgcagaagaaacagaaaatccagatagcttcatatctatttagaaaattaaaatattaattaaaaacttttccacataaaaaacctccagggccaaattgctttactggtaaattttataaagcattttgtgagagcagcacaccttaataacaaaaattgacaaagatgttaccaaagaaaaaaaaaagccatatctacatcccttaggaatttrgtaaccaaaatccccatgaaaatgttagcaaa

SEQ ID NO: 821546 - DNA, 555 bp, Homo sapiens
tgcctgtaatcccagctgctcaggaggctgagttacgagaattgccccgggaggcggaggttgcagtgacctgagatcgtgccatcgcactccagcctgagcaacggagcaagagttggtctcaaaataaataaataaataaaaataaacagtacttgtctatttcctcagatagactgagttttcccagagatggaattacaatctgtgcattcccagattgtaacatagttttaagtaaacatccactgaaagtctgcatggaagaacacagaagccagagcaagttcagggctcctagaaagacgatgctggagctagccctagagaatggctgagaattggatgaactcagaagaagcagcaaagtagttgcaggtggcaggcatggcaggagaagggatcaggtggctggaagagyggagggtatagaactgaaacagagagtctgttggaggtggacagaggaaggcgggattagatgagaaatgacggacccagtttctaagaaagaccaagaaagataagcaaagggatttaggtgggatgcccttc

SEQ ID NO: 821547 - DNA, 570 bp, Homo sapiens
aagaaggatggtgctctctgggagctggaatacaaacaaggggattcctatgattgcactcagcttactgccttgagagattttttttttttttttttgagayggagtcttgcccaggctgtagtgcagtggtgtaattttggctcactgcaacctccacctcctaggttcaagtgattctctcgcctcagcctctcgagtagctgggactacaggcatgcaccaccatgcctggctaatttttatatttttagtggagacagggtttctctatgttggccaggctggtctcaaactcctgacctcaggtgatatgtccatcttggcctcctaaagtgctgaaattacaggtgtgagccactgcgcccggccttccttgagagatttctaagttgcagcgcagagaaaggacactcagacagagactgctggactccctggtttgaggagctagaactgagagtctgaggaaatcaaaacatctagaagtctcaggacagaatactgtagggtaaagacttcccagagagatcctaagagatctatagaatgtcccccttgaggacccag

SEQ ID NO: 821548 - DNA, 585 bp, Homo sapiens
cctggctccacactccaaacccatttacctgaaatttcactgtgttgatgctattaacaagccacactcctggcaggatggcatttttaagccgtatcctccaggtaccctgtagtgaagatgaaatatgtgagactaggctgtgataggaggagggagaagggacttcgggctattttgtggtggcttctaccaccccctccccagctaggaaccagcgtgtgagaaggatgggaaggaaaaactggaaaaccgaatgcacgtgtgtccggctgtaaggactcatctgaagcatcgtcatatgtcacttaacaacagggatacactgtgagacatgcatcactacatggtttcgtagttggtgagcgtcatagagttcacttacacaaacctagatggtgtaacctacaacactcctgggctgtttggtacagcccattgctccaggactacacacctgcccagcatgggaccaccctgaatacagcaggcggctgtaacacagtgctatttgtgwgtctaaacatatctcaacatggaaaaggtatggtgagaagatggtggtctaatctttatgggaccacc

SEQ ID NO: 821549 - DNA, 623 bp, Homo sapiens
atgactgtcactggtttatgtatttattatacatatttttttttttgagacagagtcttgctctgttccccmggctgcagtggagtggtacaatctcggctcactgcagcctctgcctctcaggttcaagtgattctcctgcctcagcctcctgagtagctgggattacaagtgtgtgtcaccacacctggctaattttgtatttttagtagacacgggctttcaccatgttggccgggcttgtcttgaactcctgacctcaagtgatctgcctgcctctgcctcccaaagtgctgggattacaggcatgagccactgcacctggccctatgctgtacttttaaattgttattttagaatgtactcctacttatgttaaaaaaaaaaagttaactgtaaaacagcctcaggcaggtccttcaggcattgctatcataggagatgacagctccctgcgtgttattgcccctgaagattggccagtaggacaagatgtggaggtggaatatagtgatatttttatgatattgatgttgtgcatgcctgggctaatgtgtgtgtttgtgtcttagtttttaatgaagaagtttaaaaagtaaaaaaataaaataaaaacacacaca

SEQ ID NO: 821550 - DNA, 530 bp, Homo sapiens
cagctggtccctccgtttggggtccctractttctgcaatatcttctcccatctgcacagtgctcctgctccaataaccaaaaagcactagaacaggatctatgccttctcactcagatttgattatcaccttgcttcttcacatttatcataatccaaattaatcccattcatgtatctacacccatccttaaccagtgactagactgccaaggcaaaaggatttggaggtggtctggacacagcatttgccatatttgccaattagcctgaagaattttagtagctgtaggcttattcagctaacatacatggattatactcaccccaatagaataaataagtaaataaaattttatgagtgcatgaactatcaccttactttattattctgaaaattctaattatctaaatcacatctgaatattttatcatccaaaaataacttctctaaagccctagaaaaacgataggctcaatgcaaatgctgtatacatatttgatgccttgaataatatcaaacagatcaa

SEQ ID NO: 821551 - DNA, 602 bp, Homo sapiens
acggcccacataaggataggtctgtgcaacccagaaccttgggggtttagttttaagagttaccaaggcaaaggctgataacctacaccaacattcacttcctccccttcctccttaggaacgagccctgcatttctgtggaacacacattccagggagccccacacattccgtgtgcctcgcccaccctgcagctagctgtggccaagtgaccaaggactaggccatgagatataatgcaagatactgacaagcactcaaagtttactcatgaggaagcatggagcccatctttccccactttctgcctgctgactggaatggagaaatgacagctggagcttaagcaaccatttaggaccaggaggcaacacctgaagcggagccgcaggaccacaggagccctgggtcccgtagagcctcgatcagctgcagaccacccaattcaggacttttcaggagacagagaaataaactgcaatctttttaaagccactgttatttatctgggctttaaayaattgcatacagttaaacgtaatattaactgatacagtaacattccttgcctttttaaacatgtttccagggcggggcatggt

SEQ ID NO: 821552 - DNA, 602 bp, Homo sapiens
acggcccacataaggataggtctgtgcaacccagaaccttgggggtttagttttaagagttaccaaggcaaaggctgataacctacaccaacattcacttcctccccttcctccttaggaacgagccctgcatttctgtggaacacacattccagggagccccacacattccgtgtgcctcgcccaccctgcagctagctgtggccaagtgaccaaggactaggccatgagatataatgcaagatactgacaagcactcaaagtttactcatgaggaagcatggagcccatctttccccactttctgcctgctgactggaatggagaaatgacagctggagcttaagcaaccatttaggaccaggaggcaacacctgaagcggagccgcaggaccacaggagccctgggtcccgtagagcctcgatcagctgcagaccacccaattcaggacttttcaggagacagagaaataaactgcaatctttttaaagccactgttatttatctgggctttaaataattgcatacagttaaaygtaatattaactgatacagtaacattccttgcctttttaaacatgtttccagggcggggcatggt

SEQ ID NO: 821553 - DNA, 546 bp, Homo sapiens
cagcttcttgtatcatatctgggcctggcctcccagaaatggatgttgtgtggttggatagggatgtaagtatgaataaccgtacrgataacattgttggacaccaggggtattagaactttctggacttttccatgcattcttatgaaaataagttcccattacaagtttttctgaaaaaaaatatgtttttctaaaacattattttggtgtattatgacatttcaaaaacagaacagattaaagcaacttttattcattctacaaatgtatattgaacatctattctcaatcacacaatgaagtttccttagagagaaaacagaaaatttagagcaaagataatgtcagagtggttatggagatccacactaattttgagaagccttagattccttcattcttagggaaaggtcttagggaaaggttaacacagtggtaaagagcttgggtgcttatattaggcacagttgcattaaattcacagctcctcactttaccggttgtatgaccttaggcaagtgcatttacctctatgagcctcaa

SEQ ID NO: 821554 - DNA, 475 bp, Homo sapiens
ctctggagctcccaaatttataaaacaattactgttagacctaagaagtaagacagacagcaacataataatagtggggaacttygataccccactgacagcactaaacagatcactgagacagaaagtcaacaaagcaacaatggacttaaactacactctgtaacaaatggacctgatatttatagaacattctacccaataactgcagaacacacattcttactaacacatggaaggttttccaagacagaccatataatagttcacaaaacatttctcaataaatttaagaaaatcaaaattatatcaagtaccctctcagaacacagtggaataaaactggaaattaactccaaaaggaaccctgaaaacaatacaaacccatggaaattaaacaatcttctcttaaatgattttggggttaataatgaaatcaagatggaaatttaaaaattctttgaaatgaatgata

SEQ ID NO: 821555 - DNA, 475 bp, Homo sapiens
ctctggagctcccaaatttataaaacaattactgttagacctaagaagtaagacagacagcaacataataatagtggggaacttcgataccccactgacagcactaaacagatcactgagacagaaagtcaacaaagcaacaatggacttaaactacactctgtaacaaatggacctgatatttatagaacattctacccaataactgcagaacacacattcttactaacacatggaaggttttccaagacagaccatataatagttcacaaaacatttctcaataaatttaagaaaatcaaaattatatcaagtaccctctcagaacacagtggaataaaactggaaattaactccaaaaggaaccctgaaaacartacaaacccatggaaattaaacaatcttctcttaaatgattttggggttaataatgaaatcaagatggaaatttaaaaattctttgaaatgaatgata

SEQ ID NO: 821556 - DNA, 475 bp, Homo sapiens
ctctggagctcccaaatttataaaacaattactgttagacctaagaagtaagacagacagcaacataataatagtggggaacttcgataccccactgacagcactaaacagatcactgagacagaaagtcaacaaagcaacaatggacttaaactacactctgtaacaaatggacctgatatttatagaacattctacccaataactgcagaacacacattcttactaacacatggaaggttttccaagacagaccatataatagttcacaaaacatttctcaataaatttaagaaaatcaaaattatatcaagtaccctctcagaacacagtggaataaaactggaaattaactccaaaaggaaccctgaaaacaatacaaacmcatggaaattaaacaatcttctcttaaatgattttggggttaataatgaaatcaagatggaaatttaaaaattctttgaaatgaatgata

SEQ ID NO: 821557 - DNA, 613 bp, Homo sapiens
tggatgtggtgaaaagggaagcgttcactgtgggtaggaatgtaaattaggacaatctttatggaaaagagtatggagatttcttaaagaattaaaagtagaactactattcaatccaggaatcccactactgggtatctaccccaaaggaaaaaagtcatgtaaaaaagacacctgaaaatgtatgcttattacagcacaattcacaattgcaaagttatgggaccaatctaagtgcccatcgactaatgaatggataaagaaaatatggtatatacacaccatggaatactactcaaccataaaaagaataaaataatgtcttttgcagcaacttgaatgaagctggaggcctttattctaaatgaagtaactcagaaatggaaaaccaaatactgtatgtcctcacttgcaagcaggagctcaactatgttttttaaaaatttttattttattttatttttgagatggagtctcgctctgtcgtacaggctggagtgcagtggcgcgatctcggctcagtgcaacttccacttcctgggttcaagcaattctcctgtctcagcctcggggttcaagcarttctcctgtctcagcctccagagtacctggg

SEQ ID NO: 821558 - DNA, 647 bp, Homo sapiens
gtgcaagaaactcaatatgttcatggtccattcatggaggagggaattggtcgcttggtatactgcttgtacttaagagtytgaaataattcttttctttaatatagagtagtaaaacatctgagcactgcttttatttgtacgctttatatttcatagaagtattatgctcatatattatagatacatgtatatggattatagttggctatgtggtaatcagaaacacaggtacacagaaaatcaaatactttggttgcttttagcttttgctatggttcgagtatgatgcttggagtttatatgttgaaaatttggtccccccatgtgtcagtgctgagaggtggggccttaaaaagtggttagatttttaagaggcattaatgctgctcctatgggcctgggctaattgtcacaggagtgagcgagttctcaccctagtgggactgcattagttgtctccaaagcaggctgttgtaaagtgaggccacctcttgtgttctgcccccttttctcacatgccaacttcccttttggcttctctgccatgatacgacacagtatgaaagccctcagcaaatgctgctgccatgcccttgaacttctcagtcttctgaactgtgagttaaataaacgtctatttttta

SEQ ID NO: 821559 - DNA, 567 bp, Homo sapiens
attttttgggaaaaaataatgctatgtagatacaattactaacataggggaaattttctagcaaggagcttggtatggaataaatgctcattgcacaccasgccccttttcctccatcgctgctccccacactgtcaccctgcgtttgtctcccttgtgttctattcagccaccttctgtttcctccttggattccgagagtttgtttgttggttcacgtttctcttgttttcctgtgtgtagtctgtttttgaacctcgggcaaactctggcctcatcattcagtcatgtgtcactgagtcctgggctcatggttcctacagctagcccaggaagcagaagacctgaacataggatattgttcaatttgggtaggagttgtccagtggcagtgacacaagcattagttgacagttttgaccttagatctcaggatggacttgaactttaggaacctcgataagaaagcatctggccaaacccaaggaaacactcttaatgttccttgcttccctaagcttagatgtcagtttacaaagtgagacatgcttgctcattaaagaattg

SEQ ID NO: 821560 - DNA, 620 bp, Homo sapiens
agtgagtcatgtttgtgccacagcactccatcctgggtgacagaacaagactgtctcaaaataaataaataaataaataacaaaacaaaattttttcagcctagagaaaaacccactaagaggggaggttcaacaaagaagctaaaccatgccccttccatggctgaaattctatgatactacagcattttgaagcttctcaaatactaaaaaacagtaagagactgtgagcagttattctgtgtggtctaggagaggaggtgaggagtaaaccacaggggggtggatctgtagttggcagattatagttcaacttgaagcaaaactttttaaatgatgagctctgaagcactctttctaaatggagggtgcttaatggtaaggaaggatgttccctgtcatcaaaaggatttagacaaaggctggactgctaccatggtatgcagtagtgctgtgcacttcattactataagtttaaatttaattaaaattaaataaaattaaaagttcctcagttgcattagccacacttcaaatgctcattartcacacatggctagtggctatcaattagtgcagtgcagaacctttccatcgtcacagaaatttcaactggatag

SEQ ID NO: 821561 - DNA, 550 bp, Homo sapiens
tcgagaggcaatcagcagcacttaaaaagatgctctgatgagattcattcatttctctyctgtacctgctttgccaactttgtacagcaggagtatggaaagtagatgtttaatgaaagtggggtgttctgaaccatcccggataataccaaaagcctaagtgtggagactaaattaaaactaagaccttaatttgccagaacaataaggactgaaaggggcttcagatgtcactgtgtccaaacctccatcttatgcccaacttccctgacagcaacctgtaagtggcttgtcagtctttgctgcttgttactgtatagtaaggggcaacgtcctcatcttggttgttagctgcaattttagacagctccagttgtcaaaaagactttttgtacattgagtcctaatctaaccctcagaaactattagaattgcttgaatccttttattcttacacctgcaggaaggctcatggacatagacttgtgacaactccaaggctcggaaaccaatttgtgagcctctgagtgttagtgattctgatcttcaa

SEQ ID NO: 821562 - DNA, 619 bp, Homo sapiens
aaatgcattgttaggcaattttgttgtacaaacatcagagtgtatttacacaaacctagatggtatgacctcctgcacatctgatatagcactaggctatatggtatgcctattgctgctaggctacaaacctatacagtatgttgctctactgaatactgcaggcaaccacaacagaatggcacttgtgtatctatgtttagatacacagatatagcaaagttcatgcaatgcactgggacctacaatgtcaactaggtgataggaattttcctgctccattataatcttttgggactactgtcgtacatgcagtccatcattgaccaaaatactgttgtgacacataactgtattttcttctgcttcttattttactattgtttttatagtttcttataccggaaattgagattacagagactttcctccttttataatgtatgtatttactgttacacatcttccctttgtgcattgctttaactaaatttgacttaatttgttatgttgcattttcattcaaaatrtgttctaatttctcttgaaacattttctttgactcatattattttgaatcatgagctttaattttcaaatatttgaaggttttgttttt

SEQ ID NO: 821563 - DNA, 603 bp, Homo sapiens
gcgtagtatatgggccagatagcaccgtccctcatggcaagttccctcacagctttccttaggggagggagttcctgaccccttgcacttctagggtgaggtgacaccctaccctgcttctgctcaccctcygtgggctgcacccactgtctaaccagtcccagttatatgaaccgggtacctcagttggaaatgcagaaatcactggccttctgcattggtctcgctagggagggagttcctgaccccttgcacttctagggtgaggtgacaccctaccctgcttcggctcaccctccgtgggctgcacccactgtctaaccagtcccagttatatgaaccgggtacctcagttggaaatgcagaaatcactggccttctgcattggtctcgctaggagctgcagaccagagctgttcttacttggccatcttgcctgggagtccccttgtctacactgttataagcacataaagaagaaacccttcatgattgcaggcaggtctgagaaaaaaattatttttattattgtgtacatgtacatttgtaaatgtatatacaaaatatcaatactctttgatggaatgtaacagaatccagaat

SEQ ID NO: 821564 - DNA, 517 bp, Homo sapiens
ggaaggtcacagagaccttgaggcttcttcaattcagcatgtcaaagcaccatactttggggtatggtttctgacacacaacaaggtcattcagggacacagcttccttctgagaactaaaaataaaatcctacacccaccccctaacccctaaccaactgattgggctcactctcagccaaggggactccagagaaaccgggggaactgagttcctggccataactggacaggcggttggatatgcctatttatagccccttccttttgtggtttagacatacaagtgagcagcattaatgtaaaaatagagatgataagacaggcagaatgggctctttctgacaaaaagacaccaagttataaacaagacctaaggccactgcaggcaaaagttacatcawgcacccctacacttaaagaataaactatgtactcactgccacgaggattttctttttctctagcagctaaataagcactggccttgagataaacagtattgaaacaattgcag

SEQ ID NO: 821565 - DNA, 468 bp, Homo sapiens
cttttgctaaccatgtctcctcttctctccttcccataacctgtcttgccaccatatcattttttggccaakccaccattctttctgtaacctcaagatagtaaaaaaaaagtgtcaaccatctggccatttctttgagattttatattttgtaagtctattatgtatgctaaaaatgtatatgcctttttcttctattaaccagacctgtcagttgactttcagcaactttcagagggcaaagatgaagttttattgtgacccctgctactaatttagttcctatgtcactaaaatgtgtcaggctctctaccaagctttacggtttcagagatgaaccagacaaatgctcttctcaagaatctcagagttaagtgtgaaagacaaataaatggttacaaaacaatgtaaatactattacagagctctgtacaaagtactttgggagcgaacagcaggtgattacaa

SEQ ID NO: 821566 - DNA, 653 bp, Homo sapiens
ataaaatttggctttaccattaggtcagtattgtaataaagcaaataaagaattttcagaatgtagcagtctgacaattataagcaatgtaaagcgttaaggaaatacctcattctctgctttaaaaaatatctccccatcctatatttattatttatgtgtccatatgttgtattttttcactttcatctaactttaaatcctaacataatttgtactacttgaaagaattattgccagtcaaaatgccatgtgtggactgtcagatctagaaaaatgcttctaagtcattcactctagatccctcatcatcacaacaaggacatcagcctcagagtggttagaggggatacggctgggaaggctgactctgggaaaaatgaagaatatcttgtgcacaatggaaatgggaggactcaccctaggggaagagagagtggcagagaaccctccctgacagctgtgtgtatacactgtttcctgatgttaaaggagaaaatcactcttacccatccccaggctaggacctaacaatgtctattytaaaaaacatgaaaaaaaaaaaaaaaaaaagttaggaaagaaaaacaatagcaagcttgagagagagaatacagcagtttgaccttccaccatgcacccttcttggggaa

SEQ ID NO: 821567 - DNA, 640 bp, Homo sapiens
ggagacatatcctttcagatttctaattattggggttggattcagaaatgattagccatgagtcatcaacacattttaaacacttagctctcatttaagaaggaaacgctttggcagggcacaatggctcatacctgtaatcccagcactttgggacgccaaggcaggcagatcacctgagggcgggagttcaagaccagcgtgaccaacatggggaaaccgcgtctctactaaaaatacaaaattagcctggaatggtggcacatgcctgtaatcccagctacttgggagcctgaggcaggaggattgtttggacccggaaggtggaggttgtggtgagccaagatcgcaccgttgcactcccagcctgggcaacaagagtggaactccatctcaaaaaaaaaaaaaaaaaaaaaaaatgaaaagctttgtcctcttcatttttccttttttctttttttcttacatttcaacttttagatacgagggtacatgtgtagatttgttttatgaraacattgtgggatgctgaggttttgagtacagattccatcatcactttggtagtgagaaagtacctggtacataggtttttactccattccctcttccttcactatatagtagtgtccattattgt

SEQ ID NO: 821568 - DNA, 512 bp, Homo sapiens
aaatatattccttgtaaacatattccaaataaactaaagccgttattttcttaaggcctacatttggtattcattgcagcgtagagcctgagcagagttcatctctttcctaacccactatattaattatttgttgcatcaaatacaatataactgtcactcaggcattagtctctttgaaaatgacctagtgccttctgcctctgctgatatacacatgatatatttagtgtatttggtatacagtctcattatgtggctaattagggcattatgaaaaagaggtcatggctgtgctgacaccaccactgtagcacttcagaaactttctgatttataatctcaaccctggctagttccttgtctgcctccattaacagsgaggtgcagataaagaaacacagatggcacctattcatcagagatactagagaacacagcaaaccataaacccatggaataagactaattggaactgtgctttacatggcaaagatatgtgacttggtgta

SEQ ID NO: 821569 - DNA, 646 bp, Homo sapiens
acattctgaatgtgtttcatgatattatgcaaaggaaattgctatttggacattaacctgagactatatactcctatcaaaatactaaattctgcaatcccaaaaaaaataacggttgttaaaaaaatyttaataaattcgcaatgccaagcacatggccaacaagcctacacacatacacgagtgcatgcacacgtctttttttttttttttttttttttttttcagatcgagtctcgttctatcatccaggctcactgcaacctctgcctcccaggttcaagtgattctcctgcctcagcttccctagtagctggtattaaaggcatgcactaccatgcccggctagtttttgtatttttagtagagacggggtttctccatgttggccaggctagtctcgaactcctgacctcaggcgatccacccgccttggcctcccacagtgctgggatcacaggtgtgagccactgcacccagcctcacatatcatttttttaaaaatcactgatgcattacatgaccagctgcctcactaaatagattatttgccgtcaccattctgtcaccgtaaaagtttctaacatttttgaaaaggctcccttacccagaaaggataccaggcccaggtgtgacttttttttcc

SEQ ID NO: 821570 - DNA, 573 bp, Homo sapiens
caattcttatttgtatattttggggaggcttagttgtccttcctgcctgtcctcacactccatgtgtwctaaagttctttctgatgcaggattattcaaatgtggactacacagcaagaaatacatttatatggtaacctagtcactgatgatatataattgtatgtgtcactgtgatgactttcataaaacggtacttacatgctttgcactgattttctatttaatcatatttcattgttattaaaatgtaggtcataaaagactagactaatttcaaaatccagtaatgggtcttgaccttcagtttgaaaaaagtgctctgccttgcccaatgctttggtgcctccagatcttcatggatctgtttcctctgcctggaacactttctccctcctctatcctatccctgctcaagccttactagcgtccctcctccagtcagttaggtgtctgtgctatgaggtatttctataatattcagaactactcttgtaacattcagtactctgtttaattgtttctttctaatagcttccctataagatgaaggagggccgagacaaggttgac

SEQ ID NO: 821571 - DNA, 601 bp, Homo sapiens
ttaggagtgtctatggatctcatactgggaatctctgcccaaaatctattttccacagtcaagccagagtgaaaatgtgaaaaatataaatcagagcatatcactcccctgttaatactcttcagtagctttctcttgcacttagaaaccagactttctttttccttttttcctctttttttttttttgagatgaagtttcactcttgttgcccaggctggagtgcaatggcatgatctcggctcactgcaaccgccgcctcccaggttcaagcaattctcctgcctcagcctcccgagtagctgggattacaggcacctgccactacgcctggctaatttttgtatatttagtagagatggggtttcacaatgttgactgggctggtcttgaacttctgacctcagataatccacccacctcggcctcccaaagtgctgggattacaggtgtgaaccaccgtgcccggccraaaccagactttttcaatacttaccttccccaaatccctccacgagttgtcccatgctcacttctcatctcataactctctcttactttctccctccactcctatcatactatagagctacacacactg

SEQ ID NO: 821572 - DNA, 601 bp, Homo sapiens
ttaggagtgtctatggatctcatactgggaatctctgcccaaaatctattttccacagtcaagccagagtgaaaatgtgaaaaatataaatcagagcatatcactcccctgttaatactcttcagtagctttctcttgcacttagaaaccagactttctttttccttttttcctctttttttttttttgagatgaagtttcactcttgttgcccaggctggagtgcaatggcatgatctcggctcactgcaaccgccgcctcccaggttcaagcaattctcctgcctcagcctcccgagtagctgggattacaggcacctgccactacgcctggctaatttttgtatatttagtagagatggggtttcacaatgttgactgggctggtcttgaacttctgacctcagataatccacccacctcggcctcccaaagtgctgggattacaggtgtgaaccaccgtgcccggccgaaaccagactttttcaatacttaccttccccaaatccctccacgagttgtcccatgctcacttctcatctcataactctctcttactttytccctccactcctatcatactatagagctacacacactg

SEQ ID NO: 821573 - DNA, 520 bp, Homo sapiens
atcatatagagtatactctgatcacatcagaattagattaaaaacctaaccaaaagtatatctgaaaaattcccatagtttagaaaattaaacataatattcctaaatagtccatgaaacacaaatcacaaggtaaaatagaaaatactttgactcttaaaaaaacaaagcacaatattttaaaatttgtgaatgtagctacggaagtatctaaaaggaaacctatatctgtaaatgtttttgttagaaaagaagaaagatcccaaatcaattatctaagattccattttaaagacttataaaaagaagcacaaaatgaagcaaaagtagaagaatgaaataataaaaattagggtggaaatcactgaaataaagaacagaaaaataatagatagtcaatgatatgaaaagcagyatcactgaataaattaacaaaattgataaacctctagttagaaagattataaaaagcaaagaagatacagcttacaaatatcaggaatgaaaaaaggagatacca

SEQ ID NO: 821574 - DNA, 466 bp, Homo sapiens
aattgggctgagaatgtgaagatgactgtcacatttgagaacctattcccagaatacttacaaggaaaactggggcatacacatgcacacacacacacacacgcacgcacgcacacacacatacataccatgtgactgctagcaacttaaaacaaaaaaattttaattgaatttcggggcctggggaagatctgaacctataattatttcttagcaaacttgctgaacacagggttttcctcctctgagacgagatgagacgggtagcataatgaaccctctttaattaaaaaataaaatgttttaggataatcatattcttctaagttacattatttttttaaaggaaaggacagatcgwgagaaaatgtccattttcaagtgccccatgttaggctgcctcaaatggactagtttctcattcaaccctgtagattcaaaattagatccttagggaggcacttga

SEQ ID NO: 821575 - DNA, 736 bp, Homo sapiens
atcttcctctcccctgcccccttggatccttggagawgaaggggatgcgacagagtggcccacctcactggagaattctctccacttgggctccaggattcataggtactgggggaaagcggaacttctgagttccaaccatgagccttgttattctcctctgtagagtgggtattggggagagtgaagatgggggtatttgtctctatcaggccttctggtctcacttaagagtccttctgaagtgtttttctttctttccacttaaatcccaggctctcagaagctcttataatgattcttggagctcctatatcactccccctcagtccagctcccttctctggtgagccaagggtcaccaaatcctccctgccattctctctctgcttcccctggcagttcttggagatcttggccaggagcctcggctctgcaggtcccggcgccctccctctgaggtgccattcctcccctgcctcatttgctgccactgaccttactgagttaaattaaaaagcaatgttctgtgtgcggctccagccctgtggagcttgactctgggaagacgaagacaattactggcccctccatctccctctcatctggctgccttataatttttccccccgctgcctggtatgcaacatttatgtttttaataacaccagaatggttttgaccttgggaattcatagcagaatgggcactgcaagaggccccgacgtgattggcg

SEQ ID NO: 821576 - DNA, 701 bp, Homo sapiens
tgcaggtcccggcgccctccctctgaggtgccattcctcccctgcctcatttgctgccactgaccttactgagttaaattaaaaagcaatgttctgtgtgcggctccagccctgtggagcttgactctgggaagacgaagacaattactggcccctccatctccctctcatctggctgccttataatttttccccccgctgcctggtatgcaacatttatgtttttaataacaccagaatggttttgaccttgggaattcatagcagaatgggcactgcaagaggccccgacgtgattggcgtttgtctcagtcctttgcagggacaagactctggtgcctcctggattctggggaaggtgtgtaggggctgcaccccatgcggtttaagaagaaatctcaaaaaccagagtggacaaggacatgggaaggggggaaacagagggggagggtgttgtctttttaggtttcccctggaggatgaaagttagaataaggtgtttgagaggttgggatgtttttctcctcttgttttataggaggaatcctagattggggatggcatggaatacgtgtgtgtgggggggcaatggggaaggggtggtgtgtgatgcaagtgtakacacacactcaggccatcagtgcacaagcttgcacatatacccccgacacaattggatccatttctcctcatttactctc

SEQ ID NO: 821577 - DNA, 552 bp, Homo sapiens
accaaaatgaaagaatttcccatgataatgccatgaatcttggatctcactcactggggaggttaaaacacctgagaacaaccagcatgaacaacttaggcactgttgagaawgaaaacagagagggataaaaattattgctaagttggatgcagccataaaaaagaatgaaatcacgtcctttgcagcaacatggatgtagctggaggccattatcctaagtgaactaacacaggaatagaaaacgaaataccgcatcttttcacttataagtgagagctaaacattgagcgcacatggacataaagatggcaacaacagacactggggactactggagaggggaaggagggagaggggcaaggaatgaaaaactatctactgggtactatgctcattacctgggtgacgggatcatccataccccaagcctcagcatcatgcaatttaaaaaaaattattgctaagttggaaatttaggattcgactctgaggccttggagcttgtcagggagggttggttaagtgagggtcctcccagcctagtggcta

SEQ ID NO: 821578 - DNA, 597 bp, Homo sapiens
ggggtcaggctgaagcctcaggcaaggtacatgcaaacaatggyctaggacagaccaaatcctgaagattttggctttttgaaagacaggaaaaaactgaaatgcatttttatcagagctggaaaaaaatatgtattacactcatccttacagtatgagccaaaaagtaaatagctctacagttgtgagtaccaatcatgcagacacacggaagtgtgcctaaaattgctttgaagaatcttcccctctttcttgtcctcttagagggactgcaaagaaatgtctacatccccctcccacccctacacacactcaactccctatcatacacaatctggtgtgcagacacccttcagtgtatcatttggggatttattggtattttagttaacaggttgattctaagcctttacaacaattaaaaaaagcactttgtatacacacatgggcacagatccagagtaatgtctgtaatgcctgaggcacttaaaaatttgttttacatcaggctaagcatgttatgaatctgcattttcattatacatcacaaccatccttatttttactaatgacataaaagatgagaagaaacagaat

SEQ ID NO: 821579 - DNA, 607 bp, Homo sapiens
tataaggctgtgggcaatgtagcaatgtaagagtcagtggtatrcaactgattttcaagacaacagtagacatatgtcaaaccttatgcatgattatttctaacttctccatcaggcaatgtattaaaaagcaacatgaataagctagatttatcattttcaaaaattttctaaaggactatgttctggatataagggaaagtgaaaaacatcctttaaaattataataacagcataaaaacattaacggtgctgaaattttaaaagatcaataagatatgtcattagaataacagagatatcataggtaattttttcaatatattacatatttataatgttaaacaaatttggaaatcaagtaatcatatgcatgctgaagtatttagtaatgaagtatactaacatctgcaaactattttgaaatacgtacaaaaagaagatgccttgatgacagatgaaaagatggataaatgaaaaaaagcaagaatatgaaatgtagcaaagtgttaatggtaggatttagatggcatatacacgattgctaccttcacaattcttcaacttttctgcatatattaaacattccataataaaatgtaaaaaa

SEQ ID NO: 821580 - DNA, 694 bp, Homo sapiens
tctggcaacagaacagtgggctaaagtgagaagatcttgcatgcaggaagaccagtttaagcaggtaatatccagtctagtgactaatcaagtgcctgaagagatgagagaggaagaggtcagaggaacccccyctccttcctttctagaagatgtaccatgtgtgagtctgagagggtagcattgtcattcagtgacatggtggttaaacatggagaagctcaaaaggggaggtgggagaggacaggaagaggtggccaatgtggggatttgaggggcagtcagggaaccaccaagtaaatacctaatcagtaattgaaatgtggggccagaactagatatgtcctggaagcctgaaatgtaatcctaaatataatcttaaagaggagtcagggctggatgaggcaccagatatccaaagtggaaaagaagttcaattgcttgtacacatattatttcacttaatcgtcacgcctatggcaagtcttttaaaatatgatctattacagatatgtgatgttaaagcagaatgaagtaaatctgcaggcaaataggaactgtttaaagtctcccctatctctaattcacttataggaactttagatttagtgtaaaacccgagtagttttaaggttcagatatttccatatagaagttccttttattttttcatgtaatctaactcagagagttt

SEQ ID NO: 821581 - DNA, 500 bp, Homo sapiens
tgcttcctgggcaagtactagacagctgtgggcatgactggaactaagtagtcctgcgccagcarcaaagactttggaaatctcttatcctgacacctcactatctgaaaattagttcttaaatggcaccttccttatgttccacacaagttaactatcaacgtcaatatgtgtgtctgtgtgtattttggttatgttttaaattttattttatgatttggtgttatatttatttaaatttacctctagggtatttgtaatatttttcaaagcttaagattactaaagttcttaattcagaccaaatgtggttttcaaaacgtaatagattctcctctactgggcagattcttatgtcaagccaccttagataaaattggggtatttgggttcactctgtatgtgattttcttagaaaaaaaccctaaatatcattgtcttggcttgggtataatcttcttacgatatctgtgtaggtataaaaagttggcttgcttaat

SEQ ID NO: 821582 - DNA, 515 bp, Homo sapiens
taaaaagttggcttgcttaatataacagaaactagccacatcacttttcaggagggacacacaattccagctatatttctcagtgtagggacagtgaaattgcagaaactctaaggcaagatcatctctgggttaatacctttaagtattgctattccacaaaagatttgaattgaattgcatgggtaactaaatatcctctaaaaatatcttatttctaatattttgtttataaatatgacagctgacttggaatacatatgtatttaaatttttaatttgcttaacaaagacttcacattatagaacacagagtaatttatcttttttcccaaaaatgcatgtcctcttatttcaaggatgctgctattgattactttagcatcaataagtgagtgtgacctcaaagatcaacaaggggccaacagatyattttgcgttgtgcacacataaagattttacaataagaattaaaacaaaggcaaatgtttcagtgaggatgcattaactttcag

SEQ ID NO: 821583 - DNA, 513 bp, Homo sapiens
tcagtgaggatgcattaactttcagtatatccaaataaaaaattgttttttgtcgggggagtaagggattgtcataatcaacaccttcaggctaaaattcaytactacattctttctgttttttttttctttttatttggggggttcggggtggaatcttactctgtctccgctcactgaaacctttgcctcctgggctcaagccccacctcagcctcccaagtagtgggaccaaaggtgcatgccgtcatgcctcgctaattttttctagatacagggtttcgctatgttgctcaggctgatcttaaactcctgagctcaggcagtccacccacctcagccccacaaagtgctgggattacaggcgtgagccactgtgcctggcccatattaaattatttcaatgtctagaaattaattttgtcatctgaaaggcccgcttttttttccctctggagtactgataataataatgaacttcaacataaagaggtaaaaatagtctttatatat

SEQ ID NO: 821584 - DNA, 525 bp, Homo sapiens
ctaagcatatgcttaagaataatgaagacaaatatctacacaataacttgtacacagatgtttgtggcaagattgttcataattaacccccaaatggaaactactaaaacactatcaaatgatgaattgataatgtgcagcatatccatccaatggaatattattcagcaataaaaagaaagaagtactgatacatgctacaatatagatgaaccttggaaacattatgccaagtgacagaagcaagtggcaaaacaccatgtatggcttaattccgattttatgaaaggtccaaaataagcaaatccatagagataaaaatatagattagcgattgcccaggcaggggttggcagtaagtggggagtgatgccaatggatgcatattttatttttgcattgatgaaagagttcactgtgttgatarctgcaaaattcactgtgctgatgttgcacaattttgtgtaaaaccattaaattgtaaactttaaatagctgaattgtatggtatatgaattacaactc

SEQ ID NO: 821585 - DNA, 566 bp, Homo sapiens
taaatgaaagctgaaaatgtagaaaactatcttaataatcaatggaaaaattaygttatataatcaacaattttttgtcacaatatcaaaatctcttttaacatctgttaaagctgtaaagagaaatgaaaaaatagaaaaagtggcaagaatatttagtacattcttgtttaaaacattaaagtgtttcagttatttgcagaaaacttatcaggaatagtttgaacagtgtttgccttatttttatattactttttaacgaggaatatccatcttttctgtgtgtaaattattttactcttttctaagcttatacgggtcactcacatttaatcttttgcactttcaatatggtgaaatatctctgagagtctttttaatctgaagtgtttgttggtatcacatcctctaagacatcatcttttttgttacaatctccttcttcatttatattggtaagttcactttcactatgtttccctataggctaaggaaagacagcagtatcaacattccagcctgttactcttttctgtgactccatttacattttgactctaaaattt

SEQ ID NO: 821586 - DNA, 538 bp, Homo sapiens
atgatccaaattatggaaaattattggtgtggygactgttcaaaaattgctaaaatggtttataaccaatgtttggtctgtcaaatccataatcccaagaagacaaaaaaacattcagatggtaaatttctgctacctgatgggccatttgaacatttataaaggaattttatccatttgtcaccttccatgggatatgaatatattcttgcaatggtctatgttctctggtcacatagaagctttctatacaggaaggccaatattataacagtagctaaaagatgatcagaaacatgtttcctttatattcctggagaaatctccagcaatagaggtacccattttgctagaaaagttataaagcaaataaggtgttatgaacacaatggcattatcattgtccctattacccttggtcttctggaaaggttaaaaggaaaaatggcatcttaaaactgaaattgggaaagttaactaaatagattggattgccttagctaaaggtattactattggccttgatggcaatcagatc

SEQ ID NO: 821587 - DNA, 573 bp, Homo sapiens
gctgtgaagtaaacactgctctgtgaagtaaacatgtgctgagaactgagatctaaarccgtttaagacttctgctgttcctgcctatagcaaggagcacattttcttcactgcttgaagtggagaaaatggctattcccagccattcctgaagctcccatggggactgaaatccagtaatgctgctaaatgaatgaaagaaattagggtacctgggttcccagatgtcctcaaatggggtttaggtcaggaagaagttgccacagaactcaggacctactttgctactggtggtgacgtgcgtaaatgtgaccacttctttttactccacagaaatttttaagtgtccaaactgatagattgctcaccagcaaacactgaaatctcttgctctagtcatagggcgaggctttggaaaaattaagaacagaactcagagctcctcatatttcctagtgatttccagtggactttacatcctgccctcaaagattttctttgaagagttatgatttcataatctgacccaccaaaggctgtgaacaagatcatgtaatgatgcttcatatccaa

SEQ ID NO: 821588 - DNA, 591 bp, Homo sapiens
aaacaaggggtggattattcatgcctcccctttgtagaccatatacggtaacttccagayattgccatggcatttataaattgtcatggcatggtgggtgtatagcattgaggatgaccagaggtcactctgttcaccatcttggttatggtgggttttggatggcttctttactgagacctgctttatcagcaaggtctttatgacttgtatctaccttgtgccaacctcctatatcatcctgtgacttagaatgcctaacagtctgggaatgcagcccagtaggtctcagccttattttatccagcccctcttcaagatggagtctctctggttcaaacgcctccgacagtattgtaagcaagtgaaatgacaaagcagatgaacatgagacaaaagcaagatggggaagaggttgagcaaaacctcgaaagagagaaattcaaagcaaaccagcacccagactatcagctacccagaatctaatggacagcaccttctctgtacacttccatccatcccctcatagattcttccttttccttagcctatttccccgtgggggttcttcacatcaatgagacagggatg

SEQ ID NO: 821589 - DNA, 589 bp, Homo sapiens
agacttctgaaagatactatatagatggttaagaataatctaagccatgaactcagacaccaattctgatacttttcagtacacagtcagtgcgctcaactgtctgtgcctcagtttctacatttctcaaaacagaacaataacatgtattggtttttttttttttttttttttttgagacagagtcttgcattgtcgcccgggctggagggcaatggcgtgatcttggctcacttcgacctctgcctcccgggttcaaacgattctcctgcctcaggagattacaggcacctgccatcacgcccagctactttttttatatttttaagagagatggggtttcactatgttggccaggttggtctcgaactcatgaccttatgatccacctgcctcggcctcccaaagtgctgggattacaggcatgagccacctcacccggccaacgtgcacttytttgggtggttgacaggagcaaaagagagaatgcatatgaagcccttacctggcatgaagtacctgcccagcaaatagtggttagtagagttaggaagaggtatgtgatcaccagcagacagcaggcatctgg

SEQ ID NO: 821590 - DNA, 579 bp, Homo sapiens
cagaaaaagcatttgataaaattaaacatctctttatgatttaaaaactcaacaaattaaggatagaagaaatatatttcaacacaataaagtttgcatatgacaaacccacagcaaacataatacygaaaaaggaaaggttaaatttttttcctctaaaacctggaacataacaataatgcccacttttaccagtttaattcaacatagtactggaagtcctagacagagcaattaagttaagagaaagaaataaagagcttccaaattggaaaggagaaagtcaaattgtccttgtttgcagataacatgatctcgtctatagaaaaccctgaagactccacacacatacaaaaaaatctattagaagcagtaaataaattcagtaaagtttctgtacataaaatcaacataaaaattcagtagtgttgctatacattaatagtgactatctgaaaaagaaatcaagaaagcaatcttatttgtaatagttacaaaaaaaaatacctaggaataaatttaatcaaggagatgaaagatctcttcaatgaaaactatgacatgccgatgaaagaaact

SEQ ID NO: 821591 - DNA, 617 bp, Homo sapiens
ttttcctgtgctgttttcacaatagtgaataagtctcacgagatctgatggtctcataaaggggaattcccctcacacgctctcttacctgccatcatgtaagacgtgcctttgctcctccttcacattctacaatgattgtgaggcctccccagccgtgtggaatggggattccatgaaacctctttaaaaaaaaaataataatcagcctcgggtatgtctttattagcagcgtctttattattatgtctttattatgtatgtattatgtattattatatatttattagagcagactaatacacctgggtttgaattctggccctgtcactctctagctgtgtggaattgagaaggaaagctctctggtgattttcattatgtgtaaaatggataacatgaagtcactatgaatattgagtgttaaccaaaaatagcgattaaagcatagctgtcataagacgttcaatcattgttagctgttagtattaatatgtgccactmgattatgtcattgaattctcacaatcttataaagtagaaattattattatctcctttatacaaaggaaaaaatggaaacacagagaggttaggtcagcagtccaaaatcacac

SEQ ID NO: 821592 - DNA, 354 bp, Homo sapiens
gtagaagcttttcattttgatgtgatcccatttgtccatttttgctttggttgcatgggcttatgggctattattactcaagaaatttttgccaggaccartgtcctagagagtttccccagtatgtttcttgtgttagtttcatattttgaggtctttgatttaagtatgtaatctattttgatttgatttttgtataaggtgagagatagtggtgaattttacttctgcatatggatatccagtttttccaggactatttattaaagagactgtctaacactcaatgtgtgatcttggcatctttgtagaaaataagttcattgtaggagtgtcaatttatttctgggttct

SEQ ID NO: 821593 - DNA, 318 bp, Homo sapiens
aataacccctttatcatttttattgtgtccatttgattcttctctcttttctactttattagtctagctagtggtctatctattttgttaattttttcaataaacctcctaggttcattartttttcagagggtttgtgtgtctctatttccttcagttctgctctgatcttagttatttcttgtcttctgctagcttttggatttgtttgctcttgctcctctagttcttttaattgtgatgttaagatgttgatttgagatctttttagctttctgatgtgggcatttagtggtataaatttccctcttaacactg

SEQ ID NO: 821594 - DNA, 611 bp, Homo sapiens
tatatataaggattgagtgtggagataattaaaggattcaattttttttcacttgtttgtgtatttttgcataaagtcagcttgggattaacttattaaacaatttctatattccttatgctttgataactttctgccaattaaattgtgaatttaaaaatatatattatttaaatacatttcactgtcattgaatcattgaatttactactaatatctcacttatttcatttcattctccagtttacacgtttagaaataagagtcctgaagactggtgcctgattactagccctcagtacttctcctcttctcttcaacatacatttatttggcattgcaagtgtatgtgaatgacaattcttcttaagtgatcagatttctttccatggagactagatatttatttgtgttttttcctattaaatatgctattgtaaattgttaattctaatgtttatggagaataattttttatgataggttggacttaacctcatctatttattttcggcattatcttgctttagtttacttttcctgctccttcttgccctttagaagtcacaawtatttaaacatgttaaaagtagggttcagtaatacatata

SEQ ID NO: 821595 - DNA, 671 bp, Homo sapiens
atacgatatttctagtgatagcaaagcatttcaaagtcctttttaattttcttattctatctcatataataagcaagtatcttattatatcttatatatcggtaatgagattatctttgtgtgtttgcctgtgttctctttcagtggaaacaaagctctgtaatgatatgaactgttttgtatctattaataccctttcaggttttatcactattttaaaatagctagctcatggatgtttgctacttgaaggaaatagtttcctacttttcattttaattttaatttattgttattctttttaaatgtttgggaaatagtccaagccctgttttttctttttgtcataataatatttcattaattttcctttgaaatctattcattcatagaccacattttttctatgtgatttcctgaaacataattttatagataaatatacttatttatacttatttctgtggtaaggatagaaatatatattatttttatatgataaaacttgcgttaatgtgctctgtgactttgaaatgccttgctaacactagaaatgcagtgtttatacatttttaaaatatttgctattttgagattstgggagggactctatcctgctcacataaaaatcttctaacaatgtttttttttgtttgtttgtttgaaattgg

SEQ ID NO: 821596 - DNA, 630 bp, Homo sapiens
gtatgttgtagatcatagacaaaagttaaaattaataaaaaattaacatactaatgacagtgagagaaaaatggggtaaatgtaaaaaatgttgaaaatgtcaagagttacaatctattaaatatatsaattgtctattttaaaacttcaaaatacgtcaactgaaaacaaattggatgggtttaatagcagagtagaactaacaaagactgggattagtaaacccaaagaaaagacattagaaatttccaaactatggcaaaaaaggaaaataaaaacaaacagtgttagagagctgtgtggtataattaaaaaaaaatctaacctatgagtgatggaaatataatagggaaaggagaaagataatgaacggaagcaatatttgaggaaaacaaaagggctgagaattgtccataaaaaaatgtcagaaaactctaattagatcaactttatgcataagaaaatttaaacatgccaaggacaatgttctataaaccaaagataaagaggaaatttgcaaactagatttagggaaatgcaacaaaaataaataactaaacaagaattagaaagagattagaaagtaagaatatgtagtttctgtcatcattcacatttagtgactagttt

SEQ ID NO: 821597 - DNA, 512 bp, Homo sapiens
tttagatcccctactttctgctcaagttgacataaatgtcctccccatgcagctgggtgggagcatcaggccccacaagggtttgaggttccctactttcacagagagggaaaggggcagattcaggtagggacaacacattaaggaccccttgcttcttcctcatttcctgggtgggatggtcaatcacaccagtatgcctggaagtgagggatttcccaggatacaagactttcagtacaaataaggaaaatcccaggcaaactgggtccagttgatcatcacattcctggcagatttaaaaagaatggcatatacgcctacaggtgcacagagctacatgtgtgactcacgctgcggtatgtggtttcatgagaagtkacttatgaaatcattgctgatttctgatcctcatggccaggaaaggagacaaaatcagcagggttgaggtcagttcaaaaaggaggccttctaaccccgaagaaagcagaatccatttcaggagataacac

SEQ ID NO: 821598 - DNA, 549 bp, Homo sapiens
ggttttttattttctatttttgtttrtttttggagtttggttaaacaactcttttattttctgttttgccttatcttactaaagtgaagttttcctaaggcaagcaagaagaggagtggaagcacagttgcctggatttggaggcagagttgtcaggcttttcaagctaagagtcttgtgcttggattttccagattaatttgaaaagacctcccatttgtggctttgtacataaccaacaggcagatactgagtgccttggctcctagagttttgtggttgggttaggttgtttttgttgttgttttgttttggttttgttttcatttctgaagtttaagatgccttgactttttaaatgctcttaaggctattcgatgtaattcttactcctaaaactggctgttcttagcctgaaatctaatgctttgttttttgtacctctcccaggtgggtaacactctaggatgacatgatgttataattttaggggaaatcacatttttaccttatgctgttactgggcagaaccacgttttatgtaaacat

SEQ ID NO: 821599 - DNA, 552 bp, Homo sapiens
gatgcaagcccccagccagcacacctgggatgctcaccctgccgcacagttcagaaggcaagtcctcacctgctcgcaaagacccttcttctccaataaaagactctacttgcctgagtttcctcatcagggctgtcattcagtgatgtatgggggtctgaagaatactgccttctatctgtcttctgtttaccactcgctcctctgctaccctcctgccgcaaacagtcttcttccttttggcccagttctgtcccgtgaaattctcagaaggcctcgggagctgcgctgatgtattctctccttgtttgatagctcatcatcagtagataagcctacacacttcagagggtgacaggtttcttacttggagacttcactgcaccttgacttgtagatttgccttcagacagctcttggttatggtwacaagtggcccccgagtcccagaatctttcccaggttgccccagaaagaccagccacctgtcacaggtgcagttgtccggcaatagggaagcaacttcatttttgttttatatttattccctca

SEQ ID NO: 821600 - DNA, 577 bp, Homo sapiens
ggaaccttgattaaccatacacttcaaggatgaagtgcgtggtgcacatgagacatacacatgaaacataattttgttacatcccttgtttattaaattactcattcatgtacttatttcatattataaatacttattgaatgaccattatatatggtatattgctatgaagaattcaaagatgaatcagattagggtttgctgttgattctctttcaaaaatagtttatttccttgctttttatattgaatatcacagacaacgtaagtaaaaagccctggaccgggggtcatatggccaagaatctagttctggttttatgtaaaaatcagcaggtctcttcaactctgaatctcagattttccatcaataaaaattggaaaggatggaaaaaaatatccacttgcctatagtaaaaatgtaaataagatcatggtaatgtataaattactatytatctatctatctatctatctatctatctatctatctacctatctatttatttatttaagacggtctcgctctatcacccagactgcagggaagtggtgtgatcatagttcactgcagcct

SEQ ID NO: 821601 - DNA, 681 bp, Homo sapiens
tgagcaataatgaactcataataggtaaaatgactcattttattttgttttatgtcacttcttataataatatcttagtctaaaagattacttcggttgattcagagttcttacaaattttattaatgttctattattatttttagttatacatgcattttcccaaatttgctttatctccacttcaatatggggtatttatactccttgttcatttgctactagttgtgaagatgctacctgctgctgacttcaaatgaatccttgattattcactaaatcttgtggaacatttagctctactaaacactttttaaaaagcacacggaaactccaaaataaagacactttcaaataacttacaaaatgaaggccattattatggctataggttaatttgtctctaatgcttctgtttctattcttccgagtcttgtagaaccacatttaactaaactttatcttggacctggggcttcaatttaggtatgcttttcccctcattgctgtttgaaagttaatttatttctcaataccaaaaattcaaattrtttttcttttctctaattcttatttttttcaaatattctttaaaaacaaatttctttaaaatcttatttttctaaaaccaaactttctagttaatggtcctccattctgattttatttcatattacttct

SEQ ID NO: 821602 - DNA, 472 bp, Homo sapiens
cacttgtattactaaatagagtatttgcacagctcaataagtgacattgtacctatgcattgttcctaagtaaatttctataaccctattatatttgtgtattcataccacatataagtaattttttaggcttgaaactgaaatcattagcacttatcctgaatgcagctgtttctaataatgagtacaaaatttaaaaagttagagagtagtagtcagatatagtgttttaattaaacatcagatattcgttgaatagtttccacaagctccgttttgttttgataaagcatggacattgaattaggaaataagtttgaattttattcttgctcctcgctcagtaaccaatttgggggaagcttcttagaagtcttttagattcagtctttttttttctttttggaatgtaaaacatcggaacatctaattcataggattttttttwataaataaatgaaataaattgtgt

SEQ ID NO: 821603 - DNA, 584 bp, Homo sapiens
atcattggttaaatgatttgggacagacggctgcagtgatcagcctagatggtaaatgagtcatgagaaygcacattaggtggcagacaaccatcagttcagggtgggcttccttccttccttccttcctacctggcattctttctctattctccctagtggccctttaaaaatgcataagcatttagcacaaacatcattacctggtttacctccagagacacccgatgacttcttgatttccgactttagcttagatgccagaataaatctcctaaaccattcctctttttctcggccagttctcccaaagagatagagtatctgatctcgctggctagatcttgttccctcctgagggcggggcggcttcttagggtcctcacttccctcagctggcggcttctcttctgaagtctccttatcagtctgagctttagacataaagtcatcttgctgaccaagctcgatacaaatggggtactttttattccagattcgctttcgagccaaagttttaggtacaagataaatctacagagaaagaaaaatgatgatttatatattaaagattggctacacta

SEQ ID NO: 821604 - DNA, 456 bp, Homo sapiens
ttttacaatccttttgctagctacagagtgctgattggtacatttttacagagtgctgattggtgcattttacaatyctcttgtaagaaaatttctccaagtccccactccacccaggaagtctagctggcctcacctctcagcaagactggcagacgggtgggactgagcagtgtgctggctcaggcacagctcagtgactggtgaacaccaagcttcagaatgagtgcacggagctatgtgctgtagaccttgggagtactcacaaacaattggatctgcagattcaaatccatacacaccaagcaacaacgtgtgcaccacagcactgacccaggcacacagcttcaatgtgggcacagtcacagctgctcagaatggatagcactggcacgaatgcacaagcacaaagcgtggaggtgatgagagtgtctggtgtgtgttatagctgcagcc

SEQ ID NO: 821605 - DNA, 456 bp, Homo sapiens
ttttacaatccttttgctagctacagagtgctgattggtacatttttacagagtgctgattggtgcattttacaatcctcttgtaagaaaatttctccaagtccccactccacccaggaagtctagctggcctcacctctcagcaagactggcagacgggtgggactgagcagtgtgctggctcaggcacagctcagtgactggtgaacaccaagcttcagaatgagtgcacggagctatgtgctgtagaccttgggagtactcacaaacaattggatctgcagattcaaatccatacacaccaagcaacaacgtgtgcaccacagcactgacccaggcacacagcttcaatgtgggcacagtcacagctgctcagaatggatakcactggcacgaatgcacaagcacaaagcgtggaggtgatgagagtgtctggtgtgtgttatagctgcagcc

SEQ ID NO: 821606 - DNA, 689 bp, Homo sapiens
attgggattctgaaaggttatttgcaggagcaatccaacgggtaggttttaatctcaratcctaaataagcttatgactgaagccagctcctcttgcccagtgctgctttcaactgttagaataagctggggaggcacttaatgtgtttgttgcaataatcttcttagggaaaagcccttagaaccaatattccaggcaaatccagcagacaaaggttacctggttgtttcaaagcccacccacatttcccattctcccagcttccacacagaaaggttagattcttctctcaatagtcccatttatgctcacagtgacctggcacatggcttttgttcaccaaagaaaagcctttcctttcaaggacttaagtcttctgcaataagagttaattctttaagtttaacaaagttctcccaatacaagtagtccccacttatctgcagtttccgtcacccatagccaaccaagttctgaaaatatcaaatggaaaattgcagaaataaacaattcgcaagttttaaactgcatgccattctgggtagtgtcatgaaatttctcactgtccaatcccatcctgcccaggatgtgaatcctccctttgtccagcagatccacgccgtaggcgctacctactcattagtcacctttagctgtctcagttatcagatcaactgtcaccatatta

SEQ ID NO: 821607 - DNA, 624 bp, Homo sapiens
agctcacacccataatcccagcacgttgagaggccgaaggggatactgcttgagcycaaaagttcaatcagcctgggcaacacagtgagacctttctttccacacacacaaaaatttaaattagccaggtgtggtgacacgcaactgtagtcctatctacttgggaggctgaggcgagaggattgcttgagcgagtgagctagagttgcagtgagctatgattgtgccactgcactccagtctaggtgacaaagcaagacccagtcatgaaaacaaaaaaaattttatatgttccagatagctgaattgtctgtaagttgctaaaataaataaaaataaattactttagcgtcttaagaacaatgtctccctctagtcaactacaggacacaaagcttaagaaatgacaaacagcaactcctccataagaagaaaacaactaagttttatgcattccttttttaagttagaaagaaatttgctgtttttattgcaagttagttaaaactgatataatttaacgagccaattcagttaattcttaaattcctgtattactccaacttgagacatataaataaagacaatgataaaattttaaaaattccttgaaagacaaactac

SEQ ID NO: 821608 - DNA, 624 bp, Homo sapiens
agctcacacccataatcccagcacgttgagaggccgaaggggatactgcttgagctcaaaagttcaatcagcctgggcaacacagtgagacctttctttccacacacamaaaaatttaaattagccaggtgtggtgacacgcaactgtagtcctatctacttgggaggctgaggcgagaggattgcttgagcgagtgagctagagttgcagtgagctatgattgtgccactgcactccagtctaggtgacaaagcaagacccagtcatgaaaacaaaaaaaattttatatgttccagatagctgaattgtctgtaagttgctaaaataaataaaaataaattactttagcgtcttaagaacaatgtctccctctagtcaactacaggacacaaagcttaagaaatgacaaacagcaactcctccataagaagaaaacaactaagttttatgcattccttttttaagttagaaagaaatttgctgtttttattgcaagttagttaaaactgatataatttaacgagccaattcagttaattcttaaattcctgtattactccaacttgagacatataaataaagacaatgataaaattttaaaaattccttgaaagacaaactac

SEQ ID NO: 821609 - DNA, 605 bp, Homo sapiens
cttttgtagtacagatttggggtgttgtttttcctatttttctgtttttcggaaaaatgacttggaattttgataaraatggcactgaatgtgttgatcactttgggtagtatgaacattttaacaatattaattctaatccatgaacatgggatacctttccacttatttgtgtcatcggcaatttcctcaatgttttataatttttggtataacagatatttcaccttcttggttaaatttattcctaagtattttattttttattttttatgctattgtgaataagactggtttcttattttctttttcggatagtttgttgtcagtgtaaagaagtgttactgatttttgtgtattggttttgggttctgcaatttgactgaattcatttatcagctctaaattttttttggtggagttctaagggttttctaaatataaggtcatatcatcagcaaacaaaaaatttcacttcttccttttctatttggatgccttttacttttttttcttgtctaattgctctggctataacttccagcactacgttgaataaaagtggtgtagtggtaatctttttcttgtttctgatcctagaggaa

SEQ ID NO: 821610 - DNA, 669 bp, Homo sapiens
ccctttcagggcgactctaaaagcatccccaaagcaaatttaaggagatattcaggtgcttattattttagaataaatttattttaattccagctttatayagctgtttatgttatattagttgtttttcctactatacagatacttcattttctctgctaaatactgatttaggatgccaagtatacatttatgtacaaaaactaagagtgagtattaaaatctaattaggtaacatgagtttttaaatattttctcttacttctttccaatattctcatcttaatatcatgattttaatatttaccatcctcttaccctgaaatgtcttatttttacaacaaagttttaatcaaatacagaactatggcatgattccataatgtcttagttcattttgttctgctataacagaatactgcagactggataattaataatgaacagtaatttattggcttacaattctgaagacttggaagtccaacattatgacagcagcctctggtgggggcctttttgcagagtgatcacatggcaaaaggcattacatggaagaagggaaaagagagagagggcaatagggggcttatcttgcctgtctgtggtggcattagtcccaacccttagggcagagcccttatagtctaatcaccttttaaaggtccc

SEQ ID NO: 821611 - DNA, 609 bp, Homo sapiens
cctcttctgtgggggtcagcacggggaccggcccttccctcttggacctggtggaccctgtggcacgtggggtggcatcggctgcctgggcacagctctcagcgggagggccaggtcccaggaaatgaggcaggggctgccaggcccccacaggccacctcacctgcagcccctctttctggccctctgcacgcagggaagtggtggtcagagaggggcacacgggcgggctggcagccgccctgtccccatgcccccactccagactttccccttcccatccttcccagaggacccaagggaggaccacgcctttttaaattatttttaattttttggatacataacagttgtacatatttatgaggtatgtgtgctatagtgatgcgtgcacgtaacacctaacgatcagaccagggaaactgggctacccatcacctcgagtgctgatcattcctttctgtcaggaacatcccaaatcctctcttctagctattttgaaataaacgayaaagtattaactatagtcaccctacagtaccaccaaacagcaggtcctagttcttcagcctggcagcatgcctgcagcccttcatctcccccttccct

SEQ ID NO: 821612 - DNA, 503 bp, Homo sapiens
ctccaactaaaagacaaagattgtcatgctggattataaaaataaaacaaaacaaatgatatgttcctttagatggtactcggtagtgcaggtgcctaaaggcagaaggatagtgccgagaccagctcggtcggggagaccctaacccagtggcgctagaggaattaaagacgcacacacagaaatacagaggtgtgaagtgggaaataggggtcgcacagccttcagagctgagagccccgaaacagagatttacccacatatttattaacagcaaatcagtcattaggattgtttctatagatattaaattaactaaaagtatcccttatgggaaacgaagggatgggacgaattaaaagaataggttgggctggttaactgcaggaggagcatatcctcaaggcacagatcgctcatgcgattgtggcttaagaatgcctttaagcggttttccaccctggrcgggccaggtgttccttgccctcattcctgtaaaccca

SEQ ID NO: 821613 - DNA, 608 bp, Homo sapiens
gaacggtgcagaacaatgcctggctctagcgaggtgaggctgcatccgccagctcttgttatttcccgccccaaagcagcctatggtggaggaaccagggaaaccaggctgtcccgtgcatctctccccaggagagcagccctttgctgagcatgacaggggaaatcattgagaccacacttttattgaaagctctgtgtctggctgctgtgttctgaactgtgattgattacagagcctgctggatgcgccggacagctccagggtggcgggtgtgttcctggcacagacatgtgagcttggggtcacgaggtttaatgaacactttgcaccctgctggcgccttgaaagttgatgctttcacaggcggccggggcatctgccggcaggttttccagttcagcatttttcattttgcagtcaaggcaggagatggggggagaagtgataaagtgggacctggggcatctgccagagctatgctgatgctcccctctgtgctcctggcagaagccacagccaaggggaacactggtcagccggccrccaccctgcaccctgacaaatggagctgaagccacagaacacgtgggctgctgtgtggagct

SEQ ID NO: 821614 - DNA, 630 bp, Homo sapiens
caaatagcacaagaacgaggattaggattggaccctaaagatgtgactgaattactccaatcttatgataaaacttaaagggatgaaaagttccttcttatggatgataaaaataaktttttttttttatgaatctacttctggtgaagatgctgtgaacattattgaaatgacaaaaaagaatttagaatattccatagatttagtaggtaaagcagtggcagggtttgaaaggattggccccaattttgaaagaaattctactgtcagtaaaatgctatcaaacagcatcacatgctgggcagagaaatctttcatgaaaggtagagtcaatcaattcatcaaagtcattattgccttattttaagacattgtcatagccaccccaactgtcagcaactaccaccctgatcagttagtagtcgtaaacctcaatgcttgacactttatcagcaaaaacattacaactgactgaaggctcagatggatgttagcattttttagcaataaagtattttaaattaaggtaagtacattgttttttagagacaatgccattgcacgcttgatagactacagtatagtgtaaatataacttttatatgcacatggaaacaaaaaaatttgtgt

SEQ ID NO: 821615 - DNA, 493 bp, Homo sapiens
ataatgattgtctcttattctactcttcaaactcctgtaagtmatttagtactcctgtaagtcaaagtggtatatttaattacttctagtaactccttattgcatttagaataaagttcaaattccatgatctggccactgtttccatcagcctcattctcatttgtcatgcctgagttacactgaccttctttctttttctggaacatgttaagctcattgtcacctcagggccttcatatttctttctgtctggaatggtacatgctactcccccagatctttctgtgatctttctcatcattcacatctcagctccttagagacttatctgatcatcataactagagtagcctcgccttgtatctgatcttctatttcattttgctgttttatatatttttatagtactgttgcaggtggatgcccagggaaccagagagtgagtagtggttttgcatggaagaagttattagaggtactcttgatcaac

SEQ ID NO: 821616 - DNA, 300 bp, Homo sapiens
tttgcaagctggagaaccagggaagctggtaacttgcttcagtctaagtccaaagggctgagaaacaaagaccagagaacctgaagttctaatgtccaagggtaggagaagacaagtttccctgctccagaagaaagagcaaattcagctttcctttgcctttctgttctatycaggccttcagtggaatggatggtgccacacacattgggtgaggatagatcttcctactcagtctattgattcaaatgccaatctcttcctgaaacaactctacagacatacccagaaataaagctt

SEQ ID NO: 821617 - DNA, 608 bp, Homo sapiens
tactctctacttctatgagatcattattttttcttttttttttagctttcacacgtgagtgagaawgtgtagtatttatctttctgtgcctggcttattttacctaacataatgtcctctaagctcgtccatgttgccataaatgacaggatttcattcttttttgcagctgagtagtattctattatgtatatatgctacattttccttatccattcatctgttgatggacacttaggttgattctatatcttgcctattgtgaatagtgttgcaaaaaacgtgggagtgcctttcaacatacttatttactttcctttaaatatatacccaatagtaggattgctggatcatatggtagttctattttaggtttttgaggaacttcaatactgttttccataatggctgtattaatttacattcccgccaccagtgtataacagtgcccctttctccacatcctcaccagcattttttgtcctaaagcagtattttaaagtttatgttgctatacaagttggaaacaggaaattctaatgatggataaggaaatatggccaaatgtcttaaaacagatttctattatatgcattctttctttagtg

SEQ ID NO: 821618 - DNA, 608 bp, Homo sapiens
tactctctacttctatgagatcattattttttcttttttttttagctttcacacgtgagtgagaatgtgyagtatttatctttctgtgcctggcttattttacctaacataatgtcctctaagctcgtccatgttgccataaatgacaggatttcattcttttttgcagctgagtagtattctattatgtatatatgctacattttccttatccattcatctgttgatggacacttaggttgattctatatcttgcctattgtgaatagtgttgcaaaaaacgtgggagtgcctttcaacatacttatttactttcctttaaatatatacccaatagtaggattgctggatcatatggtagttctattttaggtttttgaggaacttcaatactgttttccataatggctgtattaatttacattcccgccaccagtgtataacagtgcccctttctccacatcctcaccagcattttttgtcctaaagcagtattttaaagtttatgttgctatacaagttggaaacaggaaattctaatgatggataaggaaatatggccaaatgtcttaaaacagatttctattatatgcattctttctttagtg

SEQ ID NO: 821619 - DNA, 496 bp, Homo sapiens
gtgccctccttagggatacttaaaagcctgcttctatgttacttctttcaaaaccagtgagtgacttagaaggtcttctcttttattgcagatgcgtagagcagcttctgaagatcagcaggcctgtgcagcatcatctgagggtccccagaattaaagcaacatgaaacccttcatactgagtgtggccacttcccactgaccatgactcacaaatggtgaggccacctgacagcgttgaagataattactattcatcctcttctgctaatagaaactattttctcccctaatctaggtttccaattttagaagctgccctgtcctcataaaagaattaccaggaaggtaggaggtttgtttgtttgcttttctgtgcwtctaagtaccctgacaatctaatctctggagagtctcagtaaccaggcaacacaagtcatgctccaattgtgcggtcctcaatccacttttcctgtgctattccagttcaaagtaa

SEQ ID NO: 821620 - DNA, 360 bp, Homo sapiens
ggttatgacttgtacagcatttaatgatttgtaaaataatgttaagtattttaaactcattgcaatcatttttattcatgtgctctggaagccatcattttgagggggtctctttggagaagaaggagttggtgtatgtatatttgtatacatttcaatttctccaaatccacacatccagtacctctttctaaatatatggcacttatttatttttataattcacgagccagacaaattttcctyaaaatcaaggtacttgcctgtgcagttcccaacattctgactcatgaatctcctcttagctggggaaattctgaaaagaagtttgcaacacgtcgccgtggggcccagtcacac

SEQ ID NO: 821621 - DNA, 622 bp, Homo sapiens
taacctagctatccggtccttctgtcatgaatggcatccaaatgctggctctttgaagtggagaagcagtgggaccttcagagacagccaaagggggacatytgtgctgcaccagcagtgacctctcatccaggctcaattcctgcccctggtgctactgcccttggtgaccacaacagttttgccctgcctgggtgacgggctgagttctttcaggacaaagatcttaggtgcgggctggatctccagggctgagttctttccagacagagatcttgggtgcctgtgggcattccagtgtccctgccccaccaagcatgggaagcgtagccactgcctctcccctcattggctatcccagatgtctcccctagcctcccagcttttacttcccaaggccagactcaggcactgatctgtataagaaacatcagttccttctaagaactctcactgtccccaccctacaccccagccctactccccaggactatgctgagatgggtgtcagaatctgcggctcagcttccagacaggtagggaaagaacacaggccctggccctgacaatatgttgaatgaatacgaaaagtgaaacaccaagaaacaccaacatttaagag

SEQ ID NO: 821622 - DNA, 576 bp, Homo sapiens
gcaggtatctgcaggaactggaaatttgtaactttaaaaagcttccaaagtggggctaatgagcaatggatgtaggaactggggtgaaaagatcaggtcctattcattaggagtttataagctgctcgggaagatcaaatcatgagaaatgctaactcacaagcttgaattatgttatgaaatgccttacatatttaacctgcttagctatgtgtgaagcatttcataaagggaaatttcacatagcccatccctcctacaaggtaggtaaagcaattgtttttattcacttttttcttaagggggtattgaggcaaagacattaactgacttacttagaaactcaaagtcctgactgagcccagcttcaaacagtacatatcctacgcccttaattgtacaaatggactcactggttcaaggtatttttttttcttttgagatggagtttcactcttgttgcctagactggagtgcaatggtgcaatctcagctcatcacaayctccgcctcccaggttcaagggattctcctgcctcagcctcccgagtagctgggattataggcatgcgccag

SEQ ID NO: 821623 - DNA, 583 bp, Homo sapiens
tgttgttgtttagtttgtcttggcacttaaaagatattgtcctgctttcctctagtctccacagtgtctgataagaaatcygctgtcattagaattgtttctttcctacaattatcatgtcatttttttctgttttcttttaagaatttattatttgtatttaattttcagaatttcaatcacagcatatatcatttctttgggtttatcctttttagagtttgctcagtttcttgaatctgtgagtttgtgtatcttgacaaatgtagaaaattttaagcccttatttcttcatctactttttcagctatgccttctttcttctctccttctgagactccaaatgataactattttgttatagtctcacatgtccttaaggctctgttcattttttttttctcagtctattttctctattttctgatttggtaatttctattgttttatcttctggttcactgattcttttctgttattgagccatccactgagctttttatttcagattatattattcagatgaaataaatcaactttctaatccaatccctgcagtgtttatatgacttttttggggcct

SEQ ID NO: 821624 - DNA, 583 bp, Homo sapiens
tgttgttgtttagtttgtcttggcacttaaaagatattgtcctgctttcctctagtctccacagtgtctgataagaaatctgctgtcattagaattgtttctttcctacaattatcatgtcatttttttctgttttcttttaagaatttattatttgtatttaattttcagaatttcaatcacagcatatatcatttctttgggtttatcctttttagagtttgctcagtttcttgaatctgtgagtttgtgtatcttgacaaatgtagaaaattttaagcccttatttcttcatctactttttcagctatgccttctttcttctctccttctgagactccaaatgataactattttgttatagtctcacatgtccttaaggctctgttcattttttttttctcagtctattttctctattttctgatttggtaatttctattgttttatcttctggttcactgrttcttttctgttattgagccatccactgagctttttatttcagattatattattcagatgaaataaatcaactttctaatccaatccctgcagtgtttatatgacttttttggggcct

SEQ ID NO: 821625 - DNA, 459 bp, Homo sapiens
gaagagctggagaaaaaattagaaggtattttcagaataccatcaaatactttaggtattttcagaagttttagatactcatgacactggatttttcaattatgttcaattttaccctcatacttgtggcttatcttttctcaattcaattttatcatacaaactgcttttaaattatgagtaaagtcatgatgtaaactcacagactgaattaaaagtgggagagagaatttgctgagataattctaaaggagttggaagagagaaaaatgataagggattattatgaatttgggctcatgtgtctgagtaagtcccatttggagaaattaactgaataagaaagaggtcataggtagaacagaattgaggagcatagtaaaagcaggaaaaagtacggtgtgaggcaraggtattgggtctcacaggtttgtgtgctaactaccaaatgtaggtgtg

SEQ ID NO: 821626 - DNA, 593 bp, Homo sapiens
agctcctgcattgttttattgtgagtcttagcttctttgcattgggtttcaatgaactcctgcatctcaatgatcttccttcctgtgcatattctgaattctatttatgtcatttcagccatctcagcctggttcagaatgcttgctagaaatgtggtggggtcctttgcaggaaagaaggcactctgggtttctgggtttctgagttttcagggtgcttgcaccggttctttctcacttttgtgggctgatgttcctctaatctttgaaattgctgacctttggatggcttttcttttcttctgttatcctatttgatgaccctgaggtttgactgtggtataaggtgattcagccaagtggcttcatttctggaagattttagggggccaacactcagctctgaactcctggactgtgtgttctgactgtgggggacttttattgggccctgactttgttccctgactccttgagattaggaacccactgcgctgggggtccaggggtgaggtactcccagactgctggtcattaccctccaatgggtggtgtcaggcaaagtgtttcatamtgcagtgacagcaggatcc

SEQ ID NO: 821627 - DNA, 643 bp, Homo sapiens
tccagcaaaacaccaaactgaaactaagttttactgactaaagatcatacataagagatcttttggtttaataataagaaccaaatcctgtttctctatgagtgaaaatggagagagatgctttatgggcatgcaaccatggagtaacaaaacaccctatagctcaaggggtcctttgcttggcttaatgctctgttattgctgtctcaaaattctagatactttttaaacaaagggcaccatatttttattctgccctgagccttgccaattatgttgctggttctggttcccaaggcaagtggcagctagctaccgtctaaggactcttgaggtgacaatggctgtcaaatccactttgtcctcaggagggtgctgttccacctttaatactcagtcctagtcttagatgcagactttttgccttcatttcccaatgtgcagctaaatataaaatcaggaatgtgtaagtaggattttaaagtctgagctactccaaaagagaaatagacatggaaatacaaatagatatgaatttgttatctatttgttgagctttgaccttgtgcygggtgcatggtaaattctgtgtttctttaatttgtataacaccttatgatacagatgtgatcattcccatttt

SEQ ID NO: 821628 - DNA, 562 bp, Homo sapiens
tatgttttgcctaaaaaatcacgccttaaaggagtatgaaagcacataaatttgcttatttctatgacaactcaaaatgactctaatagcaatgtcacattaaaaaaaaawagaagaaaacctggagtatttacattgaacaaaataagacatacgagagatacaaaattatttttttgagcatttaaagggttatcttgtggaagtgggatgagaattatgttgtcctggaggaaaaaatcagaagcaatttatgcagaattttggctcattttgaggatgaactttttaatgaatagaactatggcagagattggccctattttccaaacctatttctcctcatctggggccgacattttgataacattttccagactcccttgcgttaggtgtgtgcttgtgattaagttctgaccaagggtgtgtgacgtgggctgttttcaggcctggcccatgaacaccttctttgcacagtccgctatgctctttcttcttccactggcttgatgctgatgaacttggaagcctttgaagctatgtgccaaagacggaaggagcc

SEQ ID NO: 821629 - DNA, 547 bp, Homo sapiens
ttttatataagaaacacatatgtttattttatagatagatatacatagataaagatctctagtcagccttttttaaggctgggctgatcgcggtgcctcaaaactataatcccagcactttgggaggccaaggtggccagatctcttgagtccaggagatggagatcagccagggcaacatggtgaaaccccatctttacaaaaattagctagtatggtgtcatgcacttgcagtccctgctactcaggagactgaggtgggagaatcgcttgagcacagtacgtgaaggcttcagtgagctctgatcacatgactgcactccatcttgggtgacaaagtgagaccctctctcaaaataaaataaaataaaaaggctaccaccatactcacagataagtgtgtcaggtatatttgcagctatctttcctatattctatttggtwaaaaaaattgcaaagaactcttctcattctagatttttgtattaattagacatttgaagtttatagcagaagagctataatcatgtttggtatgtgtactcta

SEQ ID NO: 821630 - DNA, 646 bp, Homo sapiens
ccttttgcactcctgttccaatcctcgtgctttcactccacagtttggcattcgcctcttctttcacatctagcatctgagacatttcttttaggaaattattccactgytgtttctcaaaattcacatttctattacttaggtgtccttggtgtccttcaatctttttgctggaatttctacatagttaagtttatatattttttctttagggaaacaagctttctgggtattactttagcatgttaattcatctatgaaaagaatggccagcatccctcaaatccccaatgcacacaataaaaagcatccagagttcttcctttggaatcaaagagaacattcacaagaaattaatattgttttcttttcatgattcggataagcctttggtctatattcctttaagaaactgactacaagagcaagggaacttcttgctaattgaagagattttctttctcattataggtttagactacactgcttccacccataattcctccagattaatgagttttcttagaatgtatgcatacagcaggtaagaatattcaagccacatacttagacatataggaaattttttttttcctcttgaactaaacatggctttttccttaagttcctactccatcagtaatgg

SEQ ID NO: 821631 - DNA, 324 bp, Homo sapiens
agttcagcatggctgggggtttcaggaaacttacaatcatggtggaaggggaagcaaacatgtcctcttcacgtggcggcagcaaggagaagtgccaagcaaaaggggtaaaagccccttataaatccatcagatcacatgagaactcactatcacaagaacagtatgggaggaaccacccccaggattcaattttctccacctggtcccacccttaatatatggagattattacaattcaaggtgagatgtrggtgggaacacagagacaaaccatatcaacactataactcatttgttgaaatattttgcagaaatggatgt

SEQ ID NO: 821632 - DNA, 566 bp, Homo sapiens
tggtatatcctcactgcagtctagttaccaactgtggacaattcggtttttcaatgaatgtgagtttctcattaatagtgatgctgattgctaaccctagttttgtaagctagttctgatagcaattagaaataaactacttcgtgccttaactataggcaatcagaacactgaaaaattctgactgatgaaatcagtttattgcctgattagtctgaatataattcaaggatttacatttacaacagcacaggttgcagtaaccatagtcctagtgaagtaatagtgtaactggtttatattttgtatagtacacacataagtaaacaaaattcttcaaataaaatgctcctgagacatatagttctaattctcaaaaagatagaaatgtacattactacattactttggtttccacaagtgtatggcaaatgcacctgatagcaataagttaagcatactctgagaataacactatggtctaaaaagaatgtgtgttcagagttctgagctaagaartctgcgagtggccaacctggagacttattccttatctgtgaggaagg

SEQ ID NO: 821633 - DNA, 617 bp, Homo sapiens
acatcctatattcatagaaaacatgttgcaataccccttattgttctgaaatacaattcataatacagcagtataacctgcctataaatacagtttaaaatgttaatatagtatcctaaccatggtataaagaagaaataaaagaaaaacaatttatttatttattttttggagatagggtcttactctggtgcccatgctggagtgcagtggtgtgatatcagctcactgcaacctctgcctcgcaggcttaagtgatcctcccacctcacctttctttgtagttgggactacaggcacatgccaccaggtaaaaaatgtattttgatatataaatgatcatgaattactacaaaaaaagacagaatgagataatcagatactggaatgtgtagttttagtaaccatgaatatgacagctactaatgggatttcatttaggtgtatttatcaacaatttgagtaccatgaacagtgctgctgtcagtgataygcacttacaaaatgcagcacaaaacttggaaaagttcaaattaaacacagtgtttcttcaatggagagaatagttagttacattttagtaaaataaagtcattagtagccttgtaaatactatt

SEQ ID NO: 821634 - DNA, 536 bp, Homo sapiens
gttgaaaatattacatacaaataatatgtgggaaagtattataggataactcgttaacttgtatcagtgtaaagatatcacagagtcctctgttggaatcttcgttctaaaasttgttagttatttcagttcaatcaggcttattagcctctctaatattcttttttttgtatgtacaaaattcacactgctgcatttctagtactctaagatgccatagaatgtaggccacatcattgttttacacatcattaataaaaaacaaaaggccaataattacactatggtattccatcaattttaacatgaatcctgatttcagagatgttaatagaaaaaagaataagaaatgattactgtatttaaattgatgaaatacggtaggcttttttgataattaaatgagataatgaatgcacaaagcttaacacatgcctgaaatgtcaatctcagtaatatcagcaacacaaaaatatttggaaatctctactatctttaaaataactgggaaatataatataacctgtctaaatttg

SEQ ID NO: 821635 - DNA, 536 bp, Homo sapiens
gttgaaaatattacatacaaataatatgtgggaaagtattataggataactcgttaacttgtatcagtgtaaagatatcacagagtcctctgttggaatcttcgttctaaaacttgttagttatttcasttcaatcaggcttattagcctctctaatattcttttttttgtatgtacaaaattcacactgctgcatttctagtactctaagatgccatagaatgtaggccacatcattgttttacacatcattaataaaaaacaaaaggccaataattacactatggtattccatcaattttaacatgaatcctgatttcagagatgttaatagaaaaaagaataagaaatgattactgtatttaaattgatgaaatacggtaggcttttttgataattaaatgagataatgaatgcacaaagcttaacacatgcctgaaatgtcaatctcagtaatatcagcaacacaaaaatatttggaaatctctactatctttaaaataactgggaaatataatataacctgtctaaatttg

SEQ ID NO: 821636 - DNA, 539 bp, Homo sapiens
  misc_feature 525, 526, 527, 528, 529, 530, 531, 532, 533, 534, 535, 536,537, 538, 539: n = A,T,C or G
ctctcaataatgttacactggcaattaaatttcaacatgagtttttgtagggacaaaccacatccaaaccrtagcacacctggaccccatcccagcaatgggttggctccacagggcccctgaagtttatccatagataccatttaataatgcttatctgaactcacctttgatggcataacaatttctgttcttagatcccacctctctctaagtggttaaaattgtaccttttctgtttatgcgtattttaccacaattttaaaaatattccacccctttctgatctttgagttcttctaaatcaattgttcccaaagttgtggtccccagaccagcagcatcaacattagcatcacctgggagctcattagaaatgcatattcttgagccctacttgagacctactgcatcagacactcttggggtgggaccagcaacctgtgttttaacaagctctacagatgattttgattcaccttgaagtttgagaaccacttttaagtaataagtaagtagaattcnnnnnnnnnnnnnnn

SEQ ID NO: 821637 - DNA, 481 bp, Homo sapiens
taccttaatttttgctttcacaattttagcgcatacccattttatgcgctaaaacacagttaacaatttttaggaaaaggattttwaaagacaaagaaaaaccccatatatcttttccctaaaaaagttctaaaaagttcttgccgaagtctaaaagtagacttctcctaccaagaaggatcaggatttctgaactatcttagaagtataggttacatcacacagaaaggacaaactgactgacccatctggaacataaaatcatgttcctaagaaaattatcttaaccaactacaaaacctaaaaactcatcattttttgccaacgagtcttagccataagaattttcctttttcgcaagatagcaaaagccattaacccacctactggtaattattcaggctcgattccttaacatgctagtgccaaaagtttaataatagttatctatgtaccacatgttgaacctattgtataaaat

SEQ ID NO: 821638 - DNA, 492 bp, Homo sapiens
tcctagtactgggctaggtgttagatgataacggygattacagagggcatgaggtagaagataaactaaacagaaagcagaaaactaatttttctacacttaaaaaaattaattttagaaaagcaaaacgaaaaacccagtccttgaactttagttctaaaaaagcttgacattccttatattaaaatagtacttttaaattctatagcaaacttcccaaaagtatggttattaaaattaaaacactgctattctgtattatgtgaaagatctgaaataaagggaaaaacaatattctgcatttatagaattcctttccctgaggtcctcatagcactaaaaagcaaaattatatcttttgtggagaagagaggcaggtacatggagagaagtaagggtgttgagagaaagaatttcgataggagacaaaaattcaaacaaacccaaactttatacagcaatctttaatagtacttagcgccttacaatcct

SEQ ID NO: 821639 - DNA, 523 bp, Homo sapiens
agaatagacaactgcgtgttctggccaaattttgtaatcccttgagaaactcaaatagaagaagttccttattaatgtttttaagttgccatttgatcttcaaacactgatttcacgtttctttttcagcacaccaaatgaaaagctgttgggtcatttggtaaaggaaaaggtaggactctttatatgctggatttctttttctaattctgaaatgtctcttgggactaaaaacaattgcagaggggtctgagcttcctagaatggtatgattctggaataaataaaaaccgaagaaggacaacattaaaaaaatttttttcttagaaaattgagaaatattcagacagcctgcctttctcccagatgatctgattaactcagtatttaatatttttacgaagttgttstgaggtgtctctaaaagtgatacctatgtcggattagttggaaatgacctccaagttatttgaaaattatttagaaatggtcttccctgtgtacccctgctgtctcatgagac

SEQ ID NO: 821640 - DNA, 655 bp, Homo sapiens
tggagtatcctgttttctctctgctgctgtgagttcattcgcattagcacaaattaaagctctaccttaaaatagctcaaagagctgctaagtgtttttattgagatgcagcacttgattcactttaagatcacttctacagtatatgtaagggactgctctgcaatttaaaatgagcaaatatttaactcatctttggatgtccatatcaaacactcttaaaaaattttttgaatgtatagtttcattgaagtttttatttgttgtttgttttggggttttttggaaaatacaaaatgtacttacaaaattttcaaattaaaattggtcgagagacagttttttcaacagatggtacagaaaaaactaatgtccatttgcagaagattgaaattagacccttacctaacatcatatacaaaaattaactcaaaatggatcaaaggcctaaatgtaaaacctacatataaatggccaataggtatatgaaaaaatgctcaacatcactaaacattagggaaatataaattaaaacctcaatgagataaccatctcacacctctggctgttagtaaaaaggtaatggataattgttrgtaaggatgtggagaaaagggaatccttgtttgtaaatagttgatgggaatgtaaaatt

SEQ ID NO: 821641 - DNA, 529 bp, Homo sapiens
ttacaccccagaatataagggcagggcagcctcaagtgacatcaccagatcatctgcagcgtcaaccaaccgactcaaayatatatcctccacaccaccactcccctctttttctcactattagcaagccttccatagtcttcatgtttcttctttaaaagcaagacctatgcttactcaagtgaaaagcaaataagaaaaaccaaaggaaaagaataaaaaactagcttgagtacaattttcactaaattgacattcggatgataggaataacactaaaatgttaaaggaaaatttaacttgaatgatctagacagataatgaataaaagagaaagtcaggaagaagcaaagagagggaggagaagaaagaaaagaaaaataaattaaggaaaagaaaaaaaaaacaactaaatatccctgaaacgaagtcttgtttttaactctgatttgtcctgaaaccaggcaactgtgggaatcttgaaattctttctaaaaaaattaaataacaaagaggaagaggactccat

SEQ ID NO: 821642 - DNA, 601 bp, Homo sapiens
gtgcatataaaagttttgttggctggacatgttggctaaaaaacttttgtttayactatagtgtagtttattaagtttgcaatagcattatatttaaaaatgcaatgtacataccttaattataaaatattttattgctgctgggtgtggtggggcatgcctaaagtcccagctactcaggaggctaagacaggaggatcacttgagcccaggaatttgagtccagcctgggcaacatatcaggaagcttgagaagagggagagagacaggggaatggccagtcagtggagcagtcagaacagaaacaacatttattgattaagtttgccatcttacatggtcacaactcatggtgtctcaaaacagttataatagttataccaaaggccactgatcaaagatcaccacaacagatataataataatgaaacatttgcaatattgtgagaatgaccaaaatgtgacacagagacataaagtgagcacatgctgttggaaaaacagtgctgatagacttgctcaatacggggtttacagggttgccacaaacctttaatttgtaaaaaaaaaaaaacaaaaaaacagcgaaacacaataaaa

SEQ ID NO: 821643 - DNA, 531 bp, Homo sapiens
tatttataatccaattaaggggaaaactctcctttttttcccccaaacaaaatcgaacatagattctcagattgtaaaacaactaagcctatttggtttaaagcaaaattctagaggagccrgaggtcaggagcccgatccacctagcttcttgcttattccctggcagcgctcttttaaggagctcctctatcaggcatcttagtgaaccctgattgaagactgctggtctatgtggtctcacaacgttccttctagttcagggagtccctttttgtattattaaaaatcttgaatgactgcttgagaaccaaaaaaattccattatagtttgccatttgtcgtcagaaaacatggcctaattaaatatactatttcaataaatggcctaaggaatgcttatgaataagaaaagaattaatatattgaagtacagagaaactagttattatacactaatgcctgtattcagttcatctatgtatctggtttcgtgagatgcttttagagtagcggttctcaaaacgtggt

SEQ ID NO: 821644 - DNA, 293 bp, Homo sapiens
tcctaataggtggtgccacatattcttgatccgtaagacagatgctccacaggcagtttcagaacagtgtgcttatcaaatagatggctttggagctcatagaaaagtatgtgggtcacaacgggcctgcattgctcatcccagccaagcctcactttcctgtttcataagattgatgaggggaatgtcagagacttcatattcttatattttgaagtgtttgataaaayctatcataatggacttggggcctcatacagaaatgtgggttaaataataacagtttcagttcg

SEQ ID NO: 821645 - DNA, 622 bp, Homo sapiens
agaaccaactcctctttcaaacacagcagtggattctttctctcagaagrtcatgttgtgggaatcttttttttaaatagtgaaatattgaggcagcaattttttacaaaaaggtcatcctctgctctatttgttaccttgttattgctgtctcaacatttactacagctccatttacagaactgttgcttttttgcagttgtctttgttcttgaaaaaccagtaactgcttctgcataccttttgtgtagagcttttaatatcatttgaggaagttccaaatttgtagccagttccaaacaaatttaaatattgagttgagacctgtatggaattgtgttcgcaggagataaggcttgcctttgagcctactcttgattcatgcagagtgccaataagataaatcaaccaagttttggggcctcaaaagagacaccagcaactgggccttgagaacttccatttttttgcagattgtctgcagaaactcagacagctcatcagcagcagcagctgtattgtattttacctcatcttcagagtttatgttctactgaaagaggacgtgtgtatacacacacacacacacacacacacacagattggtataatggagaagatg

SEQ ID NO: 821646 - DNA, 623 bp, Homo sapiens
caactgtttggggatttattttagcagtggaactaggtttttctttggtggggrtgagttcataaccaactcttctatctactactttgtatcccaaataatcaaacatatcagttgatattatagagaaattacttgcctaagtacagctgcattcaaatcaattgtctcaaagttttcccaagaatacaatggcttatataactaaaagaattctttaggattttccccctagaagaaagaaaggaacagtctttagaaaagagtacctacatctccttttctatagcacagaaaacttttttctttcttggctactgagttctatcaaaagtaaaaaataaataaataaataaataaataaataaataaaataaaaataaaaatcttagtagccttagccaaagctctttgtgcctggcattagtgtctactagcttatcagtttttgttctttatatatttgtgtgtcccttctgtctccagctacctagaatgtaagtttctcaagaaaagggatcttttggcttttattggttatttctttgtgtgtatatcttttgataatatctggttttgtgctctgaaatggataatattagatcttcagtagatgatagaaa

SEQ ID NO: 821647 - DNA, 654 bp, Homo sapiens
gtggaagactggccatataaatgtctattgcaaccatggcctcttttgaacttcattcctgtggtcgcctatctagaggttcatttggaaaattgaatttatcaccataatggtctcaatgccacatcaactgccatgtctaggtacacaattgccaataaaatagttttacacttaaacatttcctttagagggatgctccttcttgataatttgtgctatcctgaagcaaaaaataatcacacctatttataatgagcaaagttgcatctccactggcaaccccagtggatatggttctatcagacactatcagccatactttgcagatataatttcctagcttataaaaatatatctcagatggtcacatgagctccctctttatgcaaacttaactagtagagattcatattatagaaccactaccctcattactccttgtctagagaattcacaacatagtcagcttgtatatacttcacttgtatatttgatatcaaacataccaaataaagatataacccatgcaaaaacctttgacttgaccatgctttaaactccttatgtagaaggaccactattatgttcacaacaattaattgtcattttacaatgamacaaaattataacaacattcactaatcatctaat

SEQ ID NO: 821648 - DNA, 449 bp, Homo sapiens
aatacattcaccagtgacactgctaattattgggatatgaagatgaaaagatatacagggctgactttakgggcatgcaacctgcgtttagaagaggcccatgtaagtagctttgtaagtagctggccctgtccctgtcgttaaactttgagtcccgtcatgcagccagatatgaaaacaaatacattttatatatgtaataatttttatagacaccaagagagggaatgccagtttgccttagaggttcagagagcacttctgaaagaaaagtcattaattcagcaattacttattcagcaactagtatatgtccagcactgtaccgagtggtagggaaatggcagtgaatcaaacaaaacaaaataaaaaaaatttaaaaaaacattgccctcatgaaggttaccttcaagtcagggaaaccaaacaacaaaatataaagttggcat

SEQ ID NO: 821649 - DNA, 583 bp, Homo sapiens
cagtgaaaatgtattctaggaatcccaatgaactttcattcatgtgtcagtggacagaattatatcatatgctgtggtaattccataagcgaatgggttagagacatgataaaaataaacactgacaaattctatagaagttatattttgctgtgataaatgtagacaatatattttcagcggagggtactgagaaagcactgagacaactgggatgtctaaaactgacattttccagttttcctggtcatgttggcaatagtattctgtgtgttcttccagattgtgacaagtcctaagagtgggcttagcaagggagctaccttagcatatcaccctgaagctctaatacacttaatttaaagtgttaccataattgattctaataacccatgtcacctggatctaaaatgtgaaatttagatgtattttcttaaaatgcaatggggactatctttatatgtcttggacacattacaaactagtcactagatatcactcatgargagtgcctcataggtttcatctgtctgtgggtatgcattctctgatgttgccaggagacaccagatgccactgcctg

SEQ ID NO: 821650 - DNA, 583 bp, Homo sapiens
cagtgaaaatgtattctaggaatcccaatgaactttcattcatgtgtcagtggacagaattatatcatatgctgtggtaattccataagcgaatgggttagagacatgataaaaataaacactgacaaattctatagaagttatattttgctgtgataaatgtagacaatatattttcagcggagggtactgagaaagcactgagacaactgggatgtctaaaactgacattttccagttttcctggtcatgttggcaatagtattctgtgtgttcttccagattgtgacaagtcctaagagtgggcttagcaagggagctaccttagcatatcaccctgaagctctaatacacttaatttaaagtgttaccataattgattctaataacccatgtcacctggatctaaaatgtgaaatttagatgtattttcttaaaatgcaatggggactatctttatatgtcttggacacattacaaactagtcactagatatcactcatgaasagtgcctcataggtttcatctgtctgtgggtatgcattctctgatgttgccaggagacaccagatgccactgcctg

SEQ ID NO: 821651 - DNA, 633 bp, Homo sapiens
aacatctgaaaatcaatcaatgtaaaatagccaataaataaaataaatggcaaaactcatatgatcatttccacagttacagaaaaattatttggcaaaatctaatatccttttgttattaaaacacccagaaaactagattagaaggggtcttcttgagcctgataaagcacatcaatgaagaatttgcatctaacatacttcatgttgtaagactgaatgtacttccttaagagcaggaagaagcagggatgttcactcttgccattcctattcaacattttactggaagttctagtcaaggcaattaggcaggaaaatgaaataaaaggcattaggatgaattaaaactatctgtattggcagataacccaacaaagtgctcggaggtaagcatattccttaaagaatcacacacaaaaaattaaatagaagcatttttccaaatagatttgttttcttacttacatattaaaagaaaaaatcaaacaaaaaatagaatgggsaacaggacaacagttttaaaatgcacttttattacaaaacaatgcaaatgatttgctaaaaatatggaagtctacggagtaaaagtgaagtttttctaagttcctcttttcagaattatccttgata

SEQ ID NO: 821652 - DNA, 604 bp, Homo sapiens
gctaggttgggtaccttattacttacaagtataataagcatgacatctgtttttattgatgaaattgttagataaaatatcatattcagaaatctgccacragaggccgggtgcggtggctcacgcctgtaatcccagcactttgggaggccgaggcgggcggatcacgaggtcaggagatcgagaccatcctggctaacatggtgaaaccccgtctctactaaaaaaaatacaaaacaattagctgggcatggtggcgggcgccagctacttgggaggctgaggcaggagaatggcgtgaacccgggaggcagagcttgcagtgagccgagatcgcaccactgcatgccagcctgggtgatagagcaagactccgtctcaaaaagaaaaaaaaaagaaatctaccacaagatcttcacatggattgatataaaaatattaatttacccaccttgtgatggtaagttgaactatgacaccatccaaccacattgaaattctgccaacatttctcaatgatgtcttcaaggatagagtgagaagtcatccgcagaaatacagctattctatatatactgcattccctagcttaatcagtccaata

SEQ ID NO: 821653 - DNA, 614 bp, Homo sapiens
acaaatgtatatagatatatacaaatgtatacagatgtacacatatgtatgtacatacaggcacataaaggcaaaatacagacatatacagatatgtcaactaacagttattaccaaraaggtgactgtgaagtatggggtcagggccaaggtattagtcagatcagagttagtagcggttcacagaaggaatttgtttatatatattaaaaagtgggcaaataaataaatgtattatggattaaatatttatttaaagatcctttttttaaagaaggcaaaaaattaccaataaaggcaatctttcatgtcaagagctgagctaagctggagacagctgagctatgaggtattagggctgtcaattaaaacaacaagccaaaatgaaagtactagttgtccaccaaaaaagttagaactaataaatgaattcagtaaagttcaggatacaaaatcaacataaaataattagtagtgttttcatacagtaataaaaagctttctgaaaaagggacctagaaacaatctcatttacaataacatcaaaaaatcttaggaataaatttaaccaaggagttaaaaaacctgtgcattgaaaactagaaaaacactga

SEQ ID NO: 821654 - DNA, 483 bp, Homo sapiens
actgggctcccttaatccagatcaattgaattagactctacgggtggctcagacagagtagtttttaaagcttctcactaattcttgtgtgcagctgtcattgagaaacagtgctctaggtattagtctccataggtttctgcagtcaagttacgtttttcccttgctggacaaatttatgtaggccttagaattatatagtaaaactgcttatgtcaactgacagtgtttcaacagtgaaaactctgaaaatagcaaaaactttgagaaactggaccaaggtattattagagatcaaagtattattattggtacttccttgttcaaaatattagttgggtccctgtgactaattttggctgctacgctgtaggcagargtgtccaatgtcacttttgagttcaaacacttaaaagtcagtgtccagccctcgagtgcactcttccctaacacagcaactgagactgcatgttccatacagta

SEQ ID NO: 821655 - DNA, 425 bp, Homo sapiens
gaagtgtccaatgtcacttttgagttcaaacacttaaaagtcagtgtccagccctcgagtgcactcttccctaacacagcaactgagactgcatgttccatacagtaaagccacaagatagtagagcctttgtcatgctgggtctctgagtgcctgcatggagcagagtgccctggccagagttggacatgtagtatgagcaagaaataaatattgttaagttattaatttcagggttgtttatactacaacatagccagtcaagcctttctcatacatgggtttggagcagtcttttcagaacttgwagctcaggaactagacatgaagaaggactgagaacaccacgatcaagttttttccctggcgttattgggacagcacatagaagtacttagagattttagaaagtggttgctattttt

SEQ ID NO: 821656 - DNA, 614 bp, Homo sapiens
  misc_feature 1, 2, 3, 4, 5, 6, 7, 8, 9, 10, 11, 12, 13, 14, 15, 16, 17,18, 19, 20, 21, 22, 23, 24, 25, 26, 27, 28, 29, 30, 31,32, 33, 34, 35, 36, 37, 38, 39: n = A,T,C or G
nnnnnnnnnnnnnnnnnnnnnnnnnnnnnnnnnnnnnnnaagatttattctgtacattgcattgcaatattcacagatttaaaagggtatatattattgtttagtgtaatttattcsagtatcagtatgtccatttaaaatggtagaagcaacatagtctaacctttttatttttgacattttcctttcctgattctgcctctaaactgaactaagtccatccttttaactgaattaaacattcattcaaagaacagatctgtggaaggttttaaagtgaaaatgacaaagtgagttgttatttgacaagtccttaattaaactttcaggatatctctaactcagttattttccattgtttctgctagccggggatggtggatgtgtcactcacacaaagggggcacaatatggttaaaaacaatataaccacaggccaagggaaatgtctgaatgctgtgacacagaaaatatcacacaatcaataacttctgaacatggacgctttatctaaaccttacccaatatagatgtgtttgcgggagattgggggagagaagaaagggaaggaggaaagatagagggatagagagaatcagacccagacagagaaa

SEQ ID NO: 821657 - DNA, 614 bp, Homo sapiens
  misc_feature 1, 2, 3, 4, 5, 6, 7, 8, 9, 10, 11, 12, 13, 14, 15, 16, 17,18, 19, 20, 21, 22, 23, 24, 25, 26, 27, 28, 29, 30, 31,32, 33, 34, 35, 36, 37, 38, 39: n = A,T,C or G
nnnnnnnnnnnnnnnnnnnnnnnnnnnnnnnnnnnnnnnaagatttattctgtacattgcattgcaatattcacagatttaaaagggtatatattattgtttagtgtaatttattccagtatcagtatgtccatttaaaatggtagaagcaacatagtctaacctttttatttttgacattttcctttcctgattctgcctctaaactgaactaagtccatccttttaactgaattaaacattcattcaaagaacagatctgtggaaggttttaaagtgaaaatgacaaagtgagttgttatttgacaagtccttaattaaactttcaggatatctctaactcagttattttccattgtttctgctagccggggatggtggatgtgtcactcacacaaagggggcacaatatggttaaaaacaatataaccacaggccaagggaaatgtctgaatgctgtgacacagaaaatatcacacaatcaataacttctgaacatggacgctttatctaaaccttacccaatatagatgtgtttgsgggagattgggggagagaagaaagggaaggaggaaagatagagggatagagagaatcagacccagacagagaaa

SEQ ID NO: 821658 - DNA, 588 bp, Homo sapiens
agcatgcttcctatgatcagagaataagcaacatcatttatttccattttggaggaaatattattcagtgacctacaccataatcaaagatctaggtataaattataagaatatctgayttcaattatattaacttacttacagtactcaatccaaaagcatctttgactttcctttgttgtgcaacattaaaagtaagcattcctttatactcattacttatttatcctcaaattttatgttgtctaaacatgttctctaaggctgtcaaatacaagtacaaggcacatatatttattatttgtgccttgtacttgtacctcagtagttctaggtatgaatgtcctaattgcctcaactatatatacacctttgtgtcctgcaaatctttccaactccttattccaaagagaactcaacttgactccctgacacataccttttgtctcctggttcttttctaacagaatcaacagtatttcatggtatcaaatacaacatataaaaattgctgtaactctgctgcttttctcattcccagatttcatggctaatatttcaaatcaattccacttcattatctttcaa

SEQ ID NO: 821659 - DNA, 683 bp, Homo sapiens
accaaggtcagattgcaaaaattcaaaaacttgcaacttcaggcataaatgggttaagggatggggccttagtcgataattagattatgaggatagagctcttatgaatgagactgtagtctctataaatgaagccagaggaaccttgtttgccccttccactacaggagaacatagagagaagattcatctatgaactagaaaatgggccttactagacaaggaatgctccagggccttgatcttggacttgtcggctgccagaactgtgagaaataaaatttgttgtttataagctaccctatctacatatagtattttatcctataaatacatattatttaatataaatgaaatatattatagaagcctgagctgactgaagcacttgtcatattccttattttacatctaaattacactagtaggtgtgccgtggtatctcattataattttaattcacatttccctagtgactgatgacattgaaaagtcattgtctttccatctgcttatcataggatagccacttttaaaatattgtgtcacaattctttgcaactagtattttgtattgtatttttcttattgatttgtcaaatgtgttttcatatttttgatataagtccatggttgcatatatatatatatatatatatatatatrtgtgtgtgtgtgtgtgt

SEQ ID NO: 821660 - DNA, 544 bp, Homo sapiens
tttattttttaaagtagaattataattcctagcctacctataatatacactttaaatggttaaattttaaaatttattacattttatttcattttargctatcttcataatatatagaagtattcttttaaatttaaaatcacgtcaagttgatgcttatcctaatagtgtctttacaaattatgttcctgaaatttaccatattttaggtgttgtttttctggtgtcattattttatcgagttgtgacacacaattttacatttactttatgtaaaaaatatgaattttagttgtattataattttaaacacaactacattctagatcatttatgtttcctggttaaattcaacagttcttgactctgaaaaaccggattttatggaaatatataagggaaccagaggtagatgagaatttggaggtttggttttgagattaggcagggagttttgctgtgtagggaacaagaaatagaacaggtgagtttgtgaaaatacaatctggtcaggtcagatcacttttactatgatgaatgacct

SEQ ID NO: 821661 - DNA, 544 bp, Homo sapiens
tttattttttaaagtagaattataattcctagcctacctataatatacactttaaatggttaaattttaaaatttattacattttatttcattttaarctatcttcataatatatagaagtattcttttaaatttaaaatcacgtcaagttgatgcttatcctaatagtgtctttacaaattatgttcctgaaatttaccatattttaggtgttgtttttctggtgtcattattttatcgagttgtgacacacaattttacatttactttatgtaaaaaatatgaattttagttgtattataattttaaacacaactacattctagatcatttatgtttcctggttaaattcaacagttcttgactctgaaaaaccggattttatggaaatatataagggaaccagaggtagatgagaatttggaggtttggttttgagattaggcagggagttttgctgtgtagggaacaagaaatagaacaggtgagtttgtgaaaatacaatctggtcaggtcagatcacttttactatgatgaatgacct

SEQ ID NO: 821662 - DNA, 648 bp, Homo sapiens
aatcaattattttccttttcagttttttctatttcctgctaataatttgcaggaaatacatattaacagaatatgttattttatgaataatagatgttcttgggtgagaaaaggaaaacaattctcagtgccccatcttctgttggccatcccttagaacagccagtcaacactgaagtaaaaaatccagcatcaggtctattttctgagcaaagcttatgtgtgtgtgtgagaggagagggagggtgggtatgtatatggtgaaagaagtaaaaggaggcaaaataatcaaagcattagattcactgttccaacgaactatttagaattgagttacctgggagctaaattttggagtttgattacactatgatgactggcctccttttctaataaaaatgacaaacaaaaaaaagaactcattgaacttaagcaaatttcattagtcttcttggcttagaccacattaaaagttgccatttccaaggagaagcactgtcactttttttttttttaagatttcagaagaagtgcacttggcacaataggaagccattaaaatgttatctttaggcttaagtaatataytcctcaaaattctcatttaagtgttagttcagctgactgtactaaataactaaattactg

SEQ ID NO: 821663 - DNA, 555 bp, Homo sapiens
acagagtaagattatgtctcaaaaaagtgaataaataaaaatactaagtcagagatagatttatatattccctgtaaaatgttttgtgtggaaggaggctcatgtcctggtctccaaaggatgacagactccacattcattttataacttagtggccttataatctaacattgttttaggtcaggaacatccaatctgcaagtttttctgtctagagcagaactccaggaaaacattgagttgagaagggcagggcttgttcaaataggattatctttgttcgtgtttctcggaatctgagaggctggcagcatactttaaagctgtcctttttgcgttccgttgacgtgtggtctcccgtaatcttctgcttactagacttcttgatataggaagtcttttgtctctatcagaagtgatttaaggggtgggacactaattttacacttaaataagccacacctcctaagtgaataagaattcggctcacattcttatggracccaacaccatccattccagagcatttaaaagggccaaaagatcacaactttc

SEQ ID NO: 821664 - DNA, 629 bp, Homo sapiens
agtcttggttgttatttccttattcatttatttagaggagtctcgttctgttgcccatgctggagtgcagtggtgcgatctcggctcactgtaacctctacctcccaggttcaagcaattctcctgcctcagcctcctagtagctgggattggtgtctgtcaccacgcccggttaatttttgtatttttagtagacatggggtttcaccatgttggccaggctggtcttgaactcctgacctcaggtgatctgcccacctcggcctcccaaagtgctgggattacaggcgtgagccaccacgtccagccgttatttcttctttgatgcacatttcaaataccagaagattttccagtgaaaatgtaatttctatcttaattccactgtggttagagaacatactctgtatgatttaaatcccttgaaatgtattaggacttgctttatggcctaactgtggtctgttggaaaatgttccatgtgcacttgaaaaaagcaagaaccctgtaataccttttgttggatytgatgttgccatgggcttttaataccagctgagttgaagttgacatttttgtgtgtatgacaaagggcttaactttgtttcctcacagcctagagagatatt

SEQ ID NO: 821665 - DNA, 578 bp, Homo sapiens
gttgtaccccttggtacaggtttatgttggggttgtggcattgcagccctttgtatgggtgtagtggaataatgatgcggtctcagaagtgtgaggctatattggcccccaggaagratgcgctttagcagtggctctactctcaaaatagcactatgccgtaacagtttgggtcctggggagtgggatagacccagtgtgagttctttctctggcacaattctgctgcatggattctgggcatctccctttactgggcttaggacccatgaggactgtttggctcttctgcaactaagactgcaggtgtctgtggtagtaatggggattgctggggacctcccacttacctttgcagccattctgagtttccatgccttagggggtttatatgacttccttgatgcactccgttattctctattatacactccacttgaagtgtaattatttgtttattgttttgacccctctctgcagaagaaatgagcattgggcacttgtagtcagctatcttgatgatgtctagcttattttctgctttcttgttttattattttctgtgtctgatggaatat

SEQ ID NO: 821666 - DNA, 603 bp, Homo sapiens
cattgttgtcagaaaacataccttatatgacttgaatcttttaaaatctctttcgacttgctttatggcccacaatatgctctatcttgaaatgtattctctgtgtactgaagagaacaygttattctgctggttttggatattaatgtcaattagataaaattgtttaagagtttcattcatctatattattactaaatttaagtctgcttttttgcttgttctataaattgttgtttaattttagtaagggtatgaaactgtaactataattgtggattactcttcctctttgcagttctatacatttctgctttatgtattttgaagatgtattactaagacatgcaaatgtttcggattgttattttctcttagtgaatctatccctttattattttgaagtgaccttatttatccctaataatattctttgctttagaatatattttgtctgatattaatataatgatcctaggtttcttttgattaatgttagcatggtatatcctaatccatccttttacgtttgactcatttatgtctttatgtttaaaaaagttcccattttttggcaatcatgtgttttaaaattttatttaa

SEQ ID NO: 821667 - DNA, 612 bp, Homo sapiens
tctcgtaaagctacaaaaaacataaaagaaaagaacttggtgaawtttccactttagagcccaaggagaatgcagagccatgcttctgcattctgtaggtcatttcaaaaacagatgggtttggctgaatgagggacattctttctgaggtcaggcaattcctagatgtgaggcagatgctcccacatggtgccagcagatgtggcaagacacccagacagcctctggtggcctctgctggccccttgccctgaaccatggacagtaactcatgcccacatgcttcctctctctcctttgcacctgtccactcaacatcccctccacctgttctccttcacctcctcaccaaaccttgagcacacacacatctacttttactcaggcatccagcaccagtgggcattactttattatttcaaaatcttcaaccctgcaggccatagtctacatcacattttaaatcccaggacagagggtgcctccccaccccccagctaaatcaggtattgtgaattctccatatatgtagagaaataaaattgctgggacgcagagagtaatggcccaattcacctccctgagactcagtctacctttctggagtagaag

SEQ ID NO: 821668 - DNA, 583 bp, Homo sapiens
aaatccagatttttgtatgtaatctttcaacctaataaagattgagaaattaatttaaatatttaaaaccttaggaggatcattaaaatatatttgcaatcagtatatggccccatggccaccagtttgctacctctagttgggacatcttctggctcaagacagatttgttctcttcagatatttttcaagtctacgagtcccttaagtagcagaggtttattgaaatctctgtcccacactatcctgaactttgaatgagggtgggaatagaagaatataaggcaaaattattaccctaagtttatatttagaagaggaagcaagatgaacacatattattactttctacaagggctttatagttgtggatgtagcttatttgtcctctcagattgtaaactcttcatcacttcaggggcttccaagacaaactaaggtaataatgaaaagttagaggtgcacaaattgcaacaaagtaacgtggtaaaatgccaaaatggcaragaaaagtctatggattccagggtaacttactgaaaaggggatgctgaggaaagcacctgagtaaaggtgaggagaa

SEQ ID NO: 821669 - DNA, 583 bp, Homo sapiens
gtataagtgcacattttctttattcattcatctgttyatggaaacttaggttgcttccaaatcttggctattgtgaacagagctgcaacaaacatggaagtgcagatatatctctgatatactgatttgccttcttttgggtatttacccagcagtgggattgctggatcgtatggtagctctatttttagttttttgaggaacctccaaactcttctccatagtggttgtactaatgtacactcccataaacagtgtatgagagttcccttttcttcacatccttaccagaatttattattgcctgtattttggataaaagccatttcaactggggtgagatgatatctcattgtagttttgatttgcattcctctgatgatcaatgatgttgagtacctttcatgtgtctatcatatgtgtgtcttgttttgagacatgtctattcaaatattttacctatttttaaattggattattagaatttttttctatagatttgtttgagctcctgatatattctgattattaagcccttaaagatgggtagtttgtaaatattttctcccattctgtgggtttt

SEQ ID NO: 821670 - DNA, 590 bp, Homo sapiens
gacataggagtaattgaatcctttctgggtgagtcagggccaccggtgtgaatatctgctatcacattacctcaataaayggcatggtcctgcctttcattttcttttccatggcatgaagttagaaatacaggagccatcatctcacagctaagaaatggcaaagagaaggtcacaaaaaattgatgtgaattaagaataagagaggtgtttatacaaccccaggtgagccagccctgggtagagcgtgtcttctaccttcttaaacaggcagtttagctgaggggagcagctggcagttgattttcccatttttctgtgccatttcttggttagcaatgcaacctctgaatgcaaagcacatcctctgggcaacaattgaagaccccaataacccctacttatctcatttcaggcatgagaggccagtgaaggttaactcgttgatattttcatgaaggaatttaaattgtgacattttccagttctacttagagaatattttctttgttagatatatcatagggcaataatttggctcatactacatgaagaagtgtctaatgaagccaaagaaatagtataatgtg

SEQ ID NO: 821671 - DNA, 455 bp, Homo sapiens
aagagtgaaaagcatgcttgggagaraaaaccaagtgtgtggcccagcaacctttcgctaaagagattagtattgttagaaggggtcagcaagacaattaaaaaaggacctcaaaggcattttagagatttttgaaactgcctctcccatcataggcccagagggccagaagtacagaatgacgtcaggggatggaggatgggcccaaggtgcccttcagggaattgaagctcaggactgcctctaggcttttctccttgcatcccagcacaatgctctttggcttccacagccatggttcatgtgggctcatgtgtggcttaggccacagcttcagaagatgcaattgacaaatcttggcagcagccacatgataagtctgcaggcacatgcaatgcaagacttgtggagtcacagcttcctccacctggatttcaaactatgttgcaaacagc

SEQ ID NO: 821672 - DNA, 395 bp, Homo sapiens
ttgggatcctatgtcattgactcttccttcctttatgactgacaaagactgtattcctcctgagagtcctgtgagagcaatgcaaagaaagattctgtatgaaatattgtaagtgccagcatcttacttcatctaggcaaaaaactcattgcaaaagcccatgccttattaactatttctcttagattcacaatgattaagatatgtgcaaagtaaactgtgaaatgccaatctattgcaaagtataccctcacggcattttgacaattctcagtaatgagaaaaaattggatgattactctcatttgcccttgcccagatsggtgtctcagttgcatgttttatatgatttttatacggagcaggaaaaatattctgcattaacttccaaaaca

SEQ ID NO: 821673 - DNA, 634 bp, Homo sapiens
ggtaagaatgaacattcttgcttttttctcctcatcttagtgggaaagtttttagcctttacaactgagcataatattaaatgtaggtttctgtatatgttttttatcaagttgagaaagttgtcttctattcatatttttttctgagagtttcttttgcatgaatgcatgttgaatttttctaacactttttctgcataaattgatataatcatgtgatattttttcttcttgagcctgttaatatgggtattatattgattgatttttgaaaatattgagccagccttagttccccaccctttttttttttttttttcagagatgggatctcactctgtcactgaggctggaatgcaggggcacaatcatagctcactgcagtcccaaactctcaggcccaagtgatcctcttgtctcagcctcctgactagctagaaggacagttgcccatctggtcccccaccctttttgataagagcccttgctgtatagtagaggagagtggacagtccttctaatgcagggaggaaggtgggggaagacagagaaaagaacaaawggagaaagccagagtctttactttctaccctcctccttctgacggtataaccctcagacaaatttttctatg

SEQ ID NO: 821674 - DNA, 466 bp, Homo sapiens
caggatgtaaatctcatggagaaaagaacacgtacgtccggcagaatgggataggcacatataattctaaacagcacatagtttgagatttacagttaaatagtagagatgactgagaatattgttgacccagggcaaggaaaattttgtcattgggcacaattgagaataatgaatttataataagctggattcagacaattctgtatccttacccatgaatggataaaccagagagtgggactaataaagtgttcacagattgcatattttatttggaaaactatcaaggataattaaaggggcaagagattagctaagatataattggttctgggaacaaaagcaatagagttccatgaagcaaasagcattcatgatttgggtgaagcggggcattcacccagaataaaagacttgctaagtttgctcaggttacatcagggacacatgtaatataggtggt

SEQ ID NO: 821675 - DNA, 568 bp, Homo sapiens
caaccaaactttaaaagaaatattcaacatttaaggcytcaatcaatctctacttaagcacctgctttcataatcctgaaactcatttaaaaaaaaaaaaaaaaaaaaactttctgacctttaaaaatgcaacagcctgaaatcaatttatttcagtcaggcattcaatagtatatacttgctaaaacagtcaaagttcaagttatagcatctgtgacatctatttttttcgtttttgcatttttgccttcttattttatttttttcttttaagttaaagtcaaaagtggaactattatctctttggcagtttcttgggaatcctattaacctattgggaaataagtaaactctgagaatgattcctttcttaatatgtttataatgagagctttaaaaaaatgatctctcactaacctgtatttagaaacaagatgtaacttactgcatttcttacacaggatagttaatatttatctttgggattaagattactcattttcacactatggggcagaaaataaatattatgtataaattattatgcaagtaagataatatttatgat

SEQ ID NO: 821676 - DNA, 568 bp, Homo sapiens
caaccaaactttaaaagaaatattcaacatttaaggcttcaatcaatctctacttaagcacctgctttcataatcctgaaactcatttaaaaaaaaaaaaaamaaaaaactttctgacctttaaaaatgcaacagcctgaaatcaatttatttcagtcaggcattcaatagtatatacttgctaaaacagtcaaagttcaagttatagcatctgtgacatctatttttttcgtttttgcatttttgccttcttattttatttttttcttttaagttaaagtcaaaagtggaactattatctctttggcagtttcttgggaatcctattaacctattgggaaataagtaaactctgagaatgattcctttcttaatatgtttataatgagagctttaaaaaaatgatctctcactaacctgtatttagaaacaagatgtaacttactgcatttcttacacaggatagttaatatttatctttgggattaagattactcattttcacactatggggcagaaaataaatattatgtataaattattatgcaagtaagataatatttatgat

SEQ ID NO: 821677 - DNA, 639 bp, Homo sapiens
aaaagccttcacaggagatcggacaacaaggtaagagatcgccttgtataccagtacttggttttagcataataataagacaagacacattgaagaggatagaaagaacagtttaatattacctatgctacccctcccctaaccctacgcaccacagtgcagagacattgtccatttgggggaagaggagagaaatgagcataaaactttgctttgcagaacagtactaggccagccagaagactagcaccagacagaacctcttggcacctgacatcaggctggtacccatggacagaacctccagacccaccctagcactagacaggaaactgcagccccagtggaatggacttatgttccagtcaatacggactaaactcagcatgatagactaaactcactgcaggcctactgtagtggccttgggctctaaacaaacctcagtggcaggcagggcagggcacacacaggccttaggcatgccccagtgctgcactgctatcrgtggcactgggcctggggaagaccaatttgcattagcctcagtggccatgggattgcctatgttgccctttccagaaccccaagtagcacagcacagagaaagacaacatttacctggccgaaagagaggaa

SEQ ID NO: 821678 - DNA, 625 bp, Homo sapiens
gaaatttgagaatggatagactgcctcctcaagtgggtccctgacccccgagtagcctacctgggagacacctcctagtaggggccgactgacacctcacacagccaggtgcccctctgagatgaagcttccagaggaaggatcaggcagcaacatttgctgttctgcagcccctgctgatgtcacccaggaaaacagggtctggagtggacctccagcaaattcgaacagacctgcagctgagggtcctcactgttagaaggaaaactaacaaagagaaaggaacagcatcaacatcaacaaaaaggacatccacacaaaaaccccatctgtaggtcaccatcatcaaagaccaaaggtagataaaaccacaaagatggggagaaaccagaggagaaaaacttaaaattctaaaaatcagaatgcttcttctcctccaaaggaacacagctcctcaccagcaacagaacaaacctagacggagaatgactttgatgagttgacagaagtaggcttcaaaagatgagtaataacaaacttctccaagtgaaaggatgatgttygaacccatcacaaagaagctaaaaaccttgaaaaaagattagacgaatggctaactaaaatc

SEQ ID NO: 821679 - DNA, 610 bp, Homo sapiens
ataaagtaagtcacacaaactttttggtttcccagtgcctatgaaagttatactgcagtccattaagtgtgcaatagcattatgtctaaaaaatgagcataccttaatttgaaaaacactttactgctaaaaatgctaacaatcatctgtgtctttagcaagctgtcatcttttttgctggtggagaaccttgcctcattgttgatggctgctgactgataaggctggtggttgctgaaggctgtggtagctgcagcaatttcttaaaataaaacaacaatgaagtttacctctttcattgactctttctttcatgaaagatttctctgtagcatgcaatgctgtttgatagcatttgaccaacagtagaacttttttcaaaattggaggcaatcttttcaaaccctatcactgctttatcaattaagtgtatgaatattctaaatcctttgttgtcatttcaacattgttcacacgtcttcatgaggaatagattccatctcaagaaaccactttctttgctcatccataagaagcaacttcttatccactaaaattttatcawgagattgcaccaattcagccacatctttgggcctcacttcaattc

SEQ ID NO: 821680 - DNA, 566 bp, Homo sapiens
agtcctaggcagctcaagttctgcctcccgccagtcctgtctgcaggcaggatccagtcctcacgcacccatgctgggcacggccctgcttccacaccgtgctcaggaggagagcgtccactcccaggagaggmcttgccaggcacctctccttagggacacctgcagttaggggtctggcgccagcttgtgtgtgagagattaactccccctggtaccgtcaggccccgagtgagggagccgcagcccagagaggcctctttctgtccagtttgcatcgccacatttgggtttctgtcccgcctggcctgggccccacctgcctgcggagctgccgaggccctcgtctagtgccctcccagaggggccttcagtcctggttcttatattacagaggcagccagaggcttccctgactctgtggctggcgcagccttgacaagtcatctggaattggctcacggcctcctcgcgtctcccggtgtctgatgtggcaatgaagctctatttcagggcctgcgggaggacccagcgtggctcagggtttgtcctcaagggagggcgtg

SEQ ID NO: 821681 - DNA, 491 bp, Homo sapiens
atctgcaaaaagaaaaatatctagaactatctagcttcaggtgtggctggatccaggtgcccaaataaattttcagttgttttttttcccacatccccaacccttggctttgctctcctctrtgtcgatttcactctcaggcctgctcttctctgaggcagaaaaatggatgcaggcagctgctgcattacctcctcacagggcaacaacccgggggaaacagcttttcctttccaacaattccagcaatagttcctggatttaacttcatggaataccttgtggcaagtcctcatccctgagctatgttcatgtagtcagatgacaacgtattctacctggcctaggctgggtcatgtgccctccttgcccactggtgacgcagggatgagagctggttcctgagtgacacaggggctgtgctatcagaaggagaagggtgggccagaaacagtggctcatgcctgtaatcccagcactttgggaggctg

SEQ ID NO: 821682 - DNA, 491 bp, Homo sapiens
atctgcaaaaagaaaaatatctagaactatctagcttcaggtgtggctggatccaggtgcccaaataaattttcagttgttttttttcccacatccccaacccttggctttgctctcctctatgtcgatttcactctcaggcctgctcttctctgaggcagaaaaatggatgcaggcagctgctgcattacctcctcacagggcaacaacccgggggaaacagcttttcctttccaacaattccagcaatagttcctggatttaacttcatggaataccttgtggcaagtcctcatccctgagctatgttcatgtagtcagatgacaacgtattctacctggcctaggctgggtcatgtgccctccttgcccactggtgacgcagggatgagagctggttcctgagtgacacaggggctgtgctatcagaaggagaagggtgggccagraacagtggctcatgcctgtaatcccagcactttgggaggctg

SEQ ID NO: 821683 - DNA, 493 bp, Homo sapiens
ccagataattgggatgaatattgcctgcgtactagtatcaaaggcatttgcatctaaataaagatcttaaaataaatactaggatgtcaggatagagatggacagagaatatgatctttrttagatggagacaatggataaatatctcttggatttggggcttttgttatgctactgttcttgtaagtgaaggttatcaataaattattataaaaggtttgtgtgtgatatgttctgactgaataatgctgattttaattagccactttaaaatgaattactagtaatatagcagaaagccacatcaaaagggagttcaagaacagaagattcaaatatatactaaactggtcacagaagtgactgggaaataaattatctagataattctgattgtgacataattaagttcagcatctgagtgggagaatcaaattcctagaaattcatcttaaatagaaattcaatctttaaagagaaattgaaagatcat

SEQ ID NO: 821684 - DNA, 577 bp, Homo sapiens
gaataataatgagggtggggattcttggcaaagggagcatctgaagtaaagatgtgaggtgcgatgatggtgttgagaatggaggtggaaggaagtgaataggtaccaggatgttttaggaggtagaatatgaaaaggatttggtgatagattgaactctgggaatgagaggaaggggctcctctacctggtcctgtacagctggatgagtggtgtgcttttcactgaaaagttttgcggggtggtttgagggagcttatgttcaattttgaacatagtaaacttgtgatctcatagagacatatgacttaagatacctggtgggcaaacaaaacaaacaaaaaagcttacagaggagtagaaagaaaactaggaatatatgctaggacacaaggaatatatgtaaaacattacttttttccagaagggataatgcactgtggtgcccartgataatgagagattgaggaagatttgtgaattataagtagtcgtgttcaatatggttagaaatgtggacagggatttgtgtgctgttctaaataattgagatgattgttgcaaactcagtgttgca

SEQ ID NO: 821685 - DNA, 625 bp, Homo sapiens
ttgaattatgaatacttagattgtgtgctgttgacctttagaatgttaggagacaagccagaaattaaacccaaagtaacaccaagcactggaaaagcatcaaagttaaaaaagtaataaaaatacggttattaaagggaataaaattatataaatggaaactgatttaaaaagaaaaggagagtttatctctcagggttctacagttctccagagaaacagaaccagaaggatgtgtgtgtgtgtgtgtgtgtgtgtgtgtgtgtgtgtgtgtgtttgtgtgtataatagatagatgggtaagtagatttattttgaggaattggcttatgtgattttgagtgctggcaagtctaaaatgtgtagggcaaagaggctggaaattcagggaggatttctgtgttagactcttgaggctcctcttctcagggaaatcagtttttgctcttaaggctttcaattcactggatgagacccaactctattatcaasggtcatcttttttacttaaagtcaactgattgtagatgttaatcacatcgacaaaatatgttcacagcaatatctatactagcatttgaccaagaagttgggcaccgtagcctagtcaaattgacgtgtaaaa

SEQ ID NO: 821686 - DNA, 611 bp, Homo sapiens
ctattcttcatacttcttttcactcttcaaatatctcataatttaaaataagtatttggactgcctggggttatagtttattattagcagagccaggattagattagagagcatctggttgtcataatcagaagagaacaagctggagtcaagagtatacacacaactgcccatgcagaaaaagaaaaaatgtgtacttgccatttccacactgtgatcacagatgtcacccacaaaccatattaacagctaacatttttaagcactgattagatactttgctgagtgtttcatgtggattatggcattaggataagatggaaacatgagtcagatttaaacaagatctaaaatgcactatagtggagtgcccattactgaaagggaatgtgggttgcaaaaggcattcaaaaggtaaatgaataatgtgtttgggcttgaagtgatgtcagacatgatagaacccacatttctccatttgtagtcaaattattattctactttaaactgatttagacagtagcctatgaataaaatatcagaaattatgaaagtcatgttttgaattctgttgatcacagtaaagrtaagaaatagaattgaatgagaac

SEQ ID NO: 821687 - DNA, 576 bp, Homo sapiens
caaacttcacataactgcgaatattttaaaatgtcaaaactttggatcctttttcttggtatttcctagcttaggagccttaagaaatcagaattctcatttcagtctgtctccactcctgcccaagcaggaactcccaactttaaggtattgcgtaggcagggattcaaacaggtaaaggcaagagtttgagcaagagaaggaggaggagggacaataagctcagaagaagggctgagtgggcatactcaagatgggcatatcaaggaactggttacataccaatacgtatgaagcttgtttcctatacacaaagtccacactgatagcttggccagctggaggtgtcactctgtcagtgggtcccacccattcctctgctaccacctgtcttactcctacctcctgtccttcagatactctccatttcccctcaacactggccattgccaccaccttcatgttacaatgtcaaggggtgtcctgatgccactgcagaaagtacctatctctgttcagcctcaagagaggaacttcataaatccaagacatygccagagctaggctcatcctcct

SEQ ID NO: 821688 - DNA, 570 bp, Homo sapiens
aaggaccttcgtctttatttcctcccccatttatcaaaagtagtaagtgcgctctgtgtactactcagtactggtaatgcgcaattaaagccactaagaaaagtgttctgtaagcatgggctacctgagcatttttctacccctaaagctcttccagcaataactgcccagatgtcaactcttctttgtccttgtcacctttatttaaaatagtttgtcttacggagcaaagttgatctgttttgattcttctttgtgcagtgtggcaacctacgcaaattttaaattcatttttaaacgagtgacctaagtgaaaaagcacctagtgactatcggatgcaaatttatttttaaaaggttttttagaagtgttttgtttctttttttttggactacctcaggtctttacagatggctcaggtttcactgctgttttaggkagaaataaagattctgggcaggaatgttcgttgtatttttgtacttactgtagaagtacaaaagccttttcaaactaatccttaaaataacaaaaaaaaagtggaagaaagggtctgaatggatatacat

SEQ ID NO: 821689 - DNA, 556 bp, Homo sapiens
atgagaaatcagagttcttttactgtgctgtagttcaatataaggcttgattggcaacttagtgtaggtcacagatctcttagctggctaaaggcaatgaagatactatgtagctcttcagggggacatagtggaaagtggcaaaaataaatctcaattttatccccctaaaataaaatgacagaaaaatgtagggacccagtttaaactggcatttggattctctgaaatagggattctttctattgggattgagcactagcagagagctcacactcaaatgtctggatgaaagtgtaaaattgagaagttcagtttcaaaaaaaaatagcattcctgcattttttcagaacttatggcattgtgtttcatatactttgtattttccgatgcctattttggagcttccattattttgtttctattgctttgcatgagagcccttatataagtgagattgagtagtaggsagattctatctatagctttgtcctcttctaaatattacagaatttgtttgtttgtttgtttgtttttttgagatgggagtctcgct

SEQ ID NO: 821690 - DNA, 556 bp, Homo sapiens
atgagaaatcagagttcttttactgtgctgtagttcaatataaggcttgattggcaacttagtgtaggtcacagatctcttagctggctaaaggcaatgaagatactatgtagctcttcagggggacatagtggaaagtggcaaaaataaatctcaattttatccccctaaaataaaatgacagaaaaatgtagggacccagtttaaactggcatttggattctctgaaatagggattctttctattgggattgagcactagcagagagctcacactcaaatgtctggatgaaagtgtaaaattgagaagttcagtttcaaaaaaaaatagcattcctgcattttttcagaacttatggcattgtgtttcatatactttgtattttccgatgcctattttggagcttccattattttgtttctattgctttgcatgagagcccttatataagtgagattgagtagtaggcagattctatctatagctttgtcctcttstaaatattacagaatttgtttgtttgtttgtttgtttttttgagatgggagtctcgct

SEQ ID NO: 821691 - DNA, 501 bp, Homo sapiens
aaaacacctagatcaggtaacttataaacaggatacatttattactcacaattctggaaactgggaagtccaagaatgaggcamcagcagagtcagtgtccggtgatctatccctctttctacgtgtcctcacttgacagaaggggaaaacaggtttcctcaagcctcttttataaggtcactaatcccattcacaagtgtggaccctatgacctaatcacctcctaaaagttgcacctcttaatactaccacagtggggattaggtttcaacgtgaattttggaaatacataaacattcaaaacatagtattgctgtatcaaacactgcaacaagagaactgcaaagaaatgcaacccttaacccttgggcgttcacaatttaaaacatggacaagataggtcactgagcctaaaataaacattcaatggtgaatagacaggaaagaatttacccatttaggtcatggataagtgcacaaagggcagggagccaggctaa

SEQ ID NO: 821692 - DNA, 588 bp, Homo sapiens
tatatatattatttaatccttattactgcacataattactcccattttacagatgaataaatgggattcaagttaactaacttgcccaagactactgaattcagtaagtggcaaagcaaggattaaaacctaagcctctttggctttaaagctctgcttctaatcacttttttactactgattaaacagatgtgtcccaaaattaaggaagtcatcgttgttttttttgctttgtttttgcttagtcaaagagcacaggccatcatttgttgtagtgtcacccgtaaagcttaataagtttaaagttcagggtgttaatcattacaagcataaagtatgaatatgctttaaaggtttatttaagaaaagaattgggattagatttgcccaccagaatatacatttttcacttgaagtcctgagagagattcagacagaaacagctttgactcagcagcagttagcaracaaacatcttgatataatactgatccacactttgcatatacactttcttttctttgtattacatttttagaggtaagtggcagtttttcacacacttccaaactgcttccatcagtaatg

SEQ ID NO: 821693 - DNA, 430 bp, Homo sapiens
attaagtaaatttcctactaccagctatgtccagatactctgctggacactcaaactgtttggggctaagtactgggaaaaatgtctcagtctataatttctaactctagattatcatgtagtttccatatggaaactattaaattcttcataatttaataaatatgattaactttcttcttagaggccagatggttttgccaaaattatcaacatgccaggtaagattaatagtaggagttgacttccaagaatatttggtacacatctagaacagatactggatggaaactggaatgtctctggcagcagcctcacaggttctccagagagctgtgttttgcatacatggtctrtggtctgttttgtgtcctaggtctggaatgttcaactctatacagaacacagagctccagcaacctggcagaat

SEQ ID NO: 821694 - DNA, 516 bp, Homo sapiens
  misc_feature 504, 505, 506, 508, 509, 512, 513, 514, 516: n = A,T,C or G
acacaagctcaaagataaaaattacatctgacttctcagaaaccacaaaagcaagaaaagagtgkagtaaaatatctaaagttttgagaggaaaaaaaaaaaaaaaacaacaaacctctccaacctagaattctgtaccttgcaaaataatccttcaaaactgaaggagaaataaagacattctcagacaaacaaaaattgaggatttgtagccagcagatctatcctgaaatgtttaaggaaagttctttagaaggaaggaaaatgacaggggtcagaaacttgtatctacataaagaaaagtgcagcactgaagaaggaaccagtgaaggcgaaaaacttttatttttcttatttttagtggatctagcataacattttgttcacaataataatagcaacagtgtatgcgattatgtatgtttatatatatatatgcttatgtacacttaagtataagtgaaataaatgacagtgatggtgcaaaggatggaagaaagtaannntnncannngn

SEQ ID NO: 821695 - DNA, 639 bp, Homo sapiens
cagaaaacttctaaaaaaaataaggaaaatcttagcatccttgggataacccaaaggataacccaaatgtccatcagcaggtgaatggatacacaaatgtggtgtgtccacccaatagaatacaatacaatagaatatgattcagcaatgaaaatgaacaaactaatgctacactcatcaaaatggatgaatctcaaaatcattatgctgaatgaaataagccagtcaaaaagagtgcatggtgtatgagtccatttatataaaattttagaaaatgctaactaactcacagtgacaaagtagaccaattgtttgcatggggtgatgggggggaaaaggtgggaaggagagatttctttattttattttaagttctggggtacatgtgcaggatgtgcaggtttgttacatagataaacgtgtgccatggtggtttgctgcacctatcaacccatcacctaggtattaagccctgcatgcattagctatttatcctgatgctctccctccctctgcctccccracaggccccaatgtgtgttgttctcctccctgtatccgtgtgttctcattgttcagttcacacttataatgagaacatgtggtgtttgattttctgttcctgtgttagtttgctga

SEQ ID NO: 821696 - DNA, 639 bp, Homo sapiens
cagaaaacttctaaaaaaaataaggaaaatcttagcatccttgggataacccaaaggataacccaaatgtccatcagcaggtgaatggatacacaaatgtggtgtgtccacccaatagaatacaatacaatagaatatgattcagcaatgaaaatgaacaaactaatgctacactcatcaaaatggatgaatctcaaaatcattatgctgaatgaaataagccagtcaaaaagagtgcatggtgtatgagtccatttatataaaattttagaaaatgctaactaactcacagtgacaaagtagaccaattgtttgcatggggtgatgggggggaaaaggtgggaaggagagatttctttattttattttaagttctggggtacatgtgcaggatgtgcaggtttgttacatagataaacgtgtgccatggtggtttgctgcacctatcaacccatcacctaggtattaagccctgcatgcattagctatttatcctgatgctctccctccctctgcctccccgacaggccccaatgtgtgttgttctcctccctgyatccgtgtgttctcattgttcagttcacacttataatgagaacatgtggtgtttgattttctgttcctgtgttagtttgctga

SEQ ID NO: 821697 - DNA, 639 bp, Homo sapiens
cagaaaacttctaaaaaaaataaggaaaatcttagcatccttgggataacccaaaggataacccaaatgtccatcagcaggtgaatggatacacaaatgtggtgtgtccacccaatagaatacaatacaatagaatatgattcagcaatgaaaatgaacaaactaatgctacactcatcaaaatggatgaatctcaaaatcattatgctgaatgaaataagccagtcaaaaagagtgcatggtgtatgagtccatttatataaaattttagaaaatgctaactaactcacagtgacaaagtagaccaattgtttgcatggggtgatgggggggaaaaggtgggaaggagagatttctttattttattttaagttctggggtacatgtgcaggatgtgcaggtttgttacatagataaacgtgtgccatggtggtttgctgcacctatcaacccatcacctaggtattaagccctgcatgcattagctatttatcctgatgctctccctccctctgcctccccgacaggccccaatgtgtgttgttctcctccctgtatccrtgtgttctcattgttcagttcacacttataatgagaacatgtggtgtttgattttctgttcctgtgttagtttgctga

SEQ ID NO: 821698 - DNA, 440 bp, Homo sapiens
aatgctctttgggcacttagcgcgttggctgtgatggctaccataattttggtgtgtcattttttctctactctgttcttttttcccctcctccaggtcacgattgttatataccataaaggcagtatcaggaaactgattttggttattagtggtcccatattgcaatttttggagcttgcacctgatgtccagagtggactggctgataaaatgctgtgccattagcacaatacccttgggagaggaagggtctaaatttgtatattttctgaaggcctcttccaacctgccataaaacatagctgggtttttctccttcccttatgtgacttccctgaccttataatttatggtsttggttatcccctttttcatccctccaaggagtgcctcaagaaactttgcttgcctgtttatttccacaggggtattataat

SEQ ID NO: 821699 - DNA, 516 bp, Homo sapiens
tgccctaattatgctatctaatgcagcactacttttgatgtaatggagtcacctttctgaaattaacatatttttagtttttattcattcttctacaaaacagatttataataatactttcaggattatgtgagattaaactaaaagattttaaaatacattatttttgtgaaaccagtttattataattttcaattaaaatctcaattgttattatgctcatctaaatataaaattgtatgaataggtattcaaacaggctaggatttttgcataattaaagttatttttctttaacaattgattaattgaaattgacttgaaattttataaacatctgttgttctcaggcattaataaagctaaaagttcattcaaggacagaatccattctgttccctaagtgttccactctaytgaattatattcagaactaaaaagctggtagaatacagactgttaatcagctatgaaggtctagtaactgttatataaaactatttttaaaaacttagg

SEQ ID NO: 821700 - DNA, 604 bp, Homo sapiens
ttgttctgatgaatattttccttcctttgcctgttttttttttaatctatccatcatccatacatccatctatccactattattaacatccatctatccattagcaaagattcattcagaagctatgtgccaggyactaagttaggtatcaaggatattgacagaagacagatgtagttccttcctaattctagataagcgaaacacatgaacaaaaatgaagtctataaaatatttatgatagcctgtggcagaaaatagtgtatggagggtggaggacactaagaaggagatgattctcccagaaaggtaaagcataagatacataaagaaaatgttatgattcttaacacagggcttaacgtagtacacatttgttgaatgaataaataagtaaatttaccaagtttgaggttcaaaactgacattttcttatttaaaattgggaaggaataatgttaaggtaaaaaacattagggtaagattgacatcaccaaaagtatgtacttactaaatgaaaaaacgttttgctctagttaaaattcttggcatatattttatagagtgacctaaatttttgtaaaatctgaaatgtgttaactat

SEQ ID NO: 821701 - DNA, 666 bp, Homo sapiens
ataaatatagaaaaagtatttgatgaaatccaacagcatttcatgttaaaaactgtcggtaccctaggaatgaggagaaaaccttctcaaattgatgaaaatatcctcaaaaaaccttacagctaatattgtaattaatggtgagaaactcaaaattttcccactaagatcatgtacaaggcatggatgtcccctctcatcactgcttttcaatgttgtactggaactagctaaggaataagaaaaggaaataaaagaaatacacaggcaaaagacccagaatagccaacacagtgttgaaggagaacaaagttggaggattgacactacttaacttaaatcaagacttactatgaagctacagtaataaagacattgtgattttagtgaaggaatagacaaggagatcaatggaacagaatagagggcccagaaagaggcccacacaaatatagtcaactgatctgatctttgaaaaaggaataaaggaaataaaatggtggaaggagtcttttcaacaaatgatgttgaaactggaaamacacacacacacacacacacacacacacacacacaaaatatagccatagattttatacatttcagaaaactcaactcaatatggattagagacctaaatgtaaaatgcaaactataaaactttta

SEQ ID NO: 821702 - DNA, 612 bp, Homo sapiens
gagaacacatggacacaggaaggggaacatcatacactggtgcctgttggggggtggggtgctaggggagtgatagcattaggagaaatacctaatgtagatgacaggttgatgggtgcagcaaaccascatggcacgtgtatacctatgtaacaaacctgcacattctgcacatgtatctcagaacttaaagtataataaaaaataaaaagaaaaaagaaagatctacaaagcctaaaatacactcatgaaaataaattatatacatatttatctctcacatatgaaataagagataatctttattgtcattttaaacattttattgattaatgttcagcaaagaaaattgaatgaatcatctcgaatatgagtgaagcatagaggttgaaaaatacactatgtcttctgtgaaaggagagacaaaaagttctatctggttgtgtttgaacttcctatgaagatcatgataatccaatatgcgtcatacagccgtgcattattttaatagtaacatggtaaatttttattttctttctgtaacatctgatatggacactgctatctctactttattctaagcataaagaattcctaaaggacatactccta

SEQ ID NO: 821703 - DNA, 691 bp, Homo sapiens
acttgtgcccatatattcataaaaataaaacatttaatttctttaagagttcctgtcatacaagacaaacaagttgttctaaattaaagaaragtaaagagactaaagaaaactaaatggatatcacaagcaaatgcaatacatgaaacttgttggttttttttttttaaaaaagctttcatttgagggacaatttattataatttgaaaaatatttgggggacaattgaaaactcaatatgcactttatattagatattatagaatattgtgacacttttaaattcttagaagttaaaatggtattgtggtaatgtaggaaaatgtctttattcttaggcaataaatactgaaatattaagaggcagagtgacatcatgttgcaatttgctttcaaatggctcaataaaagggaaattggagagaagctttattacatggatagatagataatagatagatagcatataaatgttataaaatattagcaattggtgaatctagatgaagggtatgtgggtgtttattgtgctattctttcaacatatctgcaggcttgggatttttcaaaacaaacggttagggaagacaaaagagagagactagtgtcactaaccaaaatagtctgaataattctgacctcagagtcacttcccacatcagggggacatttgccacactattcaccctg

SEQ ID NO: 821704 - DNA, 499 bp, Homo sapiens
acacacacatatatatatatatactttttactaaggctaggaacttgaggsgaggattttttctttcccagtttggattccctttagaattttgggttcagacaacaacttttacagttcttgaaccaagttcccttttactgaaagttaacaaaatacaaagaggggctgtgggctgtgggctgtgaaaggattctgtagaaaattgtaaggcccagattaagagcatgcagacagcagtgtatcagtcagattctaacctgaaaatcagaaaccactcaagtgttcagatggaagaaatctaatgcagagaataggtgacacactcagagtcaacatcagagaaagcactgccacagatgctatcagacacagcttttaaactaaaaatgctactatgttcaaggaaaataaagctacatttgagaatctggcatactatgaaaaaggaagaaggtccagtgctgtggctcatgcctgtaatcctagagctttggga

SEQ ID NO: 821705 - DNA, 621 bp, Homo sapiens; identical to SEQ ID NO: 814322

SEQ ID NO: 821706 - DNA, 535 bp, Homo sapiens
ctcattcttcaagttgtgtcttaagtcttaccttctcagaggccttttctgacccctccacctaaagtaagctaccccattatttattatctcctacaatgtagtgagttgaatggtgctgccaaaagatatctctacttgctggaacctactgaatgtgaccttattggagagaaagggtctttgtagattcaattcaattaaggatcttgagataagatcatcctggattatttgagtgggctttaaatgcaatgacacatgttcttacaagagacaaacagaagagaaacacctggggagaggagaaggctgtgtggcattggaggcagaggatagagtggtgcagccataagcctgggagtgcctgcagccacctggagctttggagggagcatggcgctactgacacctatattttagatttctggcctcyggaacagtgagaggatacatttctgttgtgttaagccacccaatttgtggtaatgtgtgagaacagcaacagcaaattaacacacacagcactttgttt

SEQ ID NO: 821707 - DNA, 529 bp, Homo sapiens
cacatttgccactctccctcatttgacacactgtaactcaactaggtttattcaatttttcagtcttggctaaagacttagtaaagccatcatgaaatagcttaatcyttagtcctttaatactaaatgttaattcccttcattttctttcaagtcgtggtttatttttcttaatgtttgtgaacaccttgttttcaatctacatatctgggtatgaatgtaatatagtttagtatttgctggtcctgtctcctattagattgtaaattattagagattaagacttgttttcccttcctttatagtttcaaaacttcatacagtgggcatttagaacttactgttgccccttctgttgagtgattatgacttaactcctgttccttgtaaataattattagtatcccttaagatgcttcatcgttgttatacctatttggattttttatgtggtttttttttttttgttatactttaagttctgggatacatgtgcagaatatggaggtttgttacataggtatacaca

SEQ ID NO: 821708 - DNA, 627 bp, Homo sapiens
gtcctactgacaccttaattttaggccagggagacgtctgacaacatttctaacatrcagaactgtaagatagtaaatttgtattgtttgaagacaccatatttgtgacaatttgttacagcagtaataagaaactaatataggaagaaaacaaaaaagctaattgaaaaaaaaaaagacaaaagatctgaataggtacttctccaaagaagatatatggatggcaaacaaggatatgaaaagatacttaacatcatttatcattacagaatggaaattaaaatcacaattagatgctatgtcatagttgctagaattgttacaaacagacaataaataaataatggcaaggatctggagcagcaggcattctcatttattgccagtgggaatgcagaatggcatagccactttggaagtcagtttgatagtttcttaaatatcacttctgggtatttacctaaatgtattgaaaacttttgttcacacagaaacctatatgcaaatgtttatagcagctttatttataaattgacaaaaactaggaacaaccaagatgtctttcagtaagtggtacagtggaatactactcaaccatgaagtggagtgagttggttattcctgcaa

SEQ ID NO: 821709 - DNA, 577 bp, Homo sapiens
attgctgggaatcctgagagaggcagggagtgagtgcaaactgcttagggtaaagactgtgcttacagatccgctacactttaacatgttaagataaaggccctcagaagatctccatttaacctttttttttttttttgagatggagtcttgctctgttgcccaggctggagtgcagtgatgcgatctcagctcactacaacctctgactccccggttgaagcaattctcctgcctcagcttcccgagtagctgggactacaggcacacgctgccacgcctgcctaattttttgtattttagtagagatggggtttcatcgtgttgcccaggctggtctctaactcctgagctcaggcaacctgcctgcctcggcctcccaaagtactgggattacaggcgtgagccactgcgcccggcccttcatttaacttttcgtagctcattatttctccaacacatttgcaaatgggatactttcttccctgtgccaggagtaagctcctgggagyagtgctccatgaagtgccccttcaggcatgtcacgttagcatcatttacaatattcccagtgggc

SEQ ID NO: 821710 - DNA, 589 bp, Homo sapiens
ttcagcttgcgagtttattcatttttaggttgtttgggtgaccacagtttccacctccctctattgaattctttatttcttcatgcccaggagactgccttcagtctctctctacttcatccttacckgcgtgcagctataataccagcataaccttcctaaacaagactttcattaattcagtgactccttaattgcctgcaaggcccactaccttagattgacgcccaccattcagcctcaacatacctttcagagattaatcaatcatttttacttaaaattgcagcacaagacgggctctgttgaattccagtctccaagataatttttcacatatgttacactctagttttcctatctactaatttgaatcttattcttctatagggcttgccttaaattctcccttctccaaaagtttcctttgatcattagaactcacaaaactgtattcatctgacctaatccattatcagatgaaacacattactgtgtcattaaccaccaagaaggaaaaacacctgtccattaaactaggcttcattgctttcttagaatttcaattttattttaattgaagctcttt

SEQ ID NO: 821711 - DNA, 604 bp, Homo sapiens
gatggaggcggtctaaaaatcagcagaattaaaaagacacattcaagtgaaacaggctttccttgcttcccatcttttcattccatgttattttcttttcctctctgaaaaccacttggcaaggatcatgagacagaacaaaaagaaaaggggaggtgagctatttactgaaggcataaaattcaacttgtgttggcattatgtcactgaactgaatagctatcggagactctctttcctcaactttgaatgggcccaaaatgttactgttatcaaagccgcacattgaagaagacagcagataatgtacttggtaaaacaggcagcctccgccaggaaaatgtgtaacgcttccattcactgaccctcctttccctccgcatcaacttgtgtcataaattgctatttgctgacaagctgtgctgatatgaacccaatgctggttgcagcacaagaaaaacatgccatttacttagtgccagggaacaacagccttgcttctcccaarctgatcaccatgttgctggctggtagagggagaatggatggtaaccatcgttcgttaccagcctaattcccaggtatgcactaccgtagcattagt

SEQ ID NO: 821712 - DNA, 619 bp, Homo sapiens
ccaaattgagaatttgggatttcgtgtttgttggcaattggttgaggtcatcagggctgttctgacttgacaggtaggaggctctgaacaggaaagcaaaagacagaaaggatggtaagaagattattcaagattaaagataagagagaattcaaatcagttctgtgtcttaagccctggaaatagtcattatgtgttcatccaaatatccagaactatttgataaagacacgaaacacttgctgttatttatagcagcctagagaagcaaactaaatgtagaatacagcttatgtcttgtagtgtctgtgatatcttggtaaataattctcaaaatattaccccttttagtgtatgaaatggctattttcaaaacataatttttatgttcaaaatatgccgttgctatttaaacacatatttaaaagtgactgtcttccagacactgtcctaaatgctttacaaatattaattcacttaatcttcatattgtacacccttagaaggtaagtactatactagccctgttctacagatgagasagcagaggaaccagggaggaaggaaacttgcctagaattatggagttaggaaagaatagagctgagattcaaaccca

SEQ ID NO: 821713 - DNA, 551 bp, Homo sapiens
agtttccattatttaggatccrtgtcgtggctcaaagaactaacggcaaagagaatggagtgtttctggtaggaagaacgacaaatcaaaaagcagagagaggggaaacaaacttggcccatttacataacattaagaaagatggactgggcgtgatggctcacgcctgtaatcccagtactttgagaggctgaggcggatacatcacgaggtcaggagatcaagaccaccctggccaacatagtgaaaccccgtctctagtaaaaatacaaaaattagctgagtgtggtggcgtgcacctgtaatcccagctacttggaaggctgaggcaggagaatcgcttgaacctgggaggcggagattgcagtgagccaagattggccaaggttgcaccaccgcactccagcctggtgacagagcaagactccatctcaaaaaaaaaaaaaggaaaagaaagatggccaaatatagtgtgaaattcaatagaacttagtaaacggaactaaggaattggagacaggtaaaacttggtttaaattcttaactttgct

SEQ ID NO: 821714 - DNA, 512 bp, Homo sapiens
cccaggcaagacaaaaccatgcactcccctggaaagggggctgaagccagggagccaagtggtctcactcagtaggtcccactcccacagagcaagctaagaacaactggctggaaattctagctgccagcactgcagtctgaagtcaacctggaactatcaagcttggtgcggggagaggtgtccgccattactgaggcttgagtaggtggttttcccccaacagtaataaggactgggtggaactcaacacagtgtggcaaagcggctgtggccagactgcctctctggattcctcttcactgggcagggaatctctgaaagaaaggcagaagcaccagtcaggggcttatggataaaactcccaactccctgggacagagcacctgggggaaggggyggctgtaggcgcagcttcagcagacttaaacgttcctgcctgccaactctgaagacagcaaaggatcctgaaaaggagggtcctctcaacacagcgcttgagctctgttaag

SEQ ID NO: 821715 - DNA, 512 bp, Homo sapiens
cccaggcaagacaaaaccatgcactcccctggaaagggggctgaagccagggagccaagtggtctcactcagtaggtcccactcccacagagcaagctaagaacaactggctggaaattctagctgccagcactgcagtctgaagtcaacctggaactatcaagcttggtgcggggagaggtgtccgccattactgaggcttgagtaggtggttttcccccaacagtaataaggactgggtggaactcaacacagtgtggcaaagcggctgtggccagactgcctctctggattcctcttcactgggcagggaatctctgaaagaaaggcagaagcaccagtcaggggcttatggataaaactcccaactccctgggacagagcacctgggggaaggggcggctgtaggcgcagcttcagcagacttaaacrttcctgcctgccaactctgaagacagcaaaggatcctgaaaaggagggtcctctcaacacagcgcttgagctctgttaag

SEQ ID NO: 821716 - DNA, 568 bp, Homo sapiens
tctaaaatgtatatggaaacacaaagagctaataatagccaagacagccttgagggacccaagagggagggaggaatagctcttctggwtatcaagactaattataaagctactataatataattaagtcagtgtggtatttgcttaattattatatagacaaacggaacattatcagaaagttcagagagagttacatctatgtgaacagttgatttatggaaatgatggccttacagagaagtgaagaaaatgaagttattttagtaaaaggtgttggttcaattataacttcatatggaactacaaagtaaaatttgactctgtgtcactccatacacgatagtaaattccaagtagattataagcctaaatttgaaaggcatgacaatatgcttccaaattttatcatcttaaagagtagggaaatagtggctaaatggtaagcactaactacaaacaaaaattgacaaattaatgtacatgaaattgaaaactgatttatcaaaagataccatcaagaaagtaaaaaacaagctacagattgggagaagatatctataatata

SEQ ID NO: 821717 - DNA, 482 bp, Homo sapiens
atgccccagtggcatctgtaacccaggcaagacaaaaccatgcactcccctggaaagggggctgaagccagggagccaagtggtctcactcagtaggtcccactcccacagagcaagctaagaacaactggctggaaattctagctgccagcactgcagtctgaagtcaacctggaactatcaagcttggtgcggggagaggtgtccgccattactgaggcttgagtaggtggttttcccccaacagtaataaggactgggtggaactcaacacagtgtggcaaagcggctgtggccagactgcctctctggattcctcttcactgggcagggaatctctgaaagaaaggcagaagcaccagtcaggggcttatggataaaactcccaactccctgggacagagcacctgggggaaggggyggctgtaggcgcagcttcagcagacttaaacgttcctgcctgccaactctgaagacagcaa

SEQ ID NO: 821718 - DNA, 482 bp, Homo sapiens
atgccccagtggcatctgtaacccaggcaagacaaaaccatgcactcccctggaaagggggctgaagccagggagccaagtggtctcactcagtaggtcccactcccacagagcaagctaagaacaactggctggaaattctagctgccagcactgcagtctgaagtcaacctggaactatcaagcttggtgcggggagaggtgtccgccattactgaggcttgagtaggtggttttcccccaacagtaataaggactgggtggaactcaacacagtgtggcaaagcggctgtggccagactgcctctctggattcctcttcactgggcagggaatctctgaaagaaaggcagaagcaccagtcaggggcttatggataaaactcccaactccctgggacagagcacctgggggaaggggcggctgtaggcgcagcttcagcagacttaaacrttcctgcctgccaactctgaagacagcaa

SEQ ID NO: 821719 - DNA, 567 bp, Homo sapiens
tctaaaatgtatatggaaacacaaagagctaataatagccaagacagccttgagggacccaagagggagggaggaatagctcttctggwtatcaagactaattataaagctactataatataattaagtcagtgtggtatttgcttaattattatatagacaaacggaacattatcagaaagttcagagagagttacatctatgtgaacagttgatttatggaaatgatggccttacagagaagtgaagaaaatgaagttattttagtaaaaggtgttggttcaattataacttcatatggaactacaaagtaaaatttgactctgtgtcactccatacacgatagtaaattccaagtagattataagcctaaatttgaaaggcatgacaatatgcttccaaattttatcatcttaaagagtagggaaatagtggctaaatggtaagcactaactacaaacaaaaattgacaaattaatgtacatgaaattgaaaactgatttatcaaaagataccatcaagaaagtaaaaaacaagctacagattgggagaagatatctataatat

SEQ ID NO: 821720 - DNA, 466 bp, Homo sapiens
attctatgtctggatatatacccaaaagaactgaaaacagtgacttgaatagatttttgtacatctatatttatagcaacattatttacaatagccaaaagatggaagcaacctacatgtccatcaatagaygaatggataaacaaaatgtggtgtgtggatgtgtgtgtgtgtgtatacacgtacacacaatgggaaattctaacagttgctaaaacataaatgaaccttgaagacattatgctaatcgaaataggccagtcacaaatagaaaaatatgacatgattccacttatatgatttacctaaagtaatcaaaatcatacagagattagaatagcggcaccagggacttggtgggaatggggaattgggattttactgtttaataagtacagaggttcagtctggtaaaataaagaaaagttcaggaaatggatagtggtaatgtttgtacgacagtgtg

SEQ ID NO: 821721 - DNA, 654 bp, Homo sapiens
gttctatgatagctcagtactatctgtggttttaggtatccactgggacttggaatatatcccccatggatgaggggaaactactgtaccgtgttggggattttttatttatttatttwttttttgtgacagagttttgctcttgtcatgcaggctggagtgcaatggggtgattctcctgtctcagcctcctaagtagctgggattacaggtgcccaccaccatgcccagctaatttttgtatgtttagtagagacggggtttcaccatgttggccaggctggtctcaaactcctgacctcaggtgatccacctgcctcgacctcccaaagtgctgggattacaggagtgagccaccgtgccctgccagtgtttgggatttaataagattagatttgataggttagtttaataagatttctttgtatagactggtggacttgacctatttagtttcttggttataggctgtatctgccatcataaaaatgtatgtctcagtggggaagatgtggtgagagaattgggttgatcatcacaaatctgtcaccatttgcaggataaaaaccagctaactaaccaacaatagaaacccatgatgtgctacaaagggtagagcccacaggcactatgaaattgtaaaggatcctactt

SEQ ID NO: 821722 - DNA, 560 bp, Homo sapiens
ttcagtttttattgcccatatgccttattgtaggtacttgtattgagggaaaarccttatatgtccaggtaggctacagagtcaaagaggcttgtccaaagtgttatttgtagtaggtgagtgacactgcatctgcgtgtttttcttttttattggcctttggtagtcagacttttatgatttgttgaattataaaatacatgtaaactgtaaacctgctttactcagtttgtttgacttcatttgcacttgctcataatgattgagtttggcccccacgtccaaaagacttgagttcaaattgtggttctgtcacattctctcaaccactgtatcaattaggactggaattggttggaatatagtggctttgacagtttcattttttgctcaggcaagtaagtccagaagtcattagggccccaagaagcttctgcccactatatgtagactttaagcttatggtccaaaattagtgccagagctcctgccatcacttctgcattccagatagctggatggtgaaagggcagaagaagagtgtgcttccctcctggaag

SEQ ID NO: 821723 - DNA, 577 bp, Homo sapiens
tgccaggttctgtgggtgccatcactgaaagctactgctggtgtctctggcactatgaaggctttctgacatcttcagaatcaaaacagagctttgtgtggagagagacaaaatgcctgcatgagtgtgacatcacttcatttgatgtctgccttcccctgaaactttttgtcacaggtggcattgatggctcagtccggatctgggacttccacggtagacttgtaaccgagttcgactcagccctgcattttggaccactctgctttgccagtaatcgaagtgacctgttgttgactttcaaccagcgtatctacatagtatcttgcttaaagctgctccctccagctcagctggttcacctgcgtatcctaaaaaatgcagatgaaatacaagaagtccctaaacccttccttcctagcttcttctttatgtttgaaacagtatttgtacccagatttgtctaccttggaaaagggcggcaggaattacaggggctagagaccctkgtcaacaaacggttcattgcttttgacaatactgtgcctcatgttgtagaagaagagagaagcatgtc

SEQ ID NO: 821724 - DNA, 624 bp, Homo sapiens
agacccatgacatcaaatgtcctagtttggcacccagaccttctggccaccatatacttccccatctttatatccttcacrtacatacactccagcttgagtgaactatgcgccattccctaggcagcccctgattttctggcgactggctttacttggcctttcttctaggaatgccagatgacttcctgtgcacgtaaggccccattcatcagttttcagtcttctcggattctctctaatctgaattatctccaactagctgttatcactcctttttctgaaatctcattaacaactctcttaggctgtttagattggaaacatttgtatttgtgtcttaactgtgccttcaagtagtttacaatccagtaaaggaaatgtgtcttgggtgtctcataaggcctagtactcatctttgtcctgtggtagatgtgtgtggagtgagggagggagagagaagaggaaaaaaaggaagggaaggagggaggaaggactagctttctaaatacaaacaaactctaaaacaggtttctttgatttagaagtgggtgtttcagaatccaagatggatattttccctcactgatgccacaggaaaattattaaggttataccaaatca

SEQ ID NO: 821725 - DNA, 604 bp, Homo sapiens
gcagagcctgtggagtgggaatgtggggtcagtagcccagacattgctagtccaggtcacctgccgtgagccaccagcaggtcactaccctggctccaggcacagttctcggccttgtggctactcgtccaggacagggagaggtgcccatccggctcattgtggggggctgggccagccccgggaaagcctggtcgggagaggggcaggcatggtggctctctgggcaactggcctgcccatgtcttccaaggtcttcccaggcagccacagggcctgtgttctctcacattgctgaaaatggccagaaagagggtctgggttcaagagggacctcctgacctggggcctggctgtgtcctgcccatggaagtctcactcctcccttttctgtaccactgaggagtcccaccagggagagggaagaaagcgtggaaggccatgagaaagaacagtggggagcagcccagtgtcatggggacaggccttgggcatagggccgggcccgggggctagcctgggkagggagcaaccatggtagcgatggctgagttcagcctgcccagagctcagatcattgatcatcaaagcaatcgcagcttaa

SEQ ID NO: 821726 - DNA, 445 bp, Homo sapiens
aacaaaagcccctttccttcaacaaacagcytgtagataattgtgtttttcctcatgtacagaggaaaaagggcatacatacaacacagcacaaaatagatccaaatacatagcctcatagaaaaactagaaaaataatacctgtggaagtttactcaagcaccaacctttctctctttttgctttctaagaaggatcatccactgtcaatggtaactctgagactcttaggatgaacctgggctagctaagtttctaccaccatccctacccaaccaatgtgagtgaagaatttattaacctgaataacgatggtccactatactagtgtacactcaaaactgtttatgatgactccagtgaaactaaaattttaacataggcaggtagatacaacatgcatttgctctccagcctgggagaggtggggtggaatgttttatat

SEQ ID NO: 821727 - DNA, 445 bp, Homo sapiens
aacaaaagcccctttccttcaacaaacagcttgyagataattgtgtttttcctcatgtacagaggaaaaagggcatacatacaacacagcacaaaatagatccaaatacatagcctcatagaaaaactagaaaaataatacctgtggaagtttactcaagcaccaacctttctctctttttgctttctaagaaggatcatccactgtcaatggtaactctgagactcttaggatgaacctgggctagctaagtttctaccaccatccctacccaaccaatgtgagtgaagaatttattaacctgaataacgatggtccactatactagtgtacactcaaaactgtttatgatgactccagtgaaactaaaattttaacataggcaggtagatacaacatgcatttgctctccagcctgggagaggtggggtggaatgttttatat

SEQ ID NO: 821728 - DNA, 368 bp, Homo sapiens
gttatatgaaaataatttaaattgtgaaggttagaatgaggtgctgcattttatagcataacctttaaaaataataattatttgaagtctgtttccagagttataatggtttgagccacactgttttctaaatactcaaatttggtatgcagctttatgacaggaagttggctttcagagcaggaatgtatgtaaacaaagaaatgtggctcacaggaaggtttagctaaatcaaatcccgaaggctgcctccattctgagcttstttctgtatcttgattatttgcagatgctttacatgaagttagagatgaaacccaatagttaacctccctaaaactcccaaggcaattcacagttagccctga

SEQ ID NO: 821729 - DNA, 593 bp, Homo sapiens
gactacccagcaccccactcctccgtctgaccaatgttccctgggcgcccactctgggctcagcaaggcagtggcgtggtggttaacctgagaaacaagttccacctgcctccacccacatggagttgctagttttggacacagacaacaaacaagtggacatgtatggtaccgagaagagaaaacagggcgcacgggctctgcaactgcgggtcagggaaggcctggggggcctcagtcgaggtggaaccatcgttggcagcccccaaatgggtagagtgcaccagcaaacaggagcccagggccctagagtagggggcagatccgtggggaccacctcacagggctgtgggactcagcaaggaggagcattttatcccagggaccatgaaaagccatggagggttttaggtaggagcaaaagatggtgctcttaggtttttaaaagatcaatctagtatgcytgagaaaagtatgaagcattcccgtctgccactgtggtgcttatgattattctgggatactgatacagaataaagtagctagtactgatcacgtgctataaagttacaaattgccacttttacgggtta

SEQ ID NO: 821730 - DNA, 609 bp, Homo sapiens
gggctcagaggcttgaaggtcctttctcggacaccggatgggagtggcagggctggaacagcagcccagcaccgtggctcctcaacggggctcaatacagatccagggacccacaggctgggaaaatgggtttkgttctgaagttagtacaagcctggggtttccaggggcctagtgatgactgtaggtctaaagtcaagaacagcacaggagagaactggactgttattctcctctatggggaactctcgaagtgtctcatttgaaggtatctatgatacctcaataccaaattcctctcaagaaaagcatggaaatcattgtggaagggaaagcaaagggtctttttgtaaattcttgccccgatttggccctatcctagagagtgttccccatgcccctcacccccaggaccagtctcagctctagctcctcaggggacagactccagtggggaggacagaggctccgaggagatggggcaagggaggccagaagtatctagatggggcggggcaggttccctggaggccggcagccgggggcaggggtctcagcaggcacgggctccacctaccgggcactgtgatggtgagggtggtgtcctca

SEQ ID NO: 821731 - DNA, 582 bp, Homo sapiens
agaggttgagatagaatgtgggaattaatatgcataattaattcaggaatcagatggaaatcacttatcaatgtgaagccctgtgctttttgacttccctgaattccatttaagctgcatgaataacattccaaggactatgttttttaccttgatcagaaaaataaactgagttggaatagatccacttgtcaaaagatgactatgttctcagttgatgagtttacaaagtttacacagtcacacaagaggttatattcaccatctttactagaagaattatctttttggttatctgagatagtacaatcttgagttttctcttaagatgaatgagaatgaaaatagcattaacttttctgaacatttcaatatggtgagtccctgatagataccttatgtacataaaatcacgtccatatacctgtgcaaatgtgttagcttgattttcattctaacttgcaatctacctctgctccaaataccaggaggrtcaggaatttctaatgtactctttagaattgtttttggattctaaagttggagcaacagtttggtcaaaaattcatggagacccaacct

SEQ ID NO: 821732 - DNA, 354 bp, Homo sapiens
agctaaacactgagtacatatggacacgtgtacttgagagtgaagggcgggaggagggagaggattgaaaaactacttatcgagtagtatgtttattacctgggtgrcaaaataatctacacaccaaatccctgtgacacaaattttctatataacaaacctgcacatgtatccctgagcctaaaacaaaaatttttaaaaaagaagaaatctaactactttaaaatgttttataaagccttgcaatggctgattcctgcctatttttctacatcataccatgttattttctttcctcacacacgccacattcctggtacactagccacatttcagttcctcaaacccactctt

SEQ ID NO: 821733 - DNA, 644 bp, Homo sapiens
acgattttttttaaataaggaagcaaataactgctttgaaatgtacctcagctgagcatggtagctcatgcctataatcccagcactttgggaggctgaggtagaaggactgcttgaggccaggagatcaagacyagcctgggcaacaaagcgagaccccatcgctattagaaaagaaaagaacctcaacgaagtgtcatacatggtacatggggtgggtgtagagagataataaaagggagaaaaggtaagaagatgaggatcactgaactagatactaaaagctatcctaattccactgataatgatattagtagctcaccattaatacattatcacattgaggtaattctgtcaacaacattttgagataaattctgtaataaccactcttttacagatgaggaaactgaggccaggagagattcagtatcttaataaaaggcagctagaaacagcaaagtcaggattcaaacctatgcctatgggcttaaactgtagatctgcactgagtagtaactactgttgatggaagtatcagaataaattaatcaggtatatcacaagccaatccaaacttgaaagcactggcatacatgtataaaagcttttagactacaaaattctttactaatatggtttag

SEQ ID NO: 821734 - DNA, 372 bp, Homo sapiens
actggtggtgaggggacatctgcatttaaacaatcattcaagatgattcttcttcagattcaactctgaaaactgccatctttcagcatccaagacagcactggctgagagggggtggggaaggggctgggggagaggaagagctttgcagaaaaatggaatggacaagcgacccaagaaacccataaatggagcctcatacctttgtgtatggaaggcacacacctctcacctcataccttagtgtgaatccagagagtgcatcccrgtaagatacgccatggcagaaggacataggagttgttaggatcagtcaggcagccaaatcagagaaaacgaggatgtggaaagagcaggctcaaaagcttcagg

SEQ ID NO: 821735 - DNA, 372 bp, Homo sapiens
actggtggtgaggggacatctgcatttaaacaatcattcaagatgattcttcttcagattcaactctgaaaactgccatctttcagcatccaagacagcactggctgagagggggtggggaaggggctgggggagaggaagagctttgcagaaaaatggaatggacaagcgacccaagaaacccataaatggagcctcatacctttgtgtatggaaggcacacacctctcacctcataccttagtgtgaatccagagagtgcatcccggtaagatacgccatggcagaaggacataggagktgttaggatcagtcaggcagccaaatcagagaaaacgaggatgtggaaagagcaggctcaaaagcttcagg

SEQ ID NO: 821736 - DNA, 617 bp, Homo sapiens
ctttatcagaaacaattccatgctgggcatggtggctcatgcttgtaatcttgtaatcccagcactttgggatgctgagtcaggtagaccccttgagcttgggagtctgagatcagcctggccaacatggtagaacctcatctctatgaaaacaatacaaaacttagctgcacataatgggctcgcctgtggtcccagctacttgggaggctgaggtgggaggattacttgagccagggaggttgagtgagctgtgttcatgccactgctctccagtctgggtgacaaagcaagaccttgccaagaaagtaagaaagaaagggagagagagagagagagagagagagaaagagaaagcgagagagaaagaaagaaagaaagaaagaaagaaagaagtaagaaagataagaacagaaagaaagaaagaaagaaagaaagagagataagagaaagaaagagagtctagtcaggaaggaaggagagaaagagaaagagagagagggagagaggcagggagggagggaggraggaaggaaggaaggagaagggaaggaaggaagggagacgggaggaaaggagaggatcctcagaggggtgatgggagcacctttccccag

SEQ ID NO: 821737 - DNA, 646 bp, Homo sapiens
tgaaacgtcttctttacaattacaaccaaaataattagaaaagcgcaaagtacattttggaacgrttgggcaaaaacgaaatctagccgcagaaatgttttctctgcggcctcagtcaccaaactaattagtccaagaaatcttctggtctttacaactttctcagagtccggaactccctttgctaacattgcaactagaccattttttcagaggatgaatattttttacagaaattgcgaatgcagttgtgtgccatttgggaaccctgcctgtgtttgcgggggagggagagagcttcagtgtgaggacctgcaccctttgtggagagctggggaagggagatgtttgctgttctgagttgtttttcccacctagagggataatatgtaaaaattattcccacccaaaaggtgtgtgtttctccagctctcccactggttctgagagagtaaactcaaacccaaaccctgattctaggcctaggtttccaagccattataattgggtgtttggaagtcaaaagataaaattgtatttgaatgtctgtctgcgcaatttatggtaataatgaggcctaatgaggttgttagaaagataaaatgttatttaccaaaaaacctgatgggataatttgacttgctgt

SEQ ID NO: 821738 - DNA, 552 bp, Homo sapiens
taaacatatacgcagtgggctacctggaaatggtttaatcggtttaacttcataatcacagagtgagccacagataatgtgaatgaggtgatggaatttgccggattcccgtgaaacgctccctccacttcctcagagtccccagccaaagcgggcacgggcttctccggcatctgctttctttgagtcaagctaaatgtgatccttgccctgagccttgctccactattagtagccaaatgctaaagtatatcagggagactggtgggcgtgtacggctttccctaagggacaggagttatgctgtataggagagggagtaagaacaaaatccacaggccccagaacagctgggcccctggattcatctgtttcgacactgctttaaagaactacttgagactggatcatttataaacaaaacaggtttaactgattcacagttccacatggccgggaaggcctcaggaaacttacratcatggcagaaggcgaaggggaagcaaggcaggtcttacatggtggcaggtgagacagagagcaaagaagtgc

SEQ ID NO: 821739 - DNA, 528 bp, Homo sapiens
catcaaagcatcccgaagtctagtagaaacatttaggagggaacagtcttgcgagttggggacttttgcttgcacttcatatcactataccaagcaagctcaaatataatcataagttaaagttaaaacatattcatttcatttctgattcgggtttttagtgcttagccaagaagccgaggaaagtcctctttgccctaacagcagcttgtttgccgaggggccccatgtacccctcaagtagaagcagctgccctctgtggcctacagcccacccctcccgtccacactcccacaggctcccgagtggaaagtacttgccatatttactttttcttggattccgcagtgtgagcctagacagatattcttttgcaagggaaggatgaggtcagctgggagaaagcaatatttccttgttttagataacattatgttttgagagtgctctcaaattactcacttatatttttaaagtyctgtttttctgttagattaacaatatatttgttatccaacttccaaacc

SEQ ID NO: 821740 - DNA, 661 bp, Homo sapiens
ataaggcagaagaaagtggaattagctatacaaatttcagatagaacagaatttatagatatgaaaattatcataaacaaatgccattacataataaaaagtttaatactccaagaagacataacaatcttctgcatacatgtgcttagcaagagagcatcaaactacttgagtgaaaaactaaacgcaagaataaattcacaaatccactaccatagttacagatttcaacatgctgtatcagaatggacagatccagcacagagaaaatcagtaagaacagccttaaactcaacagcacatcaatcaacgggatttcattgacaactatagactacttcaccaaacaacaccaaaatatacattcttctcaagctcttatggaaaatttaccaaaatacatcacattctgggttcagaaaacacatcttaacaaactaaaaaaaaacatacaatgtctgttctcagatagcaatgaaattacactaaaagaaaataacagaaagaaaatggaaaatctcaaaatacctggagacacttctaaataacacaggagtcaaatttaaaaatctcaaaggaaactttttaaaaawttttaaaaatgaaaatatgacacaatttatcaaaattttctagatacaataaaagcagtgtataaagt

SEQ ID NO: 821741 - DNA, 298 bp, Homo sapiens
gcgtggcttgggttgggcttcttggacccattctcctccatctgctcatctctaatgtgggttcataccatcaaaagtttctgaagagtcaactacgtcttgtccacagtgggctgcccaggacacctggagcttagaatgcactgagtgttggcccctgatgttggtatcaagagacttcttgactttccaccaaatagggtctggaaaactctcctcccaatgcctctgttgagkgcccaggtgctgggtgagcaccgtcctgtgggttattactgccctcgaggctcttctgaga

SEQ ID NO: 821742 - DNA, 580 bp, Homo sapiens
accatggcagggattcaatagcccactgtgccacagagggcatgccttggatgtagagagtgaagactttccacaacttgtgaatgagccctctgtgagtttagccaaaacattcatgtcaaagaaatggaaatctcaaataaaacccatcgcaggccaagctcaggagggctggctagccaacaaatcctgaacaagggggttcaagggaaaaggaaaacatgtgtttcataggcatgtatgaaaataatcttttcttctatagcttttgaaatgaggataatgaaatatcagttggtctttgaggatgatgaaaggaatattttttgtaagttataaaacaatagcgtctgcctttagcaagtaatctcaagagagtcactttcagagtccagactggaagaacacttaacttcaaaatagctctttacaaatactaatcagatggtccacaaaactctctrccatatgaaagttatcttaacccaagtagggaagtcacagatagctgtaaatatctgtgtgcctagctctgtgttagaagcaatggtgaatgtgtgtgtgtgggatggggtggagt

SEQ ID NO: 821743 - DNA, 610 bp, Homo sapiens
tagtcccagctactcatgcggctgaggcaggagaatcccttgaacctgggaggcggaggttgcagtgagccgagatcgcaccactgtactccagcctgggaacagagcaagactgtctcaaaaaaaaaaaaaaaatgattaagtgaatcgcattaaaataagaacttctgtttatcaaaagcctccattaagaaagtgaaaaaaaacaagccacagaatgggagaatatgtttgcaacacctatacctgacaaaagatttatatccaaaatatatgtggaacccccctccttcaaatcataggaaataaagataaataacccaattaaagggaagaatgggcaaatatttaaagggcacttcacaaaagaggatgttcaaattacaaaaaacatatgaataggctcaagattattatccatcaaagaaatgcaaattaaagccacaatgaaatcccactacagatctagcaaaatggctgcaatttaaaagacctataattccaagctgctggaaagcatgaagagcaactgaaactcttatctactactgagaagaamgtaaattggtgtaacgactttggaaaactaacaattcctactaatgtcaaa

SEQ ID NO: 821744 - DNA, 427 bp, Homo sapiens
aaaactacaaaacactgctgaaagaagtcatagacaacacaaacaaatggaaagacatcccatgctaatggatggatagaatcgatattgtgtatatgaacatactgccaaaagcaatgtacaaattcaacacaatccccatcaagataccaccatcattcttcacagaattagaaaaaaacaattctaaacttcatatggaaacaaaaaagagcccacatagccaaagcaagactaagcaaaaataacaaatctggaggcatcgtactacctgatttcaaactatactataaagtcattgtcaccaaaacarcatggtactggtataaaaataggcaataggccaatggaacagcatagagaacccagaaataaacccagatacttacatccaattgatattcaacaagcaaacacaaacataaag

SEQ ID NO: 821745 - DNA, 452 bp, Homo sapiens
aagactggcctcccttcgcttccccagccctgggggagccctccgatggctcactctcagggagcacagagcgcagctgacagccgtgcctgaagtttacaaggtgtagaggaaaaactggctaatattgatttctgaaacagatacaggaactaatggcagaatttgcttgactgtgggtctcctgtggctactggcagaaagggaggacagaggcaaagcatttgcgaaaatattctcctgttgtccttcccagccttagtctctggctgcagctttcttggtgaacactttggcctaacatagaggcttcctgattgcarggcgggggactcgacagagggcctgaggtacaaaggggcttctgcaaaggttctgcttcagctgttccaaactgttctttgatgcttattgtctgtatggaaaggacctgcacggaaacgtccatttgg

SEQ ID NO: 821746 - DNA, 632 bp, Homo sapiens
gccttgatttctttattctgcataactttctaacctccaggaaatcagtaactatctttgtgtgtgtgtatgtgtgctcactcaagttttctatgtatttaccastaaatcaaccccaaactctctccaggaatctgagcctctcccagaatgttcaaatgcagcagatcatcaaccaatttcatcttgaaaaggtctctcccagcacctcctgacttgctgctaccctgacttgttgtcctcttatgcctcgggcagttttccttggaatttctctccatggcaattgtgaagatttcctttgtctctttttcatgttggtcttctgtttcttggagcctatctcttctatctcaacttgctccctcattttagtgttatgccttctctagtaccctcttagaaaattgatgcatgtgaggaaaatcgaggccttgcacatccaaaaatgtctttatcctaccttcatccttgatcaatggtttgtctggatatgtaattttctatctggaattctttcccctctgaattgtaaaggtatttctccattttctgctagtttccagtgtgactattgagaattctgaagccaatctaattcttaatcttttgtaaataaattattttccttt

SEQ ID NO: 821747 - DNA, 561 bp, Homo sapiens
aaatgggagtttcatgaattgtaaaataagtcttataaattagctaaacawgtttcttcaatccttgaactgggggatttaaaatattagctgaataggcattttatattcctaatctcatactttcaaaaaaatcataaaaatgaaatcctgatgtttagacattttaaatggtaatgtttttaatgccacagtataaaaataaagcattgattttaatgcactgctacagtgagatggtgccagcacctctaagtatcattgccagtgctctaacctttaaaataacgaattaattgagttatatgtagtaatatatcttggctattactgccaaagtaatagatatatactgaagtcttaggagagatagagggataaatgttagtcataaaaagttgttaaagcagagggaaaaagaagtgaaaactgaccaaacatatacgtaattcattgtttctatgacaagcctgctgcaattcgaactctaggactttgtgctaatatttagcataccattttattttctagatttcctttatactcactatgttcctcagt

SEQ ID NO: 821748 - DNA, 615 bp, Homo sapiens
ttgaaaatctatttatagagtagtcaggctaaatctcttattgctaaaacaraagtagtgaaggtcaaagaatgcaaaatcctaggaaacacaatttttttccaaaggctgtttaatatgcctttgatatagattactttattgacaatggttcttttgtctttctgaaaactacatctgcacaacaactaggtcaccttgaatttcaagtacaacattgcctataaatttaatttaacatcatattatccataattaccatgaacaggaggcaggtgtgacccttatggttaagctagagggaccaaggacaggataggttaatagacttgctcaaggctccagggtctgagttaactacaggctctacatgagccacaagtatgacctggctattaaaatattattacaatcacatgcttctttaaagagtagtacttccaaatcaaaggaggtaccagttccattgctggatagtacactcttcactccaactctgaggaactttattttagcgttagatggcatctttcatttcatagttggaattgaaagcatccatagagggcaatgagaaaagcaagcaatctgaaattgacgccccaggaactctga

SEQ ID NO: 821749 - DNA, 324 bp, Homo sapiens
attctaatgtgcagccttgagccatattctttgagaaacattgcggtaaacarttgctttttttttaatcataaaaatgtgttttctttaagaaatgtgaaaaacatagagaggtagatttaaaaacatttgacgtgtgcagcagccttgagctaagtgccatacactactgcagtttgctgttttttgttttttttgttttgttttgttttgttttttaagatggagtctcactctgtcgcccaggttggagtgcagtggtgcgatctcggctcactgcaacctctgccgtcccagttcaagtgattctcttgcctcagcctc

SEQ ID NO: 821750 - DNA, 324 bp, Homo sapiens
attctaatgtgcagccttgagccatattctttgagaaacattgcggtaaacaattgctttttttttaatcataaaaatgtgttttctttaagaaatgtgaaaaacataragaggtagatttaaaaacatttgacgtgtgcagcagccttgagctaagtgccatacactactgcagtttgctgttttttgttttttttgttttgttttgttttgttttttaagatggagtctcactctgtcgcccaggttggagtgcagtggtgcgatctcggctcactgcaacctctgccgtcccagttcaagtgattctcttgcctcagcctc

SEQ ID NO: 821751 - DNA, 579 bp, Homo sapiens
ccctcactctaagtcagatatcctgtaatacactctgatggtgctctgtactttttctctctgtatttacctcaattataattgtatagtgtttctcccaaactagatgataagcaataaaggtaagaactctataaacatttattgaattaatgagtgagtgctttcgtgccatgggaaaacggaaaccatgtgacagaaagtgttagtttttcatcaaaatttatttccattttatgatggagacacaagactttattcctcaagtccctgtaagcatagatgtggccatgtgaatgaagcaagtgaggtgggccatttccatgcctgcctattaaaatctcccacatgcacttttccaggtattttccccttttgattgatttggatgatgacctctgaccccacccgcactactcttactctcctccactttaccccaaagttcaggcaatgcctggatagtcagttacagacttgycaatttccaagggctttaagtactcatctggcagactgcaggtgaatgaatctgataatttcttgttacctttttatctattctgctatttgtatcac

SEQ ID NO: 821752 - DNA, 579 bp, Homo sapiens
ccctcactctaagtcagatatcctgtaatacactctgatggtgctctgtactttttctctctgtatttacctcaattataattgtatagtgtttctcccaaactagatgataagcaataaaggtaagaactctataaacatttattgaattaatgagtgagtgctttcgtgccatgggaaaacggaaaccatgtgacagaaagtgttagtttttcatcaaaatttatttccattttatgatggagacacaagactttattcctcaagtccctgtaagcatagatgtggccatgtgaatgaagcaagtgaggtgggccatttccatgcctgcctattaaaatctcccacatgcacttttccaggtattttccccttttgattgatttggatgatgacctctgaccccacccgcactactcttactctcctccactttaccccaaagttcaggcaatgcctggatagtcagttacagacttgccaatttccaagggctttaagtactcatctggcagactgcaggtgaatgratctgataatttcttgttacctttttatctattctgctatttgtatcac

SEQ ID NO: 821753 - DNA, 593 bp, Homo sapiens
cccatatgaattgcagtctcgctttcatgttttccatctaccttgcagcattcgttytgaataaatatttcagctgtatatttcaatttattaactttcttcaaatgttgattttttattcatttgcctgttcctcttttgaaatttcaacaattatattttcatttctagaaactccatatgagtgtctttttgtctatccattttgaaagtttcctatgagtcattcatttttctaactgtatcatttacttcctctgatatatcctatatagtccttctatagtatgtctaacaattccaatatctgcagtccttgcatgctgaacctgtttttttttttatgctgtctttcattcatagtggctttccttctagtatttcccataatctttgtcaatttgttgatctcattttgtggtagtccttaaggatacttaaggggttgctttctacttttgcaggcagtgtatgggtacaacccttatgaattctggttgagagcaggtgtgccatgttataattctctaacacctagctgttccaaggttcattgtgcccacagcagtgttgctatagtgatccatctcagg

SEQ ID NO: 821754 - DNA, 557 bp, Homo sapiens
taaggagatgagctactcacagtgaaacagacaacactgtggwttcggggtaagcagggtgggactgcatgggactgacagcaagaactgacagtgttatctccagtgttccctgcctgtagagccctggctcctggttccacctagactttctgacttgatttgtctggggtgggcccctgccattgtaatttgtaaatgctgcctgggtgattcaaacagcgcagactcagaaccactgctatagaagattttcaaagggaggagagctgaaatgagttggcagcctgttgcctctgagcactgggttcccattttacagaagttattatatttagtatcttgacatctatagggaggtgtgttcatctccatttttattaatggaggaggacagaagcacaggtgatgtaggtgaccttcccaccactgtgtagtgcagaggccacgagaccctggatttggcctggactttccaggtacgaaagtgactgttcttccttccctgatcttatattgagtaaacaggaagagttggggaatgatctatggatgag

SEQ ID NO: 821755 - DNA, 577 bp, Homo sapiens
atgcagcccctgaaatccgtttttgtcccaaactcaattccaggtttcaggctgagggcctagaaaggaaaacccgatctgcccgatctgagggatcaaaagtcaggcaacaggcacaatgtaaatgggcaggacaaattcctgctgactaaacccccacttcatggagggaggccatgctccaggcataaatgaggcccagggaactcaaaggttttcaacagcaggggaaatagaggcataggtgaggggagataattcctattctctagccccaccctgcttcacgggtgcagaccacagtggcacctgtgggtggcatccataaagttgccaggactcagggacaacagatggaagagaaagtcccttgctttctctctccctcacaccctgagttttcattgaaagaaggaagggaaatgagggacacctctatttccctgtctttcagaatgggcaaccagctctcttcaccacccccagcttattctcctctggagtgtatcctgaaccactgagayggctttgaccctcagaatctggaggaaaaacacctcctagcctgtgtatcctg

SEQ ID NO: 821756 - DNA, 349 bp, Homo sapiens
ctgtgcccatatccaaagggtttttttttcctcacaaaatgttcagttatttattgggttgttctcattgcaaagcaaataggtagaacctgttcatatagtacaaatgaggaaactgaagcatagtaagcttgtggacttcgatgaatctcacacaaggagtcaggggcacaacttgggaatgaataaaagacccccttcctatctaattatttcaatcaccaacttatatatcctcccatacaatcccaggtttttctttggaaatcaaactgcagatactgttcacascttttcgtgtgaatctatcagatagtttcagcaatggttcatgaacgacagtcttggt

SEQ ID NO: 821757 - DNA, 639 bp, Homo sapiens
gggaccaggtggccatcctagcagtggtttgcatgttgctgttaccatagcaccagtgggtggtccatcctgtggagcagtggcatctttgatgatgagcaccacctccacttctgtgacattgtgggtggtgtcatcttgtttgacaaatgctacctgcctgtgattaggatccaatgttgtacttggcccagcttagctttgcttagttgtttgagctggagttcaacacagtaacaactttccaacacagcccctttcagataatgctgtttgattagtgttggagaacttctcttagtctttttgggctgctataacaaaatactatatgtgagtggcttatcaataacagaaatttatttctcacagtactggaggctggaaagtccaagatcaagatgctagcagattcagtgactggtgatgaaggcccacttcccaattcatagatagtgccttctcactgtaaccttacatggtagaatgggaaggcaactctctgsggcctttcttataaggcactgatctcattcatgagggctccattctcatggcctgatcgccttcccaaagccctacctcctaatagcattacattggtgataaggtttttaacatacattttggagggacata

SEQ ID NO: 821758 - DNA, 639 bp, Homo sapiens
gggaccaggtggccatcctagcagtggtttgcatgttgctgttaccatagcaccagtgggtggtccatcctgtggagcagtggcatctttgatgatgagcaccacctccacttctgtgacattgtgggtggtgtcatcttgtttgacaaatgctacctgcctgtgattaggatccaatgttgtacttggcccagcttagctttgcttagttgtttgagctggagttcaacacagtaacaactttccaacacagcccctttcagataatgctgtttgattagtgttggagaacttctcttagtctttttgggctgctataacaaaatactatatgtgagtggcttatcaataacagaaatttatttctcacagtactggaggctggaaagtccaagatcaagatgctagcagattcagtgactggtgatgaaggcccacttcccaattcatagatagtgccttctcactgtaaccttacatggtagaatgggaaggcaactctctgcrgcctttcttataaggcactgatctcattcatgagggctccattctcatggcctgatcgccttcccaaagccctacctcctaatagcattacattggtgataaggtttttaacatacattttggagggacata

SEQ ID NO: 821759 - DNA, 683 bp, Homo sapiens
aactaggaaagaaaattgacctsggatcctgtaaagaaggaaaagcatgtgcctcagtgtgacttagtaatgcacagatgtggaaaggacacacaccaattagcgtgacaataaaatgactgacaacagcatacaccaaaattcaggtctaaaatacggttaaacctacagtccctcatattgattagcctataaaagacacttgaaatgtgggataaaagatttctgctaataatagcacacacagcttatattgccaaagcttactagaatcttataacatagatattcttatcatctcctatttgtagacaatgatactgaggcacaaacatgttaagtgcctttctaaaagtcacatatggagagaagattaaaggagcctaccctcagctcctgtgatcttgatctcaacgctcttctgcctcttttttaaatcacagaaagatcaagtttgaaaagacctgttttaggatcttcacgttttagaggagggaactgcgatcaaaggaagttggacacacagttgacatagcaactcaggttaatgccagaattgggagtttgaatccagtcgttttttatccagcagaaggggcagtgactataaaaccatgttattgtttctaagagttttagtccattatctgccctacaggtacactttctctttggaaatgacc

SEQ ID NO: 821760 - DNA, 624 bp, Homo sapiens
gacaaggggagggagggggctagtatgaggttatcttagatcttgatcaaaaggtcatcctggaaggtgtgaagccctccgtagaaagaggttgaagataaacagttagattcccagggaaagaaatcctaagcaaaccctaagcaaccagtcagagcaggtacattcactcacctcaacagaactgtgggagaactcccacatggggcaagtctccaaagagcccaaaaatattgctctgaaagacagtcagctttgaacaccctctgaacccagcaagtatcagtaacagttcgcagaattaccaataagacatttcctgcccccttaccttcatcccatccccagcttcccatccccagcttccaacaccagctgaaagcgtagctagtgggctgggagaggaggtcacggagagcagatggagaaatgtagtataattagccattcccaccttccccattgctagactgcaaagaggaattttgattataacactggaccagtgatactgaactgaacaggcttttttgaatgctcatgaggccagactttattaatgagtgagcaaataggctatggaatcaayctaaaaattttattcaatggacaaaaaaattagct

SEQ ID NO: 821761 - DNA, 543 bp, Homo sapiens
gatgttgaaatgtaatctcaaagatggctgaataggagcagctccggtctgcagctcccagtgagaccaacatagaaggtgagtgatttctgcaattccaactgaggtaccaagctcatctcactgggactggttagacagtgggtgcagcccacagagggtgaacagaagcagggtggggcattgcctcacccagaaagtgcaaggggttggggaactgcctcccctagccaagggaagctttgagggactgtgccatgagggacagcgctgtctggcccagacactaggcttttcccatggttttcacaacctgcaggccaggagattccctcgggtgcctacaccaccaggacactgggtttcaagtacaaaactgggtggccgtttgggcagacactgtgctatcagcaggagttttttytttttcataccccagtggtgcctggaatgccagcaaggcaaaactgttcactcctctggaaagggggctgaagccagggagccaagtggtctagctcagtggatcccacccccatgaag

SEQ ID NO: 821762 - DNA, 636 bp, Homo sapiens
tcccctacatcctcttcacatctttgtcaagtgttccttttcaaaactctcctcaaaccacccaaattcagtgcgctacctatttcctgccaggattctaatgctacaacatccagtttatttgtttatgtaggtatatgtattctggaaaattacatgatgtcatgaaaagttgcatgagctatttcagagacttgaaatttattcttattcaacagatggggaatcaaaccgatcatgcattataatacagccaaatatatattattgttgctatatagccaaaagtcatataagtgtttgaaagtaatagactaatgatgcaataagatgaatatgccattcaaattcatggatggttttaaaaattagtgacagataggtatattattatttcttccattttacgataagtgaagtcagagaagtaacttggccatggtcatatgataaatagccaagctgggatttgaccccaaggagtttggctccaaagcctgggctcttaactccacccactgtttctctgggcagtacctggaaatagytggacttcaggcaggttggtcaggtatggcacaaatattggaaacctcagatctgaaattttaaaaccaacatggtgccatgtaattt

SEQ ID NO: 821763 - DNA, 636 bp, Homo sapiens
gcaatcttgctcaaatttaatatttaagtaaattgtaaaaatactgacgacataaattcacttttctaaaatgcatttttaacatttatttatttacgatattttttttttwaattttttgagatggagtcttgctctgtcacccaggctggagtgcaatggcacgatcacagcccactgcaacttccacctcctgggttcaagcgattctcctgcctcagcctcccaagtagctgcgattacaggcatgcgccaccatgccctgctaatttttatatatttagtacaggaggggtttcgccatgttggccaggctggtctcaaacgcctgatctcagatgatccacctgccccggcctcccacagtgctgggattacaggtgtgagccaccgtgcccaaccaaaatttatttttttaaataaataatactagaattatgcttgagagatttattttttatatcaactaaaaactgtgactttctgtgatctaaaattttgtttctttgggagacagtaacaatgaaggtaatcttcccaagtatactacatgaattatgttgaaatatttggtgtaactacataaatataaatgtaacaagagccttttatttccaaaatgagattcaatttatt

SEQ ID NO: 821764 - DNA, 507 bp, Homo sapiens
aggaatagcctaggatgctggattacacattttgcagggaagggctaatgatcatttctgcyggagagaagactcagtttttaaggcataaggtctgtaggtggtcatctgtccctatataagtattccataaatgttatccaacctggtaagtacctgatcagaatctttttcagagtgctctagacttcatagcagggcttctgtgatattcaactgcacagccatatatagtgaccctggttaataaatactaaaagataatttacaccatcccattcaatttcttttctgttaaactaggattccgactggttagaaactaccctcctccactaccacctccttgagattccagtcatttactagtcactagcactgtaagtaatttaactgatggttggcttttctggcaaactctcattctgaatctccacttctgtcttaagttctactactgacttcttgtcacctcaggctaatcatttaagcaaatgttgaagacaa

SEQ ID NO: 821765 - DNA, 507 bp, Homo sapiens
aggaatagcctaggatgctggattacacattttgcagggaagggctaatgatcatttctgctggagagaagactcagtttttaaggcataaggtctgtaggtggtcatctgtccctatataagtattccataaatgttatccaacctggtaagtacctgatcagaatctttttcagagtgctctagacttcatagcagggcttctgtgatattcaactgcacagccatatatagtgaccctggttaataaatactaaaagataatttacaccatcccattcaatttcttttctgttaaactaggattccgactggttagaaactaccctcctccactaccacctccttgagattccagtcatttactagtcactagcactgtaagtaatttaactgatggttggcttttytggcaaactctcattctgaatctccacttctgtcttaagttctactactgacttcttgtcacctcaggctaatcatttaagcaaatgttgaagacaa

SEQ ID NO: 821766 - DNA, 597 bp, Homo sapiens
ttattaattggcctatttcaatattgtatctcagggactatggaggcttaaggagagggagacaagggaacagctggttggtggaacagtcaaaatacacacaacatttattatttaagtttgctgttttatatagatgtagttcttgattcctccaaacaattacactgatctgtgattacacatcaacataacagacataataataatgaaaagttttgaaatgtgaaaattatcaaaatgttacagagagacacaaagtgagcatgagctgttggagatattgtagtggtagacttgctcaacacagggttaccaaaaaccttccatttgtacaacagacaatatctgtctgtaaagggaaactcattaaaataaagcatgcctttatatgatctagcattacactcctaggtattgacccaaatgcgttgaaaatatgtccgtacaaaatcctgcatatgaatttttatagcagcattatttgtaattgccaaaaattggaaggaacaccracattcttcagtaaataaatggataaacaaaatgaggtacattcgtacaatggaataatattttgcaaaaatatttggagcg

SEQ ID NO: 821767 - DNA, 578 bp, Homo sapiens
ccagcaattgtgctccttggtatttaccaaaaggagctgaaatgactacacaaacacctgtacacagatgwttatagcagcttttatacataactgccaaaacttggaagcaaccaagatgtctttcagtacgtgaatggataaactgtggtacatccagacaatggagtattattcagtgctaaaaagaaatgagctatcaagctgtggtgaggcatggaggaaacttaaatgcatattaccgaaaggagccaatctggacagactacatactgtatgattttagctatatcacattctggaagaggcaaaactatggagatggtgaaaagatcagtggttgaacagtcagagcagaggattttgaaggcagtaaaactactctatatgataatatgatggtggatacatgccattatacatttctccaaacctatagaatatacaacaccaagggtgaaccctaatgtaaactatggactctgggtgtcaatgtaggttcatcaatggaacaaatggaccactctggtgggggacgttgataatggggaggctatgcatgtgttggggcagagggt

SEQ ID NO: 821768 - DNA, 617 bp, Homo sapiens
gcttcagagggtgcaagccataagccttggtggcttccatgtggtgttaaccccacccctactaaaaatacaaaaaattggccaggcatggtggcaggtgcctgtagtcccagctactcgggaggctgaggcaggagaatggcatgaacccaggaggcagagcttgcagtgagccgagattgcaccactgcactccagcctgggcgacagagcgagactctgtctcaaaaaaaaaaaaaatagatgagtatgaatattcttagactcagggtataagttgagtgctgactggggactaacaaacctagcagtccacccctgtggtattcgattcaatccaataaatcttcacttaggtgcggggactgagggggttatcaaattgccaattgatttagggcttcaaataaattgatgtattaggcatgatttctagttttatttatttaaaaaaggagcaaggatttaatgacagaagtcaaacccaagtaaaggatcattctaaatttttctgctcatccccccaaacytttttagttttgtccacacttaaaaaaaaaagtagtattagcaacttactcttactctctccaatgcatttgacttaattttcataa

SEQ ID NO: 821769 - DNA, 626 bp, Homo sapiens
aaggatttttaaatgcactgtagtcatatcaactctctagcatacatgatgagcatgaaaataccttttctctaacttgtatgctggttcgtrggtgtgcaattgggaagggagttagagttgcaggtttaatagataacttcagttgcctagagtagtgtattttttacatttgtccttttgttgttaattgtaaactttgtgaatcagttttccctttaaatttcttaggtaaaaatcaacccaaggcagtgattaagaaaaattgagaaaatttaattcaaatcacttgagccaaagcttaaggcagttgaagtaggatggaaactgaggaaatgctacaggtgatcattgcgggatgaaagtaagaggggatggttgatggaaagcctagtttacttctcaggttagtaactagctctgcaccagcctaagaggttgttctcagatcatggtttgctttctatggttcagatataaagagtttctaccgtttaaaatgaataccatcatatatgttctccagttggtctgtgtgtacttcaaacgactatatcctttttaactcattagtaagcttctgaatggttattttcatatttttaaaattacctcaagtatatagc

SEQ ID NO: 821770 - DNA, 616 bp, Homo sapiens
caggaggcagaggtcaaagtgagccaagatcataccattgcactccagcctgggcaacaagagcaaaactccatctyaaaaaaatatatatatatacatatacatacatatatatacacatatatatacatatatacagatattatatatgtaaatgtatatatatgtgtatatatatacacatatatatacatattataactacatatatatacacacacacatacatatacatgcacacatatgtttattgcagcactatttacgatagaaaatacatggaatcctcccaaatgcccatcaatgatatattggataaagaaaatgtgatatatattcaccatggaatactatgcagccgttaaaataaatgagatcatgttctttgcagggacatggatgaagctggaagccatcaccctcagcaaactaacacaggaaaagaaaaccaaacaccacatgttctcagtcgtaagagggagttgaacaatgagagcaaacacatggatacatggaggggaacaacacacaccagggcctctcagcgggacaggggtaggagaccatcaggacaaacacgtggatacatggaggggaacaacacacaccagggcct

SEQ ID NO: 821771 - DNA, 509 bp, Homo sapiens
tgaacacactaatgatgagaaaacaagagaagcttattgctgatatggagaaagtttgagtggtctgcataaaaagatcmaactagctacaacattcccttgaggcaaagctcaatccagagcaaggccctaactctcttcaactatatgaaggctaagagagagaagctgcagaagaaaaatttgaagctagttgaggtggtttcatgagatttaaggaaagaagccatcttcataacataaaagtgcaagatgaagcagcaagtgttaatgtacaactcacagcaaactgtccagaagatttagctaagataattgatgaaaatggctacactgaacaacaacttttcaatttagataaaacaggcttatgtcatctagggctttcatagctggagaagaaaagtcaatgtctggctccaaagctatgctgaatctcttgttaggggctaatgcacctggtgactttaagtcactaatgagccagtgctcatttagcattttgaaaa

SEQ ID NO: 821772 - DNA, 476 bp, Homo sapiens; identical to SEQ ID NO: 814623

SEQ ID NO: 821773 - DNA, 709 bp, Homo sapiens
ccatttgtttcactgtttctgaggaaagacattctacattgggcttgcctcctgcagtgttctaaggaaatttttcataaatcatgctttgccactgattccttacccaaacctttttggagttacctttgcttcaagggaagaacaagaatggcactttcaatatttgcagtcatttgaataaaatccactcaaatgttaaagtgacagtgcttatctttgtcaatttccacacattatttgcctcttgctctgattttattctggctacagagcctgcttcaacactctggaaatctcattgctcttgaattttaccatgttcttgctaccaagaagtaaaatgacctgataaattgatccatattataatttaatttgggtattattatttctgaaactagaatttttacattttgtaaactctcattttaagggagatcctttggcgaagagacttctacattcagagtctcatggtgagcttttagtcgctgggagttctctaagcaagacgtgtggattgaggtggagtgggagggagatttttttctagcagcctccaaatcatacctawataatgctagctagccacccttaatatatatcaattataaatgaacacaattagaatctaattttattattattacattaataaatgatactgctgacaataatggtataacaacaataatggtgacttaca

SEQ ID NO: 821774 - DNA, 468 bp, Homo sapiens; identical to SEQ ID NO: 814624

SEQ ID NO: 821775 - DNA, 434 bp, Homo sapiens
tgttgaaattaattatagctttggtcttcaccaaatcttgggtttattgttkgatacctatcaccgtaaaatatcaggttctttaacatttaatgtaatttaatcgggtgttctctaggtgctgaattctgccttttagtgagtacagaagttttattattttattatctttgtttgtaattctgttaacccttttctttcctcagaaaaaagtactaccaaatttatttatctgctgtccccacagaaaactcttcatctcctgattataaaagttgtttatcacttttatgttagtatttttcttgtgtggcagaccacattacatctcctacttcaaagatgaatgtacctgaattttgtaaaaatttaatacctacctttaggattgttgcaggattaaattagataacccatgtaaaggatttagccaa

SEQ ID NO: 821776 - DNA, 655 bp, Homo sapiens
gttttcaagatgttattacataggccatcattaaaatkgaagtatttaagtttttttaaaaagtcatctatttaaataaaactattaagaaaatatcacatgtagtatatgtaatagtacttgtgctacatggatatggaaaaaattaataaatgactgaaagtttaggacacaacctaaagcatttataatgagctccctagccctgtctcatcacagtctaaaaaccactttcttagggctgtttttaattacaagtcacatcatcaattcagtaagtaaagatcagcatttgtttgaaaaatctggaaataggccaggtgcggtggctcacgcctgtaatcccagcactttgggaggctgaggtgggcggatcagttgaggtcaggagttcaagaccagcctggccaacatggtgaaatcccatctttaccaaaaatacgaaaattaactgggcgtggtggtgcatgcctgtaatcccagctacttgggagactgaggcaggagaatcgcttgaaccctgggggtggaggttgcagtgagcctagatcgcaccaccacactccagcctgggtgacagagtgaatctccatctcaaaaaaaaaaaaaaaaaatcaggaaatagagtacgttgctggtagttgctgcgaaaagt

SEQ ID NO: 821777 - DNA, 670 bp, Homo sapiens
tgtattattttcattttgtaattttggaaattgaatcttagggaagttaaagtttatgaaggatgcttcctggcattggcttggattagaatatgggtatgtctgaatcctgatcctatttgtttaatcactatgaaacatacaattgacttaaataaggattgttttaagctatgagttcaattgatctaatatgagttttatattttagcttcttttttttatgaaggactgtgccttctctaatttgatcaaaactagtttctttaattttaaaaacgacgcagaaacttttgcttgaaagagagagttcttttgttctttgagaacaaagtgagcacacaaagtacaatatgactgtgggctggaagctattaaccttgatataataaatgcacttcagttagtatataataaacaataaactagagctgttattcatgtaactgttggctactactcagcaaaaccctgcagagaagcatgtaaactttgacttaggagacatattcctcctaggtcatactgacttgaaagacaatatgtgtacaaatgtctgattctcaagctcgattttgacatcaagggtataatgtgttaggaagcaycaaaacccataataattgactagaaaggaagcttgtttcatttgtccgtttacttgaggtta

SEQ ID NO: 821778 - DNA, 645 bp, Homo sapiens
ataacaacttgtggcaagtgcagtgaagaggaagaagtggagtcagtgatggagackgaccgaggagggactgactcagagagggtagtgaagaaagcttcctgtgagaatgtgacatttaagtggggtcctgaaggataggaagaaaaatggagcccactctctaaagagcaaggtcaggggaggggttccaggaagggttgatatttaaaaatactgaactactaataaggtggacaactggcagctgctgtgctggaacaatgtctgttgtgatcagtttcatctgtcaacttaggtaggctacaaatcctaattattcaaacactaatctaggtattgctgtgaaggtatttcgtagatgtgactcacgttcataaccagttggctttaagtaaaggagattattttagatactcttgatgtaccttattcaatcagttgaaagaccttaaaagttaagaggaagaacagcatagagaagaaattctgctgtgaattaccacttcagctgaaacctgagacatccagcctctccttactgccctacagatttcccacttgccttgccagccccagcaactgtgaaaaacaatttcttgcaacgaatcctataatatatatcttctgaagattttgtttctc

SEQ ID NO: 821779 - DNA, 587 bp, Homo sapiens
tcaattagaccttttcccttataaattacccagtcttgggcggtcttttatagcaccatgagaacagactgatacagactgtgagatcagacacttgggattacaggacagagattccaccttcccttcatatttctactgattcttgtccacacccaatttctgcttcctcaacccatttccttctgccttgcatgaaaagtggttgtttccccgtcgtgatttccatgttgttgtgaaggagtgtgccgcatatatgattgctgtgcttgtttcatgcattggaattttcaaaacatgaaggctgttcttatacaactgcagaaatactggactagttccaagaaatgtgttttgttcatcttgataagatctgtctccatacaaaatgagtgagagactctttgatgtcactcagaagaatgttgggctggggttttaagtctacctcgactaattctaaaagaagaattagctatacatgattaattaaatagaacctgctttagaaaayattaatgaggccaacagaaaagcttttgaaaggttctgtggctactttggtttaaactcaaatattaagtgtt

SEQ ID NO: 821780 - DNA, 541 bp, Homo sapiens
tgggctattttcccatttactaacacttaagtaaaagctgctttccttttaccacaccgtactttgactgctgagtggcaaacggccaaacttgakttgggtactttatttatcctggtgtggtacctctgctctttgagcaagctgttgtggacgtgatagaggctcactattctttgcctgctgccctgtggtagagcttctgccgcaggagtggtgcctggatggaagaagagagccctagacctctagctgtgtttgcctggtacagaatttctgcagcatatagctggggtgtatgagaaatactggctggctggctacccattctggggagaaaccgtagcccttggctgggagttagggtgagagagagccctgtgttcttggctgttatgtccctggagtagagcttcctcacattgtggggtagggctgggtttgtggctcaaaagccacagattcttactgttccttccaagatttagtaatatttgtcacatagatgtttctgtatttgctgtatgcggttaagacattt

SEQ ID NO: 821781 - DNA, 545 bp, Homo sapiens
tgggaggccaaggcgaatggatcacctgaggtcargaggtcgagaccagcctggccagcatggtgaaaccctgtctctacaaaaaaaaaatacaaaaaattagctgggcttggtggcaggcacctgtaaccccagctacttgggaggctgaggcaggagaatctcttgaacctgggaggcggaggttgcagtgagccgaaatcgtgtcattgcactccagcctgggcgacgagagtgaaactgtctcaaaaacaaaacaaaacaaaacaaaacaaaacaaaacaaaacaaagatctgtccatactttattgtgggtacattaattatactttttacttattccatgctaattctaatattatgttttttatttatagaatattttcaccaaccacactttggatataaatgtaaggtggcttgctgtactgtattttaaacatggaattgatcgctactggagacgtgtagcacctcagtaagttccatcacttcccctattccttgagtataatccttcccaaattcaggaaggtgtaagaata

SEQ ID NO: 821782 - DNA, 609 bp, Homo sapiens
aaaatattgtatacatgtcaaacaattaatagaaaayataagtgagaaatgaagaatactcacaatttcacacgccaagagaatgataataaatactttaaaatatgctcttctggatccttttctgacatcatatttcatggctgaatagaattccatgttaggaacacatcagaagtaagcatactgactgagaagtggtcttttggaggcaggctgtttggatcagatcttggtctttttctttactgtgtatctctgggcaaatcatttcacttctctatgctgcagtttactcaaccataaagtaaggttaataatagttcctattgcatagaattgctgcaagtattaagtgcattaatacaggtaaagtacttagaacatgccaacacatagcatgtatgatgtaataactatcgttttcattattcatatatatatataatatattcgcatattcctttttttttttttttttttgagacagactctcactccgtcgcccaggctggagtgcagtggcatgatctcggcttactgcaagctccacctcccgggttcatgccattctcctgcctaggcctcccgagtagctgggactacagg

SEQ ID NO: 821783 - DNA, 518 bp, Homo sapiens
aacaagttgaagtacctggccttcctcctcaaagggatgaacagcaacccttcccgaagcacttaccacttcctggcccccaccacttcctggcccccagctgcatcttccagcggattgcgaggcatgctgcctcacaagaccaaggaggccaggcctccctggactgcctcaaggtgtttgacggcaccccaccgccctatgacaagaaaaagcagatgatgattcctgctgccctcaaggtcatgcgtctgaagcttacaagaaagtttgtctacctggggcacctggctcatgaggttggctggaagtgccagacagttacagccaccctggaagagaagaggaaggagaaggccaagatccactaccggagaaagaaacagctcatgaggctatggaaacaggctgaaaagaaagtggagaagaaaattgacaaatacacagaggtactcmagacccacatactcctgctctgagcccaataaagactgtttatccctcaaaaaataaataac

SEQ ID NO: 821784 - DNA, 588 bp, Homo sapiens
tccattcctatcataaatcataatgttgtacaatgttttatattttaaactaccttgattttttactccctaagtcagacactttttaacacaracattatttatttgtatttatccacatgttttccagtttctctgctcacaagtttttcttgtatctcaaatcctcctttcatgtttttgaagtgcatttttttagaaatcccattggggaaggtctgccggtaataaatacttcttttgtatgtccaaatatatttttgtttaacccttacttatgaataatgtttagctgggtatataattctagttatagtctatcttcactttaccacatcattccattgtcttcaggctttagttgataccattgaaaagtctgctgtaaatctaattattgttccattttaatcactatctttattgtgataaagacctcatgacttccatcaccatccatactaccattcacctcttgttcaaaaccatgctatgtcttcctattggctaggaaataaagtccaagtttcttaggctcttttccatttgtccccaacatatgaactatcattactctgaagctacttt

SEQ ID NO: 821785 - DNA, 541 bp, Homo sapiens
ttaaaacaaagtttggaaaccaactaaaaatacattcaggccttgttacatctctttcctctcctaccatccactaatgattgctttcaatatgctgtagaaaggaaaagtacaaaaaagaatcatttggtgtttataaataaaaattaggttgtaggatacaataggctttaaatgtgaaccaactgttattctgtaagtagagaccataagattgaggccacagaaactgtgacatatgcttgggctgcttgtaagttcttgtacttacactataatttttatccttgctttgaaaattgatggtctagaaagggaacagtatgtgagaatacttaatatgggctctgtctaacatgaacagaatcagacatcatataccatgacctatcttctctggtgacctcccatgtctaatgttgtgctgttttttctaatttttttttaatagtttcctttaatgtctctttatttttttgtttttaagaaggggtacataggcgaggttggttcgtaaytgataactaggataattatctta

SEQ ID NO: 821786 - DNA, 613 bp, Homo sapiens
aaaattgctagaaccatgaattattaggtatgatgttttattttattaggttggaatgaaatacagaaacctaatcctgaaacctgggggatctctggacggcatggacatgctccacaatttcttgaaacgtgagccaaaccaaaaagcgttcctaatgagtagaggcctgcatgctccgtgaactggggatctttggtagccgtccatgtctggaggacaagtcgacatcaccatgtgttactggcctggaaactgaagggagttttgcaagtgaaaatttagatttctattgacatccttttgttttctaattttaaaaattataaagatgtaaatggaattataaatactgtgacctaagaaaagacccactagaaagtaattgtactataaaatttcataaaactggatttgatttctttttatgaaagtttcatatgaatgtaacttgattttttactattataatctagataatatgatataagagggctaagaatttttaaattgaatcatatatatgatataatttgatccttcttgtatcttgaagttttgtacttgggatttctggactgataaatgawtcatcacattcttctggtaaata

SEQ ID NO: 821787 - DNA, 613 bp, Homo sapiens
aaaattgctagaaccatgaattattaggtatgatgttttattttattaggttggaatgaaatacagaaacctaatcctgaaacctgggggatctctggacggcatggacatgctccacaatttcttgaaacgtgagccaaaccaaaaagcgttcctaatgagtagaggcctgcatgctccgtgaactggggatctttggtagccgtccatgtctggaggacaagtcgacatcaccatgtgttactggcctggaaactgaagggagttttgcaagtgaaaatttagatttctattgacatccttttgttttctaattttaaaaattataaagatgtaaatggaattataaatactgtgacctaagaaaagacccactagaaagtaattgtactataaaatttcataaaactggatttgatttctttttatgaaagtttcatatgaatgtaacttgattttttactattataatctagataatatgatataagagggctaagaatttttaaattgaatcatatatatgatataatttgatccttcttgtatcttgaagttttgtacttgggatttctggactgataaatgaaycatcacattcttctggtaaata

SEQ ID NO: 821788 - DNA, 459 bp, Homo sapiens
gtcagtgaataagattaattctcacttgtaaaataataaggacatgaaatttaaacagtcttgtggaaaaaccatttttatattctaatcatattatcaatacccttggccctggctccctatggaaagaactgaaagtcttttctgccacactgtgctcttgaaagtagtgcttactccttatttctgcatgttgtgaggattagatgagtgttttaacactcctgcacacatgagctactcggtaaatgagttctcccttcctctgtttctctgtcctttcttccttccagagaagacacctaggaacctagtttgcgagtggaaaggagaaagggtacccaaggaagggcacaggcagggctgcttggcatacatgtgctgtcatgtggaatctcaggaatgsgatcatccagtcagtgctgtccgttcgaactttctgcagtggcgaaaacattc

SEQ ID NO: 821789 - DNA, 344 bp, Homo sapiens
gttcacattccaaatgggagaaattggccaaaacaaaggggccacaggccctatgcaagtccaaaacctggccaggcagtcattaaatcttaaaactccaaaatctcctttgactccatgtctcacatccagggcgcactgatccaaggggtgggcccccatggccttgggtggctctgcctctgtggttctcaggttacaacccctgtagctkctttcacaggctgatgttgcctgcagctttttcaggtgcagggtgcaagctgtcatgtggatctaccattctggagtctggagggcagtagcccccttctcacaactccactaggcagtgccctagtggg

SEQ ID NO: 821790 - DNA, 270 bp, Homo sapiens
tatttgccaggaatcagcatttctgcatgtctagagaaagcctcagtttggtgccgatttttccttaatgtctctcaatcttattctttgccaaatgtgagctattataaaaagaattagtaagtcctctctagattaattattacttaattatgaatgactctgtctagattaattataaaaagaatattcccctcaaaacttttctacaactatagtcgctacatcaggtaatytcaggtaacaaggaagcctagacactgttatccc

SEQ ID NO: 821791 - DNA, 505 bp, Homo sapiens
tcatgagagacaataggatttatcacacacattacttagttttcagaaaggatacaggacagacagcaagttaccatgcttgtatataccagtgcaatgtttctgattactcagtcacttgggagatatgtgatcacaagagataaagctgagtgagggcacagctctcagctcaagtaagtcttcaactctaggatcccttgacttttaaacctagaataacacatagccctcttagatgtacatgatgatcagctggtcatgcagccctcctagagatctgtgactagctcctatctctggtactgctatatcccatcaatatcagttattcattactttataaataatctcatcaagggataggtgtttggtccagttgatagtccttattcaaattctcatttatcttagttctcrcataaatgttttcatgagaaaacattaaatgtaagagaattcaactaagataatgtaagagtattcaactaagattcaaattttt

SEQ ID NO: 821792 - DNA, 523 bp, Homo sapiens
agaagaggcaattgccttacaaataattaatttttaatcattaaatatttccagtaagggcatattcttgacacccttacgggaggaggtgataatacacagttttaagaaccttaactttatggtcaaattgcctgatgtaatgtttcacaaaacaaaatgtgtgggctttcagtatcagaattcacctgtagcacttataaaacttatttaaattatttcagagccctgttttacagccactgaatctatatttctggaagtgaatgtttgcactcatcatttttaccaaaatccccaggtaattctcatacacattatgtttgagaataaccaatccgagttcaaacaataagtaggttcccattttgtttggaaatattttacaattacatgtttctttagcagcaaaaaggtaagatcatttaattaaattacttaggstgatttgatgacttacataatgcagtaaacagtagctataatagcatttttatagactgttattgtagtgagatgttga

SEQ ID NO: 821793 - DNA, 554 bp, Homo sapiens
attccaaatgttcatgcaaatggatcctaggacaatggctcccttttactgtggacccttagattggcctctgagagagatctgactgccattttcccaaaacaatgccccctgtcagcatgaagcagttaagagcagtcatagcccctatccaaacagcagttagatatacctcttcagagcagggatagaaagtgacaggagacagacgaattcctaggaagacaaggacaagtgcctgatgaaacccagccttcaagccaaagacagctagaagcctgaattgtgagctgttggttctggatagagtccacatcagagtaagaacttccttgatgctttttaaccaatcaagttatggtttttccaagaccacccatggaccaataagcacacactcctccattctgggcccacaaaaaccccagactcagacacagagacaactacctctcttaggtcccactccacygacagctttccttctgtcactcaatagaattgttctttgccctactcactctttggtgtctgtgtacctcaatcctcttgat

SEQ ID NO: 821794 - DNA, 560 bp, Homo sapiens
atattgaaatgacgtgtggtatataagaaaaaaactgattgataaagaagaatttacatggaaacctcacttcaaataaaatctgaagaccttcaattgcctcaaagcccaaggtgacacatatgtccattgcctctgtgacttcatctcatatttattcttggcagaactcactcttcactggccatgcttatcttccttgctgtcactcaatatgtcagtgacaataatgcccatggtctttgcatctgctccactttatgcctagaaggctcctcatcagatacccacatacctggattctttattaccttcccagtaagactttccttgctcgttaaaatcgaaacacagtattcagtcattctcatccaactttctcacttgattttctccatagcaattatctccttctgatatattatgtaatttactttttattttagtttctgtttctgtctacaatacaaggtatstacccccaaggacaagattttgcttttatttttgttttgattttactgctcttagttctaaaaaatgactgacatattatagat

SEQ ID NO: 821795 - DNA, 636 bp, Homo sapiens
cattttttaatcattaaagggggaaagtagattgcaagaaaagagttctcagaaccaggtccttggtcactcyggaatctccagatctttcaaagtacgagaactcatgaaagaagacttaaaaagaggaaagtttctttggtacaaggaaaaccaggatattacgggagtgtgatgtcatgaagctaaaagaagaaagcatttaagaccaatgaagtggtcaactgtgatgaatcttgctgagatgttaaataaatcacttaaatcacttattttttttagtatgaaggtcacaagacaaacatatttaaagcaataatgccacaataatataatgggtaaacaatacaaaaagacataaattgtgacactaaaaccataaaatgtgtgtgaggggatggagtaaagttgttaaatatttttacgcaatcaaagttaaggtgttatcagctaaaataacttgttataactagaagatgttttatgtaagcttcatggtaaccacaaagcaaaagcctgtagtagatacccaaaagataagaagtaaggaatcaaagcataatgctagagaaaactatctaatcacaaagaaatacagaatcagaaaaaaaaggaacaaaagatctccaaaacaac

SEQ ID NO: 821796 - DNA, 581 bp, Homo sapiens
ttacctcatcagtaatattcaccacattttgctaaatatttattgattagagtgttgaaatcaaattctgctctaaatgtgtgtgaatatgttggaraggctttgtgttcttcactgtgaaatgcaattgtgccttgaataagaaggtacctagaagccaaattaaagtaataatgacttcttattggctttgatttttcattgcagtatatgggattgtacagcaggaaatgcttatcattaatttctgatgttttttaaagcacaactcgaaacatttcgatcatacatacatagcagtagagatctgtgcccttcaggtacattgaatctgaccatcagtttatatatgtcattgaattttaagaatactcatgttaataatagtcatctatccttgcattttgaaactgttctaatcttagtgaacttgaattggatttctgggtaaaagaatgtgtttcttttatgttgcttctgtccgaaggccttgtcagaatctgtcagactcttgtttaggtttagtgtgatcatggcgtcagagaagcaaagctttcaaataaatagtacttcaggaaata

SEQ ID NO: 821797 - DNA, 566 bp, Homo sapiens
ggtaaggaagagagaaaaacattttgctgtggagttgtgtgtgaatwgatagagctgctgatggaggcttcaggctttgaacacttcataccttgtctgaacaagcgaaataacaattacatactgattatataagtattccatatctagatttatcatgtccttctccacttaaattatgtaggtgcaaataacaggaaacaatgtctgccctgacggatcttttaatttcaggaaagtgactgcataataaattgaggtattaggccctaaatcccccacggtgaaaaatatttaacatttatcgacctattatgttatgctgggtgtcagctctaaccccacctcacttctgctttgtgaccttggggaagtaataaccacctcttgtgttaattacatagggataattaccagagaaaatgataaaagtatgcctatttcttcagggtctttgagtgtcaccgacactaccaatcaacattttaaatcataataaagaaaatatggcctctccatatatctaccaaactttcaaaaatagacgtcgatcacagtttcaatat

SEQ ID NO: 821798 - DNA, 607 bp, Homo sapiens
aggatccgttattttttgacttcttaataatagtcattctgactggtatgagatgctatctcattgtggttttaatttgaatttctctaatgattagtgatgttgaacattttttcatatgcttgttgactgaatgtatgtcttctttcgaaaagtgtgttcatgtcctttgcccatttttttaaatccgactgtttgtttgtttcttgtaaatttgttttaagttccttatagattctggatattagagcttggtcagaagcatagtttgcaaatattttctcccattccttaggttgtctgtttactttattgatagtttcttttgctctgcagaagctctttaattaggtaccacttatcaatatttgtttttgttacaattgcttttggcatcttcatcatgaaatctttgccagggcctatgtccagaatgatatttcctaagttatattctagattttttttttatagttttgggttttacatttaactccttagtccatctttagttgatttttgtrtatggtataataaaggagtctagtttcagtcttcttcatatggttatcctgttatccaatcatcatttattgataggtagtcc

SEQ ID NO: 821799 - DNA, 512 bp, Homo sapiens
gttccattttcagagttcaaatggtcaagaaaacctcataaaaacaaaaactccaattaaatacttgctgggaactactggccagtttttctttcttctgrtttgggtcataccacaaccctcatgcaactagctggagtaacccttgtccgtagtttaaatcactctgagctttccagagtcgcaatcaggtggcttttgggcacaacgctaggcactgcctgtttctggtagttctaaggtggatgttttggcaagtgtgatgatttgcgtccacatttcagctgagactgttgctgcaggggtctttgttcagcatgactttcagctggcatcacaccacactctcaagttacccattcatacatatttaagctctgagctaggttctagggattctaggtcagagttcctgccctcaaagagctcatgaactaggtatttttaaaaaataacttcgtaattgtgcagacatgtaatcactcatgtaatcaccagaaagccaattagaa

SEQ ID NO: 821800 - DNA, 631 bp, Homo sapiens
cctctacccacagggccgcggccttgtcctggattctcaccggggcagtcacgtcaggatgragaggtcccatgtcagccagttctttggtgggggtcatgtagtctgaaatgacctgccgatggtccaggctgagccagggaagccgagcctgggtgcctttttggtgcctactctgacttgagttggattcatgccacagacccaccttcttgagcaacaacacatatagccaccaacacaagagccagccacacactgagcagagaaagtccctgtcgcctcaccacccaaaaactccagctttgcagagaccaaggttcttctctacctttgcagaagcctctgtgaccaaacccggagcttgcccttctgaggcctctagcatttctccaggtgtttttcagaggacttggtttaaatttgttcaccccaaatgtggtctttcccggatcatgaaaggatctgccgcaaaggtgaatctgagtctcctcagagtcatatgagactgaaactgcttataacatttccgtgacctaataagtcttccaaaaatgtagggtattaagagtttagtgacattaaaaagtttagtcgaaaatatcgtgattcaggtatatttagacatttg

SEQ ID NO: 821801 - DNA, 645 bp, Homo sapiens
caaatgtctaaatatacctgaatcacgatattttcgactaaactttttaatgtcactaaactcttaataccctacatttttggaagacttattaggtcacggaaatgttataagcagtttcagtctcatatgactctgaggagactcagattcacctttgcggcagatcctttcatgatccgggaaagaccacatttggggtgaacaaatttaaaccaagtcctctgaaaaacacctggagaaatgctagaggcctcagaagggcaagctccgggtttggtcacagaggcttctgcaaaggtagagaagaaccttggtctctgcaaagctggagtttttgggtggtgaggcgacagggactttctctgctcagtgtgtggctggctcttgtgttggtggctatatgtgttgttgctcaagaaggtgggtctgtggcatgaatccaactcaagtcagagtaggcaccaaaaaggcacccaggctcggcttccctggctcagcctggaccatcggcaggtcatttcagactacatgacccccaccaaagaactggctgacatgggacctctycatcctgacgtgactgccccggtgagaatccaggacaaggccgcggccctgtgggtagaggtgaggctcccctcc

SEQ ID NO: 821802 - DNA, 488 bp, Homo sapiens
ctaaatcatatagtagacatgagtataatttaacacaatttgtcttttatatgactgatgaaattagccccgtgggtttattttcaatgccttatacatactaaagttatgcmaagtgtttctatttttgaatgatttttctttccttattttcattgttttcccctgcactgttgctgataaccttacaaataaagattgtaaaagaccaggagaaagataagcatgccaatcataagttttggttctgtacagttttcctctttgacccattgatgcttttcagctttcccactataattcttcattaatttccaggtttgtcccgcgcattgaattccatggtttttagtgtagtttcttgccttttagcctgggaacttttgggtggggagaatatggtgatgtagttcaagtcgaaatactagcatatgaatactttcagaagcccatacacttgtgtgcacattaactatgtttttagcagt

SEQ ID NO: 821803 - DNA, 488 bp, Homo sapiens
ctaaatcatatagtagacatgagtataatttaacacaatttgtcttttatatgactgatgaaattagccccgtgggtttattttcaatgccttatacatactaaagttatgcaaagtgtttctatttttgaatgatttttctttccttattttcattgttttcccctgcactgttgctgataaccttacaaataaagattgtaaaagaccaggagaaagataagcatgccaatcataagttttggttctgtacagttttcctctttgacccattgatgcttttcagctttcccactataattcttcattaatttccaggtttgtcccgcgcattgaattccatggtttttagtgtagtttcttgccttttagcctgggaacttttgggtggggagaatatggtgatgtagttcaagtcgaaatactagcatatgaatactttcagaagcccatacasttgtgtgcacattaactatgtttttagcagt

SEQ ID NO: 821804 - DNA, 637 bp, Homo sapiens
caaatgtctaaatatacctgaatcacgatattttcgactaaactttttaatgtcactaaactcttaataccctacatttttggaagacttattaggtcacggaaatgttataagcagtttcagtctcatatgactctgaggagactcagattcacctttgcggcagatcctttcatgatccgggaaagaccacatttggggtgaacaaatttaaaccaagtcctctgaaaaacacctggagaaatgctagaggcctcagaagggcaagctccgggtttggtcacagaggcttctgcaaaggtagagaagaaccttggtctctgcaaagctggagtttttgggtggtgaggcgacagggactttctctgctcagtgtgtggctggctcttgtgttggtggctatatgtgttgttgctcaagaaggtgggtctgtggcatgaatccaactcaagtcagagtaggcaccaaaaaggcacccaggctcagcttccctggctcagcctggaccatcggcaggtcatttcagactacatgacccccaccaaagaactggctgacatgggacctctycatcctgacgtgactgccccggtgagaatccaggacaaggccgcggccctgtgggtagaggtgaggc

SEQ ID NO: 821805 - DNA, 444 bp, Homo sapiens
gtgagagttacccagcagtcctcattaccaacatgaatggttaaaatmctagctacaggagagcaccacagtcctcacagtccctgagcccattagaatgagctgcctggagtccatgaggctgcactgctctaagaaggaactcatgctacgtccctcccactccctgagacccaagatgccattttgagaacagatctatgctagactgcatcatgtcctggggcctaataacccctgtatctccacatacctggggtcccactgttatcccaccatgctcacacaaagtgttgtggtgctacaaccacagctagacacagtggtatagccatgtctgccacctgagaccatgcacaccacaaggaacaggaggtctagcacagcagggaggccacccctgaggtgtggggagccaatatatgtgctcatcagggcctgaga

SEQ ID NO: 821806 - DNA, 634 bp, Homo sapiens
aaactagaaaatgcagaggaaatggacaaattcctggaaacacatgtcagaagactgaatcaggaagaaatcaaaactctgaacagaccaatatcaagttctgaaattgaatcagtaatataaaacccatcaacmaaaaagagctcttgaccagatccatttacacctgaactgtaccacacatacaaagaagatctggtaccaatactgctgaaaccattccagaaaatacagatttctcccatattcattctatgaagccagaatcactctgataccaaactctggcaaagacacaacaacaacaaaaagaaaactacaggccaatatctttgatgaacatagacacaaaaatcctcaacaaaatactagtaaactaaatccagcagcacatcaaaaagtcaattcaccacaatcaagtaggctttattcctaggatacaggtctggttccacatacacagatcaataaatgtgattcaccacatagagttaaaaacaaaaaacatgattatctcaatagatgcagaaaaagcctttgataaaatccagcatcccttcatgataaaaactctcaatgaactaggcatagaaggaacaaaactcaaaataataagagctatctaagatacacc

SEQ ID NO: 821807 - DNA, 533 bp, Homo sapiens
aaatatatattatatatagagagagagagtctttattttgtacccacatatttcctatttctggtatgttttatttcttatatatcagaatgaccatctggtgtcatttttcttcatcctaaaaatcttcttctagcattcttttctatagtgtgggtctactagaaatatttttcccagtttttattcatattaaaaatactttcatttaatcttcatttccactggatattgaattctgggctgatttttttgttgttgtttagcactttgacttctttattccaatatcttatggcctatattgttttgaattagaagacaacagattaggatgtcattattttcctataataagttgtttttcctcttgctgctgtcaagattttcttttcatatttagcttttagcactttgattatgatgtgactaagtgtgtttttgtgtgtgtgtctgtttggatgcatgtatgtttatcttacatgagggtaatgrcacttcttgcatcagtcagcaacataatgttttccact

SEQ ID NO: 821808 - DNA, 583 bp, Homo sapiens
aattatcaacatcctccatgaaggtggtacacttattacagttgataaacctacattaagaattcatcattggctggttgtgatgggtcacacctgtaatcccagcacttggggtgactgggacaggtggatcacctgaggtcaagagtttgagaccagtgtggccaacatggtgaaaccccgtctctactaaaaatacaaaaattagccaggcacagtggtgtgtgcctgtaatcccagctgcttgggaggctgaggcaggacaattgcttgaacctggaggcggaggttgcagggagtggagattgcaccactgcactccagcctgtgcgacagaatcagacccagtctcaaagaaaaaaaaaaattcattatctgctggttgcggtgtttcacgcctgtaatcccagtacttggggagcctgaggtaggcagattgcttgaggccaagagttcaagaccagcctgggaaacatggtgaaaccctatctctacaaaaaatacaaaaaatagctgggtgtggtggtgtgtgcctgtagycccagctatttgggaagctgaggcatgagaattgcttgaactc

SEQ ID NO: 821809 - DNA, 623 bp, Homo sapiens
gtgcagttggtttgcaattytattataaatactgcatgtgtatctgggtggtttgcaattttaaatcacgagcttgaaccaagatctgaaggatgtgaaagaaaaccaggtgtatgctgggggtggaggatgatggaggaagattctatgtacaatgaacagcatgtacaaaagccttgagatttaggaagaactattcagagtaaagaaagctgaactgaggtaaagaagtgacaggaagaaacaaagatggtgaaggaaccagaagtaattcatgaggaagtaggacaagtggaatgtgacgttttaagaaagaagtggggaggttaatagctcaaatgcttcaataaatataagatgaggaatgagaaaaagatattggatttgaaatacagatcactcatgactttcaaagacaaacttcctaagttgctaaaggcttacacagagaattacagaacaagtcatttgtgaagaaaggtgaatagtacatttggaacacttttccaaagacagtaacaataaaaaagaaaaagagagaacacaatgacttgatgggttgccaaattgcaggactactttttagaaagaggtttcacttgctagtatagatggtgatgaga

SEQ ID NO: 821810 - DNA, 637 bp, Homo sapiens
ggttttcaagccaaagtaactcattttgggattcttaagagacttctggaggaaaacagattactagaaaattttaagagaaaaatttaagctgcctaagtcttcttttttttttttttttttttttttgagatggagtttcactcttgtcgcctgagctggagtgcaatggcgccatctcggatcactgcaacctccgcctcctgggttcaagcgattctcctgcctcagcctcccaagtagctgggattactggtgtgtgccaccatgtttggctaattttttgtatttttagtagaaacagggtttcaccatgatagccaggctggtctcaaactcctgacctcaggtgatctgcccacctcatcctcccaaagtgctgggattacaagcatgagccatcatgccccactgttaagctgcctaagtcttaatgagagtcatcatttaaaaaaatctgttaacactttatcattgttttagtcttccacctgtccatgcaaatatccctacagagctcaagtaaagattccaaatatagatgttagagaatgaggttgtcaggagcccctgagttaaaagataragggctattgtgggttgaataatggatccccacaaaagatatgatgaggtc

SEQ ID NO: 821811 - DNA, 594 bp, Homo sapiens
gccaccaggactgaagtttctttctcctcttaccttgaacaagagaagcagaagggccactgtttacagggagttgatgagaccaccttccttagaaggyccttacttctctggttgatgaatgtcatactgattgcacccaagactgagttcttggtacacgtggctgggcaaattcttggaacaggtgtctgggctcatttccctgagtggcatggagagccttcttccatgatcaggcctgcaacttccctcctactcacttatgggcatcacgctccccctctggagcccgttcctgctatttctcctgcctgaaatgctctgtgcccctttccttccatctctgcctaaatgctgccttatcagagaagcccacacgccatgtaaagagcagtacccgctcccttgtcctgttgcctatgtcccctaccctgccctggtttgctgtgtgggacttatcacctatcctattagatatctgtttatttatttatcatctctgccctaggtggaatgttaggtccacagagacaggatctctgtactcctcactgtcgtactccgggcacctgagtgtatggcaggcacttg

SEQ ID NO: 821812 - DNA, 519 bp, Homo sapiens
gcaagcacatgctttataaatcagctgagctatggcaatcaatgctgctctaraaactgggggcccaataggcatgcaaatggacagacacctgtaggagttcacaaaaccctctcagttaaacacaagcagggcttcaacacacatgtggccatccctgctcaacacccaagccacatgtgtggctctcgtagtattgtcactcctaccaggcagaggcatactttccaaaggactggtaaccaagaagcaatggaggaatggattcggtgttgtgaccagcaggatccccctgctgaattctcccctaagcctccgaaagctccccactgcttcagtggtttcacatctccctgccctttctttcctaggtttcaaggataactggaaacccacactggtcattgagcattcatagcatggcagtccagcactctctaacagaccctggggcagcagatttagtgtttccaggaagaatttcaggaaactcagtcattcactcattcaacaaatgtt

SEQ ID NO: 821813 - DNA, 556 bp, Homo sapiens
atgtattacgtatatatttacatattgtgcattttgatgtgattcacaggttgtacatytaactttagaagaagtaaagctcttattaaatatcccatgcttgaaaatgttagaataatttgcagaaaatatttcagagcttctctaaatggctcagaggcatttacaacttaagaaaaactacagcttgctgaaaagcatgaattgcttactgtctttttttaatgagaatttaagaaggcttattaaaaaagaaataaattttccatttcagctcatttggcttcatctgctattaaatcctacatatacccaagagttgcactgatgtacttaaatattgtttctgcattgagattgcctaatgaggcaattagtggaactcctcagatagctggaccaaacgcttttcagcagacagaagaggtccactaaagcaacaatgcaaagtgcttacattccctgcccacttctatttgaccatgtgtcttagacaaggcgagtggtgattttggaaggtggacaaaaccatgcacttcgcctagatgaaagagga

SEQ ID NO: 821814 - DNA, 469 bp, Homo sapiens
tgtaattggagccactgggcttcttaattctggatgtctatttccttccccaaatttgaagagcttttggccatttttttwaaaataagccttctttcctttccttttttctctctgttcttcttctgggactccattttgtgtaaattggtgagctaaatggtgtttcattaagtcccttaggctgtcttcactctttttgttttttgagacagggtctcactctgttgctcaggctggagtgtactggcatgatcatggctcactgtagcctcaactttctgggctcaagcaattctcctgcttcagccttctgcatagctgggactacaggcatgtgccaccacacctggctatttttttatttttttttttgtagagacagggtctcactgggttgcccagcatgatcttaaactcatggcctcaagtaatcctcctgccttggccttctaaagtgctgggccta

SEQ ID NO: 821815 - DNA, 483 bp, Homo sapiens
ttccattatatgaatatatcatagtttattcaccagttgaagaacackgggttgtttccagtttgggatgattattaataaagctcctgtgaacacttctatgcagtgtgaatgttttcatttatctttggtaactatctgggagtggaattgctgggttgtatggtaagtgaatgtttataagaatctgccaaactgttttccaaatgggctgtaccattgtgcattcccatgagcaacgtataagaagagttctaattgttccatatcctcgtgagcacttggtattgtcagtttattttttaaattgttggcatagacgtttagtgatatcccactgtggttttaatttgcattttcctagtgaccagagatgttgaacatcttttcatgtacttatttaacatctgtatatctttcttggtgttgtatctttcgaattattgctctctctctctctttctctgtgtgtgtgtgttaaga

SEQ ID NO: 821816 - DNA, 492 bp, Homo sapiens
cagtaggctgaggcaggagaattgctcgaacccaggaggmggaggttgcactgggtcgagattgcatcactgcactccagcctgggtgacagagcaagactccctctcaaaaaaagggaaaaaaaagaataagcatttccattataagaatttctgtaataattttttatctcccaattttcttcctacatcttcaactcttccttcaagagcaactcttttccgtatctacctcactaatgttagcatttttcatggttttatcctccaccctcttctacatactctccctataagagcacctctacactcacatctgaaagatcatctgtagactttttacttccaacccacagtctccatgttagagatctaggtctatagtgagcataatccatccagtagcagcctggtaggtatctcttctgatgttccataggctactgaaactcagggaactgataatctccctttcccctctaaaaacaaacc

SEQ ID NO: 821817 - DNA, 571 bp, Homo sapiens
accagagaaccagaacagaaggtaacaaaacaggcctgactatgtgagaactgagaatgtgacaagggaaccacctaagcccacaggactgtgctccagaggcacgcaccctttatcacactcaagagggcggacatgctttaccaccggagaacggggaaaacaaccgtattatttcaacaaataatttcaaaacaaaaaacaaagagggattgaaagagacttaaaagaaccataaaccaaaggcaatgtgtagatctgaactctgattctttatttttttttatttgaactctgattctaacaaaccaactggaagaaaaattctaagacaatcaggataatttaattcctgactagatatgtgatgatgataaggaactaatgtcaattttaagatgtaataatggtattgtagttttgtttttttaaaatgcattgtatagcaaggaagggtctacatatktaacaattctccaatttctcactgaaagtatttaaataaagaattgggcctgtcacagtggctcatgcctataatcccaacattttgggaggccaagacaggcag

SEQ ID NO: 821818 - DNA, 515 bp, Homo sapiens
tgaggatttgtgcatcgatgttcatcagggatattggtctaaaattcycttttttttattgtgtctctgccaggctttggtatcaggatgaggatgccctcataaaatgaggcatttattgattggaaaggtttccaaaagaatggtaccagctcctccttgtacctctggtagaattcggctgtgaatctgtctggtcctggactttttttcgctggtaagctattaattattgcctcaatttcagagcctgttattggtctattcagggattcatcttcctcctggtttagtcttgggagggtgtatgtgtccaggaatttatccatttcttctagattttctagtttatttgtgtagaggtgtttatagtattctctgatggtactttgtatttctgtgggatcggtggtgatatcccctttatcattttttattgcatctatttgattcttctctcttttcttctttattcgtcttgctagcagtctatcaattttgttgatcttttcaaa

SEQ ID NO: 821819 - DNA, 616 bp, Homo sapiens
gaggctgggtacattcctatcagccttcctcgggcacccctcctggctgccccctctgctccccagggctggtgggctctgcaacctgaaaaacccacctcttctcagggccacctacaactgtgagttagggaaagtgctggcaacagaagcaacctcatggtctcagggctcatctcccatctcataacccccttcatggggccacagacaccccgggcctgagcttcagcaccttccccattacctgtccccaggaggacatgcacctaagatcaaggcaaatgcaggccccggggcacttctctctcccagggagaaaacacactgagccacagtcacccatcggaatctatactaagtgtcataggtattctcagctaaggggcagtattaataatggaaagcagacagaggaaccgtaacagagccaaatggaagcaagaagggtgggaaacataaaatgcggaaacacagataatgataaacgagacctgcacactgaggcttgcggcaggagcgtcccaggctgggggcctgtgycacgggtaagaggggaagtcaggtgcagaggacccccgggacgccaggtccccattagaagcaacggcccaga

SEQ ID NO: 821820 - DNA, 569 bp, Homo sapiens
accttgaaaactttatgctaagtaagccagacacaaaaggacaaatatggtatggttccaattatatgaggtacctagaatagacaaatttatacagaggaacagaggtcactaggggctgggaggagggagatattgtttaatgaatacagaatttctgtttggaataatttttttaagttctgggaatagtggtaatgaacattgtgaatgtacttaatgtcactgaattatacacttaaatggtaattttgtgttaagaatatcttatcacaataaaaaaatctgaataggcctatatctattaaaaaataaaatttgcaagtaaaaacctttcctgaaagaaaactccagctctacatgactttcctagtgaattctaccatacattttagggaataaataataccagctccacacaaactctttcaggaaatcaaagaggacrgaataccaactcattctatggagccaggattaccctgttaccaaaatcagaaaaagacaagcaaatacctgtcatgagcatagatgcaaaatttcttaatgaaacttaacaagctgaatct

SEQ ID NO: 821821 - DNA, 593 bp, Homo sapiens
taaattcaaaatggttaaaaggttccaatctttgtcctaaagcacatattgaaaggtgcattcagagctgagatgcaatagattaaaaactgcctgtgtgagtttcctgtggctgctgtaacaaattaccaaaaacctggtgcttacaacaaggcacatttgttctcttacagttttggaggtcagaagtcccaaatcagtttcagcaggatggaatcagggtgccatgagggccgctccctccagaggctccaggggggtctgtttccttgccttttccagcttctagagctgcattccttggctcgtggccccttcctccgccttcaaaggcagtggcttagcgtcttcaaaattctctccacgctgtcttctcatggccttctcttctatgtcagatttccctctatcctctcttatcaggacatttgtgattgcatttgggacccacccatgtaatccaggataatgtctccttctcaagatcctcaactcaatcacatctgcaaagtcccttttgccacataagatacatttgcaggcttcatagattsagatctgcgtatattatttgagggccattatttaaccta

SEQ ID NO: 821822 - DNA, 577 bp, Homo sapiens
aagatacatttgcaggcttcatagattcagatctgcgtatattatttgagggccattatttaacctactacactgatgcacccctatattgtgacaagcaaaaaaattgaggatttattcttccagtgcttaaaaactgtggcctgattgattcagcaaggaagtcacttgtgacattgatgaataagtgaacttctgatattcgccttcattgtctcacttttacttgttaacataaatgaaaatatcagcctcatgagaatgaaacgaaatgaaaatagccaaccctcatgtgtaaagcacacttagtcatcatatgcaaacagacataggctgtagatacaagagtttggaaaaactcaacaaaggcattctgtgaggatcaaccaactatatgcagcttataataaaggatattgtatcattatgttttgttgtacattctttatatcagtaacatttataataaattatctcttcatttatatgtgtatgtacaccmcacacacacacacacacacacacacacacacacacacacacacacacaatctttccctccagagggccagctgtt

SEQ ID NO: 821823 - DNA, 594 bp, Homo sapiens
tatggaagtgacacagtctaatgctggcctcagagccagcagggagctcaggctgggccacttgtccacctgggggtygaacagcctgccccaggtttgctgaggtccccaggaccaggccaggtcaagctgggatcacacatgttccctctccagcctagagatgtcaaacaggtagattcctctcccattcatatctcctatccttggcccacagcccttcccttcttggacttatcagagaccaaggtgctgggcagggcttcaggtggttaaaaagtgaaagttcttgagtgaagtccaaaggcgcacacctgagagctgagtgggcaaaaggtcgctggctgagtgctggggatagtctggctttggagtcagatggacgagtccaaatctcagctccttaccccgtaacatgaagccctcagctctctgaacctctgtttatttgcaaaaccttgccaagggcttcaaacaggatatcctcataaaacaagtatgcctatttgggggactaagtgtgtgaagtgctgagttttaggagtgcagtaaatatcggatccctccttcttcacctcaggtttgcgagttaac

SEQ ID NO: 821824 - DNA, 592 bp, Homo sapiens
ggccaacagggctaatgcagcacatgattttggcatcctgaaccacttcccctcagtgcccctctggtttcagcagcagcagggacaggtcccaggcagcccagactcatgcagacaatgcatcgcttgcagcacaagcagctctctccctttcccagcctcagggcctgccctgaaggagagtccattcagcctgccagcccatgtggcagggagcatatggattaaagtcccggtttccagcatggaatagacaattctgaggggcactttgtacagttctcagaggtcccagtggaccctgctcctgctgcctcaatagctctccttcatgttgccttttcctccatccccatctcccacttgcccaactccttgattcctgtttcctctgggatcacttctccaagacatttcctgcacttaagttttttcttaggctttagtttcagggcaacccaatctagacacctgcagaagctcatttccatcaagcactcgataaggccaccccsattcctttagagacttaggttgcgctccatgatgcactgcaaagcacagcctctgcacgctgcggccctctgagtag

SEQ ID NO: 821825 - DNA, 649 bp, Homo sapiens
ttgtaaaagccgaccagaggaaggcagtgcacgaagtggaaagagactggatcttggcaccagagctcggttcagattctggcctcttattgttgggtgatgccctctctgagcctgagcttcctcacctgtctaattggtgtgatagtaacaactcccaggtgctgatgaggagtacacaagatcatgtattcaaagtgcctggcacaagccgggcgcagtggcgtgcacctcagctactcagaaagctgcggtgacatcatttgcacccaggagttctgggctgtagtgcacccggagtgcccattgggggcccatacaatgttcagcatcaatacagtaacctcctggaagcaggggatcgccaggttgcctcagggaggggtgaaccagccaaggttgaaaatagaacaggtcaaaactcccttgcagatcagtcatgggatcgtgcctgtgaatagccactgcactccagcctgggcaacttagcgcgacctcgtctctaaaaatgtatttattttttaaagtgcctgtcacayaatgagcactgaaacattttgtttcctcatccctttcttctcacagtgggagaagcaacatgaagatgaggagggggtgaggctgaggcccaaatcaggctgtcacgctg

SEQ ID NO: 821826 - DNA, 649 bp, Homo sapiens
ttgtaaaagccgaccagaggaaggcagtgcacgaagtggaaagagactggatcttggcaccagagctcggttcagattctggcctcttattgttgggtgatgccctctctgagcctgagcttcctcacctgtctaattggtgtgatagtaacaactcccaggtgctgatgaggagtacacaagatcatgtattcaaagtgcctggcacaagccgggcgcagtggcgtgcacctcagctactcagaaagctgcggtgacatcatttgcacccaggagttctgggctgtagtgcacccggagtgcccattgggggcccatacaatgttcagcatcaatacagtaacctcctggaagcaggggatcgccaggttgcctcagggaggggtgaaccagccaaggttgaaaatagaacaggtcaaaactcccttgcagatcagtcatgggatcgtgcctgtgaatagccactgcactccagcctgggcaacttagcgcgacctcgtctctaaaaatgtatttattttttaaagtgcctgtcacacaatgagcactraaacattttgtttcctcatccctttcttctcacagtgggagaagcaacatgaagatgaggagggggtgaggctgaggcccaaatcaggctgtcacgctg

SEQ ID NO: 821827 - DNA, 500 bp, Homo sapiens
gcccattgcttctattttctacccattttctatccagtcctatgacaattgagatagtcaatatgctaattgtgttcagcttcatgtccttattttggctttttctgatggcatgcagatctgctrctatactgcttctttaatacctccatgacagttcaaaaaaggcacttcaaactcaagaagcacattttcaaaaccaaattttgattcaattctttctatacaaggtacctaaagtgttcttctccaagactttccagttgcagtaaatggctcaccattttcccagttcaccaaaacatcagctacaatagcagattatttcttgaatttttattatccctcacatttaccctacacccaagccatcaaaatatcttcttggttcaccctccaaaatgtatcctgtatctgtctgttgccttccagcttcaatgacaaagcctatttcaagccaccatgatttttcatgtggatccccgattgcttcctaagaa

SEQ ID NO: 821828 - DNA, 529 bp, Homo sapiens
tttatctaggcattgtcagttgggcaatccaacatgatgctttgactttttaaaggctgattcaaagctgtagagwataggaaattctgtaccaaggtgccaggtgcatcaaatgttcagaccggaagtagaatatagcatccaactgagcacttgggattgtagcaagaggtcactttgtttctggtacatggcctcccttcattcctgcccattgtataagctggtcatctagccattccagtgatgctaggcattgtccaacatcctatgaatccattgtcttactagctgcctagtgctagtttatattatttgaagtgaataaccctgaataatgcacattattcataagaacccccataatctgaatctcatacactcctttgactacatcttttcccagctccccagtgtgcactaagtttcagccaaggggtctaagtaatctttcttgaaaatgccattgctgtttctgtcatgctatattacatttactatttcaatttttttttttttatttaacagt

SEQ ID NO: 821829 - DNA, 529 bp, Homo sapiens
tttatctaggcattgtcagttgggcaatccaacatgatgctttgactttttaaaggctgattcaaagctgtagagtataggaaattctgtaccaaggtgccaggtgcatcaaatgttcagaccggaagtagaatatagcatccaactgagcacttgggattgtagcaagaggtcactttgtttctggtacatggcctcccttcattcctgcccattgtataagctggtcatctagccattccagtgatgctaggcattgtccaacatcctatgaatccattgtcttactagctgcctagtgctagtttatattatttgaagtgaataaccctgaataatgcacattattcataagaacccccataatctgaatctcatacactcctttgactacatcttttcccarctccccagtgtgcactaagtttcagccaaggggtctaagtaatctttcttgaaaatgccattgctgtttctgtcatgctatattacatttactatttcaatttttttttttttatttaacagt

SEQ ID NO: 821830 - DNA, 541 bp, Homo sapiens
tggcgtttgaacaataactgggctcctttctctttcaaccagcaaaacatattgtaacactactgcattgaatgagtgtgatggattagagggaaattcttgaatgccatctcatttacatttttattaattgattcccctgcaacctttggtacttatgaaaagtaacaaatttctaatagcagccacatacccaacaccaaatacactggtccattaaacaggacttaggtgaaatggggtttgagcagtaatgttcggaccctattctaggtgtatcaggtttatttattttcttgtttgtaggatgctcactcttggcctatgtacgcaggctgccaagtaccagagatgatgcagaattcagattcccaaggaggggtaatggacggaaatgaaccctttcctgcttacacagtaaatattcacaaagaagtaaaagctaacctgagraaaaaaaaaaaaaaaaaaaaaacaggagaaaggggaaggggggaaaggcattttttattttcatagtgggaagaaatgtactctggga

SEQ ID NO: 821831 - DNA, 525 bp, Homo sapiens
atttctgagttgccaattccttgcctccactgtgagacaaaccccagccacatctccagcacacaagaactccaaatgcctgaaccgcagctgccagaggttcccccagaacctcctcccccagcttgctacaagtgccagaaatctggccactgggccaaggaatgcccacagcccaggattcctcctaagccgtgtcccatctctgcaggaccccactgaaaatcggactgtcaactcacctggcagccactcccagagcccctggaactctggcccaaggctctctgactccttcccagatcttcttggcttagcggctgaagactgacgctgcccgatcacctcagaagccccctggaccatcatggatgctgagctttggataactcttacagtgaarggtaagtccatccccttcttaatcaatacggaggctacccactccacattgccttcttttcaagggcctgtttcccttgcctccataactgttgtgggtattgatggccaggcttctaaacc

SEQ ID NO: 821832 - DNA, 525 bp, Homo sapiens
atttctgagttgccaattccttgcctccactgtgagacaaaccccagccacatctccagcacacaagaactccaaatgcctgaaccgcagctgccagaggttcccccagaacctcctcccccagcttgctacaagtgccagaaatctggccactgggccaaggaatgcccacagcccaggattcctcctaagccgtgtcccatctctgcaggaccccactgaaaatcggactgtcaactcacctggcagccactcccagagcccctggaactctggcccaaggctctctgactccttcccagatcttcttggcttagcggctgaagactgacgctgcccgatcacctcagaagccccctggaccatcatggatgctgagctttggataactcttacagtgaaaggtaagtccatccccttcttaatcaatayggaggctacccactccacattgccttcttttcaagggcctgtttcccttgcctccataactgttgtgggtattgatggccaggcttctaaacc

SEQ ID NO: 821833 - DNA, 525 bp, Homo sapiens
atttctgagttgccaattccttgcctccactgtgagacaaaccccagccacatctccagcacacaagaactccaaatgcctgaaccgcagctgccagaggttcccccagaacctcctcccccagcttgctacaagtgccagaaatctggccactgggccaaggaatgcccacagcccaggattcctcctaagccgtgtcccatctctgcaggaccccactgaaaatcggactgtcaactcacctggcagccactcccagagcccctggaactctggcccaaggctctctgactccttcccagatcttcttggcttagcggctgaagactgacgctgcccgatcacctcagaagccccctggaccatcatggatgctgagctttggataactcttacagtgaaaggtaagtccatccccttcttaatcaatacggaggctacccactccacattgccttctttkcaagggcctgtttcccttgcctccataactgttgtgggtattgatggccaggcttctaaacc

SEQ ID NO: 821834 - DNA, 330 bp, Homo sapiens
aagctagggacaaaaataatcaccacagcagtgggatttcaaggagagagcaarcattcctgactggtttggggatcacagtggtgcttatggcagtcagctactacaaagaagtacaattccaatggaaaattattttcctgtaaaacatttaaaaagaagtaaaagattataaaactactatgtctacaatgcatccagactctgtgatttatatatgtcaattatcagagtgcctgcaggaacatcaatattgcaagctaggaagcaatgtaagtaatgtgaccaccaatctgtcttgcataaaatcctcagtatcttttttaaaag

SEQ ID NO: 821835 - DNA, 575 bp, Homo sapiens
ctttaaatattataccaaaacacaatccaggatgtgaaaatctggagtcatttttaagaagataaagtatatgacactacatcaaaacaatatgccaatatgtgaaaatctagagtcatttttaagaagataaagtatgtgacactagatccaaacaatatgcgatcctactcacattcctgcctctgacagtagcctcaagaaacctcagaagtcaggctcccataacggcagtttaaatagtgtgcatgataaaatcttaagctcaataacatattagataatcattcattcagcaaacaataatccatcatctattctgctagtaaaagttctatattaaatgctattgagttgaacggatcaatgaggaagaaaggaggacataaaaatgaagaaacatattttctttgcagactttattgttttggtggagtataagrcagatgtttaaatcaaccaaaccatgctcatttaaataaaaataataataattaaaaattcataaataaggagataaattgtttatggtatgtatctataagacaatggtatatgatatagttcaaatcaaa

SEQ ID NO: 821836 - DNA, 603 bp, Homo sapiens
gctggttgattcttgggatctctcraatctttgtgctagttgaatctgctttctttgttcttagcaacccctaagtgtccagattatgcttgtcctaccgagagctttgagacaagtgagacagaatccagttaccagagtagcccacataaaagttgaataactggatgctctgtccaaaccttttctctccaggaaaaatctgagatcttggattttttgcctgttccttctgtgctaaattgggggatggggctgtggcaactagttgcatgctcaatcaaaccactgtcttgttctcactggcccattgatgtctaaagtattctggttctcatcagccctctgaaacaggcaaaacagaagccattttttggggtatccctcagaaaagctgtggcattggatgcatggtccaactctttccctctacagggagaagctaggagctgagggtttccttccaatcatatggcatgggcaggaataggaattcttgcaagagggtgtcttgatctccctaacagtttctatgtatctaatttcgcattcacacaaggtacagaagacttttaaccagtttctaaattctcagaggagaaa

SEQ ID NO: 821837 - DNA, 603 bp, Homo sapiens
gctggttgattcttgggatctctcaaatctttgygctagttgaatctgctttctttgttcttagcaacccctaagtgtccagattatgcttgtcctaccgagagctttgagacaagtgagacagaatccagttaccagagtagcccacataaaagttgaataactggatgctctgtccaaaccttttctctccaggaaaaatctgagatcttggattttttgcctgttccttctgtgctaaattgggggatggggctgtggcaactagttgcatgctcaatcaaaccactgtcttgttctcactggcccattgatgtctaaagtattctggttctcatcagccctctgaaacaggcaaaacagaagccattttttggggtatccctcagaaaagctgtggcattggatgcatggtccaactctttccctctacagggagaagctaggagctgagggtttccttccaatcatatggcatgggcaggaataggaattcttgcaagagggtgtcttgatctccctaacagtttctatgtatctaatttcgcattcacacaaggtacagaagacttttaaccagtttctaaattctcagaggagaaa

SEQ ID NO: 821838 - DNA, 570 bp, Homo sapiens
gtacacatttgatgccaatgattttcatagcatgatatgctacttactggtataaaatactaatgtgtgtgcatatgtatgaatttaaaartgttattccaggctgggcagggggtcccatgcctgtaatcccagcactttgggagcctgaggccggcagatcccctgagtcaggagtttgagacaatcctggccaacatagtgaaaccctgtctctactaaaaatatgaaaattagctgggcatggtggagggcgcctgtagttccagctacttgagaggctgaggcaggagaatcacttgaagctgagaggtggaggtagcagtaagccaaaattgggctactgcactcccgcctgggtgactgagtgagactctgtctcaaaaataaaaaaaaaataaaaatttaatccataccaactttaaagcaaattttcccttctatacagttctattagacatgatgcaagcccttgaaagtgcttgttaactaaaattatttatctaattcttcagtgcttgttaactaaaattatttatctaattattcagtgatcttgatattggagat

SEQ ID NO: 821839 - DNA, 602 bp, Homo sapiens
tgtgctgattggtccatgggcagccatgggcaggcctggaaaaagcaccatctcgtcacagaaggcatcaaggaagttctcactccaggttgtggactccactgggaactggaagcccagtgcccaggcttcaggctgtccctggcttgaaggtgggatttcacaggggaacagccccctcccgcctaggaacctgtctgcctcccactgccatcaacatgccatccacagagtccaggatgtctgcaccgaggggcacccacaaacccatactaagccaccctcagccccctgggctccctcccatgaccgtcagcacccaatgttttagcctcagaagcagtttccagaggaggccaagccagcaggagactggtatgtcagcaccaccctaagtgcacacatgcccagctgggtagcaagagtgcctgggctcagctatcgggacatgtccacaactttgttctgctgcagagtagcactgggagcagggagaggccagggagtgggagcaggcacttccaagcctgtgggtgcaggggtcttcctaggcccccragagtacagggatgactggatccagagctgtgactgggtggctg

SEQ ID NO: 821840 - DNA, 478 bp, Homo sapiens
gtacactggtgaacacacaataattctgtctttctagtcatatatattcattgtaggactgtaaataaaacatcctgttctccttagccaaggagtagttgtatgtcccagactagtgaattcatacctgaaacacaaaaaacggaaaaatcattttaagttaatttattctattggtggtatcatgatgaatattctctgatacctggacccctatttcttccctggaagctacatttttttttctgattctggttctgtagccttcctatcagtcctatgatcccactgatacctttcccaaaaattgtttattctgtccaaactagtgagacacaagttttattstttacagccaacgaaggtaactgatacgattatcaacacttaaaacaagttttacaattttgaatagaggtacaagtctaagaaaaaaaacactaacacagaaaattaaaaattcaaataaaaataaaat

SEQ ID NO: 821841 - DNA, 581 bp, Homo sapiens
aattagacactaaacaccttcatagatttcaattattctcttctaatgagggcgaagtggatctttgcttttgacctggaaaatgactaggtgtactaatagctcaaaattaccagagccttgrcatcttcctttccttacacaccaagttgacatctgctagctttcatatttcttaaaatggtaatctgtctcttggaaatttatccagaaaaaaagttaataatgacctaagactttattaataagcatgaagtacgacagaattctcaataacatattttgtagcgtagagatggagagaaggcttcccttctaccttctttgaagatcccctaaaatgaatgacaatatacaaattaacaggaaaaaaaacataacaaatgtattagcatgaatatgaacatggaagtcactcaaatatgagactccaaacaggccagatggttggggcttaaatatcttcttcaaggaagagggaaatgggagcagcagtggagggcgtgttgtaggcaattgttagagggctagtaaataatttttagagggaatgaatggatccagaagaccaaccaatgctt

SEQ ID NO: 821842 - DNA, 631 bp, Homo sapiens
ctcatatcaatgcgtaggatctctttgattttatgaatgagtttcatggtgggtgtatgtgtgtgttcctttaaaaagaagaaacttataacctcagaaatttaaacaaaaacacacccactgaaagcacgtcgacagcatggcagatgcttaacactagagtattgaaatggggaaagtaatagttgcaagtccaaattatcaatgttccagcttatgacacatttgatcaaaaagctaaataaaatattatttcttccatgagtaaggctgctctatttatcaaataaaaactcagatatggaataattttttagtataaggatagcccaggtaattcctaatttacctgacatttaaatttaacttcaaccctgtgtttcatcaggcaacccgatttaggagagcatcaaaccccatatctcagcacttataaaagtatttgtgaaaaataaacacatatacatgcaaatcactcttccacttcttaacaaactttcctgcttgagggaattgctaagtccagaagacaggccactggaagagctataaccagscacgatgcaatttccacctagaaatcctggaggcttgcaccttcagacaatctgtgagagaaaatacattggat

SEQ ID NO: 821843 - DNA, 551 bp, Homo sapiens
atcccctgtcaacatgcagtcartcagaggtgacgcctccaactactgtcagctgttaatttagtggacatgcccactctccaggccaactgcaggactgagaggtcacccaacccatgggacaaaacagctggcagcagacaccaggtagtcatgtaggaagcaggcagccaaatatgcagcaccggcatatctttcaggctggtggcccccaatccaggcccagatgatgctgaagtgcaggtgtgagcactttgaaggttgctggctggtcacagggccccctagcccaagggttgacaattcagcacagaggcagaggctctgaaaagagtgaggagtgctagccttggaggatctggggtccaggcaaatggccaagagtaggaagcaagtcagaaagcagctcaggcacaagggaggggatggctggtgtccatgctgagctcagggtgttggcctggagctccttacagactgtccacctgaggcctctggtcaagactggatctcaatacctaacacgtggctgagccatggtgagagagctg

SEQ ID NO: 821844 - DNA, 651 bp, Homo sapiens
acctcagttgaaccgctaggtgacctccacacctcctttccaattcattctccacattgccatggcacctgtttctctaaattggtcagatcatgttattttcctgcttaatatttgctgttggctcmttgtaactgctagataatccaccctctttccagaaccttgaagccctcggaggtctggcccctttactcacactgcccccatatctgggccccagtcacaccatacaaagctagtcatcactgcttaacaggctgtgtgcattgctgttttctttgcttgaaatgctctccagctttctccttctgccagatgagctccttttctacagaagaccaactctctgaccctctgggaagtttgccacaccttgccagtggtctctgcatagtacttactaactctttgatttacagtgaccttatgggtctgtcctttgcttctggactttttctttaaattcccattgttcagctacagtgctcaagaggtaggagctcccatttgttgagcactgactgtgtgccaggcattgtgagagacttggttctcactggattaaaaagtccttgcgggcaggaaccacagtttaccctaggctaagcattcggtcgagtgagagctctttaaataaaacacattggt

SEQ ID NO: 821845 - DNA, 651 bp, Homo sapiens
acctcagttgaaccgctaggtgacctccacacctcctttccaattcattctccacattgccatggcacctgtttctctaaattggtcagatcatgttattttcctgcttaatatttgctgttggctcattgtaactgctagataatccaccctctttccagaaccttgaagccctcggaggtctggcccctttactcacactgcccccatatctgggccccagtcacaccatacaaagctagtcatcactgcttaacaggctgtgtgcattgctgttttctttgcttgaaatgctctccagctttctccttctgccagatgagctccttttctacagaagaccaactctctgaccctctgggaagtttgccacaccttgccagtggtctctgcatagtacttactaactctttgatttacagtgaccttatgggtctgtcctttgcttctggactttttctttaaattcccattgttcagctacagtgctcaagaggtaggagctcccatttgttgagcactgactgtgtgccaggcattgtgagagacttggttcycactggattaaaaagtccttgcgggcaggaaccacagtttaccctaggctaagcattcggtcgagtgagagctctttaaataaaacacattggt

SEQ ID NO: 821846 - DNA, 493 bp, Homo sapiens
ttgcagtccaatattataatttttagtctaattttctctattttaatatttgtaacatcttgttttgaaagcmatgtacttagatgtcattatctttaacacatttccttattcgatcaatttcctggtgaattttccttctctattgccaccaatttccataagtgccattatcatcctgtataggctatgacccacccataccaggccaccactcatttggattctctcctcagtctgcttggggtgtgacacctattttggaccatttccttgcttgctctgactaagctaagaagttccctgagttgactcaatcatcatcctgttttagctctaactccatgttctcagctgtcatattcctcttcctcacttctggcacagatgcctgtctttatctgcctcgtccaatgtctttaggactgaaatattcgacaagagaagatgaataaataaaagagaatggaaagaggacaaagaaaaaaaaata

SEQ ID NO: 821847 - DNA, 463 bp, Homo sapiens
accccattctgtttaggactttgagttttctatttccataattacgttggaagtttgaggcttcaraaacaaaagttgttttcaaccattcctctggaaaatttactggaatgcctatcaacaaaaataatataaaaatttatttagagaggtactgtattatctagtgattgctcaaattcaaaactacattttatcatttgatgcatgaaaattgattaaagagtttctttgttatgaggttataattccttctgataaaatctaccaaaatatacaagcattgatcaataaaaggaaattgattaaaacaagtctttgcattatgcaaatacttccatcttcagaactatattttctgagtattgcatgagaatttgagacaaataggataaattatgtccttgggaaaaataaataaactataactttttgtttcttgggttgagcaattatcgaatat

SEQ ID NO: 821848 - DNA, 655 bp, Homo sapiens
caatcaagtgccaagtacagggttatgattccattctagttggaatattttccattattcaacttatttaataaactgtcacttgaaagggggtctgataggctttttcrcaatgaatcaaagaactgctcgctttcttcctttattatgcatgctacatttgaagctaatgaagcgtagcttctgagctgatacttttatagatgaaagagacatcatgtcacatcttctgtttatttaatcagctactcatagccaacacaaaacactttgattgccttgaactttatttttgacagatgatggacgtttctgttgctatcttgcctaatagtttactaccatatgcatattttaagatgttaaccatgaataaaattactaggaaaaaaatgtacaatagcaatggtacatttaattgaagaaagtgtagtagacataatactgcttacaatattttgcagattttatataccctccccctagagcaaatactgccttgaaatagttaagtatgacatcatctaatattactttcatgaagcttttattatttactaaaatatcttcataattcattgagctgaaacaacacaatcttctatgaaagtagaacttcttcatttataaaaggcatcaaaaggaataattcatc

SEQ ID NO: 821849 - DNA, 631 bp, Homo sapiens
aatgagggaaaaattgttcagggcagccagagagaaaggccatttcacataaaaagggaagtccattggactgtcagcagacctctcagcagaarctctacaagccagaaaagattggagaccaatattcagcattcttaaaaacaatgttttcaacccagaatttcatatccaactacactaagcttcataagcaaaggagaaataaaatcctttccagacaagcaaatgctgagggatttcattgccaccatgtctaccctgcaagaactcctgaaagaagcactaaatatggaaagagaaaaccaataccagccactgcaaaaacacaccaaaatataaagaccaatgtcactatgaagaaactgtatcaactagtgttcaaaataaccaaatagcatcatgataacagcattaaattcaaatgtaacaatactaacctctagtgtaaatgggcagaataccccaattaaaagacacagactggcaaatttgataaagagtcaagaaccattgatgcgctatattcaggacactcatcttacatgcaaacacaaatacaggctcaaaataaagagatggaggaaaatttccaagcaaatggtaagcaaaataataataataataatag

SEQ ID NO: 821850 - DNA, 528 bp, Homo sapiens
ttttccatttgtttgtgtcctctcttatttcattgaacagtggtttgtagttctacttgaagaggtccttcacctcccttgttagctgtcttcctaggtatwttattctctttgcagcgattgtgaatgagagttcattcattatttggctctctgcttgcctattgttagtgtaaaggaatgcttgtgatttttgcacagtgatttttgtatcctgagattttgctgaagttgcttatcagttcaagaagttgttgggctgagatgatggggttttctaaatatacaatcatgtcatctgcaaacagagacatttgacttcctctcttcctatttaaataccctttacttctttctcctgcctgattgccctagccagaatttttgattctatgttgattaggagtggtgagagatgacatgcttgtaccagttttcaaaaggaatgcttccagcttttgaccattcaataaaattttgggtgtgggtttgtcataaatagctcttataattttgagatatgttcca

SEQ ID NO: 821851 - DNA, 528 bp, Homo sapiens
ttttccatttgtttgtgtcctctcttatttcattgaacagtggtttgtagttctacttgaagaggtccttcacctcccttgttagctgtcttcctaggtattttattctctttgcagcgattgtgaatgagagttcattcattatttggctctctgcttgcctattgttagtgtaaaggaatgcttgtgatttttgcacagtgatttttgtatcctgagattttgctgaagttgcttatcagttcaagaagttgttgggctgagatgatggggttttctaaatatacaatcatgtcatctgcaaacagagacatttgacttcctctcttcctatttaaataccctttacttctttctcctgcctgattgccctagccagaatttttgattctatgttgattaggagtggtgagagatgacatgcttgtaccagttttcaaaasgaatgcttccagcttttgaccattcaataaaattttgggtgtgggtttgtcataaatagctcttataattttgagatatgttcca

SEQ ID NO: 821852 - DNA, 523 bp, Homo sapiens
ttattaagtcattttaacttgaaaagatgttgaattttatcaaaggccttttctgcatctattgagataatcatgtgttttttaaatttggttctgtttatgtgatggattaagtttattgatttgcatatgctgaactagccttgcatcccagggatgaagtagacttgatcatggtggataagctttttgatgtgctgctggatttggtttgctagtatttacttgaggattttcacattgatgttcatcagtaatattggcctgaagttttcttttcttgtgtcttttcccagttttggtattaggatgatgctgtctttataaaatgagttagggaggagtccttccttttcaattgtttggaatagtttcagaaggaatggtaccagctcatcattgtatttctggtagaatttagctgtgaatccgtckggtcctgggctttttcttggttggtaggctattaattactgcctcaatttcagagttcgttattggtctattcagagattcaatttct

SEQ ID NO: 821853 - DNA, 523 bp, Homo sapiens
ttattaagtcattttaacttgaaaagatgttgaattttatcaaaggccttttctgcatctattgagataatcatgtgttttttaaatttggttctgtttatgtgatggattaagtttattgatttgcatatgctgaactagccttgcatcccagggatgaagtagacttgatcatggtggataagctttttgatgtgctgctggatttggtttgctagtatttacttgaggattttcacattgatgttcatcagtaatattggcctgaagttttcttttcttgtgtcttttcccagttttggtattaggatgatgctgtctttataaaatgagttagggaggagtccttccttttcaattgtttggaatagtttcagaaggaatggtaccagctcatcattgtatttctggtagaatttagctgtgaatccgtctggtcctgggctttttcttggttggtaggctattaattactgmctcaatttcagagttcgttattggtctattcagagattcaatttct

SEQ ID NO: 821854 - DNA, 586 bp, Homo sapiens
attgtaagtttccaattaaacctcttttctttataagttacccagcctcaggcattattattattaattttttttttgagaccgagttttgctcttgtcrcccaggctggagttcaatggtgcaatctcggctcattgcaacctccatctcccaagttcaagcgattctcctgcctcggcctcccaggtagctgggattacaggcacccatcaccatgcctggctaattttttgtatttgtagtagagatggggtttcgccatgttgggcaggctggtctccaactcctgacctcaagtgatctgccgccctcggcctcccaaagtgctgggattacaggtgtgaaccaccacacccagcccaggcatttctttatagcagttcaagaacagactaatacagacttctgtggtacaaaaacagcctcccaggtactggtgactggtgttagagagctgcttgcagtctacctcatccctctcccaccagctcacacccccacaatactctttttcttccaattgtcataatattttgctgtatctatttaccattaaccatacactagacagcctttccttttctc

SEQ ID NO: 821855 - DNA, 572 bp, Homo sapiens
aacagtgcccagacttctatgccccgtgcttgttaaaccctatttccaggtactcagcagggaagcaaaaagttgacatcagaactcactgacaatgagtaatggatatgtctttttcagagtgtgcgctcagatatcctcaattattcctcttaagaaaatcttgagttaaggatcattctaggaatttttataaaaagaggaccctggagtggcaagactctctgggactaaccaaccaccatgccctgggctcagcttcccttggagactcaggtcacactcaggtggctttggggaacctgggctgggctggtccttgctgcccctccttgactttgctgcttatgtctggtttgggccaatattaaattcagtttgcattcagggaggatctgcaaggtcagctagtgggttcatgatgtggggcaagatgaggaggaatgaacccaggctgagctcaaagaaataccaaattgcataacaaagatgagggctgggagccctgatatatcactgaaacaagggcagtgctggcasagaacagggatccatgaaaatatgtagaacag

SEQ ID NO: 821856 - DNA, 633 bp, Homo sapiens
ggaaaaggtaaggaagggattctcccctggagcctccagagggaactagccctgcccacaccttgattctagcccagtgagacgcaggtcggacttctagcttccaaaacttgtgttgttttcagccactaaatttgcagtactttgttaccacagccatgggaagcatgcactgttaacaggctttctctaagcagatactaactcacttgattctcgcagcagccctgcgcaggggtaccagtgctattcttattttatggatgaagaaacggaggcatggagagcttaagttgctggccaggttccaccgctaatgagggcagagctggggccataagccaggtggtgggctctggagtccatgctggtgccaaccgtacgacgatggccgccaggggctctgcagggattgaatgaggtcacagggggaggcatgtgccacgtggcaaaccatgtggcctgtaggattgacttcatcctgcttaaaaggccaccgactttcctcttccggagtgataccgcacggctttccatcgctgtccttggctcgggggacattggtaagcagatgacttactggkcagtcacgctgtcgcagaaacgacgtgggcttgggaccggtgacagaag

SEQ ID NO: 821857 - DNA, 670 bp, Homo sapiens
agttgctgccttcttatctggatcctctcccatctccccacccttcttgatcagcagaaaatacagctttgccagcatggagttggctttgaaaaccagtgcctgggccaccagatggagcagattcggaggtcgggggataaaaatccaaggcttggtcagctaacaggggtgatctgaaaacaggcagagaacgctcacagctttggtggccagaggctgaggcctcagctgggctgagcagcaaagcagtcagaggtccatgagagaggcatagaagatcgataacagattgcccctggtccctggttgtctagaaaactgcttctgcccaggggaaaccaaggagcccactgggaagtgaaagcaaaggaagatctgaaaattggagggctttaaacacactccccaactgtatgagtccattctcactctgctataaagaactgcccaagcctggctaatttagaaaggaaagaggtctaattgattcacaattcagcatggctggggaggcctcaggaaacttataatcatggtggaagttgaaggggaaggaagacatcttcttcacaaaacggcaggaaggagaaggaaccccatgattcagttacctccacctgatctctcccttgacacrtggggattatggggatcacaattcaagatg

SEQ ID NO: 821858 - DNA, 668 bp, Homo sapiens
aatcatctgttgctaactgtaacatttaaaagaattagtttgtgtattattccctgctttaaagtgacataagaagagtacttaagtttggagttccttttctaagctctccatctagtaatactggtaaatgataaagttttacttatcaagacaacagtagagcaaaataataaaacgtatgtcttggaagttaagaatgacaaattactcctctctacctctaatttcctttattctttaactccacctccctccaaaatgtttctaagcaggccaaggatacatattataaaatatcatacccagtgacaatcaggacttcagaatttccaaaatctaccatgaatatttgtattagtgcaacttcatggacaaataatctggttggactacaaggttttctggtatttctaccctctattggaattaattctgtgatagttcctcgacaccacattccatttttaatactgctgacaaatattcttgcacctaaataatgagggaaacaaatcgttataaacatttatcaataaaagccacttcataagtttacagacacgttagttctaccacgaaaaagtcttaattcrtttatttaatgatgatatagcactgtgttcaagtgctataagaaagatataatacagcatattatgatagtt

SEQ ID NO: 821859 - DNA, 425 bp, Homo sapiens
ttattgaagatttttgcttctatattcatgagagataatggcctactacagtttccttccagtgtctgatgttggtattagggtaatgctacactcaaacaatgagttaggaagtgtaccctctacttctatcttatgtaattggtataattttctccttaagtatttggtagaatttaccaatgaccccgtctggtcctgatgctttctgttttggaaaattataaattatttattccattttttcaatagaagtaggcctattcaaattatctactcaccatgttattttgaaatggcctctgccattctgttcaatgwttcctctcaacgagttccagtttggggaacaattctaatccttccaaattcaatatgactacctccccaaactctctatttttgtcatgggcattatcattttc

SEQ ID NO: 821860 - DNA, 588 bp, Homo sapiens
gaagccctcctggcttcacacctaaccaggatccacatgcctcttccactgagctgggctctcccagcttcctgactcaggcactacctcgtctccgggccgcaggggtttgggcatcattctgyctgcctcttcttcctcctccttcctggggctaaggtacatcatctgggcaggtagctgtcttgggaagatgacatctttctagccagacacctggtggtggcaactctgcaatagtttagagggttgcagtggtgtttcaatgcgcccacacttgtctcagggctattctcttaaaatcagtaactgggacattattttttctgaaatccaccgcaccctcacctacttcctacgccaagacaatagcccatttagatttttcttggatgaagagacattcacacacacacacacacacacacacacacacacacacacaaacaaaaaacacacttttttttttttttttgagacggagtctggctctttcgcccaggccggactgcagtggcgctctctcggctcactgcaagctccgcctccggggttcacgccattctcctgcctcagcctcctgagtag

SEQ ID NO: 821861 - DNA, 588 bp, Homo sapiens
gaagccctcctggcttcacacctaaccaggatccacatgcctcttccactgagctgggctctcccagcttcctgactcaggcactacctcgtctccgggccgcaggggtttgggcatcattctgtctgcctcttcttcctcctccttcctggggctaaggtacatcatctgggcaggtagctgtcttgggaagatgacatctttctagccagacacctggtggtggcaactctgcaatagtttagagggttgcagtggtgtttcaatgcgcccacacttgtctcagggctattctcttaaaatcagtaactgggacattattttttctgaaatccaccgcaccctcacctacttcctacgccaagacaatagcccatttagatttttcttggatgaagagacattcacacacacacacacacacacacacacacacacacacacaaacaaaaaacacacttttttttttttttttgagacggagtctsgctctttcgcccaggccggactgcagtggcgctctctcggctcactgcaagctccgcctccggggttcacgccattctcctgcctcagcctcctgagtag

SEQ ID NO: 821862 - DNA, 566 bp, Homo sapiens
aatttataaacaacataaatttatgtttacagttctggaggctgggaagtccaagatcaatgtaccagcagatgtggtgtctggtgaggacttgctctgcttcataaatggcaccttcttgctgtgtccttacmtgatggaagggacaagggagcttgcttttataagggcactaatcctattcatgacagtagaaccctcatgacttaatcactctccaaaggccccacttcttaataccatcatatcgggcattaagttccagcatgtgaattttaggaggatgccaacatgcagaccatagcaaaaactaactatacagctataaagttataaagacagcgtggtattgataaaagaatagacacagaaatcaatggaagaggtaagaaagtttagaaatagacacacaaatatagtcaactgatctttgacaaatagtaaaaggcaattcaataaagactagtcttttaacaagtagtactggaaaaattggatgtccatatgcaaaataataataataataataataataataataataataatgaatctagacacaggcc

SEQ ID NO: 821863 - DNA, 566 bp, Homo sapiens
aatttataaacaacataaatttatgtttacagttctggaggctgggaagtccaagatcaatgtaccagcagatgtggtgtctggtgaggacttgctctgcttcataaatggcaccttcttgctgtgtccttacatgatggaagggacaagggagcttgcttttataagggcactaatcctattcatgacagtagaaccctcatgacttaatcactctccaaaggccccacttcttaataccatcatatcgggcattaagttccagcatgtgaattttaggaggatgccaacatgcagaccatagcaaaaactaactatacagctataaagttataaagacagcgtggtattgataaaagaatagacacagaaatcaatggaagaggtaagaaagtttagaaatagacacacaaatatagtcaactgatctttgacaaatagtaaaaggcaattcaataaagactagtcttktaacaagtagtactggaaaaattggatgtccatatgcaaaataataataataataataataataataataataataatgaatctagacacaggcc

SEQ ID NO: 821864 - DNA, 548 bp, Homo sapiens
ttttttgtttagacagggtcttgctctgtcacccacactctggagtgcagaggcgcaatcacggctcactgcagccttgacctcctggactaaaatgattctcccacctcagcctcgtgagtagctaggactacaggcacaagccactatacccggccaaattttattttttgtagagatggggtttcaccacgtgtctcagactggtctcaaactcctaggctcaagcaattctcctgccttgccttcccaaaatgctgggattacagtttcgagccaccatgcttggctttttcatagatctaattcatggaacagggtggggaaaactagtgctgattcttgaagtaggaactcagactggtttgagaagtaaacctctctatcagttctgccctgcctccaatgtctaacgacagccatccaatcttccttgcccctgcactgtyctctagctacatcgttcttcttccttaactcaaagatcactctatatctgctatctccatattctttgtttttatttagttatcttttcagttgaaaaa

SEQ ID NO: 821865 - DNA, 665 bp, Homo sapiens
tttgccttcctgggtaagaaaattttaacccaagtctgggattctctggcacctgtcttttcccatctttyaatgagttggcaagattaggtcaaatttcaatgctaaatttgattttttgaattttaaatagttgcactttatttcatgctgaccaccaacttaatttatacattttaaaataaaattatcctagaagtgttgtaaacgtgggaaaattttaattagtgttggaggtcattagattggacccaggtttaaatataatgatctcttcacagcttatttgatgtttaagagcaacttgtgtgatcttagctttgcaggttttctgtaatttatgtagcacaataaaggataaccagttgactgtgttactggactctgagttctcacagctagtttcatctaagcttggtttattatcatttctgctttggatttttttgtgcatcacatgaatacttagaaatccatttgttttcagtgtagtacctagggtgaagtagatgctgcacaagtaagtttaagggaataaaagtcccgacactttatatacatgttgaggggcacgatttaagagactgaaacagtttacattaaactgtttttattttctgccagtagactctatctgcttaaaaaaataaaaattgttcaaccca

SEQ ID NO: 821866 - DNA, 613 bp, Homo sapiens
gtataaggtttaggtcaaggtttttctgtcttacagatatccagctgctccagcactttttttagtttgtttgtttttccttcttccacaggttctaatccagcaccattattaagactattcttccactgaattactttggcacctttgacaaaaatcagaggtcatatttgtgtatggctatttctttccattgatctacatgtctgtcgctttgccaataccacaaagtcttgattatgaaagctatatagtaagtcttgaaattgggtagcatgattcctcccattttattccccttttttaaaattactttagccattctagtagtcctctgtctttccatataaattttagaataatcttacctatatctacaaaagatcttactggaattttgagaaaaactgcattaaacctgtatatcaatttggggagaactggtatctttgttgagtcttccattcaatgtagaatgtctttccatttacttttatcttctttgatttctccatcagccacrctatttttaaaaatatgtttaacaactttttaaaaatagacaatttagccttgaaatctggatttcagcttttcttgaaatacctgaaga

SEQ ID NO: 821867 - DNA, 427 bp, Homo sapiens
tttgtattggaactcagtgtttgttggtctgtstgtcggaatggaaagcaatgcagggcacaatttcgctggtgcccacagaggctgcatttagaacagccctagccagagaagaatcttccatcctagcaattggaacctgagttccagctagcccaccgctgtgggctaaagtgctgtaagctcctaaataaatttgaaagatagtctaggccacaaggactacaattcctgggcacatcctggtactgtgctgggctcagagccagtggacctggggtacacatgacctagagagatactagctggaggagccaaaggagtgcttgcatcaccctctcccagtcccaggcagtgcagcttacagctctgggagagacttcttccacttgaggaaaggtgagggaagagtaaagaagactttgtc

SEQ ID NO: 821868 - DNA, 427 bp, Homo sapiens
tttgtattggaactcagtgtttgttggtctgtctgtcggaatggaaagcaatgcagggcacaatttcrctggtgcccacagaggctgcatttagaacagccctagccagagaagaatcttccatcctagcaattggaacctgagttccagctagcccaccgctgtgggctaaagtgctgtaagctcctaaataaatttgaaagatagtctaggccacaaggactacaattcctgggcacatcctggtactgtgctgggctcagagccagtggacctggggtacacatgacctagagagatactagctggaggagccaaaggagtgcttgcatcaccctctcccagtcccaggcagtgcagcttacagctctgggagagacttcttccacttgaggaaaggtgagggaagagtaaagaagactttgtc

SEQ ID NO: 821869 - DNA, 632 bp, Homo sapiens
taggctatcactttgcccaaagagactttttaaattgaattttgggtagatgagtgtgtactaaaaagtctgtggggagaaaagacattaaggaatatcctatgaagctcacatcaaatgatgtaatttaccrttaagtctttgaatgcagaacaaagacatgagaaagagatttggtattagcaagcaactcagaaaaatattcaactgcccaaaaccaaaaagccaaccttttcttcccctcctccacccaaaaagtcctgtaaaaaaataagctaacccctttcaaacatgtcagattgtttcacactgagttatgattatatatttctgaaaaaaaaaaaatctatccaaaatgcaaatataattacaacagcctgtcttgagataaagactacagtgtatgaaaaacctacaatgcaaaatacttcaggagcaaagagacaggcagtcagagctgaggggtatgaagaaagtcctttttctcacttcacctcattaatgtctgcaagtaaaccaaattgtggggaaatatttatttagaagaaagtaaggagagttttaaaaaatacagaagtgcatagaagctaaaagtcttacagtacacatttaagtgttgttattctcaaaga

SEQ ID NO: 821870 - DNA, 607 bp, Homo sapiens
accacaacagacaggaggtacataataagaggtaggggatacagatatggaaagagctaattcctcatsatgcgtaacagcaagccaacaggtcattactagaatttaaaaatcaacaattagcagtaagagcatttgatttaaaatgtgaaaatgattgcctcaggagagggagcaaaagaattcaggagaatgctgtttttcaagagaagccttcagataaaatgactttttcaactagatttatttataaacccgataaaatccgatttttaagatagtaccatattaaaatgtctatacactgaagattagcctacacattttacacatgtatactcttgcgtaattaggtaaactaatcccaaggaaataactaaaattttagttagataactttccagtgttccaaacactcatatataatacctggtcccagtctctttctccagatttttttttccaggtatttctccctttggaacttgctatccagtctcatttcagctgcctaagactgtacttgttatcccagatttctaaaatcctgtgtcacagaatccctacatattccttttaactccaccaatatctcccaagaaacatt

SEQ ID NO: 821871 - DNA, 533 bp, Homo sapiens
tgacaattcaaagaataacaaagagtgaataaagaaagtctcttctcccatttcagcttctagtttgcagccaggaaggtaatctttttctgtttgtcatatagccttctcagggatattctatatacarcatataaacatatatgcaacttcccacttttctgtaaaactgttgcttaaaaatggtagtatactatatatataatgttgttctgcttgtcttttttacttcatcttcaagatgatgtttgatgagtaaataaaatttcattcttttaaatggctctactgtataaatatacaagaaaatatttaatgcagatttaaggccctcatgttttttatttctgtaaacttgccccaacctgtgctcatttgacagcaaaatctgacctgaactgacctaagactatttgcactctttattagtcttacttagggagaatatctatagtttgctgttaactattcagatatattgattatggagcacttgtcccatagcctgccagcgatgctacttattatagtat

SEQ ID NO: 821872 - DNA, 587 bp, Homo sapiens
acctgtgccccacacaaagctctgcgctgagcatcctgctggccccaggttggagtgacgctgagtccagctctctcatgcatcaaaccgktggttggacaggtttaaaccaggcaggtccacgggagtcttgtgacagggacagaaggtgtccatgtaagctgctccttaccctagcagaaagccccagtggcgcatgcagggcctcaggccctgtgcagggtgcagccctggattcccacatcctcacctcctgagtgcgttttccacagctctgggagctgtgcttccagcagggactgtgtgaagcctgggccgagctgcagcggaggaagagtagacagacatctgcccattgaatcctttgaaaaggaaaggaaccaaatcatgtggccaggatgaaagagcacttaccatccccagggcaggccatggagttttgcagccagaagccacatggggctcagctgggacagtgcctggtgatcagatgggaaaccaaggtggggcccggcgcagccccgctctgagcagtggggatccgctcagcatcacatgtggcaccctgggagctgctcactctctgt

SEQ ID NO: 821873 - DNA, 602 bp, Homo sapiens
tcattcttcaagatgaccaaatacaccaccagtgctcggtgcccctgccgatggatcttgtcggcctgtacgctcaccgtgcacactgctatgtccaatgtccaagtcaggctcgcatgctgcccttggtgagacaattccccaccctaccccccgggcaccctccgcctcaagccgctgcctctcgtaggttcctcctggagctggagcaccggatggaggagaacatcgtcatctctgacgtgtgtgacattgtgtaccgttatgcggccgaccacttctctgtctacatcacctacgtcagcaatcagacctaccaggagcggacctataagcagctgctgtgagtgtatccggcaaggggctcaggggcagggggaggtgcccggggcagccataccagtgctggcccaggctccttacacggtgacacttcatggtcctttacctctgcgttcccaaggtccacatgagccaccggagttggccagggatactggtgacagtrtcccaacccagcacgttctagggtgtattggtgtcactagagaaacattagcccagccagaccccaagagaatcagcgtagcatccactggacc

SEQ ID NO: 821874 - DNA, 611 bp, Homo sapiens
ctcaaaatgacaagagacttttaaatatatatatttaaaacctagtgttgagggactctaaatgagcactttcaaacacagctgataagaagagtatatttgtatcaaaaccccagtaataatatatttgtatactttctagtgcttctatttctagaaatttatcttgcaaaataatcagacatgtacacaaatatttatttattagcatgttcatcccagcaaaaagttaggggaagaatagggagaagaaacttatatgcccaatggcagggaaattgtttagtaagacaatatacagctgtttaaagacgcaaacattttatttgttttattttttattttttttgtgacagagtctcactctgtctcccaggctggagtgcagtggtacgatctcggctcactgaagcctccacctcctgggttcgagcaattctcctgcctcagcctcctgagtagctgggattacaagcacccaccacaacacctggctaattttttatatttttggtagagatggaatttyaccatgttggccaagctggtgtcgaactcttgacctcaggtgttgtccctgcctcggcctcccaaagtgcggggattacagg

SEQ ID NO: 821875 - DNA, 572 bp, Homo sapiens
attaagaaggcaaaaaagtgccaggcacggtagcacacacctgtggttccagctactcaggaagctgaggcaggaggattgcttgagcccaggagtttgagaccagcctgggcaacatagtgaaaccctgtctctaagggtgaaaagaaaagaaagaaagaaggcaaaatattagcacagattcattgtagagaaaatgttatgtatcctcacagactggagccacatacaaagagataagtagccttctttcccatgcttccagataaccaggatgcatctaaggtaagaggttggaggaaagaagacacattgctctgattccaagggtagagggaataatgaccagatttcaaccctaagatagaacccaaatacttgggaggcttgtggttctttcttcttaatggttgataacacagtgtccctacagagaggtcatctgaaactcagaggcaaataactcatcatgggcagcaacactggcaacctaacttagaagccccgtgtggccccttttttatttggagtgggtctcttcactayagcaaggcagaatgtactctttaagt

SEQ ID NO: 821876 - DNA, 404 bp, Homo sapiens
gtctgtagtcccagctactctggagtctgagactggkggatcctttgagtccaggagttcgaggtcagcctgggcaacatagcaagaccctgtctcaaaaaaatctccaaactgtgtctgtgtgtggatgtacagtggaaggattgtacttagttacgaaaagtattgtattgagatgacagaggtcatgagtgttatttactgttgagttgtttaaatattaaatattcaaaccttaaaaactgttcagttatttaaaatgtatgcttaaaatgtttaaagggataaactgacaaagtcctttgaagaaagcctgttaaaagaatttctgccattaaaatgtccaacaatagcggccaggcgtgatggttcatgcctataatcccagcattttgggaggccga

SEQ ID NO: 821877 - DNA, 404 bp, Homo sapiens
gtctgtagtcccagctactctggagtctgagactgggggatcctttgagtccaggagttcgaggtcagcctgggcaacatagcaagaccctgtctcaaaaaaatctccaaactgtgtctgtgtgtggatgtacagtggaaggattgtacttagttacgaaaagtattgtattgagatgacagaggtcatgagtgttatttactgttgagttgtttaaatattaaatattcaaaccttaaaaactgttcagttatttaaaatgtatgcttaaaatgtttaaagggataaactgacaaagtcctttgaagaaagcctgttaaaagaatttctgccattaaaatgtccaacaatagcggccaggcrtgatggttcatgcctataatcccagcattttgggaggccga

SEQ ID NO: 821878 - DNA, 567 bp, Homo sapiens
ttacaataaaagacttccaacaataaacaagtctccttccccactccttgcctacccagccaggctcctctgcagaggcaactcttctagctatttcttctggttcttatctccacatttccaaataatgtgctcactcgtatatttcttcatttaccaattttaggtaatatctgttggttttctgttattggtgggtgaggatttgatgtttttgcacaacctccatcctctgatcacatattttagttaaataaatatttggtgtatagtttattgtgattacgaatcatttcagtctttgccatgtcttaaaaaccactctaggatctggcttctggctccctgtctccctcacctccagctgtttccctctcactcactcgtctccagcatcactggcctccctggctcctcagacctgagaacactcctacccgaggatctttgcacttgcccttctctccatcagagtgctcgccttcctgacatttcctgtcygcttccttatttcattcccgactctgctaaaatgtcacctgattagcgagaacttcctgctctcct

SEQ ID NO: 821879 - DNA, 663 bp, Homo sapiens
tacttttgcatccagtccagtaacacagagttcattctagccttccgtttgtttttattggtaacttctttctctgatgggggaaattgggctcttcttattcataatatatttacttattgttcaacccaagtatatccattttcagaattacttatacatgtcctcacgagaaacaaatttactaactacattatttgtgcatagttcatttttctttaaccttgcaattcccagtcaaaacaccgcttgcttacttagattagttcttttcttcaccacccccatcagtgtggtagtgctattcatttataatatagttaggttcatttgttagtttgtgtcctgatttgagttcactccatgccctgattttaaaattttacatactgtaaaattcattctttttaatgtatagttttatgagttttgaccaatgctcagagtagtgtatcaccaccagccatgatacagaacaggtccatcacccccaaattcctcatgctgcctttttgtcattaactcctcccgacctctgacaarcactcatctgttcaccacccctgtagttttgcttttcccagaatgtcgtataaatggagtcatacaatatggagcctcttggttctggcttctttcatttactaaatacatttaagattc

SEQ ID NO: 821880 - DNA, 675 bp, Homo sapiens
acagcttggttgtttcccaacacagtgcatggtatctgcccatcagtgagtttcctgaaggtaggggctgagtcttacctttctttctgtgcctccaaatcctgaactaggactgagcctgggcctgcctgaacatcctagtgcttcctccagcaattgagatgcttcattgcacatcacggcttttggggtaaagtcctgagttctttcgctcacctgcttctgaggcccttcaggagcttgtccttgcctcatcccccaggttcatctccctggcactgcccaaccatggggcttcctcctgctttctcttgcctccagccttgcatagctagccctctacctggaatgccctcccctatccctgccttctgccccacatccatgcaatttccccacctccatgtacatgccctttcttcaggaaccctcctcatccctccagggctgcttgagcaaagcttcttgtgggtgccctcaccatctctcctaacttagtactcaccacactgaggaggcctcttcttttcaactaatctatgagctccttgcaggcagagacwgggttgaactcaccattctatccccagcctagcacaatgcctggcacatactgcatactccatagatatctgctagagaaaattaataaatgcacctctcttgctgctactt

SEQ ID NO: 821881 - DNA, 537 bp, Homo sapiens
tctttccatagcttgatagctcatttctaagtgatgaataatatcccattggctggatacactatagtttatctactcacctactgaaggacatcttgattgcttctaagttttatcagttacgagcaaggctgttataacatctgagtataggtttttttgtgggtgtaattttcaattcatatggataaataccaaggagcatgattgctgagtcctatggtaagattatgtttaattttgtgaggcactgctagacttttttccaaagtggttttaccattttgcattcctaccagcaatgaatgagagttcctgttgtttcacatcctcatcacatttggtgttgtcagttttggattttggcagttttaatgggtgtgtagtattatctcatgtgattgacttttgtatattaatcttgtatcctgccaccttgctataatcacttactaatttcaggagttcgttagttcttttggattttctatataaacagtcttgtcatygaacaaagttttgtttcttccttcccaa

SEQ ID NO: 821882 - DNA, 586 bp, Homo sapiens
agataccaatgagtaatctttagaggtaggttttccttacatagggtccattgatgaggcttgcrgggggtgtctataaacccctgtttcagagatctttttgtgtgtgtgtgtgattaagtttaaagtctagattgtgtgtgtgtgtgtgtgtgtgtgtgatttttggagttgttactgttttttcattgttgttttgttttgctctctaaaacttgctgcttccaaacacgtataaaaaatgacctcatttttcaaattcttcaaaaaattcttcagaaacaaagatatggttctagaaagtctaataccttcggccgggcacagtggctcacgcctgtaatcccagcactttggggggctgaggcaggagtttgagaccagcctggacaacatggtgaaaccccacctctactgaaaatacaaaaattagccgggtgtggtggtgcatacctgtaatcccagctactcgggaggctgaggcaggagaatcgcttgaactcgggaagtggaggttgcagtaagctgagattgtgccattgcactcgagtgtgggtgacagagtgagactctgtctcaaaaaaaa

SEQ ID NO: 821883 - DNA, 586 bp, Homo sapiens
agataccaatgagtaatctttagaggtaggttttccttacatagggtccattgatgaggcttgcggggggtgtctataaacccctrtttcagagatctttttgtgtgtgtgtgtgattaagtttaaagtctagattgtgtgtgtgtgtgtgtgtgtgtgtgatttttggagttgttactgttttttcattgttgttttgttttgctctctaaaacttgctgcttccaaacacgtataaaaaatgacctcatttttcaaattcttcaaaaaattcttcagaaacaaagatatggttctagaaagtctaataccttcggccgggcacagtggctcacgcctgtaatcccagcactttggggggctgaggcaggagtttgagaccagcctggacaacatggtgaaaccccacctctactgaaaatacaaaaattagccgggtgtggtggtgcatacctgtaatcccagctactcgggaggctgaggcaggagaatcgcttgaactcgggaagtggaggttgcagtaagctgagattgtgccattgcactcgagtgtgggtgacagagtgagactctgtctcaaaaaaaa

SEQ ID NO: 821884 - DNA, 586 bp, Homo sapiens
agataccaatgagtaatctttagaggtaggttttccttacatagggtccattgatgaggcttgcggggggtgtctataaacccctgtttcagagatctttttgtgtgtgtgtgtgattaagtttaaagtctagattgtgtgtgtgtgtgtgtgtgtgtgtgatttttggagttgttactgttttttcattgttgttttgttttgctctctaaaacttgctgcttccaaacacgtataaaaaatgacctcatttttcaaattcttcaaaaaattcttcagaaacaaagatatggttctagaaagtctaataccttcggccgggcacagtggctcacgcctgtaatcccagcactttggggggctgaggcaggagtttgagaccagcctggacaacatggtgaaaccccacctctactgaaaatacaaaaattagccgggtgtggtggtgcatacctgtaatcccagctactcgggaggctgaggcaggagaatygcttgaactcgggaagtggaggttgcagtaagctgagattgtgccattgcactcgagtgtgggtgacagagtgagactctgtctcaaaaaaaa

SEQ ID NO: 821885 - DNA, 587 bp, Homo sapiens
ggggaggagactgttgggtgcagttgaggaaggaggaccagttaggaggctgttgcgatactttagtgggaaatgatgaagatctgactggaacagtggcaccaggaagagaacgggataatccctgggataaggaagttgaatggatgggtcttggcaagaccaaggatatgtggggatggagggacagcagcaagtcaaagatgcttcccactttctggcttcacacctggggaaaggctgctccacatcctagcatctctgggagggaggccctggtgagcttttgcgctctcacacgtcagaagtcagtgagttggggtggggacccttggtaatttctagtctaccttcctggcaagcttggagttgggccccagacactgctctacacaaatccccttgaaggcccaatgaaacatggagcctttcagaatccgatggcatggagcttattcagaatgagcttttgaccaatttccctcagtgctacccccaaaatacatccaaatccaagcccacagtcytagaacaccctgttgagaggagattctcatgaagtaggggaggccatgtggcttgggcaa

SEQ ID NO: 821886 - DNA, 576 bp, Homo sapiens
gataagatgttttcagaatgtagaaagtaaagttgtttaaattatcagccaaaggtagatgttgaaaatctcatttatggatttaattcattatctccstagtttatattcccatggtagtttaaaagtagctaataaaatactgtgaggaggccggacgcagtggctcacacctgtaatcccaacactttgggaggctgaggcgggtggatcacctgaggtcaggactttgagaacagccaggtcaacctggtgaaaccctgtttctactaaaaatacaaaaattatccgggcgtggtggcaggcgcctgtagtcccagctactcgggaagctgaggcaggaggatcacttgaacccaggaggcacaggttgcagtgagccgagatcatgccacagcacagcctgggcgacagagtgagaccctgtctcaaaaaataaataaataaataaaaatactgtgatggataggaactttttaaaaaattaaatattacccgggcacagtggtttatgcctataacctcagcactttgggaggctgagaagtttgagataaatactggcaatatagtggg

SEQ ID NO: 821887 - DNA, 402 bp, Homo sapiens
ctgaggttgggacttggactggcttcctggctcctcagcttgcagacctattacggcccatgatgggacttcgccttgtgatcgtgtgagtcaactccccttcatatatttatcgatcctattagttctgtccctctaaagaaccctgactaatccagggggctgccggaatagatgagtgtgggctgccccatggtagtagcagcagaatggtgagaagcggctgttctgagggtctattggaaggtagtgcccttaggcctgtgccgaggttgatgtyggcaagctcgcctatgttgtcggcgcacagttgcaacttgatattcgttggacagataacggctgatatgactccctcagataacagataatatatacctgacaatacaagaaatatgaaag

SEQ ID NO: 821888 - DNA, 632 bp, Homo sapiens
aaaaggtgctttacaatgctctggatcctcttgacctacttatttgaaaataggaagatgggaagacccactgaggctgtgggaagaagaatctaggggtggcaggtctgggatggaacccagcccctcagagcatctcatttgggagggcagaggtcagtggggtgaagtgctctttctcacagtgtcctgggaggaatggaggggctgatgtaggtaagttccctgaggaggtatgatgcaaatctgtgcggcttctaaaagaacattcccactttattttatatagaaatcccagagtccagggcagtacaaaatggatgcttctgggcccatttataccttggcaagcaaaccacagtgttcccaatttctttatgcaagcaggagcacacatacagccttcccaaaaggtgtaagaaattttaattaaaatgataaatgccatgctcaataataaagctttaatatctctggcaaacaaaataacaatgtactgctattctcctttcccagggmagcataggtattttaatgaaagtctttttatacatctcataaaattattcttgaaaagaatagcactaagtatttgatacctttttggcagtgaaggactcttgcactccaaa

SEQ ID NO: 821889 - DNA, 636 bp, Homo sapiens
tttcctgtctcttcactgtccgcacatttcttagcattccctccaggcttgggcagggagactcgcagatgcacacccacaagtattcagttctcaaactctagacgagtgttggcaactggattgcaagatgctcctaccctgatagatcaggggtggctgctggaggctgtgctggggatctgaggtttggtctgggctcagtgggagacggcagtgcaatcctgatgagtgatgtctgccaggcaccgtaagtttgattagtgatgtctgccacgggcagggatggaaggagcagtgtgatgtctgctctcttctctcccctctgtccctcttcaggaagaaagagctcattctgtctcacaagccaccggcatcctgtatcagcttccagcctcccctcaggctttccagtcaccagggacactcggagccacagcctagagccccgtgttccctggcctgtgcgtctgcccccttctgagatgcagccagaagctctgtgcctgctgcaaagattcaggtggaccctcctctaatctcctcctgctgtgcccgccagtccttgccctcccaccaggtctctgagctcagtsttaccaaattcgccctttaacagcttgctctggcaacccc

SEQ ID NO: 821890 - DNA, 643 bp, Homo sapiens
aggtctctgccaggtgggcctgcaagctgggggcatcctccgtcctgtacagccaggcaggtctaaccaaggcaaagagcatgcactttgtagatctgcaggcctgggttccaaacccagcctggccacttcctggctgtgtgacctggggcaaatgacttagcctctctgggcctcagttccctgatagggttacaggagtgatgacatgagtgctagcttgtaatgtgctcagcgaggtgcttggtgcatattagggctcagatctgtgattgttgttactatgccctttccctccttccttcctgctgtgtgtatgatgtaggaccttcttgtgtctgatgtgtaactgatgttgcagttaaactaaaagaatcctctgctgtcatggagggcagtccagtggggatgacgcataaacagactcacagagggggcaccacgtgctgctggaacccaggggaggtggtgcaaactctgatgggggcccatcttcacagactccctagtctggttcctagagaatgaatagtggaaaaggtggggctaacattcmtattgcccatccactgaccccacccccaaagggtgccagggatcattaaggcacagaccaggttcatgaaatagctttactgggctc

SEQ ID NO: 821891 - DNA, 519 bp, Homo sapiens
tgtgggaagtataggttggaacttggggtttttaacaagatggtctttaaaaggcagaggactgttggatacctcactattttaaagagaaattttatttaaaaaagaaatcttatgcatgatctcatttcagtgttgatttactagaagcatatgatggacctacgaacaggacccttcaaatcaaaatgtatcgtttaggaatattctgaaggggaaagtctgtgactgcattctctgagaaccatctgctcacctacttatgtcccttaaaactgaagctttaggatatcctttgaaacctttttgtttcttatcatataatgtatggtaccataaataccattgcatttgatttttgtgtgaaacaacactaaatcactaytaaaaaggaaagaatgaggttatcttgctgacaatttaaagaaaagacttcttcataatatatttacgacatctaaaatgccttttgtcctcagggtagcactgtagttcttcggtgcttgagttgatactgca

SEQ ID NO: 821892 - DNA, 576 bp, Homo sapiens
gttttatttcagtgtggtcagaaaaaatacataaagtgatttcaatctacttaaatttgttaagaccrcttttgatggcctaacatgatttatactggaaaacgttctatatgtgcttgagaaaaatgtgtgttatgctgttgttgagtggagtgttctgtatatctgttagatccaattggactataatgttattgaagtcctttgtttccttatgatcttctgtctagttgatctatcccttatgaaaagtgaaatatttaaatatcctactgttaactgcgttactatttcttccttcaattctgctagtgtttgctttatatatttgggtgctctactgttagatgcatatatatttagacttgttttgagttcctggagaactgatccttttatcattatataatgtccttctttgtctcttgtgagtttttgacttaaagtttattttgtctaagtagggctaacctcctttttcctttggttgctatttgcatggagtatctttttccatcctttcactttcagcctaagtcttcatatctacagtgagtgccttataaacagcattta

SEQ ID NO: 821893 - DNA, 615 bp, Homo sapiens
ttaagagaggggctgacatcattcaaatggaactacttgtcktatctctttcaatagaactattcatggctttgatcctgcctagggtgctgtgaattcacaactggcttctggagctatcctaaatgtttttgggtcatatattgttaagtcagtgtctttgtgggaaaacaaggtctagggcttcctattcttgctgacattactgtaagccattaagttttgaagtggtgtgttatgcaaatccaaactggaacaacttaaaggactgcaaagacattaacataggtatccatggcattgatcaagaatggctgtaagtactacaatactacaataagattgatactgtggccttctggcagagaagaaaagctctccctatgaagtagctttgaataaataagtaaataaaatcaaacttgaattggctcaagcctctagatttaacgatcaatgtataggaaatacagaaggtagcagttcatgttaaatgacaatatggggatgcaatcagcaaaactcagactctacaggaaaacctacagaacaatagtttctttaacaaagtgcaaggagaaaaagcaaaaggagataaagaagaaatctttagat

SEQ ID NO: 821894 - DNA, 575 bp, Homo sapiens
aaataaatacattttttactaagtagatacctgttaactttctgcygaaaattcatgacaagccaataaaattctgcactggaaaacaaacaaaaagcaaacataaaagggctaaccaaactcattttaaaaacatacattcatatttgcatgataatgcataagagccaaaccagtttaattcaaattgcataacaatttcaataaacatgatgtttcatgtatataaaataaaatacatattaattgccattagatgccattactagcttaccccattatgtattaagttcatataacaagtgtaaaacttttagagaaatccacactttgactttcatcttggttctgtaaataacaagactgctatataaacagttgttttgaataaacattagaaatacacaactttccgtactgacattttttctagaatttttggcatagtaagtcattattttatatcatagcacaataaaatagtttctaaataaggcctgaggttaattttcccacctttgcatagaaattacattctatacttggtcatgccgttctctgttgtggaaggtgaa

SEQ ID NO: 821895 - DNA, 314 bp, Homo sapiens
tttctctaacaattatttctaaaggttatgtacatttttattacttttagtgatgtggaatatgtttcgtaggacttggaacgtagtaaccagyacttttttttttttttttttttttttgagacggaatcttgctctgttgccaggctggattggcacagtgtcagctgactgcaactttcacctcccgggttcgagtgattctcctgcctcagcctcctgagtagctgggattacaggtgcccgccaccacacccagctaatttttgtatttttagtagagacagggtttcaccatgttggccgggatagtt

SEQ ID NO: 821896 - DNA, 539 bp, Homo sapiens
attactggtcccatcctatgatatttcttaataaccaataaagcttaagtmtaggaaatatttaaaataaaagataaaacaaaaggcatcatatattccttggtggttcaatgtcttctctaagaaaataattattcacttctggcttctaatatggcatgtgaagagcttagaaatcgttacttcatcctatcaacaagtaaaaggctcaaaagacagaaaaatcaacaatccttcttagatctatcagagaaagtcttcagagaagtaaaatgatgtaagttagaaatttggaaggaatactatgtatttgattcccataaatgtgataatctagaagaaatggaccaatatcttgaaaatcacaatctgtcaaaactcacacaagaagaaatagacaatctgaataggcttatttctactaaataaactaaactgataattaataacttcctaaaacagaaagcaccacaaccagatgggtttgttggtaaattgcactgaacatttaaagaagaaacaattgtccacaatttctt

SEQ ID NO: 821897 - DNA, 643 bp, Homo sapiens
cacaagtggctggccatagagaggaacacactggtagaaaaacacacaaggaactggacgtcaggaggaacacagcagcagaagaacacacagatgccaacatgccattgaccgcaaaatgacgcagatgccaagagaaattcagctgagggtggttggaggagagcccaaccactgaacggcccaactccaggggaagaccactttcccactccatccaccttttggctccccatcaatctgctgagaggtatcttcaccattcaataaaaccttgcactcattctccaagcccatgtgtgatccaattttttgcagtctactaaggcaagaaccctgggatacagcaagccctgtgtccttgcgataaggcagagggtctaattgagctgattaacacaagacacctgtgggtggctaagctgaaagagcatattgtaacacacacccactggggcttcaggagctgtaagcactcaaccctagatactactgtgggacctgagcccacactcccaatgacctgyccgtctgcatgctccccctaggagtttgagctgtagggcactgaaaaagtgagccactccctctgtggcaagccctgagaggaagataagggaacttttcctgtttcaacatcttg

SEQ ID NO: 821898 - DNA, 582 bp, Homo sapiens
gaggatagtttttgacaaatgattgtaaatgttattagctgtgttgacttgagtggtgatccagtgaaattatatttgaatatgcacccaagttgaagagatgtgagaggaatgtccccagcactccagcctcgcgcaggcctggctctgtcccctcctccccttcctctaacactcactgcctgtcctgtggtgcttacctgatcccacatgcccctggaagcactcccaatttttcaacttggtctctatcctgataaaacctctgtgagactatgagaaccatcttaaactctaacccatcttaaactctaatctgtacaaaatttgatgatctgttacactcttacttcatttcatctgcagacaaatagccccaggcattctaggttttctatctatttttctattatatctacttttctaaaaagcatgttttggatgataacttttatgatcatccttcctcatctatagacagtgtttctagtaattaccaaattatcttcagttcaatgtcgcctggaaagttgtgttttaaaattacaaatttayagatgctccccagtcctcccaaatgaa

SEQ ID NO: 821899 - DNA, 542 bp, Homo sapiens
cagattgaaactggatcctcatctcttcactttatacaaaaatgaactcaagatggattaaggacttaaacctagggcctgaaactatactaattctagaagataacattggaaaacccattctagacaytggcttaggcaaggatttcatgaccaagaacccaaaagcaaatgcaataaaaacaaagataaatagctaggacctaattaaactaaagagcttttacatggcaaaaggaacagtcagcagagtaaatggacatcccacagcacgggagaaaatcgtcataatctgtacatctgacaaggactaatatccagaatttacaatgaactcatatcagtaagaaaaaaaatcccatcaaaaagtgaactaaggacatgaatagacaattctcaaaagaagatacacaaatggccaacaaacatatgaaaaaatgctcaacatcagaaatgatcagcaaatcaaaaccacaatgtggtaccaccttgctcctgcaagatggtcatattaaacaatcaaaaaacagatggtggcatgc

SEQ ID NO: 821900 - DNA, 538 bp, Homo sapiens
ggctccaacacaccacttcctgagagccatccaaggccaagaaacraattatagctaggacttcttttaaagcatttgatgagcaatcttccacccttttccgatttgctttggacacattcatttatcttaactatgtctttggtaagtttactttgctaaagttcgactttcagagtccaaggaaaagtaaaatagtatgcagtctctttctgtggtatctttcccctcatggagtctgtgaaggggcaagtttttgcagctaatggagaacagaggtagaaaacatcaatgctctcctgtataactcagtggtgtcccatgagggacaaccatctggtaaaatacaatttatgaacatgtaacaacaaaaactaaaactctcagtaggcaatttttctttcataatttctggaacttctatcacagatatggggacatttctctagaaaaaattctgtggcaaatctcttgagaatggatcatttctctattagaatgatgttatgaaggagaacaaagaaagaaagaaatagaa

SEQ ID NO: 821901 - DNA, 645 bp, Homo sapiens
acaatttgttttcatatggcattagattgaaaatatttgttgtctttctaaaataatgattcttaaacttgttaaatcattaggaaatgccaattgctccttatgaatcaagactatgccttctcacctttaaatccatactgcatggactagtagtagactgagtcacatgtaaatatttatttaataaaagattcttttcaagaaatacacatttataatgtcaaaagtaagtgaggtataaagaatgaaaactttttgataagcagtgtaaaaatctcaataaaagatttattcttttggaaattattttgagcgttttaaggtgaatgacatttacggatagaatgttttccttcaataaaaaaaaggaaggaataaaaaagaaagccacttttggtaatctctcattttgttagtcatattaaattgacatttgatttctggctatttttcaaaacatatttcctgtactgtttgtagagttctgcaagtttaaagttcagagccaaatttgtattgcatatatktttactacattgtaaagaacaagacttttgactacagacattttttagatccccctcatgtgattactttgtgaatttaatagtctatacaatttaaatctcccctttctaattc

SEQ ID NO: 821902 - DNA, 664 bp, Homo sapiens
gtgctgcacttctggtttaggacagtttcataaactgtaattcctttctcaccacaaccctttgagtatgagattgacatatattaaccctaaatttacaaaagatgaaactaagttccaasatgggttacacaatggacaaaattgtaggaaatgtcaaggctaggtttataattcagttctgcttgactccagatcaccgtgtacttaatcattacgccacattgaatttcagaaaaaaaaacagcacaaagcatatgactttaccttaatagcatcatataaaggcaagctcagtcaaatgtgcacagcacacaccacagtcctagatgctgggatggtctgctctattccatcaattaccatattcaattgctccttatcaaatgtttcaaactacatttttttgtggggggactacacttcatagaggggtgcttgcaaacaaaatttgtatctgacaaaaagaatgctctcaggaagtcgaagtggccttttccagtgcataataccataattaaaaatcagagaagaattaatataaaggtaagaatttgtgagatatctttacactccttgggagtagagtctgggtattatggatatcccattttgcttgttatatatgtttatccaagtgaatatgaggaagatttacctcttt

SEQ ID NO: 821903 - DNA, 484 bp, Homo sapiens
taattttaaaactgtttatttattgtgaatacatagtagatgtaagaatgtatagggtacatagatattttgatacaggcatacaatttgtaataatcacattcagggtaggtatccatcacttcaagcrttaatcttttctttgtgttacaaataatccaattatactcttatttgttataaaaagtacaataaattattgttgattgtggtcaccctgttctatcaaataatagatcttactgaactctttaaagtcgtccatgagtcttggaatctactttttctaaactcctgttaacgttgatattttgaacaactcctgagaatcacaaaacttcttaatggcatctataaacctttccagaagatttcaattttcttttcccagaggaattactatatatgaaatccctagtattaaaagttatttattaaatgataagtcttgaaagctaaaattcttgatccatggcagcaaata

SEQ ID NO: 821904 - DNA, 526 bp, Homo sapiens
agaaaaacaaatggaaacacatcctatgttcatatatgggtagaatcgatattgtgaaaatgaccataatgccaaatgcaatctataaattcaatgcaattcccatcaaattatcaccatcattttcacagaactagaaaaaacaatcataaaatttacatggaacaaaaaaagagcctgcatagccaaagcaagactaagcaaaaagaacaaatctgcaggtatcacattacccaacttcaaactctacttcaaggttatggcacttgtataaaaataggctcattgaccagtggaacagaatagagagcccagacaaaaagtcaaatatttacagccaactgatcttcaagaaagcaaacaaaaagataaagtagggaaaggacatcctattcaataagtggtgctgggataattggcaagccacatgtatatagaatgaaactggatcctcatttctcatcttatacaaaamtcactcaagatggatcaatgacttaaatctaagacctgaaaccataaaaat

SEQ ID NO: 821905 - DNA, 521 bp, Homo sapiens
ctgaatgtcttttcaatcctagaatattcttcagcactatgtatatatacacacacaygtgtgtatatatatgtgaatatgtgtgtgtatatatatacacacatatatagttttgaagaatattctagaattgaatatatatatatatatctcattctagaagcaaataattgagaaatggaaaatttattattttatttattttttaaaatattttaaaacatagttatacacacacatatgtggtcttttagaatacacgtctaaatatccatctgtatctatctatctatctttaatcactcacagggtttttatttgtcaagtgccccaactgacttcttaaaatttcctatctctatgcctaacgtgttttgttgcgtttgagctcttttcaccaagctgtctcatctattacttttctttccatgtttacatttatatctccatgtttatattcatgctattttattttacatttttgtatatttcttgattacattctgtaatatattttttcc

SEQ ID NO: 821906 - DNA, 581 bp, Homo sapiens
atgattttatcttagaatataaaatccttaagggtcagaatctcttcagtttccgtaagtgctatatctgcagtgtctagcattcttgtctggtggcacttacattttgttgaattgatgttcaattaattaggrcattgaatccaggcttgacttccaaatattttcattgatagagagaagccacagcagttctagagaaaagagaagtaagttcactaaggaacttcaaatgaaattaatatgaatgattttggagaacactcaggaaccatttatgtatttcacaattatataaaggctctttattagaaaaatgtaaaaaaaaaaaaaaaaagcaactgctctgtattgtcacaaacttctaaatcaaaaggagaaacaaagaagaggactttcactggccctaaagaagaacttgaactatcttcaggttctgggaagtagtattttcagcgcccaacatattgtgcctttcttcagctaccctacctttatcaagagggcagagactgttggttgcttacccggtaactcttctccccttcatggttagtaacagaaccctgattttatttcag

SEQ ID NO: 821907 - DNA, 581 bp, Homo sapiens
atgattttatcttagaatataaaatccttaagggtcagaatctcttcagtttccgtaagtgctatatctgcagtgtctagcattcttgtctggtggcacttacattttgttgaattgatgttcaattaattaggacattgaatccaggcttgacttccaaatattttcattgatagagagaagccacagcagttctagagaaaagagaagtaagttcactaaggaacttcaaatgaaattaatatgaatgattttggagaacactcaggaaccatttatgtatttcacaattatataaaggctctttattagaaaaatgtaaaaaaaaaaaaaaaaagcaactgctctgtattgtcacaaacttctaaatcaaaaggagaaacaaagaagaggactttcactggccctaaagaagaacttgaactatcttcaggttctgggaagtagtattttcagcgcccaacatattgtgcctttcttcagctaccctacctttatcaagagggyagagactgttggttgcttacccggtaactcttctccccttcatggttagtaacagaaccctgattttatttcag

SEQ ID NO: 821908 - DNA, 575 bp, Homo sapiens
tttaattaaaccattgtgattctgcttttggctgttaagtcagatagtgataactgaaactgttaagtcagatccggaacttgaggactccagggtccagtggagtccagtggttctagtgtcaggctctctgtgccttatctcatgggaaccttctgagaaccaggaggtagtggctgagatttcccccactagagatgaagggacctgcctcggttaatgagtagtagcaccagaacctgaatctagcccagactagacccaaagccagtgattctaatcaccatgcctcatcacttactaatcgcatagtagctaatacctagtgtagtggatactgtaatgtgccacccaggaccccctggaagaatgaaggattcacacccccagctgatgatagtattgccagagaatatctctctgctgtcagtctctccaacaattgactgaggctgaaaacaacwgccttgcccaaggtcaatttccttccaggagccgcccacatctaatactgattgtttcaatgtgcaacagtactaaagggtcattccggcaggagacctggctgtaaggtt

SEQ ID NO: 821909 - DNA, 387 bp, Homo sapiens
agcatccctggctcctacccactagaaaggcgaagtagcacccccacccccttccccatttgtgacaagcmaacctacctcctgagactgccaaatgtccacgggagcagaagagaggggtgcaaaaatcacccccagttgagattcaccaatcgacataaatgtcagcttcttagaaagtattttcctggccacttaaactaaaataacccccttgcctcatcaacatcactctctgttgctttgccccacttgtttgtggttgtccatagaaagtgccactcactgaaattatattatgaatcagttgactggtttgctggctgtctccccagcttgcacgtaagtctcacatgagcagaggccttgtccattttgttctctgct

SEQ ID NO: 821910 - DNA, 612 bp, Homo sapiens
gagcccgggagttcaatgttacagcgagctatgatcaccccactccactccaacctatatgacagattagcaccagtctcaggaagaaagagagagagacagagaataatttagaatgtttctttcttttaatatacttcgaaacagttttaaaagctttggaattgggccaggcgcggtgggctcacgtctgtaatcccagcactttgggaggccgaggcgggcggatcacgagaggtcaggagatcgagaccatcctggctaacacggtgaaaccctgtttctactaaaaatacaaaaaattagccagttgcggtggtgggtgcctgtagtcccagctacttgggaggctgaggcaggagaatggcgtgaacccgggaggcggagcttgcagtgagccgagatagcgccactgcactcccgcctgggcaacagagcgagactctgtctcaaaaaaaataataataataaataaaaataaaagctttggaattttctgttcctttatgaattttctgcgaaactactttatttctattgyggtaactggtccatttggattttctgtctcttctggagtcacttttggcaaattatatgtatctaactatc

SEQ ID NO: 821911 - DNA, 681 bp, Homo sapiens
ttgttttaccttgcacataaactgcatgcagggcagaagtccaaaggtgataagtgtataaagttcaagcctgattactgcttgtgacaaagtacattgaagattaatccttaaagccacactaagaaataccccagttaagaaatatactcagagataggaagattggttctttcaaaaagtataaccaaaattggcgtgcatgcgtgtgtgtgcatgcacacgcgtgcacacacatgcgttttcgtacagcacatctggttttaactgaaacacattcacaataggaatcatgttctatttaaacatatcctctgtagatcaaaaaggatgctaacattatctttctaaatcattaatgagcaaaagttgtaaaggttgaaaaggttgatttaaacaaaatttcccacactaaccagtactagccagtgggcgtctctggaaaatctcattcagaagagtttagtgacttggcaatggttccttctgaatggctcattcaggaagcaaatgatccattatctttgcaacagaattttcctttaagctatgtgactaatcctcccaacagcctgggttttgyccacatgttcttgtctagtgcattccccgcacattcctctcctttcttattcaagcccatcagaaaccaagatgtagtctaccaaagattagattgtc

SEQ ID NO: 821912 - DNA, 562 bp, Homo sapiens
cttcttgattatgtggtcttttgggaaggatgtataaagagttttggatccatgtggctgccattgtycttcaaactgaaagctcctacaaggaaagttatattctccctacttgtagatacaaaacgaagattcagaaaggctaaatgacttgaccaagatggcacagatactaagtaccagaatataagaagaccatattcttttttgtatatctgtgagaaagtttagtcccatcttatgaagtttacttatagcggagggacaatgtaagtttccctgatacatttttaaagtattgtagggaagtgaaggtgctctaaaaatgtttaataatttgtttaaaaaataaaatttcagatttggttgtggatatgatggtatatgaatatttacaaacttaaaagtttgtatggctttatcttttcacagtgaaatgacagtttttttcctgtgatttttttttcttgatgcatattgttgaaatcaatgaaaaacaaacaaacatataatccaatttgtaaccctgatgttagttgttttggggttaggaaaggacagc

SEQ ID NO: 821913 - DNA, 665 bp, Homo sapiens
ttttttatttttgctgcggatctcctatttacaatggactccattatgagattcttcttctttgttggtrtattaaataaacatattaccttattttaagtttcgataaaatactgtggaagactttgccaaattttatatgattgtgacaagttttttggggtaggtgcacttttttgtttgtttctttaatttttaaaaggctgcaaacacagctcatgaaggctggtttcttttatctctgaggtatgggcctgggagtatgtgagtcatgcctaggaaatagaagcaactgatccaagatataacattgaaagtagttgaattctattttgagatgggtctgataaccacaatgtaattctctttctatttgaggaaaatataaattttagtatttcagagcatcagattttttgttaattcacaacactttccctctagaaattcagcacctgcatcgcccttcttagtaagtttggttttatttgggggcagctatgattaagcagataacattgggtatattgaaataaaggaacaattcctaacattttaggaatactacaacagctatttcctttcctttcaggtgatgattttcatacttgtgttgtgttctttctacagaacaaagactaaataatgacataatcctcagctga

SEQ ID NO: 821914 - DNA, 642 bp, Homo sapiens
gtagactggttatggcaaagaataaaaagtgggaaaaagtgtttcagtaaagtgagcacacaaatacacgctgattaaatgcttccctcacaaacagccgcagagcccctgctttatctctatcaatattatcaaagcacacctttcctaaggctctactggaaattccagttacaatcacgtattagctactttattttcaggcatttttccctctaagagctgaatggaaaactcaagctgaatgcattagtgaaatgatggaaaaaaaatccgtgcattacaactaattcctgataaccattcaagacaaattctgaatatggccagagaagaatatctgactgtagttatcttttaggctaaaggtctaggcagatgttttgcttaagcaaattttggttagaacaatgatctttaacactggtaccctcaggtccacattcaaggacagttatgagggaaacaaattccatattttcactgtatttactctctcaaattgcccaagaatgtatgatgtatcttttttcaaaagtcctcccattttaccaaagattgcataactgttagccaacataaatatcattactgcattgccctgagaatagacatacwtccaagcaccaaagggataaagct

SEQ ID NO: 821915 - DNA, 594 bp, Homo sapiens
gtctttgtgatttcttatttatttgagaattgtctattattttttaagtggacttacatatagtaatttattggtaaatgcttcctgaagattagttgactgaatgaatggattacccaacagatgaattgttatctcacagacagtttacattcaggtaatggtaaaaccatcttttacctgtagaaatgaaaccctcatagtaagacatactttcttaaagaattttgttattccaatctaatatattatgaaggtattttacacaaacatgatagtattttgatgcaatttgaaaattatgcttttaccagtggtttagaaaaactgtgtattaatctgcaaatgtgagtaaccattaacatgtttatgagaatgggtctgaaggaacaagtccactacaatattttaaaacactattgaaattgttgcaaaaagggattcagcctatacttgatatttaagtaatctgttaattagcatcctgtttggctataatacttttggttagtttagaatacattaatacaagcrtcctttgttaattaaaggtttagtttattaacaataaacaagactgtattagttcattct

SEQ ID NO: 821916 - DNA, 583 bp, Homo sapiens
atttatttagtaaatatgcaagaaaataatcagattctgctcccctttcattcattcattcatttttctcaacaaataaatactaattgtctgttttggccagaactatttcagggatgaaaaggtatccctttcttccttactttagagaaatgtagattttgtggtagaagctcagcatatctaaagacacccaaatagaatatattctacaccactttgaagtagtttgaatgtcacctgaaacagaatattacttctaatccatttcaggccatctgttttttttttgtttttcacttttctcttatagactaaatattatcatagtattagcacatatagtatatatcaatctatataacatatggtattgggaaacatttttactaatagggatatttacaagagaattatgtctcattacgtatgttcacaaattttaataaactcctgtttctgcccrttgccaaaatgtttcctatcctctcaagaaataaaactgttactttgtttttggttgaactcatagaatattttcttttttagggtaaaattattacttttcttacataagtcatat

SEQ ID NO: 821917 - DNA, 555 bp, Homo sapiens
gttttcaattatcttggatctaagagtagaattgctggatcatatggtagatgtgttttactttttgaggaaatcccgaactgwtttctggctataccattttacattcccaccagcagtatatggaggttctagtttctccacatctctttatacactctccagcacttgttattttattttatttgttttttactatagctgtcctagtgaatgtgaagtgatatctcatgcttttgatttgtattttcttgataactaatgatgctgaacatcttttcatgtgcttattggccatttgtatattttctttgggaaaatttattcaaattctttgcccattttaaaattgggttgtctctttattcttgagttgtaagaattctttacatgttcttgatagtaggccctcattaactatatgatttgcaaatattttctccaagtctgtgggttatttttcactttctggatagtgtcctttaaagcacaaatgtttcttattttaaagtccatgtatctatttttcctttggttgctcatgctttaggtgtc

SEQ ID NO: 821918 - DNA, 619 bp, Homo sapiens
accttctgctgtttgttccaggctcacctttagaacaggagacttgagcttgacctaaggatatgcattaaccactctacagactcccactcagtactgtacagggtggctgtkgtcctagaagttcagtttttactgaggaaatatttccattaacagcaattattatattgaaggctttaataaaggccacaggagacattactatagcatagattgtcaaatgtaaatttactgagcgtgttttataaaaaactcacaggtgtttgaggccaaaacagattttagacttaccttgaacggataagaatctatagttcactgacacagtaaaattaactctgtgggtgggggcggggggcatagctctaatctaatatataaaatgtgtgatgaatcaacaagatttccacaattcttctgtcaagcttactacagtgaaagaatgggattggcaagtaacttctgacttactgtcagttgtacttctgctccatagacatcagtattctgccatcatttttgatgactacctcagaacataaaaaggaacgtatatcacataattccagtcacagtttttggttcctcttttctttcaagaactatatataaatga

SEQ ID NO: 821919 - DNA, 645 bp, Homo sapiens
tctacctcaaaaaggaaaaaaaaaaaaaaaaagacgacaaacacttcttggagacagtggaacagaagtgcaaactggtgagtagaactgaggcctgttgaacttaggagttcaggtacaggggaacaaggtgggttaaaagtgtttcatctggggcaataacaggacatgggaagtggattcactgcttcaagccaggagcttaggcaggagcccactgccccattcataaaatgaggctaaaaagaaaaaaaaatagaaaaggaacagttgctacacacttcccgaggagataggagggcacaaatggagtcccaagatcaggaatgaacaaaactgtgtaacttctccttggacatgtctaccatgtccttaatatctccaccgaccaggtacatgaaaggatcattgaaatacttggttccagatcagaaatccaaggaattgtgcagggtcaaccataaaaacaattagaaaggtaaatgaggatgggtgcataagaagcttaaggaagaaaacaaagttaacaaaatagtttcaacacaaagtaagtcagaaaacaaayatctcaaacatataaaaacatctaagtttaaaagagatttttaaaatgctaaagtatttgatcagaaactctgaaacctt

SEQ ID NO: 821920 - DNA, 519 bp, Homo sapiens
ggggtagttctttttctgaataactcttggctcattaagaagaaatagttcttgcacataggccttcccagaaaatggaatgtgcctttctccttaaattcatacaggctacccagaaactcaggagttcctggaaattttattaaaattttcatataaacaagcaatcattttgagaccatagttcctggtaataatgcctatggatgcaatcaaaacatgcatttggactagaagaaagaagatgaaaaaaatgaggaagacattttcttaaagatagatttttattaaaatggctatttttttcttcattcattcacatgggatgttacagcaccattagtaaattgttattttatgagactgtttcactcaggaaatttctwaattcattacattttattagatcagcagtaatgaaccaaaaacaatatcatttatttttattactactgtaggttaaatcacaatgatttatacagccagattgaaacaatgactgtgtaattactgttattg

SEQ ID NO: 821921 - DNA, 623 bp, Homo sapiens
ctgggggcacttttaaaaattgtcaaggtcatcaggcacaagaaaagtttgagatactgtcacaatcaagaggggcctacagagacataacaactagataaaatgtgatatgctacttggtggaatcatggaacaggaaagggacattaggtaaagtctaagggaacctaaatagaacatgaattttagttaattatgcataaatattgtatcatttattgatacaattgcaacatactaatgtgacatgttgattatactctctatactttcttcaaaacttttctggccacttaaaactattctaaaatttcagttaaaaaaaaagtatcagagaagaagaagcagatgatattgaggaaaagacaacttagtaagttacattcttcagaaaaatggaagtacgcaagaaagagtgtcttgaaagtgcacaatctgcatgaggttcaaagtgtatacgacatagaagaataaaatgaatggcaaagggcatcaatgtcatagcaatggagtaactggacactgaaaagatagcacasagagagtgtagatctctgcaacattcatataaatatggacaaataacagaaaggaacagagaaaaaatgtagaagtgggaccat

SEQ ID NO: 821922 - DNA, 522 bp, Homo sapiens
catcaggctgcactctctgtgaaaatgaccaactgggatgaaattttttctaaataatgtcaatgaaacaacatttgaatgaaatttctgtgggaaccaatcaccctgattatcgatatcatcaaaataaactttgaacttatccccacatcattcaatataatgtgaaaacatttttctaaatcagctgcctatcccatctctagggttgtgataaatttccaaaggactctagtatttgaaagaatcacttttgaagtctgaaaccatgatggatttcaaaatacacatgattatttaattagttgttcactactgaagattttgctaatattacaattatgcttctgacccaataaaatgtgtttactttctccctgatcaagtttcttaaatataagyatttcatacataggatattttgaaaaaaaaattcttaaatgtctggagaagaaagctagagaatctttggcaaaactatggggagaaagttggaaaaactcacaaattccagagagatta

SEQ ID NO: 821923 - DNA, 600 bp, Homo sapiens
ttcctctggtctatgagagtttcttagactttttttttttttgattaccccaacagttctgaggggtgctggctggatatctgatagaattttcctcatttggatctgcctgatggttttctcatggttagactggtgttatgtatgggcttggagtactaaaccatggaggtaaagtgccatccccactacatcatatcaagggcatttaataacagtaataacatgacttgtcactgttgatgtgatgtttgtcaaatttctccactgtaaagttcctctttctctctttttccatatagtacccttgaagcaaatcattcagtggaacccaccctaaagaggaagaagttaagttcaagatttaggaaatattgattcaagactttgactttcttgtctcacttgccagatggccttggataaatctgtttcctttttgaaattgatttttctcatccatgaatgaagctataaatattcagcygtctgttgtaaaatatcacagaggataataaaatatagattctttggtccctaagagtgtcatgtaaatataaaatgatattatttattactactaacatcaatcacatccac

SEQ ID NO: 821924 - DNA, 648 bp, Homo sapiens
catcaaaacctaaacaaatacattcgtatggatataccctgcctgggtatcttttaacatctagaaatataattttgcgrgaagaattataagtaaagtgtttataagggcttttaactctgaatcatttctaacatcaaaatatagaaataactttaatgatgaataaacttggatcatttaaatacagtacaggccgggcgtggtggcttatgcctgtaatcccagcagtttgggaggctgaagcaggtggatcacctgatgtcagaagttcgagaccagcctgggcaacacggtgaaacccgcctctactaaaaatacaaaaattagccaggcatgatggcgggtgcctgtaatcccagctactcgggaggctgaggcaggagaatggcttgaacctgggaggagggggttgcagtgagccgagatcgtgtcactgcattctagcctgggcaacaaactgagactctgtctcaaaaaataaataaataaataaataaataaataaatacagtacagtatatctgcttgctgtaatgctgagcagctattaaaatcacatttaagaaaaatataaaatgttaaatattaggaatacaattaaatgttgtaagaaaacactcattagttattcttttaatgttacaa

SEQ ID NO: 821925 - DNA, 588 bp, Homo sapiens
tgcttgtactaaagcagagtgcctgacactgtagatcctcaattaaaaggtcactgaaaggatggactccagatgactggatggacaggtagatggatggatagacatcttaatggttgcaggtctttgttaaataggggattttattttcagaactagcgaagggattttttaagcctcccatggggaatacagtggtgttataaaagtgctagtgtggtataaacagagagtacagcatatttaatgatttagtgaatgggacaacagattctatgttttgagtgccccattatgtccctgtcctattatgctgctgggatttgtcagccacacagggtgtgccacctccttgcacagctccagggcacctgttctctttgtgttttaggtaaatagtgttcctggagttgtgcagtgggcaagttctgagcccacctttgctggggaggctctgsagcgccaggcacagcgatggacccaggatgtgaggtgagcgtgcaggctggctcgacgcacctcccacccccttgtcaaggagggaagcactcagatgacgtgttttgggaaacgttttccttcctcact

SEQ ID NO: 821926 - DNA, 588 bp, Homo sapiens
tgcttgtactaaagcagagtgcctgacactgtagatcctcaattaaaaggtcactgaaaggatggactccagatgactggatggacaggtagatggatggatagacatcttaatggttgcaggtctttgttaaataggggattttattttcagaactagcgaagggattttttaagcctcccatggggaatacagtggtgttataaaagtgctagtgtggtataaacagagagtacagcatatttaatgatttagtgaatgggacaacagattctatgttttgagtgccccattatgtccctgtcctattatgctgctgggatttgtcagccacacagggtgtgccacctccttgcacagctccagggcacctgttctctttgtgttttaggtaaatagtgttcctggagttgtgcagtgggcaagttctgagcccacctttgctggggaggctctgcagcgccaggcacagcgatggacccaggatgtgaggtgagcgtgcaggctggctcgacgcacctcccaccccctygtcaaggagggaagcactcagatgacgtgttttgggaaacgttttccttcctcact

SEQ ID NO: 821927 - DNA, 450 bp, Homo sapiens
ctgcctagcacaaacccgctgacagcctcsgtctgcccttttcctccaaagtcctgcccaggctcctcttggattgaagagtcctgagcccagccttgaactgataactgcagccagggagtgaaatgtgctgatttgctgccccaggagccgatggggtcagccctgtctaaagaacaggagctcagcacaggggaaagggcaactccccaaaggaaaactgaggtgctattaccagaagcagaagagctgccacttaaacaagcaaaataacccatgtccccacacccttcagtaccaggcccatcaatcaccttctaagcttacatatataatgcagataggacatgagagagatggcaaaggtttagataaaatgctgtgataatttagaaacatgggggttttcccatatgaagagtcagggactgcctcatggaggaagtagct

SEQ ID NO: 821928 - DNA, 560 bp, Homo sapiens
cctggcaagaaaaccctcgtgtcagcccatacctcggggggatctactggagactgggtggaggtgcagagaacaggtcctgggccccaaggggaggtgagagaaggaggctgaaagcatcctggacacaattcatccccgcggcctcagcctcacccccagactcctggagcctgggcctgacttctgtgtgtggccgcttgatgcctggcactacctgtcccattacctgctgacctccacaggcacgttctgccctcctcacctttgtgtgagaacttagcctcccctccaagagctgccgaaagggggctggtaactgggccatatctgtccacactgtcacatactgactttatgtctgaaggaagggggtttcatctccctgagcctccacttcttccactataaaacagaaaaacagaattgtaaaagcactagccgcagagattygcaggatgagggtggcctcattaatccaacactctagttaactctcatatctatgtcaacaattttcaaaggattattataaagcaaggaccatctttgataatcgt

SEQ ID NO: 821929 - DNA, 626 bp, Homo sapiens
cttggggggtgggtcctggaaccaatctgctatggacactgagggacagcagtacatcgaaagtttttgtttctgcctcgtttaaacaccacatgactctgagcaagtcaacttctatgagccttkgtttcctcatctggaaaatgtttgtggtgtaagcttatgccacatgaaatacagcttgttaaactgtaaaagattacataaagttaccattatccttcctgctaaatgctaatcatccacactgagatttgaatttcatcatgaagtatgttcatttcatttcattctcaccctggtaagttcctaaggagaaaacattataggaaacttctagagcgaaagaataaactactaatcactagagcctagcactgggctagatgctttctcatacttgaagactcatttattccacagctctgtgaggttagaaatataataatcccctttcagatggaaagaaacaggcttgaagtgagtttcagtgatatcttcgaggttacccaactgaagaaaagtcacagttctgtgctggtaaagtgactctgaagaaagagagaaaaaaaagcttgcccattactgtggtgtaaatgctcccactgtggctgatttcatgccca

SEQ ID NO: 821930 - DNA, 602 bp, Homo sapiens
ttttaatgtcatggaaacttctactttcaagactgtgttaattacacaggatgaggtggaacaaagggargatgcacagttagcaaagtacagcctattataaccagctctgtttagtttagcacctcttctgaacctggatatgtaataaatcaatatgtaatagtgacctagcatttattttttagagaactcttaaattttggtaatgcaggatttttggaatgtgagatttggccattttggatttgactatagggatggtacaggagactttgacattctagtctacataataaagaggaaaaagcagggtttttagagggagaagacctcttccttggtctgccactcactggctgggtgatcataacttctctgagctgcttcctccactgtgtggggataggggaacagtaatgcatatgaaagcacctagcactaagcctagactatattaaggatacaattttaattttagatccatttcctttccccttcccaactttccttttctttagtgagatttcactcatctcaaataaaaatccttaagactttaagaactgtacaagaatgactgtaataaccgacagatgtac

SEQ ID NO: 821931 - DNA, 602 bp, Homo sapiens
ttttaatgtcatggaaacttctactttcaagactgtgttaattacacaggatgaggtggaacaaagggaggatgcacagttagcaragtacagcctattataaccagctctgtttagtttagcacctcttctgaacctggatatgtaataaatcaatatgtaatagtgacctagcatttattttttagagaactcttaaattttggtaatgcaggatttttggaatgtgagatttggccattttggatttgactatagggatggtacaggagactttgacattctagtctacataataaagaggaaaaagcagggtttttagagggagaagacctcttccttggtctgccactcactggctgggtgatcataacttctctgagctgcttcctccactgtgtggggataggggaacagtaatgcatatgaaagcacctagcactaagcctagactatattaaggatacaattttaattttagatccatttcctttccccttcccaactttccttttctttagtgagatttcactcatctcaaataaaaatccttaagactttaagaactgtacaagaatgactgtaataaccgacagatgtac

SEQ ID NO: 821932 - DNA, 658 bp, Homo sapiens
ttgtaactttcctctcagtacattcagacrcatagactaacactagtccattaattctgtgttcttaaagaaatatcttcaggagccttctgatgctctaattgggactgagttgctatttaaacctgctgcacatctgtcatcctgaaatctctcttcatgaggatattctcaatctctctcattggattccttgtttgctgaatctcatgattttcccatttcttggttttactccttcatcttggtggacaacatccttcaataactttcagagaaggaagtatggaggatgaacttttcaaaaccttgtttatctaaaaatgtctgtattcatccttcgcaatgacctaattgtttggctaggtaacaattctagcttggaagtcgtttctttccctcagaattttaaagtcattgttccattgtgttccagcttttagaggtgctgttgggtaatgcaatgacatcctaatttttgaaatttgtgtaaaacctgcttctctcttctccttaccacaacttcaaagagtctaaggatttctttttgtcctgaaatttcacaatgatactacttgatataggtctattttcacccattaccctagtcatttggtggatcctttcattctgtaaatttcttaaattatgtgttaat

SEQ ID NO: 821933 - DNA, 631 bp, Homo sapiens
gaaatatccaacataaatattcatcagtcctttaagctgccctgccagccattcattctcttaccaaatacttagcacaaactctgggcttcacattctgctaagaactgaggtcacctataagaagatggtctctccagcataagcacctatttaacagtgtagacattggattcctaaaagtcctagttgagaaacaccactgctctgttggtttcatggtcagaaaaagagagtgttcaaagaggcaaagtcttggcttcatgaaactgttttttgttatacaactcagtaattttattgaaccaccctgcagtttgtatttcctgtttttgttctcttctgatgccagaaggcaggcacttcataactgttaaagatcaagaggagttttctttcttcatgcaatatttaggcatataggagtctgtaggataaaagaacagtttagcagcttgggggtataaaatagccttgtagaataatgaatgctacctggatgcttaagagcaaagacacactgatttggttactttttaataatgcaaggtaccttcacttctcctactgrgggactgagctaataaggctaatgagtagctgctctgcaatcgtgtaaggttcccataaa

SEQ ID NO: 821934 - DNA, 573 bp, Homo sapiens; identical to SEQ ID NO: 821587

SEQ ID NO: 821935 - DNA, 458 bp, Homo sapiens
gtttaagatgccctttgccacctctctctgctgaacccagtcaaatgccagctcttctgagaagccctccctgattgcatgggcagacataattgcctctcatctgtgcatccacagcactctgtacaagtgcctcataacacgctgaccagacgagactgatgattttgagggtagaggctgtatattattcataattgtatccccaactaagagtgcactgcctgggcacacaacctagtaggttctctgtgtgtttgttataagagtgagtgaattaattaattaattaattaactgatgaatatccgtcctgtactttcatgcaagaatcaaggagaaaaattattggtaatgatttaccatctaagtaaaataagtatgtatwattcacacttacttaggaaattcaaacatcaatggttctttaacttttctttcatcaaggatccctctga

SEQ ID NO: 821936 - DNA, 560 bp, Homo sapiens
gaaatcatttcagctctgtaggatcccaaawcattcactcactcaggactaactacatgtatttcagatgagatgtgtacttgcctacatgcaagctagatggggacagggatatggttttatttaccttgttatccctaggacttagcacactaattatgtgcttcaaaatggctagaaatataatgaatgttgcagaatcataaaatctagcccaaccttattctggctgaattccttccacagttccacaattcttctagtataactactgggagtgtgggaatggagtctgaaggccatgtgagtatttatctctatgtatgagaaaactcaggaattaaaccaaaactatataaacttgaggtttaagatatttttacacattttttatgtaaaaagtaactcatactagttgcagaaaatataaatcgtaaaacacaactctaagcacattctttctttcatccattatcaaaagactatgatttggtacagtatcatatcctggttagcccttaatagattaaaaagaactgcagaatacattttcaccttta

SEQ ID NO: 821937 - DNA, 561 bp, Homo sapiens
agcaaatactatgactaacaattaatgraactaattatatatacataataatatataatacataacatagaatatagactacagaatactatatatattatataaatgtaacacatataataatatatgtatctacccacacatacacacacacactcatatgttcaaaatacccaaaagattttgtgtttagtggttaaccaaacagaaaagcctctggcagtataaattcaaaccaagaaatttcacaagaaattaaataaaataaataaaaacttttctgatgtagtagtggttttgaaattaagggcaaaatatgataaactgcaaatcatactgaaagaaagaacttacaattcttgccatacccagttgactacactggtacttctgctgacaataatcaaaatgctgttataaaacaaacaaacgtctttaatacatccctgacacagcagtaaaaattactctggatagaaaactagcaataactgtcttatcaccttgataagagaacatctgttcagaaaatttggccctgagcagagattaaaagaaaaa

SEQ ID NO: 821938 - DNA, 612 bp, Homo sapiens
gatactccctgccccctggcagcagacttctctgcaactataccygtcctaaattctgtcctgcttcccacatgaggggtcccttctgctctctgagggtgtgccctccacttatgttctgaatcccaagccccttcctcaaggatcctgtcttatttattataccttcccttctttatgttcaatctcttccacttttctgggtctttcctatagcacatgactatgttcatggcttacatattttaaagtttgcattcatcctacccccgaccccctgctggggcactgccctatttctcttacattcttcaaagttaagtttttttcagaaataaattttgttgtgtgtatttgaagttaacaccatgatgttatggaatacgtatacagatggtaaagttgttactagagtgaaacaaattagcctatcatctcatatagtagtgtgtgtgtgtgtgtcaagaacagctaaaatctacttctttaatctatactctttaattcctaacctcctattcactgttcctccattttgccatctggctcctgctctcaccactccagcaaaactgcattccactaagtcactgatgatgtcctaattgctaa

SEQ ID NO: 821939 - DNA, 616 bp, Homo sapiens
tgtataatgcaatgagactaaaaatgtcccatcaaaattatttaaggtatgctcaataaatatggtgtacttttaaatagttatgaactttgtgtgacttttctgctaaatagataaaataaaattttcatttgtgtcgagttatctaaaaagaaatatgatgagtgagtgaaaagctggaagcccctatgggataagtatactgttagacacataaaacataaagttttatgagattctttaaactaagaatatcaagaaggcactaataatttcaaatatcttctaaaccatatatatatttaacataagagatcattgaatagttcttcattaaatagtgacatcaaaacataacacataacacaagatgtgaaggatggcaggtgtaaatggcaacactaggaaggaaaacgcttttactatcagcaacaaagacatgtgggttagaatgcttctccagcatgacggtattatacctacacactagcttattattaaaaacctcagcagttttytcattcccagtagcaatctggttttcatagcacactgttttcatagtgaacaataatgtctttacaaccatcttttatttcctccttgtcatttctca

SEQ ID NO: 821940 - DNA, 639 bp, Homo sapiens
ctaaagttttgtgcatcacttaaagattgtaggcattattctcagtataaggtgaagccaatgaagaatattaaataggaacgaaactgtctgatgtacattttsaaagctcattctggccactgtgtagagaatggatattaggaagatgaaaaaggaagtagggaggccagttaggaggctactatagttgtccaagtaccagggaggtgccagggtaaatgggagaaatggtcagcttcatcatagattgtgcacatggaacgtataggacttgccgtcagataagatgtgaagagaataagaatgacaccaatcagaaacaaaccctaggactggtatctgaacaacttggtgggtggtaggctcaaaactggaggagcaggtttggaattgcagttgagttttgattttgtccatataaatttgagatgaaaatgagatattcatgcacagaaagtagaatacagaaccaaatatgggttacttatttaaaaattttctctctgcctgcacggagcacagagtatgctagtaacggcctccaacacagtccaaactattagacaacatgggtggagtgtcttagaaggggtgttatgagcttgattaaagcagttgcaactgcttgctcaagtg

SEQ ID NO: 821941 - DNA, 639 bp, Homo sapiens
  misc_feature 33, 622, 623, 624, 625, 626, 627, 628, 629, 630, 631, 632,633, 634, 635, 636, 637, 638, 639: n = A,T,C or G
aatgcaccaagtattttaaaaagtgatttaccnaaattccttctattttcctttgttgtcttccttaaacaaatttcagtgaagatgtagtttgctcccttctgaagcaaaccagcagggagcgttattaacatttttaaaaaattaggacctttctccaggtaatttacaacaaattaagtagatcattattttagatagacaatcgtggaaagttccaagaaaataaactccacaacttctttttgttacttgcttcgtttcccttctttcaacctccactacggaatttagatccagtgaaagttttgtgttttgtaataagaacaaacattttcttatcgaaccaacaatatttgaagctaataatctcaccaataatgtatttttcactggattaaactgctggcaaacagtctatagctccgtttcccttttttcaacctccacaagcagaaatttaaatccagtgaaagttttggttttttgtaataagaagaaatattttcttattgaaacgacracatttgaagctaatgaaagaatctcaccaataatgtatttttacactggattaaaccgctggcaaatagcctaatgtttaacaattctgtcataaatnnnnnnnnnnnnnnnnnn

SEQ ID NO: 821942 - DNA, 639 bp, Homo sapiens
  misc_feature 33, 622, 623, 624, 625, 626, 627, 628, 629, 630, 631, 632,633, 634, 635, 636, 637, 638, 639: n = A,T,C or G
aatgcaccaagtattttaaaaagtgatttaccnaaattccttctattttcctttgttgtcttccttaaacaaatttcagtgaagatgtagtttgctcccttctgaagcaaaccagcagggagcgttattaacatttttaaaaaattaggacctttctccaggtaatttacaacaaattaagtagatcattattttagatagacaatcgtggaaagttccaagaaaataaactccacaacttctttttgttacttgcttcgtttcccttctttcaacctccactacggaatttagatccagtgaaagttttgtgttttgtaataagaacaaacattttcttatcgaaccaacaatatttgaagctaataatctcaccaataatgtatttttcactggattaaactgctggcaaacagtctatagctccgtttcccttttttcaacctccacaagcagaaatttaaatccagtgaaagttttggttttttgtaataagaagaaatattttcttattgaaacgacaacatttgaagctaatraaagaatctcaccaataatgtatttttacactggattaaaccgctggcaaatagcctaatgtttaacaattctgtcataaatnnnnnnnnnnnnnnnnnn

SEQ ID NO: 821943 - DNA, 550 bp, Homo sapiens
taaacaaacctactgtgctgccagtcatataaaattgtagcacatgtaattatgtacagtacataatacttgataatgataataagtgattatgtttctggtttatgtattcactgtagtaaagttatatttactataatttattatcatatttactatactatagtttttatcatcattttagagtgtacttctactcattaacaaaagttaactataaaacagtctcaggtgggtccttcaggaggaattccagaagaagtcattgttatcataggagataaaagcttcatgtgtgttcttgtccctgaagaccttcctctgggttaagacgtggttgtggaggatggtgatatggatgatcctggctctgtgtaagcctaggctcatgtgtgtgttgtgtcttagtttttaacaaaatgtttgtaaagtaaaacaaaaaattttgaaaatagaaacaagactktagaataagtatataaagaaagaaaatatttttgtacagctgtacaatgtgtttatgttttaagctaagtgttattacaaaaag

SEQ ID NO: 821944 - DNA, 507 bp, Homo sapiens
aatgtgtttatgttttaagctaagtgttattacaaaaagttcaaaaagttaaaaaatttaaaaactaataaagttaaaaagttatagtaagctaaggttaattattgaagaaattttaaaatgaatttggcrtagcctaagtgtacagtgtctacaaagtctatagtagtgtacagcaacagcttaggtctccatattcactcataattcactcacttactggcacagaacaacttccagtcctgcaagctccattcctggcaagtgccccatgcaggtataccattttttatcttttatacaattttttttgtggtatcatttcgattttagatatatttagatacacaaatacttatcattgtattacaattgcctacaattttcagtatagttacatattgtataggattgtagcctaggagcaataggctatgccatatagcctaggtgtgtagtaggctataccatctaagttcatgtaaatacactgtatgatattcaccc

SEQ ID NO: 821945 - DNA, 598 bp, Homo sapiens
tagaatgtctttcttcctgttcgtatgcctgcctgatatattgattattagtayaaatgggatagagttggggtaggagtgtgccttattaacataatctaatgtcaaattctgctacatgaacctatgttactgggctcaccacaagcttaaaatcgaaatcctgcattagtttgtcactttgaatacgtttcctttttcaaagggccctgtccaaatctcacaagactgttcagactcaggaaccattaaacacataaaagcacctcctaattacttccttatctcaaatgtcctgcctgttctttgctgttaatagacgagttgttagaaactaaaaatcctgacattatcacatggaaagaaaagtagttcaaagaaaaaaaaaaacaatagaacacaaagttctttggtgaaatgctgattttgagagtaacatagacaaagcagttattcataaatctgaggtaatattcttttcacttttatttaaagaaatgctatagtagctgaaactggagtctacaaatgtttccttcacatgtcattttttcctccaattcagatacacagacttatgattataaagttcttcaga

SEQ ID NO: 821946 - DNA, 547 bp, Homo sapiens
atacttatttgataggtaaatggctgttaacagtggtcatctaatagtgtcttactaatttttagagctttgccctaaatctttataaaatgaagtaactacatgttgtggaaagggtttgacacttattaartgcccgaatgactttctgtggcaacatttatcttatagataaaaacagccagagagataaatgaaaaataaagatgaaaaacaggaatgtaaaatagctggcaaggagaggcttagagccagaaatacatcagtaaagggagcaggtcagtcttagtcacagagaatttgtagaaagacatgtctcctgagtcccactgtgatcatgtgtactttaaattcatgtaatttggaaaattttttaaatgccacaagttttttctgttgtaactgattattagctccaataatatttccttattgataatttatatctttctagcacttcgttttatttacccccattgcaagattgccatgtgtattataattatctgtttacttttcagtttctcccactaaatgtcagttttta

SEQ ID NO: 821947 - DNA, 601 bp, Homo sapiens
gaaaggaacatgattttcttttyttgttttgttttcttttttataaacaaaaaaatatataaggaataatttatccttaaggatattttcttgagattatttccattcaatttcttagagacttccaggataagcagatacttgagctacagacctggaatgagaaaagcaatgaaccttaagagggcaggccgggtgcagtggctcatgcctgtaatcccagcactttgggaggccgaggcgggtggatcacctaaggtcaggagtttgagaccagcctgaccaacatggagaaacccatctctactaaaaatacaaaattagccaggcatagtggcacatgcctgtaatcccagctactcgggaggctgagggcaggagaatctcttgaacccgggaggctgccatgagctgagatcacgccattgcactgcaacctgggcaacaagagcaaaactctgcctcaaaaaaaaaaaaaaaaaaagagggcagagttctgtgtgcatcttctaaggctgagcatgggagtccttgaaaggggacgttgtggttggtggcctatggtagattgagtcattagcattaatgcttatccatccct

SEQ ID NO: 821948 - DNA, 650 bp, Homo sapiens
tatttctattgaccaatatcattggtgggatcataaaatgacctcaatccataactcaaaagtgtggtggaatcttgccccagggcccagaaccatcaattttccatgtgacataaataatatcgcattagaattgctatggctgggtggtcttgccctcagtcacccaaaggcctcacaggagcaactgacccggttaagggatcctgttgctaaagtatgtcatgtgacctgagcacttgctctcagtaacggagtcacagactctacaaccacatagaaaatgtttctcttgttccataactctaattgaaagcagcttattaccttagctttccatacccatatatttgtttatgggaggagccatactgaaatattatcatggctttgtcctccctgtatttttccctttctaccctttcaagcaagtagccagacaattttatgccctgtgataatgggatgcctaagaagttacagagccaaaagcagaagcttcctgcaagataattccctttcttttgaaaaaggctaagttctttaaagaggctayactcattgtcctggaggaaaaggtcctttgagaaagggtaaaaaaagagtaatgatttgggccttcattgaaaaaaggaagatcagagttccag

SEQ ID NO: 821949 - DNA, 569 bp, Homo sapiens
gcagatctctcatgaatggcttgttgccctccttgagatagcaagttctcactctgagttcaagtgagatcgggttatttaagagtctggaacctccccctcttgccatgtgatacaatgacaatgactccawtgccttccaccatgattgaaagcttcctgaggcctcaccaggagcagatgccagcaccatgcttcctgtacagcctgcagaaccatgaaccaaaataacactcttttctttataaattaccagcctcagatatttctttatagcaacataaatggactaatacagactcctatcatgacaaggacatgttggacacactgctcttagataatattaaggcaaataagactcaaaatatgttaaaagcaaaatgctggcataatgcttttgttttctaaaaccaaagacacatatgtgaattatttgttacataaaaggcacccatttgaaaagggtgatttttttataatgtgccagatttgtcattgtccttttctaacctatccccatcacagtctttccttcttaaatcttcttatcctagtataaacctaaa

SEQ ID NO: 821950 - DNA, 581 bp, Homo sapiens
acccagattcacaaaataagctcttagagacctacaaagagacttagactcccacacaataacagctagagactttaacaccccactgtcaatattagacagaaaattaacgaggatattcaggacttgagctcagctctggatcaagtagacttgacagacatctatagaacactccacccaaaaacaacagaatacacattcttctcggtgccacattcacttactctaaaatctatcacataattgaaagtaaaacactcctcagcaaatgcaaaagaagtgaaattataaaaacagtctctcagaccacagtgcaatcaaattagaactcaagattaagaaactcactcaaaaccatacaactacatggaaattgaacaacctcctcctgaatgactcctgggtaaataatgagattaagacagaaatcagaagttctttgaaaccaaagagaacaaagagaaaacataayagaatctctggggcacagctgaagcagtgtcataagggaaatttatagtactaaatgcccacatcaaaaagctagagggatctcaaatcaacaccataacatcaca

SEQ ID NO: 821951 - DNA, 621 bp, Homo sapiens
tttaggatcctttctttattcttgatctttgggagtttgatttttaaatgtcttgaggtagwcttctttgggttaaatctgcttggtgttctataatcttcttgtacttggatattgagatctttctctaggtttgggaacttctcttatataaccttgataaactttctactcctatctcttcctctacaccctctttaaggccattaattcttagatttgcccttttgagactattttctatatcctgtaggtgtgcttcattgttttttcttcttttttccttttgtctcctctgatcatgcattttgttgttgttgttgtgtttttgagatggagtctcaccctgtctcccaggctggagtgcaatggtgcagtcttggctcactgcaacctctgccttctgggttcaaacgattctctggcctcagcctcctgagtagctgggattacaggtgcccgccaccacgcccagctaatttttgtatttttagtagagatggggttcatcatttggccaggttggtcttgaactcctgacctcatgatccacctgcctcggcctcccaaagtgctgagattacaggcgtgagccaccacacccggcctatgcattttcaa

SEQ ID NO: 821952 - DNA, 466 bp, Homo sapiens
cttcaaaagtattcattggccaggcatagtggctcacacctataatcccagcacttttggaggccaaggcaggaggaytgactggggccaagagtctgagagcagcccaggcaaaatagcaagaccctgtctcttaaaaaaaataattttttaattggctggtggcatgtgcctgtactcctagctactcaagagactgagaccaggatcacttgagcccaggaagtagaggctgcagtgagccatgatcatgccactgaactttagcctgagcaacagagcaagacctgcctcaaaaaaaaaaaaaaaaaaaggattcgttgctggattcctttatataactggctccctcattgcaacttgttgtgggaagtcaggggccctgaacggagggaccggctgaagccatggcagaagaatgtggattgtgaagatttcatggacatttattagttccccaaattaa

SEQ ID NO: 821953 - DNA, 623 bp, Homo sapiens
caacatggttgtgacacaaagaaacacttggtcttctttttaataatatatctttgtatcatcaatcaacattttcttcctgttctcttcataaatggttatttctttgcttttattaattgttttcattttaaaacatttctttaaagaaactcttaatttcctggctccactgttggcattcatgactaataacgttttggaagcttccacgtattttgctacaaaggaagccagttcaggactattaatttttctcatatttattcagttatagttaatcatatgtgtcaagctaaatgagttcaaatctgaataatctaactcctctcttgttgtttttcacgtgtcttttacaaacacataccaaatatttatctagtttttaaagggagggtaaagttgtacttccatagttagctaatgagaagactttaataaattatatttaaatactagtactgattttttaatcaggttttatcagttttgtagaaacttaaaaagtgacttattttaaatttataactttgtattaaatgtacaagttagaatgtgatataaatrtatgtataaactaagcatctaaggttaagtgtgaaaacacagcaaatttatattcg

SEQ ID NO: 821954 - DNA, 528 bp, Homo sapiens
agggtgtaggagctttgagaggccatggagaccaacatgccttttgaagtaaaaattcctgcaaccacatccctggtcattagatgtggtctttgtcctctcagaacaaacagtttaacaaaaccaaagacataagcagtgttccggggactggcagtgtgcacatggaggcagggggttgtggaggcagggggctgtgcagcctggagtgtaagtgccaggggggtcctgagcccagggtgaccagggtgacccatgcgagtgggaccatgtaggactggaagtgggccatccagactaatagatgggagtgtgaagtggggagtgtgaagtggttaaataataatcataaaaagacaccaggaggaggaagaggaaggggagggagaggggaaggggaagaacgagatgattagagagacagcaagttcctcaacycccaaatctctgctgcttaaaatcccaccattaaatattcattttggggaattaagttttgtgttctctattttcatctttcagaatgaa

SEQ ID NO: 821955 - DNA, 528 bp, Homo sapiens
agggtgtaggagctttgagaggccatggagaccaacatgccttttgaagtaaaaattcctgcaaccacatccctggtcattagatgtggtctttgtcctctcagaacaaacagtttaacaaaaccaaagacataagcagtgttccggggactggcagtgtgcacatggaggcagggggttgtggaggcagggggctgtgcagcctggagtgtaagtgccaggggggtcctgagcccagggtgaccagggtgacccatgcgagtgggaccatgtaggactggaagtgggccatccagactaatagatgggagtgtgaagtggggagtgtgaagtggttaaataataatcataaaaagacaccaggaggaggaagaggaaggggagggagaggggaaggggaagaacgagatgattagagagacagcaagttcctcaactcccaaatctctgctgcytaaaatcccaccattaaatattcattttggggaattaagttttgtgttctctattttcatctttcagaatgaa

SEQ ID NO: 821956 - DNA, 486 bp, Homo sapiens
ttgtggctgttctccaagacttacacgtcacgagaaggaggagcaccgttcatgcctcatttggcaaatacccagcacggtgtctagcacagggccacaaaaggaagaggcacagtcctttctctgttggaaagacaaggaaaaagtatctgaaagtgaaagaacaaatcgaagatgaataatgaggtaggctttcgctcacgggactggccttgctcatggttggtgtcagcaggactttccctgcagaacagggtcatccacccacactggccacagaggtgccaccagtgatgctgccatctccttaaacatttgtggactcatcttggggactcaccttttgaacctcaacacattcttttgattatcctcaagatgcaaatctctgtcctttgtgggtgaatagaatttttggaaattatgggtcaaaagtgacccctarctgacacagttcattcgattcagttctgctcaattcaacac

SEQ ID NO: 821957 - DNA, 470 bp, Homo sapiens
tccaagggcccggcttctgccaatgcctccagggcagacactgtgcaactactcaggggcaatgagcaagacacaggcactggaatccagcaaaggcactcaatttactgggtcacctacggtttagagacttagtgactatctggtctcggcggccacccctgtaagacaggactaataacatgtgcctcccaggggccaggctcagggtgggggccgggggagagggtgagccagcctgcatagctgctcctccggcctgcctcccctgcccagatcaatgcccctagctcaggctcctgagctgccacacttccctcacccactctgagctcctgcagccaaggacaactcgtgccttgatctgcttcatcgccggctcagggtcaggtgctcctggagccacagggccctagagttcttataggtcgtgcctgctgtcctagargcagagcctgggaggggaccca

SEQ ID NO: 821958 - DNA, 568 bp, Homo sapiens
gcccgcatctctctatattttcaaaaattatagacatatttttatattagctgtctttaccttcattaaaagggtatcattctctacataaccttttgggacttaagtttttggcttaattrtatcttgctaagattcatcgacattgtttcagttgctgtggctcatgtgcttagcctgcttaggatattctgttgtgtgaatattgccattgattcattcatgagccatggaatcttagtgggaaaggagagaagtaaaggcaggaggggttgatggatggagaaggagtgaaggtaccaacggactggagagctccatgaggacagagagctgtggcagggcacccaggccaggaagcaaatgggcttgggggtgatatatagtcgaaggagagaatttctgatttcagaaggagtgaggctttctggtgactgtaaagttttcagggataaacgaatagctaaggccagaattctttgagatgagggtgaaggaagccagaggtcagagtgcggacataggtccctccatttttctaggatactggcaggaggtggagtggaga

SEQ ID NO: 821959 - DNA, 599 bp, Homo sapiens
tcattcattcagttatgcaacaaataggtattgtgtgcccgccctacgccargccctgtgctaggtcctaggatagggcagtgagcagacaccatggctgtcctctcaaagttcacagcctcctgggactttctacgccactggtgatggggccaagtgggaaatggctttttacaaatctgcagagagcactatttacaatagcaaagacttggaaccaacccaaaggtccatcaatgatacactggataaagaaaatgtggcacatatacaccatgggatactatgcagccatgaaaaagaatgagtccatgtcctttgcagggacatggatgaagctggaagccattatcctcagtaaactaacgcaaaagcagaaaaccaaacaccacatgttctcactcataagtgggagctgaacaatgagaacacatggacacagggaggggaacatcacacactggggcctgtcaggagttgggggcaaggggagggagagcattaggatgaatacctagtgaatgcagggcttaaaacccagatgacaggttgatagatgcggcaaaccaccatggcacatgtatacctataaacctgca

SEQ ID NO: 821960 - DNA, 607 bp, Homo sapiens
aaatgcacaggtaaagatatgcttaattttatattttaaaaaagcctggtatgcaaattgaatgcgtgcaaagcaaacaaatggaatatgttttaacctctacttattgagttccctatttggattactgctgccatcattaatccagccactcaactccagcaagaatcactgaagtctccattccttcctccccacactatccccgtccaggcattcaccaggtcccaaacattctaaggtcattctacctcaggtctccactgggaggctgcaggatggaatgggggaagtcaggattttaagacagatttggttccaatcccattgcacatgactgcattctcttgagcaaataactttacctctctgggccccaatttcttcatctataaatatacatgctaccattgaagaactgtggtaaaagtcaaatgagataacatatgtaaattaactaccacaccatatttgccayggaacgcacgatcacatggtaacaccaagaacctccccaatcctcctcttcccctcggcccctgccctaggccaggccttccaaacttcacctgctcaatgatgtcttctagtctttctgccacctgga

SEQ ID NO: 821961 - DNA, 607 bp, Homo sapiens
aaatgcacaggtaaagatatgcttaattttatattttaaaaaagcctggtatgcaaattgaatgcgtgcaaagcaaacaaatggaatatgttttaacctctacttattgagttccctatttggattactgctgccatcattaatccagccactcaactccagcaagaatcactgaagtctccattccttcctccccacactatccccgtccaggcattcaccaggtcccaaacattctaaggtcattctacctcaggtctccactgggaggctgcaggatggaatgggggaagtcaggattttaagacagatttggttccaatcccattgcacatgactgcattctcttgagcaaataactttacctctctgggccccaatttcttcatctataaatatacatgctaccattgaagaactgtggtaaaagtcaaatgagataacatatgtaaattaactaccacaccatatttgccacggaacgcacgatcacatggtaacaccaagaacctccccaatcctcytcttcccctcggcccctgccctaggccaggccttccaaacttcacctgctcaatgatgtcttctagtctttctgccacctgga

SEQ ID NO: 821962 - DNA, 611 bp, Homo sapiens
aggataataagcagtttcttttatctgtaaattgaatttacttttccaagttttatgcttattttatgttaaatatgtgcttgataaamaaaatatggtatactttttttaattaacacttttttaaaaaggacctactactaacagggaaatagcttatttttcttcaatgaaaaagctaaggcagtaaaaagggtacctacaaaataaaaagcgctattataatgggaaatattttagatgtacatgtattcattcacttattcacaaattcaaccaacatatgattacttgctatgtgccagatactgtacctgtggaacatacctttgatttatgtgcttgatgaataatctttagtgcatctgaaagaaaaaagcaagttatctttttacacagtttattctaaacttcttttcaaattattaaaatgggtggagggtggctacgaaattgagaaatgtaagtccttgttttataaccagactcatttagaaatatactatacagcaaaagaaaaattacttctgtagatcattaaaactgaagtaaaagatctttatcttttaaagccttggtctttgacacacagcagtgtgtgtgtcagaact

SEQ ID NO: 821963 - DNA, 641 bp, Homo sapiens
cctagagatgtcaaacaggtagattcctctcccattcatatctcctatccttgcccacagcccttcccttcttggacttatcagagaccarggtgctgggcagggcttcaggtggttaaaaagtgaaagttcttgagtgaaatccaaaggcgcacacctgagagctgagtgggcaaaaggtcgctggctgagtgctggggatagtctggcttggaagtcagatggacgagtccaaatctcagctccttaccccgtaacattgagcccctcagctctctgaacctctgtttatttgcaaaaccttgccaagggcttcaaacaggatatcctcataaaacaagtatgcctatttgggggactaagtgtgtgaagtgctgagttttaggagtgcagtaaatatcggatccctccttcttcacctcaggtttgcgagttaaccagtgaggggccttccaggcctagtgctcttgtagaccgaaccactagctttcctagagaaggtaactgaggcctagagagtggcctccaggttccgtgctctgtggcagagctggccttggctccaagtcccagggttcccagctcagtctcagctgatgcctcccagcctggcggtctacgctgcctgctacattccctgt

SEQ ID NO: 821964 - DNA, 724 bp, Homo sapiens
gcacaatcatcacatccagctaatttttagtttttattttttgatagagacagtcttgcaatgttacccaggctgatcttgaactcctggcctcaagtgatactcccatcttggcctctcaacgtgctggattttttttttcttgttttctttttctttttttttttgttgagatggagtcttgctctgtcgcccaggctggagtgcggtggcgtgatctcggctcactgcaagctccgcctcccggcttcacgccattctcctgcctcagcctcccgagtagctgggactacaggcgcctgccacctcacctggctcatttttgtatttttagtggagatggtgtttcaccatgttggccagtctggtctcaaactcctgacctcaggtgatccgcccgcctcagcctcccaaagtgctgggattataggcgtgagccaccgtgccccaccctcaagcagaacatctttcatcttcatttttttcaactgctcagcaacatttgctgtcttcttgaaaccgtttctgtctcccagctgctctgacactagcctctctgggtttgctcctctctcattggcttcttcttcttcttcttcttttttttttttttttagacaagatctcgytctgttgcccaggctgcagtgcagtggcaccatttctgctcactgcaacctctgcctcttgagttcaagggatcctcccacctcagcctcctgag

SEQ ID NO: 821965 - DNA, 549 bp, Homo sapiens
gtggaagggctgtgcagatagggtgtatatcccagagcatcagaaccaaggctggcgagctggaaaaggaacaccacgtgccagaagccagccacagcagacactcaagagaagctcytctcactggttcaacttgaaatataaatgaagaaagaaaacaaaatcacacactcacatatgcagcatccatactacccaacatgagcacttgaaacaatatttggttctggaagaagtgtccgtgggaatgactttttaaacactcaatacacaattgacacttgtggcttctctttttcaccttggaatcccattgcctaggacaattcctgccactggataaacaggtgagcagtgaatcagtgcatgaatctcaaggaaatagtgaagaattccccttctggaagcgactgcatatccagccagtcttccaaggggcagtcccgaccttcagcgccaggaatttttttaatggcctgctttgttaagaagcaggaatatgttctccactttgagaaatattaagccatcagtgataacactatgttt

SEQ ID NO: 821966 - DNA, 620 bp, Homo sapiens
tttttttttggtaggtatgtctcatgaaaagctatgtccctcaagacaagactactttttgggtattgttatgaaaccctgcactactttataagctattttcaaaatyaaacccgagcactgacattaaaataacaatgtaatgtaaaattattattattattttttttttttttttgagacagtctcgctctgtcgcccaggctggagtgcagtggcgtgatctcggctcactgcaagctctgcctcccgggttcatgccattctcctgcctcagtctcccaagtagctgggactacaggtgcctgccaccatgcctggctaatttctgtatttttagtagagacggggtttcaccgtgttagccaggatggtctcgatttcctgacctcatgatccacccgcctcccaaagtgctgggattataggcgtgagccaccgcgcccggcctagaattatttttaaaagaaatctggaggctgatgaaatttcaagtgatttttattttcttcattatgtttttctctatttcccacatttcatttaacaagacattatacattaatgaagttctagttaagagagatgagtatttttgaaaagcatatctaatatataat

SEQ ID NO: 821967 - DNA, 547 bp, Homo sapiens
ttctggggtttctgttcctatcacaggcattacytggtgctctgtctaaccactcaggttcctcttgggccaggagtcaccacttcttgagaagacccttttattaaaaaacaaaaccaaaacatcttttttttttttaaacacgagtaataaatgctcgtcttccagaaatgaaaaagtggataagaaagaaggaaaaaataatcacctgcaaccctttatccacagctaatcttctttctgcatatatacgtggtggttttttagttttctatcttctcatagcaccttattagttaacttaaactttcaaaatcacctctacatgttctctagcaagatttaaataaaaaaaaattaaattttattttattgagatggagtctcactatgttggccagggtggtggtcttgaactcctggccttcagtgatcagcctgccttggccttccagagttgctgggattacaggcatgagccaccacgcctggccaacattggaattctttttcctcgaaaatacaagaagtgtgaagagaattcaca

SEQ ID NO: 821968 - DNA, 540 bp, Homo sapiens
ctcttgggccaggagtcaccacttcttgagaagacccttttattaaaaaacaaaaccaaaacatcttttttttttttaaacacgagtaataaatgctcgtcttccagaaatgaaaaagtggataagaaagaaggaaaaaataatcacctgcaaccctttatccacagctaatcttctttctgcatatatacgtggtggttttttagttttctatcttctcatagcaccttattagttaacttaaactttcaaaatcacctctacatgttctctagcaagatttaaataaaaaaaaattaaattttattttattgagatggagtctcactatgttggccagggtggtggtcttgaactcctggccttcagtgatcagcctgccttggccttccagagttgctgggattacaggcatgagccaccacgcctggccaacattggaattctttttcctcgaaaatacaagaagtgtgaagagaattcacattcatatcccatggatccamtactaatcactgttaacatcttggcatttttttt

SEQ ID NO: 821969 - DNA, 557 bp, Homo sapiens
agtaaggccatagttagtcacctcaaaaaaggttcacgccaccttagaaatgaatagagaacacaacrgaataactcatagacagtgcaactgctcatggcccaaggatcccctggcacaattaagcggctaagcattctcagtttgcagaaggctctagaaattgctattggtgagtcactctaaagccctgtatcaaaatcaagctaggagagtgttagatacatccatctcccaggagttttcaaccacaggtctccagggccttctgagtacaaaagatgctctggcccagggtctcctgctttcttaaaatccacaaagctacagtgaggagagaaggaaggaagagatggagagggagagcatggagaatcactctcttgctcattaccagaggttattttgattcttttaaattgatagaagtactgaattacatatttttccttttctgtaatttcagtgaatatgttcactgcaattaaataagattttgcagtccattaccttgtaatggatgtagcctttgggtatttttgaaaactaaaattaaa

SEQ ID NO: 821970 - DNA, 473 bp, Homo sapiens
gctggctgagaacctgaatctagccaggttagaacctakaactagttccaaatgggcttcagtaaagtgaggtaatgaattccctttatttttgcttaagctcattcaatttggatcacaatatattacctccaaaggctttcttgtttcaattgccaccccaccaccctgcttttttttagaaataatgttgaagaaattcttacatagctctaaatttgaactaggtaaaattattatcctttcctactctaagcgtctgtgatctttgcccatagcttatgatagtctctgaaatagctttcagagtctgatacagcattcagaccttccatttctctgttaatttctcatggatacagtttcccaactgcgaaatacagacaatttatagtaaatatcttaagactggttttgtgggaatctagagagagagatttaatgtaaaccatttagtccaatatctgatacaa

SEQ ID NO: 821971 - DNA, 522 bp, Homo sapiens
agtcattcttgaacaaccctgagattacaggcagatattgaaaacatattcatcaagttgaaaggctactaagcaaaaatgatggcaattgcagaagtgtggttgaagrtggtttgctcccaggaacatgttctgttctgaagataggactgcatatgagtatgtgtgtcactatgaccagtggccccccaaaaacgtggatcttgcatgctgaactaagtaatacatctagaaagtctatctctagtcatgttatctattctaacttgttgcaattcatataacttcagttttaagaaggaagctgctgaatttttcaaaatcatttgaaagaatggataaactactttttattttgatagagaaaataattttaaaatctaacataagtaaacgacttggacacaactccaatacatctaactaggttacatctttggtttgactttaatcatttatagagcaaaaaaattattcattattcataaatttaattcactgttttctgctactgggaaaaat

SEQ ID NO: 821972 - DNA, 579 bp, Homo sapiens
cattcttgaacaaccctgagattacaggcagatattgaaaacatattcatcaagttgaaaggctactaagcaaaaatgatggcaattgcagaagtgtggttgaaggtggtttgctcccaggaacrtgttctgttctgaagataggactgcatatgagtatgtgtgtcactatgaccagtggccccccaaaaacgtggatcttgcatgctgaactaagtaatacatctagaaagtctatctctagtcatgttatctattctaacttgttgcaattcatataacttcagttttaagaaggaagctgctgaatttttcaaaatcatttgaaagaatggataaactactttttattttgatagagaaaataattttaaaatctaacataagtaaacgacttggacacaactccaatacatctaactaggttacatctttggtttgactttaatcatttatagagcaaaaaaattattcattattcataaatttaattcactgttttctgctactgggaaaaatatactcctttaatttgccaaagtgctattacttatcatttaatattcacaaatatgatat

SEQ ID NO: 821973 - DNA, 522 bp, Homo sapiens
agtcattcttgaacaaccctgagattacaggcagatattgaaaacatattcatcaagttgaaaggctactaagcaaaaatgatggcaattgcagaagtgtggttgaaggtggtttgctcccaggaacatgttctrttctgaagataggactgcatatgagtatgtgtgtcactatgaccagtggccccccaaaaacgtggatcttgcatgctgaactaagtaatacatctagaaagtctatctctagtcatgttatctattctaacttgttgcaattcatataacttcagttttaagaaggaagctgctgaatttttcaaaatcatttgaaagaatggataaactactttttattttgatagagaaaataattttaaaatctaacataagtaaacgacttggacacaactccaatacatctaactaggttacatctttggtttgactttaatcatttatagagcaaaaaaattattcattattcataaatttaattcactgttttctgctactgggaaaaat

SEQ ID NO: 821974 - DNA, 494 bp, Homo sapiens
atactctagaggagagtccctctttgcctcttccagctcctgttgtctcagatgatgctcagctgtggcagcgtcactcccatcctggcctccgtctcccctcacctctcctctgtctctctcttttgtgtcacttcataaggatacttgtcattggatttaaggcccacccgggtaatccaggatgatctcatctcaagttctttaatttaatcacatctgcaaagacccttttaggtcccattcataggggctggggattagcgcgaggacgtatattttgagggctgccattcaacccacacagttgaatggatctgagatgccctggagggaacgcgtgggagaaaaggaggtgtgggccagagctcaggggttgcaggggagccccctccttgtctctgctactgttttactccttgtagtctcttctcactgtcctctccacaacccagccgtagagatcaggcrtttgtctgtctgtcccaagatgc

SEQ ID NO: 821975 - DNA, 641 bp, Homo sapiens
ctccaaaacacaaatgtttaataagtgggagagttttgaaagcagcaccattattctgaggttgataatatccaggtttgtgctgtctcctatgggttaaaatgaaaaggatgtatcctacaggtgacgrtagggacagaggccctcccagtagtcacgttaagctagtactgacagaaaaaggaaaagcctgtccaggtggctgggcaaccctgcagcgaggcatagatgagcttgtaaatcaaaggaaatgaccaaggtgagtctcaatccttttagaggtttattttgccaaggttgaggacacatctgagaaaaaggaacacaaaatcacaggaacatctgtgatctgtgctctttccaaagagggcttgaggacttcaatatttaaagggaaagagcaggcagtaggggaaagtggaaagtaaaaagggaaggtagataaaaggggagagtagttgcattctttggggcctttgatcagcattcactgaatgcgcatgttacattcgtgaaaggaggtcgtagaggaatagtcagttatgcattcgtctagtgcttggtgaatctgcatttttacaagattaaatatagggtagaggaagcggtcaaattgcatttttctccagcgagaggaagga

SEQ ID NO: 821976 - DNA, 627 bp, Homo sapiens
ggcaatatagttatttgcatacatgcaataaggatctgttttcttttgtagcagaacacaattggataaattggttatttcaccacggctttaactggaatggtgtgctttcctttaaggratcaaacttgacttgtaaagccaataaaagccacttggagaattggcctcagatcttgtctgcaactgtccctgtaaaggtaagtaaagaatgacctgtggtaagtaaagaatgtcactttctggcaggtccaggagtcctaagttatcttgggacctcaagagaacaggaatttactcaactcatagatatttgaggatacaaacacatggccgagcttggctttacaaagtcttgtctaagattacttctatagagcagagttccatcaaagctaatttaaaaagagcctatgtgaaaaataattatttttgttgcactttatacaaataatcaggccaagtataacaaagcaaatcagccttaccatgatttgtctttagtaaaaatgagaaactggagagagaaatattatgtttcaagtactgtggtatacttgttattaaattctagtctcattagttgtttttaagttcgtttctgcaatttaggctaaccctgcttat

SEQ ID NO: 821977 - DNA, 441 bp, Homo sapiens
gctttatgactaaattttgtgtcccaagatgcttcctttactcttgattgctgaaataactacactaggttaaagacagaaagggtttgtaggtcaacattcaggaaaatagcacactgaacatgtggttttaaataatgttttaatgaagaagaatgagaaggttattttgcaagacagaggggattgtcacattacgcttacctagaattctaaggcaagaatattaatggagactcataaatcatttgttcaattattttcaaattagttcttaaaatttaaaagtcaaatacaaattataagattgaaaattaaaaattcaaatcaaaaatttttaaagcaaatatttttaatttaaatgaaatttattacacatttttatataaatttgcaattctaatrtttattatttatctagttgtcaaataattggtatca

SEQ ID NO: 821978 - DNA, 590 bp, Homo sapiens
attacagataattgaatttttaatgggaaagtcccaacrtagcaagaaaattcttacaacagcacctggcataaattggagattttggaggcagtgtgtagtgcagtgtcctgagcccatgtttttgagcctgaaagacttgcgttcagatcatggttccttcactggctgctgggtgtcctaggttaagatcctcttttatttcagtttcttcatctgtaagatgaaaataataatatctaactcattggaatcttaaaagaattaaatgtgaaaacaaatgttaaaatgctttctggagtacctggcccataaaaagcacgccataaattatagtaattattgctttgcggtaattagaaaatagtatgagagaaggaggtagaagaaaaatggcagaagttactgagcactgttaggaagcaaagcctttatggaaacgtagggccttaagttctgccgctagacaccatttgtcacagagtccacactgcctgttacatctttctctggacctgcatactgctggatccagtagagaacagctcagggcatccgcacagggaaacttgtgatttggagataactct

SEQ ID NO: 821979 - DNA, 408 bp, Homo sapiens
gaggagcatctgtgtagagaattaccatatactctcaaattattatttgtctgatgtttttcacatgattagactgggctaatatgtttttgggaamaacctcagagacaaaatattattttcactgcatcatatcaaatgtacatgctatcaaatgatttactgttgatgttaaccttgactatctggctgacatagtgactgtcagccttctccactgtaaagttacttttttccttcgttttcatactgaatgctttggaggaaagtcactcaatttgtcctgttttggcattcaggatctctttcacttggctcctgtgtccctctgaattatccctcatcattgtggtgctttgtataaaatattttcttagcatttccttagtttctgacacttaaatatgc

SEQ ID NO: 821980 - DNA, 612 bp, Homo sapiens
aaacatctcttcacctgggatcctgggcttctgrcctgtagtgcccaatctgtccacaagagggcaggcactctttgctgctttggggttgtacagggggctgtggttacagaaaacagcaagaaaaaggaagacacacaaaatatgagcaatacaaaacagcccagaagagtgggagaaggtatcctcccaccctgaagttgtgcttcctccaggatcagcataatagaggagactgttcctttgaaatcgggattagtggattctgtttgtgagaaataagacccatgtttagggaaggctgtaattgtaataaccccaaaggctggaagaggtgaaccaggcatcaggaagctgatgcgctatccaggagcagccaaggaagttcattgatgctgacagccacaggggttactgagcacaagaccggagacttggccctctgagctgttccctctcccactgaataggggccaggtagggtgtcgagagcatctcagcccccaagagcagtgcccccacaagcagctctaagatccaggtcttgttggagggcatgaagggccaggaagtgaaaagcagaagtagtggtcactgtcacagccaggtaac

SEQ ID NO: 821981 - DNA, 520 bp, Homo sapiens
ttcttgaagtagtctgcataaaaaatgataggtgccaagctccatgtatttaaaaaaagcccacgatttgcatagtagttrcattttcttttaaagaacagtgtgggccaacaaaaagtttttgtagatgtcttttttctgcaggtaatgtttgatctataatggattgtaactggattgctccccacccttggatctgttaaccttaataacgaggtcctggcaatatgatattgagcttatttgagtgcagtttgaggatggctacctgggaagacgcagactccacaaagcagacagataatcctacagcagaaaatttcaaaatgtgtgtatttcaggatgtatgcattctcttatgtgccagatagttcttctgccttactaaatagaatataatgtaatccagcctgtggctttttttctttataaacatgattctccactgggctacccctatgggataggggagctgtcttttaaaacattccagtaccacatcttttgatagcaaggtctg

SEQ ID NO: 821982 - DNA, 374 bp, Homo sapiens
gtcacccaccagcgacatgggcaatgcacagaaatgatgacccatcatcattctgagcttgcctcgcttcccccatggggcttcttctcacccagtggcctccttcatctstgacctctgttgttttgccacaggatatttttcctcacttagtttgtcctgcttgaaatcataatccagccctaaactgattatcttattcccaacctgatgctggatctcagctaatttcttttctgtttcaggcctccagagcactttttttttttttttttttgagacagagtctcgctctgtcgcccaagctagagtgcagtgacgcaatctcagctcactgcaagccccgcctctccagttcacgccattctgctgcc

SEQ ID NO: 821983 - DNA, 503 bp, Homo sapiens
taaacatttttaagcagccttacaattcattaatagtcctgtggttaaataaactatgttaaatacatactctgggccaggcacagtggctcacgcctgtaatcccagcactctgggaggtcgaggccggtggatcacttgaggtcaggagtttgagaccagctggccaacatggttaaacctcatctctactaataatgcaaaagttagccgagcgtgttgggggccgcctataatcccagctactcgggaggctgaggcggaagaatcgcttgaacccagaaggctgaggttccagtgagccgagatccttccactgcacttcagcttgggtgacagagccagactccatctcaaaaaaaaacaaaaaaacaaaaaaacaaaaaaaaawggatggaatatgatatgatgcagtagttatacaaaacaaagtagatcaatttgtactgacatgaaaacagctataagacatattttaaattgaaacaagagaaaacccaagt

SEQ ID NO: 821984 - DNA, 571 bp, Homo sapiens
aactaatcttccttgtactctttgctgactatggtgggtgtcagaatttggcacatacaggatcactggacatgaggagcttttytctccccaaaggggcacagttgacaactgaagggactgctggtaaagatcccttcacgatgtgttgctgcaatgggtgagtctttctctgctctccccaatgttcttgccttccccaccccatcgcaggcaatgcttttctgtctctctctctcctttccatttcttcccaccttttctgtcacccagggcaactgtccactcttccatcttgcccagagaccacgtgttgaaactcctggttggaggtcattccaccctactttgagtggatcaaacatgacagggcccaacctggggcaagtttgagccttgccagtttgatattgggtactaagcagagtggctaatgtctaggttttatcacatgtatttttctttttcttttctttttttttttttgagatggagtttcactcttgtcacccaggctggagtgcaatggcgcgatgttggctcactgcaacctctgcctcctgggttcagg

SEQ ID NO: 821985 - DNA, 647 bp, Homo sapiens
cccaccaccgtttctgcgctgacgccgccactgcagagagctcagtgggactcagaatactctgtcatttgctacagctgggtctggctaagctgacatggcctggggaagccagtgytgatttaggggtgattcaaggctccccaatttgagcccagtgacaggaaaggtgataaagaggcacacgttcaggttattactctgaactgcaaacttgaagagaatagcaacgagctttcctatgaagataattcaagatttaactagctctgaatccatgctatttcttgaagtacaatttcatgcagcttcattatagaaaataacactgtcataatttttatttttctttactaagaagaactgtcaaatggtggctcattcttttacgtgaatggggccattaatgaggtttcacaggtgtaacacaagcctcagattaatgtattagaaggtaaatggtttagacctgagttgttctactgctatctttcaaactatgcacaaagtgtattcaaatacctttagattgagatcccatctccttccttgtaaagtgtcttttgcttcactgtggtagacagaatactgccccaccaaagacctacatcctaatcctcagaagctgggatgttcattacgtgaaa

SEQ ID NO: 821986 - DNA, 626 bp, Homo sapiens
gtattccatgaatcttggtagcctaactttttaattaaaaagttgtttcaaaagagttcttgaatagaaactctaagtaactgcctgccaactccaactaccatgcctaaggaatcggcaatgaggagaattgaatgcagaagaaacaagattttgactatcgtcttagaggaaaagagacaccttaaaacatacagcctagagggtgggctgcatcatgatacagtgcagttgaacaacttcattctaatcgagagatcccactctgccagaagataccatattgagcctcatgccctttctgtttgtcttcacagcattaaaaaatgttttcatatattgtcaatattttttaaacagaagatctcacatagaatccagatttcagacctgtcttgaagtcgaagatatggtgaaactgagcatatatcccctgcgcccccacagctatgaagggcagacggggagtagcagctgcccctctctggatcaggcctgagttctctggttctctataatctctrccactccctaatgtctcatacactggcctgcttgtctatttgttacctccctggatcctgcagcccctttagtcagcctgtttaatccattctgcttggcaa

SEQ ID NO: 821987 - DNA, 632 bp, Homo sapiens
acacttaaaactttaataattttgaaacaagtcaaattacataactgtracatacagcagatcaccaattcacaatcatctctaccttggttcatctttacacaagtacttgaattccctttaatgtctctttagaagttcataaactatatctagatctctgctacaattttcacaattaattgaagttataccagatagtaacttaatacagtatattctcccaattttctagagtagctagtctccatgaccatttcaaaatagctattcataattcacaaaatgcctttattctttggcccttcaactaactgatttgtacacagataataaatccaacaggtaatattgtaaagtaatattgtaagaagaaagttttaagacgattaagtagttgctgtccactggaaataaaagtagacttataaggtcttattttttaaatgaaactttatgtaaccttcaggttgtattttttaaataaccttaaatgctgacaccaacattgagaggcagtgtaaaattcatggttcaatacaaatcatcctgcattaacagttgagatctaagttctggcttggctcaggtgcctgctatccctatgaccctgtgtcttagcccatttgtgt

SEQ ID NO: 821988 - DNA, 630 bp, Homo sapiens
acaagtcaaattacataactgtaacatacagcagatcaccaattcacaatcatctctaccttggttcatctttacacaagtacttgaattccctttamtgtctctttagaagttcataaactatatctagatctctgctacaattttcacaattaattgaagttataccagatagtaacttaatacagtatattctcccaattttctagagtagctagtctccatgaccatttcaaaatagctattcataattcacaaaatgcctttattctttggcccttcaactaactgatttgtacacagataataaatccaacaggtaatattgtaaagtaatattgtaagaagaaagttttaagacgattaagtagttgctgtccactggaaataaaagtagacttataaggtcttattttttaaatgaaactttatgtaaccttcaggttgtattttttaaataaccttaaatgctgacaccaacattgagaggcagtgtaaaattcatggttcaatacaaatcatcctgcattaacagttgagatctaagttctggcttggctcaggtgcctgctatccctatgaccctgtgtcttagcccatttgtgttgttaaggaatacctgaggctggg

SEQ ID NO: 821989 - DNA, 635 bp, Homo sapiens
tggctcaggtgcctgctatccctatgaccctgtgtcttagcccatttgtgttgttaaggaatacctgaggctgggtaatttactgaaaamaaaacaaaacaaacaaaaaaaaaaaacaaagaagaagtttatttggcttacagttctgcaggctgtactagaagcatggtgccagcctctgcttggcttctggtgagagcctcagaccactcatggcagaaagcaaaggggagctggtgtgtgcagagatcacacagcaagagagaggaagcaaagaagaaagggagggaggataccaggctcttttaaacaatcagcttccaggggaggaaaaatagagcaagaactcattactgcaaggacaacgccaagacattcatgagggatccgctccatgctcaaaacacctccagcaatggggatcaaatttcaacatgagatttgcaggggtcaaacaaaccacatatagcaccatttctaagtcatttaggattttcggaaactcagcatactatattttatgaaaatcatcatataatcagaatatctttcccctgacacacgcacatccacaccccaagctatacctcttctgatacaactatgttctccataacaatagtgactgtgggtct

SEQ ID NO: 821990 - DNA, 611 bp, Homo sapiens
caaatttgattaaatctataaacccacagattcaaaaatatcaacaaatcccaaatacaagaaacattattttgctccaagacagtgcatgaacaaattgcttaaaaccaataatcaagagaaaaatcttgaccgggtgcagtggctcatgcctgtaatcccagcactttaggaggccgaggtgggcagatcacaaggtcaagagatagagaccatcctggccaacatggtgaaaccctgtctctactaaaaatacaaaaattggctgggcgtggtggcacgcgcctgtagtcccagctacttgagaggctgaggcaggagaattgcttgaacctgggaggtggaggttgcagtgagctgagattgtgccactgcactccagactgggcaacacagcgagattccatctcaaaaaaaaaaaaaaaaagaaaaagaaaaagaagagagagagaaatcttaaaaaaaaaaaacaaaaaaaaaatacattatgtacagagaaaaagataagaatgacagcagacttctcatcagaaaagacgcaaacyagaaaacgatgaaacagtatgtttaaagttctgaaagaaaaaactgtcaaaaatgttatatccagt

SEQ ID NO: 821991 - DNA, 471 bp, Homo sapiens
tcaattcaattgggacttctggccctctgcctggtcccctcactgtcttcctcaaagacttagggccattcccctgtgaatctcaaatcagggcagccctcagtgcctcctctccatatcttaatcagatamgaataatcagagatgacagtatttaaagaagccttgggggatcaattacaaatagcccaatttcagttacaaaggactttcactttgatctaatatttaagtgagagactctcacctgaatacagacctgataaaaaacattagaaggattaaatgctttgcttaaggtcacacagaatgcatcaaaacttgcacttaaagtggggacctatcttttaaatctagcaatatattttttccagcaccatatcttggtagccaatggtgataacaaagctgtttttgtttttctaaaatgaaaaatatactaatgtctttatttagagtttttctaataaa

SEQ ID NO: 821992 - DNA, 642 bp, Homo sapiens
ggtgaacccgggaggcggagcttgcagtgagccgagatcctgctactgcmctccagcctgggctacagtgcgagactccgtctcaaaaataaataaataaataaataaataaataaataaataaataaataaaataaaataaagaaaatggctctagcacagtggccctattgccattcctgcctcaggaattttgcacttgctgattcctctgtttggaccactcttcccccagattgccgtatatggctcactccctcacctccttcagatctttattcatatgctgctttctcagtgagactttccctggccaccctggatgccctgtttaacattgatgcttcactccggtaccccatccctcttccctgatttattcatttttttcctgtaacacttaaaccatctaacctactcccttccctattattttatttacttatttcactgtggtaaaatatacaccacacaaaaattaccattttaatagtttgtaagttttcagttcggtggcattaattacattcacattgttgtgcaaccatcaccactatccatctccagaccttttgcatcttcctcaactgttgaagctctatactctttgaacgctacctccccattccccactccccccag

SEQ ID NO: 821993 - DNA, 642 bp, Homo sapiens
ggtgaacccgggaggcggagcttgcagtgagccgagatcctgctactgccctccagcctgggctacagtgcgagactccgtctcaaaaataaataaataaataaatamataaataaataaataaataaataaaataaaataaagaaaatggctctagcacagtggccctattgccattcctgcctcaggaattttgcacttgctgattcctctgtttggaccactcttcccccagattgccgtatatggctcactccctcacctccttcagatctttattcatatgctgctttctcagtgagactttccctggccaccctggatgccctgtttaacattgatgcttcactccggtaccccatccctcttccctgatttattcatttttttcctgtaacacttaaaccatctaacctactcccttccctattattttatttacttatttcactgtggtaaaatatacaccacacaaaaattaccattttaatagtttgtaagttttcagttcggtggcattaattacattcacattgttgtgcaaccatcaccactatccatctccagaccttttgcatcttcctcaactgttgaagctctatactctttgaacgctacctccccattccccactccccccag

SEQ ID NO: 821994 - DNA, 612 bp, Homo sapiens
cttcaaactcctgacctcaggtgatccacccacctcggtctcccaaagtgctgggattacacgggtgagccactgcactcggccaggcttctgaagtatttaaaacaatgccctatagtttctgttatagamcagtctggatttatcccgtctctgtctctgttgatccgctcctttgggacatactgttagtgtcttcatggcatctgctctggaatcatcatgtctgtatcttatctgttattttctacgttttaatgaaagtgttacactaattgctgacatctttgcatcattattgattgtcagcatttgatcacaaacatttgtgtcttcctaaagaacaaaacaccagaataaaatgataattaatatgtaaaaaaattaaaattaaaattaatgccctagactccagtaacaaattaatccatttcaaagaatagtatacacttgtataaatataatgtggactctattacaattctggtcaaatcacctctctctccaacaccgaaggaagtgactgtggcctctctcccacgctaagacaaaatctttcaataagaggattaatctttcacctaaaatggcagaacatccttctattctcat

SEQ ID NO: 821995 - DNA, 592 bp, Homo sapiens
ggctatctagacggcactaggaacttttgcaagttacttaatcactacacattagtctcctccattgtaaaatggggatagtaatcatacttatttatgactgtcggggagatgaaatgagatactgcatgcaaaaacagagtctagtccaatgtaagaatttagaaaagcatagctattattattaaaagcatatgtttttaattgaactattaggataagaaagcatatttgcctcctttcctgatgtattttgtattttgatttgatgtatagatgtattttggaaatcctgatgttattttgctgaaggctttagtcaagacagaagttatttaagctgatagctttggctttagaagtattaaatcactacacagtccataaacttactaataattgtctcttgatatttcatttgaaaatctgaacttctttttgggctgttagctttgtagtaatttcctttcatcagtgacacattagaattaatctgragtataagagaatagttcagtactcttgaccagtgttccctttgattttgtataaactgtgagcaattggccatattccacaagcaactagttat

SEQ ID NO: 821996 - DNA, 562 bp, Homo sapiens
tgctattcctttatgtttgttaattttccttgtaacagtcagacctctctgytgcagatctgctggagtttgctagacatccactccagaccctatttgcctgtgtatcactagcggaggctgcaaaacagcaaagattgctgcctcttccttcctctggaagcttcttcccagaggggcacccgccagatgccagccagagctctcctatatgaaatgtctgttggcccctgctgagaggtgtctcccagtcaggaggcaagggggtcaaggacccacttgaggaggcagtctgttccttagcagagctcaaacactgtgctgggagatctgctgctgttttcagagccagcaggcaggaacttttaagtttgctgaagctgtgcccacagttaccctttcccccaggtgctctgtcccagggagatgggagttttatctataagcccctgactggggctgctgcctttctctcagagatgccctgcccagagaggaggaatctagagaggcagtctggctacagcagctttgccgagctgcggtgggctccccccagttc

SEQ ID NO: 821997 - DNA, 639 bp, Homo sapiens
tgcatttttatgagtagaagtggtataaggataatatgcatttatatttgtgttaggttttgtcagattgccctccaagaagattgtttcaattyctattttttccaatggtgtgtgaaaatgcctgtgttctcacactcttttcaatagtagacactattattctcttataatctttaccatgacatttttgcatcttgtgatgcttgtctctgtgtagcatttgatgcttttgaccataactatcttgaaagtctttttcctgttggctttcacccctctggtacttttacactggtgattattttattgtccctgaatgaaagctgagggaatggatttaaatatagccctgaatgttaaatttatcttctaaagacaattctacagtgagtcagagtgccatagtccaggtgtgagccttttttggggcttggcttaatgggtggataaagcttagcaattttgaggagtaaatgaaagacttcttagcctgttcctattaacgccctctcttgaccattgatgatttaagccagtaattttcaaacttttttagtaatagagaaaattttttcaaaccaacagagtcattcaggggatgcagtttgaaaaccacttgtgttaatccattttttt

SEQ ID NO: 821998 - DNA, 400 bp, Homo sapiens
agagtttttattttataccaatgttctggattacatacctggtccagaaatctagacttgtacttctttttaattgcctagttgacatttcaaccttgattaaagattgacaatatttatcaccttttcctcctggaacaatttaggttaatggtgcagccttttttcctagtcaaacatgccaggaagttcagggcaaagttcaactgctccctcttgtcttatgtggtcactgcttctgagaacatccaggaagttctttctatacttgaatcatcttctcagtcctttggggctttactgctatgagtatgaacttttgtgattatttatttcagtcttcatratggtgctatcacattctacagttgtttatgtctgtacccagtaagctcttttg

SEQ ID NO: 821999 - DNA, 658 bp, Homo sapiens
tcatgaggattggatgttactaattctacacctgctatttgccaatgacagctagaaaaacaaccttgccttctaaaatgttatgttaaatttttaaaatacagaatatcagatgtatctcaatgctttaggatcaaagtagtccattgctggaaaaaaatgattttttaaatgacacattcctttgaaataaaataagcgatatctaccatttccatctctgctgatcatgtgtagtgaatcctgtcctctagagaagtagggattccatgaaggaatataaatcattctgctacaaagacacatgcacacatatgtttattacagcactatttacaatagcaaagacatggaaccaacccaaatgcccatcaatgataggctggataaagaaaatgtggtacgtagataccatggaatactatgcagccataaaaaagaatgagatcttgtcctttgcagggacgtggatgaagctggaagccatcatcctcaccaaactaacacaggaacagaaaacaaaacaccacttgttctcactcgtaagtgggagttgaacagtgagaacaaatggacacagagaagggagcaacacacactggggcttgtccgggggtgaggggyaaagggagggagagcattaggacaaatacctaat

SEQ ID NO: 822000 - DNA, 626 bp, Homo sapiens
taattttctgctccacgttttgttgcaatttctcattggccttgtcattgactccaaatggaactgagtccctttccttgcgatgcacacaaagccactcagataagcccttttgtaacaggtgtacragattgtgagaactgcatctcaaagtaaaaatgacttaaaattgaaaatcaaacattcttgttcttagaagtctttggctactccaccacataatttgaccctcttttctttctctttttaaaaatcacctttcttgtctgatccttttttttcaataacacagaaacagaaattttttcttgttttcttgtgtataaaaatttaactctctctaggcctttctcttaaatacatttacagaattccctttgcaaatccaaaactatgacaaaagcttagagactaactgacacttgaagggacctgatgaggctcagagaaaaagcaccactgtcttgaccgatttcttgtatagaagcagataggagttctattcttttaattcagtaagcattaaaagaggaaaatgaaaggatattaacaacatcttaatacttttatctctgaatgatgatccctctaaagttattttttattttattaaatttcactttcta

SEQ ID NO: 822001 - DNA, 635 bp, Homo sapiens
agtctcaaggtcagcgtgaagttctgtcagatgaaactaggatgttgctggcctaagatgtgaaactttcagaagagtttggtaatgcatcgagctgccagcttctcccatccagaggacgcacagcggggaactggaagaggcgcagcccgggctagcaagcagcgggagaggaccacccgacaccgtcaccatgcctgcatgcgctcccaaccaggggcggagtggtctgcggagtcgtgagtcctggcaagactcacgtcccctcaggaggggacatttcctaccagtccttccctggagtttgagtcaaattagaatgcaggaaatactgaatttcccaagccatcccattttaccaacaatttctttttcacttttccatcggaaagagttgatgaccagtctcttcaaaaggagagaacattggtgctgtgagtttaatctcgcggctatcacttattagccactcttggcctcaatatcctcatgtataacatacatcataataaactatgtaatacatagttatatgtattattaaatcgtattaatcattaaatatctgtatttagagatctgttycacaacaatgtgaatatacttaacgctactgaacacttaaaaatggttaa

SEQ ID NO: 822002 - DNA, 627 bp, Homo sapiens
gctcagtgcacctgcctctcatctccccgctgaagtggcaagttcaagcttttgtttagcccagggctgcctggaacactagtgcccagcaccattyctgccacctctgcccccagagcccgcacaggtggtgaagcctgggtgggtgaacctgggagagcgctggcagctctacaaaattcttcctcctgcccgtagctccctccctccacccactccagagctgcagggtccctaaaagtttcttaagaaacggggctggggcctgactgggctggttaccaggggctgccctgcaagccatccatcagaggagggagggaagacctgggagacttccagggccctaccccaccacatctgaacccctgggaggagggaggagatccagggagggccgggcccacccccgcaggactctggctggcattggtcaccaaggcctccagacactccgggcaatttgggctgtggtcaggctgcccagggctgcgggcaccaagtcgggcccctcagcaggagcctgactcagttcagcctcaggggcctcctccaggtcggagcacaggtcgtccccaggacccggggggctgggtattggggatcccggagcgccccccgcaggcc

SEQ ID NO: 822003 - DNA, 326 bp, Homo sapiens
tccccccatccccatgcagcgcgcacgggagccgggagggggcgcgggcgggcgcgcggtctcggrcgaggcgggggattcaagcgcgttataaggcgaggagcccggcgtccgagacgccgcgctcggagccgcgagggaaccgccgcccgcatgccccggcccgccgccccgccggagcccgcctgctgctcgtctaacgcggcctgctggccgcgccccgcgggcctggggtccccggagcctgggcgccctcgaggagccgcgcccgcagggagccgccgcccgggaacgagctagcccggggccccggggagagccgcgcg

SEQ ID NO: 822004 - DNA, 632 bp, Homo sapiens
tgcagcccttcattttcagccagaaggccaggcagttgggactttggccaagattaastctcttcaaacaagtggctgctatgaagatgtggccaagaacactaagaaaggatgagaacagcccctccaggggccttgggtgtccttcgaagctcccatgtgaaagctataagagttgccttgaagtagaggaagactggctccagaaacaggaataatctagtgcagtggtctcaaggtgtggtgtcaaaaaccagcagcagcatcaccccctggaaatttgttagaaatgcagattctcaggctccactccagacctactgaatcagagactcagtatcagtatttaatctatggaggaattctactctagaaatgctatttctctcccccgaagaagaatgggaccttgaaggacctactgggactagtcattcaaccttggtgtgggcctgcccacttctccgggaccagactgggccacctcctgagaaccacagatgtgccacgccttcaggaaccccatcacatgctgtccgaggaggaaggaagaggggttgagtgtgctgacacacagagtaacaggctgtttaggagagagggtggaagaaggtgagtgttcattagatact

SEQ ID NO: 822005 - DNA, 562 bp, Homo sapiens
acatttcttaccaatcctctcctccctactgctgacttctaagtctggggcaggtacaaactggggagataagaagtttctgatacaatgaacaattgaagttttaatattgtaatactaaaagaaaaaaaagttttaaataatactgacctgaacattctaatacctggaagaatgagactagtcactattatctgatctgttgaaaaagccatagaatctcaaatccaacatgtataaaaataattattgtcacaatcaactgggatttgttccaggcaggcacacaaggcaagttcaacattcgaaattaagaatcaattattttaatctgccacataaacagactaaagaagaagaatcgtatgttcttatcaatcgatcccgcaaaagctcttgacaaaatccaacacccattcttgataagaaatttcagcaaagtagagatagaggggaactttctcaacttgataaaaaactacttctaacatacwtagtggtaaaaaactggatgctttaacactaaaattgagaagaaggagaggttgtcccctgttagcac

SEQ ID NO: 822006 - DNA, 490 bp, Homo sapiens
gtcaaaacagtatggtactggcataaactcatatacttagaaaaatggaatagagagcccagaaataaacccatacatatatggtcaattaatagtctacaaagtctccaaaaatagacagtgggggaaaggatagtatctccaataaagtgttaggaaaactggatgtccatttgcaaaaaagtgaaattggatctttatcttatactatatataacaatcaactcaaaatgaattaaagatttgaacataagatctgaaactataaaattcctatgagaaaactggggaaaagctccatgatattggtcttggcaatgatttttttaatatggtgaaaaacacacaccaaaagcaaaactaaacaagtgggactacatcaaataaacaaacttctgcatggcaaagacaataatcaaagcaaaaaggcaacaaaccaaatgaaagaaaatatttgcaaacrtatacccaataaagggtaaatatccaa

SEQ ID NO: 822007 - DNA, 607 bp, Homo sapiens
gctcagaggaagttcagtaagtggtagctatatgtaactgcctagtggtagcacttagcatatgatttttwaaaaaatatttaatcatattttctcattacaaaagtaaaaaaagtcattgttgaaaaattgggaaatatatgtcagaaagataagaaaagttttttaaaaattataattccacaacctagataaccattattatcatttggtgaatatcaatatggagtgtgtgtgtgtgtgtgtgtgtgtgttttaaaccaaagcagaatcatgtcatatgcacaattttatctgtttttttcttacttaatatatcatgaccatctttctagttcctacttcttttgtagctttttatgaaaacatattataaaatagttggtatgtataacacaatataaatagcatagaaataattaagaataataaaatggacacttaggaagtcaccatgcaacttatgcagtagaaaattaccataccttgggaggcttccgtgtgaccctccctgatcacattagcccaccttcttcacttaccctcaggataccatgatcctgaattttgtgtttttcattctcttacaatttgtgcagttttacca

SEQ ID NO: 822008 - DNA, 613 bp, Homo sapiens
tttaatcacacagtctatgacctcagacaaatagaatagtttttttcaaatcttaagacttcattttgagacaggtaatattgatacaaaatgaattgcttatatatattaaattatttatagtatataaaacatacacagcataaagtaaatgctttacaaacagttacataacaacaacactgcaaaacaataattatatgaaaacaatctaaaatgtaatgtttatatgcaattgtgcagaagtatatcaatcaaatttttggttgatataaaaaagtactgaatcatccctgatgatctacatcagttggaaaccggaatgtcaataggagtcaggcaggtagcctgtgaatgaagctggatacaggaggactgtggtaggctggaactcatgcttcatctcaaggcagcagctgaagctcatctctggccaattgttgcccagagataaaactggaccactattgtaggtctactgttgttgcttttttattttgtgtggattttttttttttkagaaatgtatgattttataatattgaccactctgcataccaaacagcatacatcttcctcaaatttccctatttgttaacatctagagtagaca

SEQ ID NO: 822009 - DNA, 511 bp, Homo sapiens
cgttcctacctgcaataaagataggctctagagttgtaactgtagtaatgacattgtagtcaagatttgacttgacctataaactacaaaaaagcaaaagaataggaaaacaaatggtaccttcctttttcttgtcttttttttcctgtctctttcttcccttttccatcattctctctctgcctttctttttctttctttctttcaaagaaagttgcagttatgtctatttttaatggtgacctacaactatattttcttagagatatataaaatttaatggtagtgaattttattaaaaaacttgctgatagcattaacatttaattatattttatagttattttatttaggaaataatttttgatcttcactcttaccttatgatatggtttgcctgtgtccccacccaaatctcatcttgagttttagctcccataatccccatgtcatgggagggaccyggtgggaagtaatggaattatgggggcagatttttcccatggtgttc

SEQ ID NO: 822010 - DNA, 581 bp, Homo sapiens
gcaaatatttctaatattttgaggggtgctttttttactctattgatagaaagtttttgcacaatttttttaatttttatgaatcctaatttatttttcctactgttacctgtgcttttagtgtcaaatccaagaaatttccaaatccaatgttttaaagtattttccctatgttttcttctaagagtttttataaaatcattttcatttctttagaattgataataatgtcattgcatttgtgatttgagtaatttgtcttttcacttttttattagtctatttagctaaaagtttattaattttatcttttcaaaaatccaagttgtagtttcattgattttctctactgcttttctattgcctgtttcatttatttatgctctaattttatcatttcctcccgtatgctacttttgagtttagtttgttcttccttttcttattccttaagttttaaagttaggttgttagtttgagatctttattgttttttarcataagcatttattgatctgaactttcaacctacaaactgctttctgatgactcttaaatttgtgtgtattgttttccttttc

SEQ ID NO: 822011 - DNA, 615 bp, Homo sapiens
atgatattaagcaacatgagcaaatttgatcaaatattcattctatagcttccccctaagtgattccatccaataacaatgacactaatccaaagccaaagaaaaatagttttacctaaaatgttggcaaaggagctggaacaaatagaattaagctgaccttttaataaatgtctgtttattgatttaaattcacttttttctttttctgagcaatgctgacgaggcctgttagaatacaagcatgtataataacttggacacaaccatttttacttcttttgtgtgtcattactgaaagattgaagcaagcttcacctaagtgtagtgatgcaaaaataatagtatcccagtctggctgcgcaagagtggaggcaaacaagagcttcatattaaagtgccttctaggtagctgacatgacgcatctagtcagacgtaaataatgacagacggaaactatcatgaggtctgtgaagcatcaacatactgctatcattttctctctaaccttgccttgctagcrgctctcagccttacaggctgagagatcatttaaaaagcaaatcctaatgactctgcccactgtaacaacagtcagcaagattggcatcaat

SEQ ID NO: 822012 - DNA, 660 bp, Homo sapiens
atgaagactagaagaaataataaccaaaaacttctcagatttgacaagagacgaaaactacagactcaagaggctcagaaactcycaaacaagaaaagccaaagaagtgcatgccaacacacaacataatgtctgagaactaaagaaaagaaaatatattgaatgcagtcagagaaaaacaacatcttaattagtatgaaaaaagcaattagaatgacactgtatttctcatcataagtcattgagaaggaagtgacacaatatttttcaaatattgaaagacgactttcaattcagaatcttgtagtcagtgtgaaatacccttcaggaataaaggggaaatcaagacattgtcagatgaaggaaaactaagagaatttgtcttcagcagacctatattaaaataatagctaatggaagttctctaagcagaaaggaaataataccagaaggaaccttggagcatcagaaaggaagaaagaacacagacagcaaaaatatgggcaaatacaacaggttttccttctcctcttgagttttctaaatcatgtttgacagttgaggcaaaatttgtactaatctctaatgttattccaaatgtatgtagaggaacaaatactattatattataaattgaatatgttgaagggatgtaaagac

SEQ ID NO: 822013 - DNA, 660 bp, Homo sapiens
atgaagactagaagaaataataaccaaaaacttctcagatttgacaagagacgaaaactacagactcaagaggctcagaaactctcaaacaagaaaagccaaagaagtgcatgccaacacacaacataatgtctgagaactaaagaaaagaaaatatattgaatgcagtcagagaaaaacaacatcttaattagtatgaaaaaagcaattagaatgacactgtatttctcatcataagtcattgagaaggaagtgacacaatatttttcaaatattgaaagacgactttcaattcagaatcttgtagtcagtgtgaaatacccttcaggaataaaggggaaatcaagacattgtcagatgaaggaaaactaagagaatttgtcttcagcagacctatattaaaataatagctaatggaagttctctaagcagaaaggaaataataccagaaggaaccttggagcatcagaaaggaagaaagaacacagacagcaaaaatatgggcaaatacaacaggttttccttctcctcttgagttttctaaatyatgtttgacagttgaggcaaaatttgtactaatctctaatgttattccaaatgtatgtagaggaacaaatactattatattataaattgaatatgttgaagggatgtaaagac

SEQ ID NO: 822014 - DNA, 605 bp, Homo sapiens
agcttttacctatcaatttacttctgagatcttgcttatgatgtaattaacaaatatcttttaacataaggaaagagcacagattctctcattgttttcactttaaaatacatgccaaggctcataataatttttaggtctcaaaaacatataagacatcaagtatattttctttcttgaagtatattctcacaaatctagaagacattgttatggctcctactcactttatagattactaactgccagacagaaatcttctataaagaactgctgactgaatatgccaataagtaatcatgtctcaacaatgatgtgaggataaactacgatgagtgaaaatgtttggaattcctaaagaagaaaatgtgctgagtcatggaaagtactgatgtatagtttctcaactaaatgatggacagcaaagaatactgtgactcctataaataactctttgtttttattttaaagaaattacactaatatwtatctttttgttttccacaattgggaagtgatatctgtcatgttaagccctgtgcttctgttgaggcaatgagtgagggcctggttcttgggctctgtctcttccatactactgaggt

SEQ ID NO: 822015 - DNA, 615 bp, Homo sapiens
tctgtctcttccatactactgaggtgaactgttaagaagtggctttaaaatctttattaataaaaccaatcccagacaaaagtgttcctcagagacctttcccccactccttcctctctgacttctctgctcctggtacccctgtctcccagcaagctgtgacctgggtcctattcccacaaggcctcctcctaacctttagctactaactcttgctatttttaccctttctgtatgttttggcttaattctgaaaagcctccaataaacaaaagagatcttttggagcaaaaggcacccaacatttcaccatcgatgtcccattttccttagggcactgctcataagacattacaaacttgcctttctggttaaatcagtatctggcatgaaagacaattgaaagtcaattcatctagagcaatgtctcaaggtactgccctcccatgggaaaagggatcccagagattatgaactcagaggaaagctgccacattttgatagactggaaagttccagrcaatccttagataatggccctgaaggaaggcccaaagaaaaggcttatgggcctgtttgtttaccccataattggtctaccctactcaacgtgtg

SEQ ID NO: 822016 - DNA, 615 bp, Homo sapiens
tctgtctcttccatactactgaggtgaactgttaagaagtggctttaaaatctttattaataaaaccaatcccagacaaaagtgttcctcagagacctttcccccactccttcctctctgacttctctgctcctggtacccctgtctcccagcaagctgtgacctgggtcctattcccacaaggcctcctcctaacctttagctactaactcttgctatttttaccctttctgtatgttttggcttaattctgaaaagcctccaataaacaaaagagatcttttggagcaaaaggcacccaacatttcaccatcgatgtcccattttccttagggcactgctcataagacattacaaacttgcctttctggttaaatcagtatctggcatgaaagacaattgaaagtcaattcatctagagcaatgtctcaaggtactgccctcccatgggaaaagggatcccagagattatgaactcagaggaaagctgccacattttgatagactggaaagttccaggcawtccttagataatggccctgaaggaaggcccaaagaaaaggcttatgggcctgtttgtttaccccataattggtctaccctactcaacgtgtg

SEQ ID NO: 822017 - DNA, 598 bp, Homo sapiens
atatgaggcatccgtaacacttatagagactcaaagttctgagaatagagggaaccgtaggaaaatttctgcttcagtagaaaactaggcattgcctatcaagcttgtctaacccatggcccgcgggccacatgcagaccaggacggctttgaatgcagtccaacataaatttgtaaactttcttaaaacattatgatttttttgtgaatttttagctcatcatctattattagtgttaatatattttatgtgtagcccaagacaattcgtcttcttccagtgtagcccagggaagccaaaagattggacacccatggtctagatcctagaggatacttttccagtttgattctagcctgtcctcgtctttggtctatttacaactctgtaaattgtgaataactgataacaatgtacaataattcttgtctatagatttgcaaattctgtcctgttcaaaaagttcaattkcctatcaccaactccttgtgaaaaaaccagttttgccttcactttcacattcatttcaatgttatctacaacatgtgtattctttagattatcttttaagagtcatgaggcactcaaaagagtgtg

SEQ ID NO: 822018 - DNA, 620 bp, Homo sapiens
gccattttatttttatgcatttttttcaatattacttattaagaaaaatatatatgacttactgaagctttttggttatttgaagaaatgaaggttyagttttcctgttaatttgttaacctttttttttgtttatttcctatttatttttacccatttgcaagaaatttgtaacattttgatatatatctgttacagattaaatacctgacagtaatctccacaatatatttattaattgccctttgcttatcatatggtttggctctgtgtccccacccaaatcttagcttatatctcccataattcccatgtgttgtgggagggacccagtgggagataactgaatcatgggggcaggtctttcctgtgctgttctcatgatagtaaataagtcttataagacctgatgggtttataagaaggagtttctccgcacaagctctctctttgactgctgccatccatgtaagacgtgatttgctcccccttgccttctgccatgtttgtgaggcctccctagccatgtggaactgttaagtccattaaacctctttttcttcccagtctggggtatgtctttgtcagcagcatgaaaatggactaatacagtttatatc

SEQ ID NO: 822019 - DNA, 576 bp, Homo sapiens
tccagctatccctgaagaagcaaggagtaaccatgttcttagatgttcccccaagtctatctgggtgttttcccctgatggcactctccaggttgaaccccaagtgaaagaagagttaagaacactcaggtctgactttttgtcgttctttctccttcctgcccagaaaggcttcctacttccccttcctctttaatcagaactgtgcctaggtcatgtcttccttctctatgtagcacttgccttcctccccttccccttccctgggaaagtgatactggaatggctgcagagaaagaaagtgaatttccaagatgagaaaccaattgaaaagtgtcttccaaatagtgacctctatggcccagcatggtggctcacgcctgtaatcccagcactttgggaggtcaaggcaggtggatcacgaggtcaggagttcaagaccagcctcactaagayggtgaaaccccatctgtactaaaaatacaaaatttagccgggcatggtggcaggtgcctgtaatcccagctactcgggaggctgaagcaggagaattgcttgaagcaggagaattgcttg

SEQ ID NO: 822020 - DNA, 576 bp, Homo sapiens
tccagctatccctgaagaagcaaggagtaaccatgttcttagatgttcccccaagtctatctgggtgttttcccctgatggcactctccaggttgaaccccaagtgaaagaagagttaagaacactcaggtctgactttttgtcgttctttctccttcctgcccagaaaggcttcctacttccccttcctctttaatcagaactgtgcctaggtcatgtcttccttctctatgtagcacttgccttcctccccttccccttccctgggaaagtgatactggaatggctgcagagaaagaaagtgaatttccaagatgagaaaccaattgaaaagtgtcttccaaatagtgacctctatggcccagcatggtggctcacgcctgtaatcccagcactttgggaggtcaaggcaggtggatcacgaggtcaggagttcaagaccagcctcactaagatggtgaaaccccatctstactaaaaatacaaaatttagccgggcatggtggcaggtgcctgtaatcccagctactcgggaggctgaagcaggagaattgcttgaagcaggagaattgcttg

SEQ ID NO: 822021 - DNA, 628 bp, Homo sapiens
caattgttgcttggttttaaagaayaaaataatacataatagggagtgaatattgccctccacttatattaaggaaaagaccaaaagataatgccagtctcctaattataactttatagtttttcagtttagtaaaggtataataacttgttctgagtggcttctggtagagaacatgtctcataactgtcttaattttgctggatcaaacagtaaatgatccaattaaccaaacacttgactagggttattctctctgcttcagagaaaaaaacgcatgacacaaaaaaaatgatttaaaataatttcagtttctctatgtaataaatactcccaagaattactgttgaataaaaagaagttttaagtgttttataaggtaagtgctaaacctgactccttctaatttatttgaactcctccaagataaattaagtttaaaacagaacaattcataaaatttatgtcttcccaaattataatctaaaatcattaaaacaaacaaacaaaaaaccccaaaccttcatcagtttaaaattgtttaaaataaaagtgatagaaggaaggaaaaattaccctccatcaaaaggtagtgggaagaaaagctgcattttcatctataattcta

SEQ ID NO: 822022 - DNA, 321 bp, Homo sapiens
tcccgagtagctgggactacaggagcccgccaccacacccgactaatttttttttgtatttttagyagagacggggtttcaccttgttagccaggatggtctcgatctcctgacctcatgatccgcccgcctcggcctcccaaagtgctgggattacaggcattggccaccgcgcccaggcccaactcttaatttttaaaggcttctaatcattttataataatatctatatactaatcaattattacataataactagaaaaatatttaccaggtcctcgatattgccatagatattcttcttcatgcctgatgcgcgag

SEQ ID NO: 822023 - DNA, 519 bp, Homo sapiens
tttgggggcatttcacattttgkttttttgcaggatattcaacctgtatatttttatttgtttctagtatactgatattttacttttctttataaaatttataaagtactttaaatctacaatgaagtgtataggacggaacaattccctgtgaatctacttcttagattgcatatcttaatattttggtttcttccaatccctcttttttcccccagaaaactttttacttttctacatgcagtcatcatctactgagttagtacgctggtgttcgtattccatgcattgttagctagtaacccagtttatgttatactatcactcagtcattcacaattttttttattttttaagtcagatttctcaagttgaaatgttattcacaaattttgatgctaaattttaacaaggggaataaatcctttcaataaaaaaattatcaagtcatcagcctttgagtagtagaaatagtttggcagcggctgggcgcggtggctcacgcctataatcccagga

SEQ ID NO: 822024 - DNA, 670 bp, Homo sapiens
gggggcatttcacattttggttttttgcaggatattcaacctgtatatttttatttgtttctagtatactgatattttacttttctttataaaatttataaagtactttaaatctacaatgaagtgtataggacggaacaattccctgtgaatctacttcttagattgcatatcttaatattttggtttcttccaatccctcttttttcccccagaaaactttttacttttctacatgcagtcatcatctactgagttagtacgctggtgttcgtattccatgcattgttagctagtaacccagtttatgttatactatcactcagtcattcacaattttttttattttttaagtcagatttctcaagttgaaatgttattcacaaattttgatgctaaattttaacaaggggaataaatcctttcaataaaaaaattatcaagtcatcagcctttgagtagtagaaatagtttggcagyggctgggcgcggtggctcacgcctataatcccaggactttgggaggccgagacgggcagatcacgaggtcaggagatcgagaccatcctggctaacacggtgaaacctcgtctctactgaaaatacaaaaaattagctgggcctggtggcgggcgtctgtagtcccagctactcggcatgctgaggcagg

SEQ ID NO: 822025 - DNA, 622 bp, Homo sapiens
aacatctacatgattgtattaaccatcccaccaccgcacactccagtcttctcctatctcaggacctgcctcaataaattaactcatacatttayaaagaaacaatttaaggtcctctttaaattgttattttgtaaatcataaatgccacagtcctggatattgggcaggaggtcaggtcgtcaagaccagagataagactggcatcagtaacaccaaaggctttgcagaaattggaatggatgagatcagctagaaaagaacagactggggaaaaggaagtgtgaccagcagaacctcagcatctatgtggccaggacgggggtgggggcagaggaagagacggagtagcaatagggaggaggatctggtcatccagggcattctaatttccttcagaatcgccatgcagaggtggaggacaagtggtggaggtcagaggttgctaaggaaatagaagtgatgagagtttagcggtgacaaagtaaaaagtaaagtatcgaggacagatacttaggttagaaagcttgagtacaagtcccgtctgatgcttctggctgtcagaaccacctgggtaagcttttatttttttatttgatttgttctttattaacaacctctg

SEQ ID NO: 822026 - DNA, 622 bp, Homo sapiens
aacatctacatgattgtattaaccatcccaccaccgcacactccagtcttctcctatctcaggacctgcctcaataaattaactcatacatttataaaraaacaatttaaggtcctctttaaattgttattttgtaaatcataaatgccacagtcctggatattgggcaggaggtcaggtcgtcaagaccagagataagactggcatcagtaacaccaaaggctttgcagaaattggaatggatgagatcagctagaaaagaacagactggggaaaaggaagtgtgaccagcagaacctcagcatctatgtggccaggacgggggtgggggcagaggaagagacggagtagcaatagggaggaggatctggtcatccagggcattctaatttccttcagaatcgccatgcagaggtggaggacaagtggtggaggtcagaggttgctaaggaaatagaagtgatgagagtttagcggtgacaaagtaaaaagtaaagtatcgaggacagatacttaggttagaaagcttgagtacaagtcccgtctgatgcttctggctgtcagaaccacctgggtaagcttttatttttttatttgatttgttctttattaacaacctctg

SEQ ID NO: 822027 - DNA, 659 bp, Homo sapiens
cataggatggaggacctgtgccaggtgtagaaaaccaagaataccagactgtagatcactctcacccatttgctcacctgtaggacagaggcaagccaagactagaggctaccacaccagctacccagagcttacagaagtagttcagagattttgcccaggggcagtccataaaaaaaagagaacttcaaaggtctggccgaaggaactgactttatttaaaacatagtgtggcatagtgttagcctacgagtgctctagaaaacaataacttattttaattaacagcaataagcaaaaccatagattagctagttcaggaagagagaggtaaagaagagccctcttggggtcagaataaacctccaaaactggcctcaaaagctacccctgggagaattctggtaagatgattgattgtgaagcaccagaaatctgtctccccacctagacaacaattacactgacagaatatgtctgctgtaactattttggaactctggatcgatggcttagaacataaatcatggtgaattttggtcaatttcagctgtgagcacagtagctgttagctactcrtcacccacacccagccctatgtcagagagtccttgcacatgtgcctgcagcagcttgcacacagctagtgggatccaaag

SEQ ID NO: 822028 - DNA, 591 bp, Homo sapiens
ttctgttgctcattcacatgtttattcattgatccatcagcccctcgtgtagtgctgagagcacaccaggcattgattggacatcatggggactctgggcagggaagcctctgaccctgtcctcatggagctcaccatgtaggagagagatgaagacagtactccgaggcaccaggcaggatttgcaaggtgccatctaagcagaattattctagagaatcccaaggtgctcaggagggagatcattgttttccctgaggcagtaggaagggcaggagatgcaagaacaggccctggactcaggcagacccaggttccaaccctgcttgcacactctgaactgggtagctttgagccaatcactggttgtctcatgcagaagatgggctaccagcacccaccccagggatgctatgggctgacaaccaacatatcatctatacctgtgggtggacttgcatggaatcggggctggggatccccccacggcctgtgtgcccaggagcctgggctgaggggcaggaggaaagagcatcatcctggcacytggtcccaggagccttctctgtgccagatgccatcctcagcccg

SEQ ID NO: 822029 - DNA, 591 bp, Homo sapiens
ttctgttgctcattcacatgtttattcattgatccatcagcccctcgtgtagtgctgagagcacaccaggcattgattggacatcatggggactctgggcagggaagcctctgaccctgtcctcatggagctcaccatgtaggagagagatgaagacagtactccgaggcaccaggcaggatttgcaaggtgccatctaagcagaattattctagagaatcccaaggtgctcaggagggagatcattgttttccctgaggcagtaggaagggcaggagatgcaagaacaggccctggactcaggcagacccaggttccaaccctgcttgcacactctgaactgggtagctttgagccaatcactggttgtctcatgcagaagatgggctaccagcacccaccccagggatgctatgggctgacaaccaacatatcatctatacctgtgggtggacttgcatggaatcggggctggggatccccccacggcctgtgtgcccaggagcctgggctgaggggcaggaggaaagagcatcatcctggcacckggtcccaggagccttctctgtgccagatgccatcctcagcccg

SEQ ID NO: 822030 - DNA, 552 bp, Homo sapiens
tacaggatcctgcctaggatcacatatggcatttagttgtcacatctctttatctcttatctggaaaatatcctcagcttttatttgcctattgcaaagttgatttttctttttcttttctttttttttttttttttttttgatactgggtcttactctgtcacccaggctggagtgcagtggcatgatctcagctcactgcagcctcgacatcccaggctcaagtgatccttccacctcagcacccccgagtagctgagactgcagtcaaggaccaccattcctggctaatttttttttactttttgtagagacagggtctcactatgttgcccaggctgatctcaaactctgggttcaagcaatccccccaactcgatctcccaaagtgctgggattatacgagtgagccactgcacctggctgatgctgacattaaaaaaaaaaaaaagtacagaactttaaataaaaagaatgtactcattttaggatyagctttctgcaactctggctagaatactacaccaataactttgtatccttctcaggact

SEQ ID NO: 822031 - DNA, 591 bp, Homo sapiens
ggatccgaggccctccccatgaatacacagtgagctcgaggcagcctaggtctggacttgagtcccctgaccacattagggcccatgtggccattttaatgaggcgaaggaaagacccctgagacattccttsacctgatcacaggtacctgaaattccttcacctgatcacaggtccctgaaattcccgtcaaaaaggacaaagtctttttctctcaaactggcaacagactgagaattaacccacaagaccatccctaccctcactgatgctaaccaggggcaccctctgagcagagaacatgaggacaggtaggaggtacctgcctggggtcggggcacagggagaggctcatactccaggtagggacggaaagtccacggagggcctacaagggctgtcaaggactccccagtattccactggtctgctaggaaggctgggagcaaagccaagcaaagaggcagatgttaccaagattgcttcgcacttcaaactctctccaaaaccagcaggaaaatgttgtctttcagaatagtctctggggaaaacatgtatagtcaggctcagggggatgaaggacctcgccc

SEQ ID NO: 822032 - DNA, 441 bp, Homo sapiens
attgctttttccaaggtcagtgtcccataaagactgcaccgttcrccatgagattaatgaacacagcagcctgctcagcctgtgactcaccagtgtcatcccgggcctttatgactctgtcctcagtcattcactgagacgggtgggttgagcagaaagatattttcttcttgattcttggcacagcacccgaggttcacgattcatagaggattggctttgtttgttttttgggaagaaccttctcctccctctgcaaacatgctcgtttcttttcagagcctagaggaaggaggagacttccgaaaggcatgtccacctgccccctgggatgagatgctgggtgggcccagcgtcacccaccaggcaacttgtccttcctttccacgtgggtccacactgcctctccatctccagggagctcttccttaaaaccggctg

SEQ ID NO: 822033 - DNA, 642 bp, Homo sapiens
attatagacctaaatgtaaaacctaaaactaaaacttctagaaaaatacataggagaaaatctttgtgaccttggattagggaatggactcttagaacaccaaaagtcatataacaccataatccataccagaataaaatgataaattagacttcatgaaaattaaaaacttctcttctttgaaagacactgttaggagaatgaaaagacaaggcacacactgggagaaaaatctttgcaaaatgtatatctgatatccaggatataggaaggactctcaaaactcaataagaaatttaaaaatgggccagagatttggacaatcacttctccaaagaagatattcatgtggcaaataagcacacaaaatgacacttgacaccattagtcattggaaaattgcagctgaaaccacaatgagagagcactatgcacccactagaatggctggagtataataagtgccacgtattggtgaggatgtggagcctcaaagactgctggtgagaattcaagatggtayggccactgtgggagacagttcagcagtttttggtaaaggagagcacacactgatcatggacctagccattctgctcctgggcattttaagttaaatgaaaatatatatccataaaaaat

SEQ ID NO: 822034 - DNA, 595 bp, Homo sapiens
tggccccagctgatggctctatgtggcctgaggaggcgccagtgacctttctttacaagaatccctttatcctagcctgaaggcgagcrtctgggaggcagggggtaaggagcactttggaggctggattactgctgggaaggcagctggcggaggcaggggggccatgtgcactggctctgggtggggcccccattgggcctgggccccatgctgccaaacagctggccttggcgtggggtcagagagcatggcccctccccaggtgtccagaggcaagcatcctcagggacacagggctggccaggcagaggcagaacctgacctgtccctccccatctgctctgggctggcaccacatgggacctcttgtctcccagtggtggaaggggtctttcatgccccacatgagaaatggaaggaagagcctgctccagcctatgcagtgggggttggggaggggtggtcagcccagagtcagagctcactcccttcctgtgccctcgcctctgtcccctccgcaactcctaggtggcccaggaaactcagcagggcaggaggaagtgggagccatgaggaggggaccaggaggtgc

SEQ ID NO: 822035 - DNA, 610 bp, Homo sapiens
aactttcattgcatcttgccagtttcagttttctcttccctcttaaaaggaacaaaatagtaacacttcccttcaactcattttcagctcatataagttttgttttcctcctcaggttctgtttttttktgtgtgtgtggcctgatgctaacaatgttttcttaaagaaaatgttttcttctaacataatattctatacactgcagaaggtatttgcttttgccttttggtaagtggcctaacagattttatgttttatcaaaataattcctatgccattattattaagtttggtttgcttaggaaaaacagatattaaaattttttttaaatcaaggttattccgtccttatatcttcttgtatgtgcttttaaagtccttgcgacattgagttacagggatttgactcatgggtctaaaaagaacaccaagtcctgctaaattttaaacactgacagcaattaaagcttcatcttcaggcccggtagaagatgccaatcaaaataaaccacattcctgagacacagaaattaaagctgttcaactcctcaaggcccagagactatcccagaagagatagacatgtgagattgtaagggctgactttga

SEQ ID NO: 822036 - DNA, 637 bp, Homo sapiens
caccctagcctcccaagtagctgggactacaagcatgtgccatcacactcagctaatttttagatttttttgtagagatagggtctccctatsttgcccaggcttgtcttgaatgcctgggctcaagtgatcctaccacctcagactcccaaagtgctggtattgcaggtgtatgccaccatgccgtgcctgaaatatcttaatacactaaaggatcaagtgctttagctgtacttttgagctctaccatggccataagaaacaatttgaagaaagagatatgtgagagacctcattcgtgctgggtgtgatctaatgaactataaatccaaatggttagtaaatgtataaaatgaaggtatatatatgttgacaattcttattcaattcaggaaacattgaatgtgtgcttcagtgtttaccttgtatttcatattcagaatatagaactaccgaatagctctgttgagtaacaaagttccatgaaacaggcaaaaaactgatgttgaaacaagaagctatgaacatatttcagttaccagacaaagagaatatcttcagagtttattcttttatgatacttctgcattagaactattgaaaagctacatcgtactaattttatagcagcagtatc

SEQ ID NO: 822037 - DNA, 550 bp, Homo sapiens
aaagcaaacacagttgtataaggaggatcaatatttttctacataagttaatcgggtgaattgtacatagcacaggtrtttatcaagaaaggatgctttaattgattaatttcattcttttatttataaatttatctataggcagagatacctacatccttttaaaaaaattatactgttcatgttagtacaacataggatatttttcttgtgtgctaaggtttgggctccatgaccaatacctgtaagttatacttaaatatgtcacagctaaattctgataatatcatatcacattgtatccattttatataaactgcttcaccttatgcaacaggtgtagtcgtgaaagttttggtaacaatttaatttttaaaaataaaaaaaatctgtccccagtgacctaaatgagtagggtatttcaaggaaatttaggatgaatctttcttaaaataatcctctggaaaaaaaatcacaaaactttccttctatatatacgtttactgtattttcttaaaggagtacaaacataagcaattttatgcaccta

SEQ ID NO: 822038 - DNA, 635 bp, Homo sapiens
aaaagttgaattttaaaaatggaaacaatatttttgcaaagagtcactacatgacaccttgtaggaagcagtcactattatgttttcatatattaaacttgaatatttgaggtaaaataaaagagctgtgtaattggagaaatcctggatcatttgagttacaaatctctacagctagttccacaaaatacttggaaatttagtaaccctctataatttcactgaaaggatgtatataagtactgttagaagtgactgatagctgtcacttatctatatgactcacttactatgagtcacctatgagatatatatgtttttgtttgtttgttcgtgcattcgtttttgagacagagtcttgttctgttgcccaggctgtagtgcagtgataggatcttggcttactgcaacctctgcctcccatgttcaagtgattctcatgccttatgcctcacaagtagctgggattacagatgtgtaccatgcacacccagataatttttttatttttagtagagacggggtttctccatgttggccaagctggtctcgaacttctgacctcaggtgatccacccgcctcakcctcccaaagtgctgggattacagggcgagccactgcacccagccaagat

SEQ ID NO: 822039 - DNA, 618 bp, Homo sapiens
tttgatattcaggatgaacatgatggcattagctctttgctattcagtgtttttcccttcagaaaatgttggcaacttttcattcttaaaataactttttcttttggcaatcactgagctgcacacttagtaaccactcagaagccatcaaggaaatgtgagaagattcaggtttaataaggaaaaaaaggcttattattgtcatctttcattacatttcaacccaaaacatggagtggaatttttttatccccattcagtgagggtctttctctacccattgaattttttttttttctacttgaaacacctacctcaatgttcccatgtgtctttcctagacactttctaggaactcttgggagaggttggatatcaatagggtaatgctcatgggaatgatacttatattacagttttgtgttttctacttctagctataggaaaattagaacaaattatgctggccaaggttagacaaaaacaaaacaaaatgaaaaaccccactgagtttgtaagtcttaaagtaacctgccaaaactcacctggccaktagtggtacaacatttatgtgattttggtggatggagtcagtatcatgaattgattacatacata

SEQ ID NO: 822040 - DNA, 619 bp, Homo sapiens
tccctcagcccacaaaccacatacaatgtcctcagttgctccacacgttctctcagggctcagaggaaacattcaaattcctcagtccttatgacctgccccctccacccgacgcacacaacggstcatgtgattcccctcgttcccccatgaacatctgggctccagccaagactgctccttcaccagccccaagaagccatgctcctctgcctctggaggactttttaaatgacctggaccctctctggggctggtatttattccctaatctcccaacatacttggatttgcccactgcgctgtctcccaggcagatgatcttcacgttgtcatcagcatcatacttcccttggtccaactcactcggtttggttttgtcttctgccattggctcctagccgtagagaggggtccagcccaagggaggggagggtattgtcactgtctgggaagatcaacaagaggctgttgtcagagataagtcccctcaaccaaatctccagctgtacctccatccagactgcttccctcagtgccagactgagatatggtatgcaattgactactagacttggagtagcagagtatgacacacaggcatcagtaatatgttata

SEQ ID NO: 822041 - DNA, 543 bp, Homo sapiens
ctttatagcacccctcaccacctgctgtattatttgtttatcrttcagctttctctctaaaatggaagatctatgagaacaagaacctgtctgctcattgaggtgttcctctagaaaaatgtctggcccatagcaggtgcttaatcaacaatttgtgaaggaaaagtggaggaaaaaaagataggagaaagcaaactcatgaagaagagtgcttgggtggggtgggaggagaagagggcaatggatccaggccctacagggattcactgttcaagcagaaagtccagggaaagccacatggcctccttcaatcggatgagctggagctgctgacatcccctgcaacctgggagccagtgcatgcaatgctccagctgggtctaaggacagaaggaggctaatgaacagccaccttcggagcaacagggtcacttcagtcctccctgtttacttccaagctgctgagagtcttatgcacatttcctcttctcacttgcctcttcacatccctagctgccgcaggaatttatggcttaattaaag

SEQ ID NO: 822042 - DNA, 596 bp, Homo sapiens
ccagaccctctatagctgaacaagccatccaggtggttttgatgcagctaaagttctggaacaactaatgtagccccatttggaaaacttggctgtacaggcctccctagctggtaagctgctagcattttttgtttgtttgtttgtttgttttgatacagggtcttgctctgttgaccagaccgtgacctcctgggttcaagcgaggactcagcctcctgagtagccgggactacaggtatgtgccaccaccatgcccaactactttttgtattttttttttgtagggatggggttttagcccgggctagtctcaaactcctggactcaagcaatctgcccactttggcctcacgaagtgctgggattataggcatgagccactgtgcccggccctgccagctttgtataagctgaggagttctaaaaaatacctagactcagggcaaaccccagacacttaaatcagattctctgggaggtgaakcccaggcactggtatttttaaagtctctacagatggttctaatgtgctgctaagttagagaactgctgatctagaccaggccttttcaaacttaatgtgcacgtgaatt

SEQ ID NO: 822043 - DNA, 492 bp, Homo sapiens
atttcttagttctcagcttttcttcctctgatcaaagtgcctgaggcagtgagcactgggagggcaggagcatttctggctgagcccaatgctcmcctcttctgggccgttttaggaagctgtggcccagtgttctctggtcagacaagcatggcctggctgtggaagggtctccaaaggctcatgggtcccaggtgccctggattttgaaggcagctgccctgcctccactgggagaagattaaagccccctttgcctttcttcgtccctccctttcccactctgttcactcaatcactcttttctctccaatgaattaaatgcagaaaatccatgagcaggatttctctcttcaaaggaccaaataaccttctttctattccccctaaatttttttccaaactgcaaaaagaaaacatgcaaacagacttcaagttaaaggtgagagaaagaaagaaaaattgaagcaaagtaattttaacttgagaagt

SEQ ID NO: 822044 - DNA, 617 bp, Homo sapiens
aatggatccatcttaccatatgatccaccaatcatgttcctagttatttacacaaataagttgaaaatttatgtccacaaaaaaacctgcaaacaaatgtttatagcagctgtattcataatggccaaaccttagaagcaccaaagatgtcttttggtaagcaaatggataaataaactgtggtatattcatacaatggaatattatttggaaataaaatgatatacaccatgaaaaagcagagaggaacactaaaaatgcatactgctaagtgaaaggagccagtttgaaggctagatactgtatgattccaattatgtgacattctgaaataagcaaaactacagaggcaattgaaagatcattagttgccaggggattggtgggagaaaggaggaggaatgaatgagagagaatgttcttctaagtggtctaggtctcttataaacctctacctaattatttcccttttctcagtaaaagatcatctgctgaaatgtaggttcaggtaaatttggaggatkgagcaacatgagaagtttgaaatagtcacctcagaaaaagaaagcaagacttaagagatgatcataagaatttataagtagccatgaatgtct

SEQ ID NO: 822045 - DNA, 549 bp, Homo sapiens
tgcagtcgctggtccctcagggaggtgtgggkagctgtccccaatggggatgggctggaaggctccagactcttcttgcccatgaagtgacctggaaaggaggtgtccaggcacaaggaagtcaagcagccaggatcctacctcagaggaaaagttcctcatctctcccacgtttccgttcttgtagcgggaagacacttaaccttcctcctcttggtgcttccacctcaccaaggagccacaaaggtgtctgggtggtggcaaagcctgctccctcagcttttcctgaacaggtagagaggatggcacagctggcaggaaggtgggatggtccagggccagggagaaactctgctagttgtgtgggctgcttggacaagggacgaaaaagggcagggtaggaagtggagagtgaagaggcgcctggaaagtggaggtgcagcaaaaacacaccagcggttagaagattcggttaagtctcgcctaaggtaaggggcacggctggcagtgggatttaggatctagccagccctgtcttaaactggctgc

SEQ ID NO: 822046 - DNA, 663 bp, Homo sapiens
gtttctgactctcaggaatggtatgagataataagtgttcattgttttaagctattaagttttagagtaattagttattcagcaatakaaaactgaaacatattgcacagctgctggccctgtgcctgaaagtgaaaattttcacatgctttctaaacaatctatcctatgctactgtggggctttgactagtataagagtctttgtgtgactcatagcccagtgggtgtgacggcgataagacaaataagataccacagtgacaccaaaatcccaaaatagagggattttgaccaggaatcttacacataattattaaaaagaaacttaacaccgtagctatagacactgtataggtcttctttcttctatatataggtaaggcttcctctaggaacagacacatagactttgcttaagaaaaaactcactaattactgtctgttaatcccatcagcttcacacacaaaaaaagaaaaaatggtcataggatagtttgcatcactttttcctagataaagattatttagggaaagagtagaaagagagaagagggcttaagtgatctcatccattttacagatgtaagtgccatcctaaatctgataactctagtctagaccatccctttgaaccccagcttcacatatccagctgcttcca

SEQ ID NO: 822047 - DNA, 581 bp, Homo sapiens
ttctgctccagccacactggatcctttgttattctcaaacatgccaggcatgttcccaccttaggacatttgtacctattttttaattgagacaggccactttattaaaataggtccaaatgtaacacacgataacattcattttaaataaaaactacaaacatgacttgacttctccaaatatacattctctcaggtagtccatccgagcatcctttgttgacagtgccatagagttccattcaaactgggaaatctgaaaataagtaatgttgtttgaatgaaagttttaaagcaacaacaaaaaacattgaggaagacatataagcactactgatcaaagctgtaggaatcctatgaaattagtttacataaggatagcctgtgaacctctactggaagccaagtgggtccttctgacattgcctagaatacttttttctgctcctttcatcctccttttcctacaataccaatgatggacattttttcctacayagtcttctatattcatacctagttgtttcctctgataactctatccatctctacagtgcctctctcctttgtaagatatagaa

SEQ ID NO: 822048 - DNA, 604 bp, Homo sapiens
aaatagcactaaaagcaaaaaccacaatgcaagttaagaatcatartggatgaaaaagaattacaaagagtaataacactttcaacttgggccatttctggttaattagtttagattacgcagtttgcttattattaagtagaatgatttcccaaacttcttcactgacctttacttgggggtatggtgtgatgtaaccttatcaattagtcatttaacttactagtataatattaaggttaaaaaccaaattccatagctcatatctgtaatcccagcactttggtaggtcaagttagaaggatcgcttgaaccaggaatttgagacctgcctgggcaacatagcgagaccttgtctccaccaaaaatacaaaaattagccaggtgtggcaatgcacacctgtagtcccagctatttggaaggctgaggtgggagaattgactgaacccaggagttcgaggttgcagtgaactatgactgcaccactgcactccagcctggcaacagaacaagacagtctcaaaaaaacaaaacaaaaccagaaataactccagaatattttatttgtaaaaacctaaggtaacaaaatgctgctttgttttt

SEQ ID NO: 822049 - DNA, 599 bp, Homo sapiens
gcttgtcgtaagattggaggctgcagttaaataaatacggtttgtccrtaagattggaggctgcagttaaataaatacggtttgtccgtaagattggaggctgcagttaaataaatacggtttgtccgtaagattggaggctgcagttgaatacggtttgtccgtaagattggaggctgcagttgaatacggtttgtccgtaagattggaggctgcagttaaataaatacagtttgtccgtaagattggaggctgcagttaaataaatacggtttgtccgtaagattggaaggtggaacggtccttaaattaaagtgcatttggtaggaattgatggctgagttgttttaaaggacacacagccaggtgggtataagatctcaatttagagaactgaaaacccaggcacacagcagacacgaatggcatgtagggtttgtcgctgacaggatagttgtgggccgccaccatgtggggatatcagctcagctgggatgggcctgtcaccctcacgcaggatccctggaatcacacagcacggccttctgtgtccggcgtctccctcggggaggtgtgtttccgagtcctggccatgctgg

SEQ ID NO: 822050 - DNA, 572 bp, Homo sapiens
tgcacacaggcccaggcattgtggcgggctgtgaatccagggccccttctgcagcacctcctctaagtggtgtcctgtggsagggctctaggggtctctacctggtgcctagcccaggatgaaactctgacacgctgtgctgctgggaatggtggtgtctcgggcagggttgtgggtgaccggcggtgggagtgtgcgggtgaccgggggtgggagtgtgcaggtgacctccctggcccttagcccccgtgtgtgttaggggatggcagtcagacctgatcacttgccctcttgtccccagtttaaggagtcggccttgaggaagcagtccttatacctcaagttcgaccccctcctgagggacagtcctggtagaccagtgcccgtggccaccgagaccagcaggtatgtgcgccggccctccctcatgcatgaagccttgagtgtgggaagactggaggctgttcctaggtgtgctgtctgcacagaggcttctagaccggggggagatgatcagaactggaaaggagctgtgctaggggtgggctgggcagcaaggccagagcagccct

SEQ ID NO: 822051 - DNA, 613 bp, Homo sapiens
ccaacttaccacagatctgaactccatggagaagtccttctccgacctcttcaagcgttttgagaaacagaaagaggtgatcgagggctaccgcaaggtatgtctccgccaccctggtgtcctcacctcggaggctgatggactcatggtccaagccagcggggctacaagctgctgtctttgcaccttggtccttggccaagcctccccttgccacgggggcatgggatgacctgtgaacgagacagggtgcaggagtcacagcatagctggtttgcgaggcagctgagggcggcaggaggcagagtgagcagggaggccatctgagccgtccgctgttgtgtgacagacgactcggctatgatcaggcatctgtgagatttgagacagcgctggtgcaccggggcctggggcacctcggaaaggtgtctgggctgtccgagcgcttgggtcccaagggttggggacccagggcatgcagtatccaaggcgggaggcccactgaaaggtggtcacggctgtgcaaggccaccctggtgtcctcctggccacrggactctgagcgccccccaccttctgtgctgggcaaggcccacatgcttgctggaaggag

SEQ ID NO: 822052 - DNA, 599 bp, Homo sapiens
acttgatgtaactcatgggttatagaagaaatcaacggaagtgagaaaagacttagaaccgttggcagtgggcgcggcagatccgtgcttgtggagtagatcccaagtggtgtgtagaagggaatttacagtcctcagtgactgtattagaagaaataggagtgaaaaatagctgggcacagtggctggcgcctgcagtcctagcactttggaaggccaacagcggggaggattgcttgagttcaggagtttgggaccagcctgggcaacatagcaagacctcgtctctactaaaaataaaaaaattagttgggtgtggtggctcatgcttgtagtaccagcttcttaggaggctgaggtgggaagattgtttgagtcccggaggttgaggctgcagtgagccaagatcacactactccactccagcctggatgacagtgcgagaccctgtctcaaaaaaacaaaacaaaacccagaaatgaatgaaactgacaacaaagccacagcggagaagacccacaaggttttctttstgagaccaaataactggcaaaagtcttttagcttaattgagaaaaggggagaatgagcaaataaat

SEQ ID NO: 822053 - DNA, 490 bp, Homo sapiens
gttgggggtcggcaaaccgcggcccactggccacatacagacgcggcctgtttccgtagagtttgatggaactccccgacgtgcatttgtgtagaccttggctgtggctgtttcggctgcagtggcagaggtgagtggtctcagcagacaccatgggggccacaacaccaaggtgggctctgaccccctggtcacgggcagctcagaggacagggtgtctcaggcccctgcagcaggtggcaccagggccaggctgtcttgtgcacctgcctcgtgggcagctccgacagcttggaaggggatgacctacccctgtgtgtgaggagttggtccccttgtccaggactcataccctcaccacacctggcaggcaggcagccgggtgaggtgtccagcggggtctcrctgtggtctttttgtgctgggcggagggggaagcagggggacatggggaaggatgaggaagggagcacagaagggaaggtctggg

SEQ ID NO: 822054 - DNA, 507 bp, Homo sapiens
acttataatacggtattttttaaagttcaacggttttcttgaagattccatttagatttaattttttaattacatttaatcagcatcgaatgaaaaatactcccaagtacagtacrtataactgggagagcgatcattttaccaccctgatccttacttttttattttggacagcgggaaaccgtaaacaaacacgccctgtcgccaagaaacaagatgggaggaaagcagcaaaaaacaaacaaactttgccaagtgagcaagctacaggtatctcctgttcattctggtcagcacgacctgttcgaaactctgggataacaaggagtaaaatgaggattcatctggagattccgaatggggctgcagcatttgaaaagcagaacaatgataacttccttaaagcatcattgggaaaaaaaccgtgagtcacggcgcaggctcttgcgtctttgacgtgtacccacagggccccgccccactcaacacacacactcacccacacgc

SEQ ID NO: 822055 - DNA, 507 bp, Homo sapiens
acttataatacggtattttttaaagttcaacggttttcttgaagattccatttagatttaattttttaattacatttaatcagcatcgaatgaaaaatactcccaagtacagtacgtataactgggagagcgatcattttaccaccctgatccttacttttttattttggacagcgggaaaccgtaaacaaacacgccctgtcgccaagaaacaagatgggaggaaagcagcaaaaaacaaacaaactttgccaagtgagcaagctacaggtatctcctgttcattctggtcagcacgacctgttcgaaactctgggataacaaggagtaaaatgaggattcatctggagattccgaatggggctgcagcatttgaaaagcagaacaatgataacttccttaaagcatcattgggaaaaaaaccgtgagtcacggcgcaggctctygcgtctttgacgtgtacccacagggccccgccccactcaacacacacactcacccacacgc

SEQ ID NO: 822056 - DNA, 636 bp, Homo sapiens
cttttgttctttttcccatttgagacattctcttttgaagtggcctatttttaatttgaaacatttgttttgtcctctttctttccctttgcctctccctctctctttgcctctctgtctctttctctctctstctctgcctctctctctctctctgtctctctctatctctctctctctgactccctctttgcctctctgtctctttctctctctctctttccttctctctctttgactctctgtctctgtgactctctctgttccctctgtcagtctttctctctcctcttagaatttttttctctacctttgagtctcctggctttactcttttgtaccctttatattgcctggagagtggtgggtctaggcttttttttataggttctggccccctgggtactttattgtatggtggacagcagaatttttgccttctgcttttgtttttcttcatctcttcttacaaatacttgttgggcttctcttataagctcttctataggtttatctttctagttctctgtcttttgtaatttcttgttaatatctggccaacttagtgacaaagtgaagttttaacattccctgcccaagaggatcctcgagacctagaccagcctattttctcat

SEQ ID NO: 822057 - DNA, 616 bp, Homo sapiens
atttccattaataaatttgttgccaaatgaattggagctcccttatatgttatttgctttttctttttttgctgcttttggatcttctctttgtccttgacctttgagaatttgactattatatgccttggartagtcttgtttgggtcaaatctatttggtattctctgactttcctagacttggatatttataccttcctgaagtttaggaaggtttcctgtgattatttttttaaataaattttctaccccttgctcttgcttaactctctcttgaacactaatagttcttagatctggtcttttgaggtaattttctatatcttgtaagtggtctttatttttttcatcatgttttctgctgtgattgtgtattttctaatagcctgtcttcaagctcactgattctttcctttgcttgatccattctgctgttgagagcctctaatgaatttttcagttcaacaaatatatttatcagttccaagatttttgtttgattttaaaaattatttcaatccccttgtcaaatttctctgataaatttctgaattgcttttctgtgtcatcttggagatcactgtttccttaaaactgctactttgatttctttg

SEQ ID NO: 822058 - DNA, 523 bp, Homo sapiens
attttatttaagaaattcttttctgtacctgtgttaatatttttttcttcatttttccctcaatgttttacttttcatgtttagatctctaattcatttggaatttatttttgtgtrttcttctttttttttttttttttgagacggaggcttgctctgttgcccaggctgaagtgcagtggcgcgatctcagctcactgcaagctctgcctcccaggttcacaccattctcctccctcagcctcctgagtagctgggactacaggtgaccgccaccatgcctggctaattgttttgtatttttagtagagatggggtttcaccatgttagccaggacggtctccatctcctgaccccgtgatccgcccgcctcagcctcccaaggtgctgggattacaggcattttcgtgtattctttaaggtaaagatccaagttctattggtacagataaccaactggcctggcacattcaataaacagaaaaccctttccccagtgactggtgatgccatatctttcac

SEQ ID NO: 822059 - DNA, 523 bp, Homo sapiens
attttatttaagaaattcttttctgtacctgtgttaatatttttttcttcatttttccctcaatgttttacttttcatgtttagatctctaattcatttggaatttatttttgtgtattcttctttttttttttttttttgagacggaggcttgctctgttgcccaggctgaagtgcagtggcgcgatctcagctcactgcaagctctgcctcccaggttcacaccattctcctccctcagcctcctgagtagctgggactacaggtgaccgccaccatgcctggctaattgttttgtatttttagtagagatggggtttcaccatgttagccaggacggtctccatctcctgaccccgtgatccgcccgcctcagcctcccaaggtgctgggattacaggcattttcgtgtattctttaaggtaaagmtccaagttctattggtacagataaccaactggcctggcacattcaataaacagaaaaccctttccccagtgactggtgatgccatatctttcac

SEQ ID NO: 822060 - DNA, 430 bp, Homo sapiens
taggtgcctggttcgggttatatcacaatgctatgattcagtatcatccatccccatcttagggatgagtcaagccatgctcagagaggttaagtaactttctcacatccttactgtgaataggggccaggtgcaaactcagacttgccttatccatcaggtaccagtgttgatgtctcagtggaaagaagtaccctcaatcaggataatttgagaggtgtttatgcacaaaggcactaaatacatgccatgggtgggtagggggaagcagaaggggtactgcaaggacctggggctagcagcagcaaaggacctaaaaagagagacttyggggaagcgcacgagcgtccctgccccagttccagccagcctccagcagcctcttgctgtttctccctcctatctactgggatccccaccagccggactt

SEQ ID NO: 822061 - DNA, 616 bp, Homo sapiens
tccaggcagaaggctgtttcaaaccaaaattgatgttttaatctttaatcaagtaggaacggcatgttgtgaatgtttctagggagtaaatttactagtgctgtaagattggcccaacctaggtattttgtasagatttggtttcattttagtccctggtcaaaacaaaacagcactgtatgcaatttataaaccaaaatgaagcataacgcagtgtagacattcatcataagttcttttattaaaattcctaaggtttagtccagatctgtaatcagatcctacatgtggagtatgccattacattgaggaagagaaagtaaatggttttagaaatgaaaaaccaaggaaggaaaaggggagtgctatgattttctttccatgaaaaacatgtagtactgtggaactgatttcagctgaaaactgagggaaagcgttgcttggatggttctgtttgtcttcttgagtccttcagctttcccactcatgcaaagacagatattttcctaggttcctcttctctctcctgtatcaccagaggtgacccctctgtaggcattttctagcagttaatgattggctagtttaagggccctgggttttgcctctggccctt

SEQ ID NO: 822062 - DNA, 583 bp, Homo sapiens
gcctcagtgataatcagcacattttgtgccttcggggtgattctgaagctgaagttcctaggtccctagggggttcttgaatgagtttcagtaggwttgtaaactctctgaaattgtgtgcaaaatattgcaaatgttttttttcaccagattttcaaagaagtctctgatctaccaaaggtaagaatctattgttctggaatagagttttgcaaaactgttttgacaaaaaattacagtaagaggttttgtattgcaacagtatatgtctacatgaatacacatataaatatatcttaatcaaaattatcataaaacaacacaaaagcttatgtcaaatcctgaactgtttgagaaatgataaggagtgctgtgagatagagaggtgggactagaggagagaatgatagaaaatgtatttgaagaggctaggctccatcagtggtgataatggtaggggccaccaccatcatcataatcatcatcattggctactctactctcttctcttctactccatccaaacaagattgattgctttttcatctcttctttcatagaactttgcaaataccttcaatat

SEQ ID NO: 822063 - DNA, 489 bp, Homo sapiens
aaagaaataattttcacataaagcgatctttcttcctttcttcattgtgagctgagagaggattgtagcartacaggttgagcaattttcttttttatgaatctcgtgctcaatttatgaaagccattttgcaacccatttacatgcagtaaacctttgccttaaagttctgtcatttaccttgatcatgattatttatagtccttttagacaaggctctttactggtttagctctcaagcacagcactgtcacaagccagttttctacgtctttcaaggcagggtaggaagctaagacagggccagtcttgtagctcgctgtgaggaatgggggctttgggtaatgggaagaacactagttggcatcaggagtcttgcattcgcaacctctgcactctcactctgtaatcctggccatttatgcttctttagtttcagtttgttcacttatagaaatggagcgacactttcatcacaaggctataaag

SEQ ID NO: 822064 - DNA, 227 bp, Homo sapiens
tttcatctttttgtgtctagtgtttaaccagggggaagaaggtacctyctggtacattattctaaaaggatcagtgaatgtagtcatttacggcaaggtatatatatctttttctttttgaaactttattacgctccacttactagtgtggctctaagtattagcaatgtagtgccacaattaaatttgcaacaacattgctcctagatgtagaaaagacattattg

SEQ ID NO: 822065 - DNA, 592 bp, Homo sapiens
ctcaagtaattttcctttgtttgccaaataagcaagatgtttcctttatcaaggcattcaccataaatgattaatttttattgtttagactaaaagtctaaggcccagacattttcatttgggtgaatcaasatatttgcaaagagggcaggaaaaaagataatattattaaatagccatagtatattttgcagattttataggattcttatcatattacaacaccttttaaaagatggagaaatttatgctcagagccacaagttacttgcccaaggtctcaaagcttgtaatggcagagcttggattcaagtccagcttgaccagttttcacatgcctatcccccttccacctgacagcttactataacaaaatatagtagataagactacatactcaacactgtttagtaaatattgcaaaccactccatatcgaaagaactgacatcaaaaggactatgtaaaaaaactacctgtcacttacaaaactataaaattaccatagaaatttccttattatttattgttttctactgtctgttcttgaaattgttcttgcccaaatgtttttaacagttttccttccagtc

SEQ ID NO: 822066 - DNA, 604 bp, Homo sapiens
gctgagcagaagcattttagtttaatatagtcacatttgtctatttttgattttgtttcatgtgctgttgaggtcttagccmtaaaattttggcctaggccaatgtcctaaaatgtttcacctatgtttcattatagtagttttgcagttttgggtcctaagtgtaagtctttagtacattttgagttgatatttgtacatggtgagagaaagcagtctagtttcattcttctgcatatggatattaagtttcctagcaccatttattgaagacagtttcctttccctctatcagtgttcttggtacctttcttaaaaaattatatggctgtaaataagtggttttatttctgggttctctattctgttccattggtctacgtgcctgtttttataccaataccttgttattttggttactgttagccttgtaatatattctgaagtcaggtaatataatgcctccagctttgttcttttggctcaagattgctttatctgtttggcctcttatatggttccatatgaatatgaggatagatttttttttctgtttctgtaaaaaatggcaatggtattttgataggaattgcattcaatcaag

SEQ ID NO: 822067 - DNA, 604 bp, Homo sapiens
gctgagcagaagcattttagtttaatatagtcacatttgtctatttttgattttgtttcatgtgctgttgaggtcttagccatwaaattttggcctaggccaatgtcctaaaatgtttcacctatgtttcattatagtagttttgcagttttgggtcctaagtgtaagtctttagtacattttgagttgatatttgtacatggtgagagaaagcagtctagtttcattcttctgcatatggatattaagtttcctagcaccatttattgaagacagtttcctttccctctatcagtgttcttggtacctttcttaaaaaattatatggctgtaaataagtggttttatttctgggttctctattctgttccattggtctacgtgcctgtttttataccaataccttgttattttggttactgttagccttgtaatatattctgaagtcaggtaatataatgcctccagctttgttcttttggctcaagattgctttatctgtttggcctcttatatggttccatatgaatatgaggatagatttttttttctgtttctgtaaaaaatggcaatggtattttgataggaattgcattcaatcaag

SEQ ID NO: 822068 - DNA, 601 bp, Homo sapiens
tcttttgtttctttcattctttcttattgtgtatcattttggtttggtggtttttttgtagtggtaacattggagttctttctcttcctcatttgtatgtttaaaactctrtcagtgagttttatactttcatgtatttcacaatgatagatataagccttttgtttccaggtgtaggacacccttaaacatttcttgtagggatgatctaatagttataaattccttcagtttttgcttgtctgggaaagactatttcttcttcattcatatagcaaaactttgctgtgtatagtaatcttgattgccaatttttttttaattttcttttagccctttgaatatatcatcctatactctcctggcctgtaagatttattctgagaaatccagtgccaatctgctgagagttctcttacatataacaagacaccctgctctttgtttttagaattttctatttgtatttgcatttgacattttgactataatgtgccatgaaaaacaccttttgaatgtatccatttgagaatctctaagtttactacttctggatatctaaatcttgctagacttaggaggttttcagttattattttgt

SEQ ID NO: 822069 - DNA, 604 bp, Homo sapiens
taaatgtttattgaacaagtacatgacaaccttttccacctacaattacgtctagaggaaagatttcttagaaatattggctcttaatttttggaacataattgttccaatatctgtttcattgggtaaagattctttttatttattttatatatctttaacttcgttgttgtaaattaaagaaaggcccaataaaccaacatagtttttaacttttattcaatgattgatgtgatttactagattgcattttactcttcaagtgattcctcagtctttccatttactttttttaaacttatattttaagttcaacggtatatgaacaggatgtgcatatacctatgtgacacataggtaaacatgtgtcatggggtttgttgtatagattatttcgtcattcaggtataaagcctagtaaccattagttatttttcctgatcctctccctcttcccaccctctgcccattggtaggccccagagtacatggttacyctcttaccacttactttttatgaatgtaggccagacttggaattccctaataaaactggtcaatttgcaagagaaaatacttaactagaagatacatatttttctgc

SEQ ID NO: 822070 - DNA, 538 bp, Homo sapiens
ggtggttcccgtactctcatcatagatgataaatcatattcaaaacaggattcaactgaaaaatatttttggctgggtgcggtggctcacgcttgtaatcccagcactttgggaggccgaggcgggaggatcacgaggtcaggagatcaagaccatcctggctaacatggtgaaacctcgtctctactaaaaattcaaaaacatcagctgggctctttttttttttttaagatggagtctcgctctgtcactcaagctggagtgcagtggatcaatctcggctcactgcaaactccgcctcgcagggccacgccattctcctgcctcagcctcctgagtagctgggactacaggttgtgccaccacacccggctaatttttgtatttttagtagagacagggtttcaccatgttgaccaggctggtcttgaactcctgatagagatcaagccactgcactccagcctgggcagcagagcaagactctgtcttaaaaaatacrcacacacacacacacacacacacacacacacacaca

SEQ ID NO: 822071 - DNA, 545 bp, Homo sapiens
ggtatcaatataaaaggggatcccattaaaagaacagtaggctggaacttgggatatgactaggaaaacagtcagaggtgaggctgtaagggctttttagggctgtactgaggagcaaatacctcatcaaagaccaaaccacttactttcatgagcactgggaaactactgatttttttaaagagagtaacatgattaaagctgttttaggaaaattaatctgactataatcacggtttgggactcagacatgtttttatactcttaattcttcagcaaaaagattcagtggatatctgtctgagtcggttaagaggagtcaccacatgacttccctttcaaagggtggagtctcccattcaaaaaaaaaaattttaagtgatccccagagcacctttcatttccttgtaaactgttgagatcctcaaagataygaactctatcgtacacaactagcagtcaccacaggagctagaatagtgtgttacacatatttaactaatattcaaagcttagattcaaagtggaaagaggattcatgcaat

SEQ ID NO: 822072 - DNA, 601 bp, Homo sapiens
cataaatatagaacaacaatgccatattcagatgcagttgcggagctcttactaggcttgctagcaagttaagcaccttggtttccagcactagattcttaaaatgcagaattttagcttatacttctgttaattgctctatgtaattctatctttgaggtgttcccaaatggtcaaaaacacaagcattaattatgctagtgccaaggcagtatatataataaaacactagttgtgcctgtgatgtactcaatcatgtgccaggcactaggagttctgggaaaagctgatcctttaaaaaggctcatattttagtcaggaatacctacactttaatatttaaatataatgtgcactgtaaaggcatgtattaagttttatcaaagtacagaaaggaaacagttaattctacctgagaatgagtaaaccacacatggtattgaggaatgaatgcagacagaatgaggacatcctgggcagaggaaaatacratagtatgttaaaaatatgaagtcagtgagctcagagcatgagagaagcacaatgaaagctatctcagggactttagttggagaaatttaagcatggtatgttgggacag

SEQ ID NO: 822073 - DNA, 592 bp, Homo sapiens
aagtctttctggataccagtgagaaaatcacgttttcctatagacattttgcagcttctctttaagagcaatttccccctggtaattatacagcagtttgctctcagaaaacagactgattaatgaggaagcagctaaatgagttctttaaaaatgtctaaaaatgttcttgcttctgcttttctaatcttcctcaaccaaattgacagctttttaaaagaatctccttagtgaatgcatgacaattacattggaactcaaagaattaccacaagccttagtttaagaagacattttaaatcataagagtattcattaaaaggccatctgtcagatgttctccatcactgacatcacccacatctctaccttcttctcttcctgttattttaacctcatttgacttttttgactgctttggaagaaaatcagcctttcttggccaggtgcagtggctaatgccctgtaattccagcattttgggaggccaaggtgagaggatcacttgagatcaggagtttgaggctrcagtgagctatagtcactccactgtactcctgcctaggcaacagagtgagactctgtcagaaag

SEQ ID NO: 822074 - DNA, 654 bp, Homo sapiens
gatattgtaaatatcttctcccagtctgtcacctgtccattatcattgtctatagtggtgtcctttttgaatagagaccttatgttttgacrtagtcaaatccattctgttttaaaagtttatctctactccatgattatacatatacactccaatatcttcttcctttatctttatgattttccctttcacattaagttccatctagaagttaccttagtatatggtttgagataggagtctaacttaactttttttttccatagagtgaggcatttttctcaatatcctgaccagtttataatcttatctatgaataaagaaatttgtattatgggaggtaccagaatgatgtaggtaagagtagagagtgaggaacaagtaacaggtgacttatttcccctaagtatgctctctaaaagtggtacattttcaaaaaagttgaagacaacatatagccatagtagttatttagacaatgatgacaagatattagaggagtcgagttgaggatggaagaggcctcagtttaagaaacacagataaaccagagggcccacagacatagtcaaaatgaggaagagccatcctgaaaacgctgaggcagcctcttctgatggggagggatgaggagtgagaacaggtagtttcaga

SEQ ID NO: 822075 - DNA, 562 bp, Homo sapiens
gggcattcctgagtcatcatcacagctctcccgtctttgggttgtgctggggagtcaccttgtcctagattatgagtgaggaactgcatttttatgaaatgccagggccctattattttgcttttgactgtccattacttattctcatcagggcaaggcagtcttctccttcttgagcttgtgcctattttacctttctcctagttcctggcattctctcttttttttttttttttttcttccttgagatggagtcttgctctgtcacccaggctggagtgcaatgctgcaatctcggctcactgcaacctccgcctcctgggttcaagcgattttcctgcctcagcctcctgagtagctgggattacaggcgcatgccaccacgcctggctaattttttgtgtttttagtagagacggggtttcaccctgttggccagactggtctcgaactcctgacctcgtgatctgcccgctttggcctcccaaagctggaattacaggtgtgagccacctcgcccggcctggcatycttttaactcaagatccacgagggctttcat

SEQ ID NO: 822076 - DNA, 658 bp, Homo sapiens
aaaccaggcctcttaagctcagaaacagtctgtggccccagcaagccccagggcccgggaccccaaatgcagaagaaatgcctagtagccacagggcccagaggggygtgcagtactgggagacagagatggcactaattcccaggacagtggcggccaccagggcatgcccaggagctcaggggtcttggtggtacccgggaagctccttccctcacccagcaagcagctgaggctgcggagaccaggtacctgctcaagaacattcatctgacaaatactcattattgagtgcctacggtatgctgagctgttccaagtgctctagatggggctggctgtgatcaaaacagaaagccctgccctgaaggactgggtagacctcagaaatacctcttataagtgtgagagtttgctttatgcttttctgtgtataaatgggcttgcattgctttgaaaattaggaaaaaggttattaaagaatgttattagaaattgtttttgaataaatatccacgaggaaatagaaacatgataaggaaataccagctaattacacatccgcaagtgcagtggactctgtactctgatgaggcctcaggaggtgtggtcagagaatcaacaccagatggtcctagaagaactgattgtgaactgt

SEQ ID NO: 822077 - DNA, 526 bp, Homo sapiens
gataccaaggctgaatcaacagtaattatgctaactcctcacttgattccatatgctctggggtcacatgtggctagctggtgcttttcatcatcaatatgcccacccaccccaagcaattaacttactttgcattcccaaaggataggtcttagttgtaattttccatatggaggcagtgggccagacatgtaggggcctctgcccaaaccacaaagagtatcaactgtcaggacagaaacagtattccagaaatctgatcattcagtcttaaatattcaaaacctcacttatttgaagagccagggcaagcacaaacttggcgccgctttgaagttattaaaatctggttctattcttcagtatatggattcccaggaaaattccactctgatttgccaaccccttaggtctgtgggttatagtaaaagagaagctgcagattagttcygattaatttccatcataagagtcaattcttgcttttcagggagagattagggaaggaatggtaattaaaatccac

SEQ ID NO: 822078 - DNA, 526 bp, Homo sapiens
gataccaaggctgaatcaacagtaattatgctaactcctcacttgattccatatgctctggggtcacatgtggctagctggtgcttttcatcatcaatatgcccacccaccccaagcaattaacttactttgcattcccaaaggataggtcttagttgtaattttccatatggaggcagtgggccagacatgtaggggcctctgcccaaaccacaaagagtatcaactgtcaggacagaaacagtattccagaaatctgatcattcagtcttaaatattcaaaacctcacttatttgaagagccagggcaagcacaaacttggcgccgctttgaagttattaaaatctggttctattcttcagtatatggattcccaggaaaattccactctgatttgccaaccccttaggtctgtgggttatagtaaaagagaagctgcagattagttccgattaatttccrtcataagagtcaattcttgcttttcagggagagattagggaaggaatggtaattaaaatccac

SEQ ID NO: 822079 - DNA, 449 bp, Homo sapiens
cacagcttttaacaactcagagaggtccatccacatacctcttccccaacattctttgtcaccaattctccaatcatgctacttccaagtccctgaccatccagccaaaccattggctacagcccataagtcagtatgtaattgcacatctggccatttctccttccatgcaaagtgcacaacaaggtgtactgctcgaagttctgcccactgggaagatttcctttcacgctgtcctccagggatatcctagaaagggactgtagtgccacagctgtccactttcaggtggtgcctgcatatcgtgcagaaccatctgtgaaccaggccctagtcttctcttcctctgtcaactgatcatagggaactcccyatgaggccattggtgcaggctggaggagagaaggtagggtggcaggagtggagatcatgggcatttgagccacttc

SEQ ID NO: 822080 - DNA, 596 bp, Homo sapiens
gggtgtggatctcaaccttgccacttttctcccagaggatggcgaaccaattgagcatgactgycaacaaattatagcccagacttatgctgcctgagaggatctcttagaagtcctcttagctaatcctgaccttaacctatgtaccagtggaagttcatttgtggagaatgggatacaaagagcaggttatggcatagttagtgatgtaacagcacttcaaagtaagtctcttcccccaggggccagtgcccagttagtagatctagtggcgcttacccgagccttagaacttggaatggaaaaaagaataaatttgtatacagatagcaagtatgcttatctaatcctacatgtccatgctgtaatatggaaagaaagggagtttctaacctccaggggaacccccattaaataccacaaggaaataattgagttattgtatacagtgcgaaaacccaaggaggtagcagtcttacactgccaaagccatcacaaaggtgaaggagaaaaggtagaaggaaaccatcgggcagatgctgaggtaaaaattgctgccaggaggaacttcccattagaaatacctatggaaggat

SEQ ID NO: 822081 - DNA, 476 bp, Homo sapiens
atacatgaagccaaccagtggaaaatacttaagaccctccaccaaacttttcatatgggtattgagaacactcaacaaatggccaaagccctatttacagggccacatctcctttggaccatccggcaagtagtcaaagcctgtgaggtatgccaaaggaataatgctttgatccatcataagttccctctgggagaacaaagaatagggcactatcccagagaggactggcagttagacttcacccatacgcctaagtcaaggggatttctttgctaacttaacctaccactcccattatgaaggaaaagaccctttccaacttctaaatatgcaatcattagctgacttccccatctctgatagaaccaaaaataccttaacaggatgagcaatccagcttttacgctcttacatttctaaccycacctattatatgagcaatgaaaagcgcatacatagcctgtaaccacgaa

SEQ ID NO: 822082 - DNA, 561 bp, Homo sapiens
aatttagattaagaaatttgcaaaagttaaaatgtaactgcaatattggcatttgaagttcttttttcaaactactgaggttgaataacactttgacrgacattttcatagggcttaaagcaaaactactaataaaatttaaatgcagtattgagatcaaatgcctactgtctggctttcaacaccttactgagaattagtaaccaacaaaaaaatatgttaggcctaatcaaagaattgagtgtatgtgcagccactcgtttaattcctacaacaacccttatgaaaattggaattatttttatacatttttatatttgaccatgagagaaatttgatagatttgagagtttacattgccaaaattcacagaaatatttaaattataaaggcaatattcgttataaagtaatgaatactcaatcctagtccaagaaatcttatttcgttactcatgcgtcataagccctacactatactactgtgtggtttatcaaagccaacctgcccaacctcattggtccctttttgaatcaattgtttcatcactcgactagtcac

SEQ ID NO: 822083 - DNA, 547 bp, Homo sapiens
ttctacatatggatagccagttaytccagcaccatttattgaatgggaaatcatttcctcactgcttgtttttaacaattttgttgaagatcagatggttgtaggtgtacagccttatttctgagctctgtgttctgtttcattggtctgtgtgtctatttttgtaccagtaccatgctgttttagttactgcagccctatagtatagtttgaagtgaggtagcatgatttctccagctttttgcttttttaactaggattatcttggctattagggctcttttttgcttttatatgaattttaaaatggatttttctagttttgtgagtaatgcagttcatagttttgtagaaatagcattgaacccacaaattgctttaggaattatggccattttaataatattaatttttttctatccatgagcatggaatgtttttccatttgtttgtgtcatctatgatttttttagcagtgttttctaattctcattgtagaaatctttcacctctgtgcttggctgtattcccaggcattttgttcttt

SEQ ID NO: 822084 - DNA, 663 bp, Homo sapiens
acatggaactcaataaataaataaataaataaataaacacattatgtcattacaaagtaggcaaatgacataaacagacatttatcaaaagaagacatgcaagttgccaacaaacattaaaaaatactcaagatcactgaagatcatagaaatctaaatcaataataaagtgtgtattagtctgttctcatgctgctatgaagaaatatcccagactgggtaatttataaggaaaagaactttaatggactaacagttccgtacagctagggaacattcaggaaacttacaatcatggtggaaggggaagcaatcatgtccttcttcacatggcagcaagaaggagaagaatgagagctgagcaaatgtggaatccccttataaaaccatcagatcttgtgagactcactcactatcacgagaacagcacggagggtaaccaccctcatgattcaattacctcccaccaggtccctcccatgacacatggggattatgagaactaaaattcaaaatgagatctgggtggggacacagccaaaccacatcaaaaagtgaytcatttgacttagtcttccctatcttctctcatttagggtaacattatttccttgaatcaaaagggtatctctatagactttgagttcatcttgacgtctttga

SEQ ID NO: 822085 - DNA, 544 bp, Homo sapiens
ctttgcctcccaggttcatgccattctcctgcttcagcctcccgagtagctgsgactacaggcgcccaccaccacgcccggctaattttttttttttttgtatttttcagtagagacggcgggggggtttcaccgtgttagccaggatgatctggatctcctgacctcatgatctgcccacctaggcctgccaaagtgctgggattacaggtgtgagccaccgcgcctggcctatacactttttctttttgttaacttttttagcattcaataaaataattgtgtatctaaacaatgaaaatgtcttagatgtgataaaataaagtaaaattttctaaatatctaaaattttttcctcaggggaaaaaagaaattttaaatacatgttttaagtataatacaagtacagtagtgaaaaactaggaagaattcagaaaatgactattatcttacaatacagtatgtttccaattattacttaaaagctatgaagttcaaaatggagatcattttatgctgtatttcaaacactgttataagtata

SEQ ID NO: 822086 - DNA, 601 bp, Homo sapiens
aatattttagtaacagaaggaaatttgtatctaaattaaaaaaatttaacatcagaattggtaaaaatgaagataataaagttatctctttattgtaaaattgttcaaggtaaattactatytaaagcaaaactagtaacaatatattattggtcttctaagtatgtataaattttgtgataatcacagaccttaagaattggagaaagactgaaagtatattgttgtatgatttagacacgattttgacgtggtataataataattggaggtctatagaattaaacatgttgtatgatccatggcaaccaccaaacatttaaatttaaaatgtataataggacaagaatgaagataaaaaatcaaaataatagagtgaggaagcataaaagagggaaaattattgcaaaaagaaacaactgtattatgtctgtgagaaattcctttgaatgaaatatatagataggttagatgtataaataagaaaaatacagtatgtaaatgccaaaattaacaagactactgtggatatattgatttcagaaaagctatataccagaatgagtaatattcctgggctaaactgagatcttacataata

SEQ ID NO: 822087 - DNA, 633 bp, Homo sapiens
tatttatttggatcctctctctttacttcttcgttagtttagctatcaatttatctatctcatttttttttcaaaaaattatctcctggattcgtcaatcttttgaatwttttttattgttgttgtcaatctcctacagttcagctattgtcttctaataactttggaatttgtttgcccttgattctctagttcttttatttgtcatgttaggttattaacttgagatctttctaattgtttgatgtgagcatttgttactatacatttccctcttcatagtgccttagctgtgtcccagagattatggtatattttatctgtgtttttattagtttcagagaacttcatgatttctcctttaattatttacccaaaattcattcagggacaggttgtttaatttccatgtaattgtacagttttgagtgattttcctaatcgtgattttcattttttttttttttttgctgttttccaagagagtggttggtatgatttcagttcttttgcatttactgaggattattttatgtctgattgtgtgattgattttagagtatgttaaatgtgctaatgggaaaaatgtatattctgctggttttgggtatagagttctctggataactatca

SEQ ID NO: 822088 - DNA, 466 bp, Homo sapiens
tagtgcattcttgtgtttaccaaaggcatggayataactcttttggagtgtcagcattctaaaatcaatatcccaaaaggcctgtaaacacctgaagattcttggcttagcacgaataattgaaagtatggaagaaagtgacagctgtttaaatattttaaagccattcaaaagagatgctctcttagtctgctcaggttgccataatgaaatgccacgaactggtggcataagcagctgaaatttcttttctcacagttctggagactggaagttcaaaattaaggtggcaacaggaccagggcctgttgagtggtttctctttgggttgtgaattgttgactgtcactatgtcttcacgtggctttttctcgatgtatttgctcagaaagagaaaactttgctgtctcttcctcatcttataagggccttaatctcatcataacagccccatcctcatgacctc

SEQ ID NO: 822089 - DNA, 631 bp, Homo sapiens
ttggcacaatttgatgtgaatggcacatattatttttcacagaagtttctgtgtgttggactcaactttacattgtttataatttataaatgcttaaaacaattaaatttcatcactaaattgcattacccttgcgacttcacagtctccctcaatggaattcttaccttttaagtttcagggaaaatggtgcaaacaggcttgaaatgcctaacatgtgggtagaccgatcacaatccttaattacttgaactctccccatcttgattgccagatttagtgtaaaagggtatcctctctgtctaggatccatatccatccaatttatggctcttaacgctttgcatttcttcacaaaccttacgtaaatttcttcagcaagcattttttcacaaaccttatgtaaatttcttcagcaagcattggctactgtaccaaaatatgaaaatataagtttgagatgaatatatcgatcttgccataattcagtttatatgctggtaggataaaccaacattaaaatataatacaatattaatttgaatatatttgttgaaatcaccataaaagtacaaggctatttctactcatttacttttcacatttatttawtctatctttattatatgta

SEQ ID NO: 822090 - DNA, 638 bp, Homo sapiens
aatttgtttttttcatgattagactggagctttgtgttttggggaggaagatcacagaggtaaagtgccagtctcatcatgttgtatcaaggatatgtaccatcaatacgacacactttttatgttaatattactatgtggcctcaggtcaagttgttcctaggcgaaactgagggttgggctgctatttctcatgggccaataatgagatgtagatgaactggggaggaagagagttttaatttctgtaaccagttacagtgggaaggcctggaaactatcaccagaccaactcaaaattacaaagttttccagagcttatataccttctaaactatatgtctattggtaagtgtgcattcatccaaagtcataagtgactaacttcttttaatctatatctaaggcctgagtcctgaataccttcttctggagcctcagtaagtttaattaatctaaatgggtataggtgctggggtaattccccttctcttgtctcctgctaaatcataaaggtttggggagtttctttagtccccaataaacttgtttgcggaggcctggggagtttcttcagacccccccaccccccagtaacatttrtttaatcctaaaagcgtcctgttgataattccttc

SEQ ID NO: 822091 - DNA, 629 bp, Homo sapiens
ctctccacttcctgaccaggcagaactccaggcatttgaagcatctgctcacatgatcagcaaccagaacagcaccacctttcctgtgcatagatcatgtgcagcggagccctctgctcaaagsccaagcagatctccaggcattcaaagtacgtgcttgcccatattaacactccaccattcctatgcagagtttcaagtgcaggtggggccctctctgccccatacccgggcagatctccagacatttggagaacccactctcctgtattaagaatataggccacccctgtcgccatgcagataacttggggctgaggaggttttccaactctacacctagactcacctgtggtcacttggtggtcacttactgaattctccctcaatgctcatgcttgtgtttgccatcaagggacctgtaggcaaatatatgccgtctggccctgctcaacttgccccatatccccagggctgagaagggccctcaaaccactgtgcactccatgaatcagcctgagttcacagagagtttctcccagtaaacaaggatcaggtatatacccagccttgttggtaacaggactcttacccataagcccaatctaactgcagagatcattataaat

SEQ ID NO: 822092 - DNA, 591 bp, Homo sapiens
ccccaagcaaccactgatatgctttttgttatggtaacaatagattgaaaaataccttagagatcattagcctttgttaccaaggagttcagcgtgtggagatttccatggaataagaccaggaggraagttgaagtaactgggactaggctgatatctgctcactgggaaaggggatggatacaaagaggaacttggtgataacaggacacagattccaaagcatgtggcaacttcggattgggttcaggtaaactttaagattggggtagactggggttttgcaggtcctttaaaggaggtccttaggaaatgatgccatccttgaactgcacaaccaaaataaaaacatacagacagaacccccaacccaaacccagaacttcaaggttggcagtggaaaaggactttcctggtaggtggggcagctgatttttgtccttcaaatcctcttggctctcttagggtcactcctggcgatgggagacataccatcattccgtggtgggcaggtctatgcaaaatgatccccagagtccaaggaagcagagaggccaaagaaagaggttgacaaatccagtttctcagaaa

SEQ ID NO: 822093 - DNA, 591 bp, Homo sapiens
tatttcatgggactgtttaaaagattaaataaaataacatcagtaaagctcttagaacagtatctggcaagtagttagcactatatgactgtaaggatcattatgaattggttgttatagctattatgatgatgaattggttattattagttggatatcaagtaatataattttcactccatttgctaatttgaaatccccttatctccaaaattaggaaaaagcttattttaaaagcatctaactggtatatatatgttggcacccacaaaacaggacatcctataggaatagttttattcttttttcattaccttatgatattgaagtagcctcttcataaacataaatcatatttcatagaaccaaaaaacaaaaaacttgttattggtattatcctatagaatatggaggaaaatacaaatcttttctttataagctttatttaaatattcacagacttgcatgaaaacacaatcttcctgaaaatctatttgtgtatatattttttcagaagaatgwggttttttttctcatgaagtacttttaggatttcttttattttttccatttaaaaggaaactgcctctg

SEQ ID NO: 822094 - DNA, 642 bp, Homo sapiens
ggaaattctaacatgtgctgtaacatggagaagacattttgctgagtgaaataagccaatcacaaaagggcaaatactgaatgagactgggtatcaagagcactsaaatccacagagactgaaagccaggggctaggggaggggaaatagggagttatcatttaatggtacagagtttcagttttgccggatgagaagagttctgtggctcgatggtggtgatggctgcacaaccgcacgaatgcacctaatgccactgaactgtacattttaaaatggctaagatggtacttttttttttgagacaggggctcactctgtcacccaggctaaagtgcagtggtgtgatcacagctcactgcagtcttgacctcccagattcaagtgatcctcccacctcagccccacaagtagctgggactacagacgtatgccaccaagcccagctaatttttaatttttttgtagagatggggtctcactatgttgccaggctggtctcaaaatcctgggcttaagcattctgccctcctcgacctcccaaagtactgggattacaggcgtgagctatgatgcctggccaagatggtacattttatgttatgtgtatcttaacacaatttttgaaaataaaattaaata

SEQ ID NO: 822095 - DNA, 519 bp, Homo sapiens
catttctattacaatgaaagaaggaaagaaaggatttgggaggataagcagcagtttccaccatatgtataatccaggcaacaggactccaacaaagataaatcccagatgatgttgaagggacccgtagaatgtcctattcacagggctagagctgtgaatcaggccacagagcaaagagtccagacaggaacaggaaagccaaaaagctctaggaagggcggccaatgaaaataatgaaaccaagagaatacctgtatttgaatgtattttcaggagattttgtggatgaattaataataggtacatagaaaactaaacaaaatacaaaaacagaaaactattaattccagggaaaacaaaaggctgaatgaaaaaggaaacataattataggattctatgtggcttacctgggaataatatttacatagtcataaaataaatatttaatgttgattttacccaaaatggtggcataactaygttgggaggttgagcagagggaaagtgtgtgcagg

SEQ ID NO: 822096 - DNA, 589 bp, Homo sapiens
attctatgtggcttacctgggaataatatttacatagtcataaaataaatatttaatgttgattttacccaaaatggtggcataactatgttgggaggttgagcagagggaaagtgtgtgcaggccagtttaatgatgataataagtaatatttatatagcgcttactgtgcaccagacattattctaagcccattatatattcaacatttaatcttcatagtcactctatgaggaagataatattattgttacaagaaagcggtcctgatccagaccccaagagagggttcttgggtcttgcgcaagaaagaattcaggatgagtccataaagtgaaagcaagtttactgagagagtaaaggaataaaagaatggctactccatagacacagcagccccaagggctgtcggttgcccatttttatggttatttcttgatgatatgctaaacaaggggtggattattcatgcctcrcctttttaggccatatagggcaacttcctgatgttgcctggcatttgtaaactgtcatggagctggtgggagtatagcagtgaggacagctagaggtcactctcatcaccatc

SEQ ID NO: 822097 - DNA, 597 bp, Homo sapiens
tcaactttgttccataagcagtcattttcagtctaggcaaagcactgcttgytgcaggtcagcagttctgcaaattgtttcaaaagcatgcttttaactgggaacctcgacataaaagtcaggtaaggatggagctactttgttggaagtgggaagaggaggtccctggtgcccccaggctccacgctgaactccacaaaggggacctgcatcccttccaaggagcaaggatgtccttagatcataagatgttttcttttctttttcttttcttttttgagacagtcttgctcggttgcccagactaaagtgcagtggcgtgatctcagctcactataacctccacctcccgggttcaagtaattctcctgcctcagcctcctgagtagctgggattacaggtacctgccaccacgcccagctaatttttatatttttagtagagatagggttccaccatattggccaggctagtctcgaactcctgacctcaagtgatctgcccgcctcggccttccaaagtgctgggattacaggtgtgagccaccgcgcccggccacacaagacgttttttaagttcaaaagccattttctaag

SEQ ID NO: 822098 - DNA, 558 bp, Homo sapiens
tgatgattcctgctctggaggggcatcactgggtcaggatacctgggcatataagccataggcactggtggtggctgggaagggcagcaagttccgtagacatgggactctcggggccragatggctcaagaacactgtggggggtcctgtctgaatgtgagagtccacgagtgtcaccagagcagccaggtgtgggctgcagcaccggggcaattgtgttcattcctcagcgtggggcctctcatcccaccccaggacaggataaaaaaatgtcatggaagttttgcaacttggctggatgatttgctcaccgcatgtgggccacattgtcctgcccctcctggcagatctttggctctggaagtggtgtggcactcactccccatcgctggctcactgcaggccttccctcctggcagctctgctctggggcctgcctgcccaggcctgattaatgcagcccagtttcctccaaagatgccttggaggtggaggtgggggggcgctcagtgaagtcattctcacagcctaattgactgatcatttttatttctcct

SEQ ID NO: 822099 - DNA, 591 bp, Homo sapiens
atttctggggagactttctgtgctgaagagaaggctaaggacagagagaaaacactcggttatttgtcacagttacaaagaataggctgagaattgggcctaaattagggcaggaaaaaaatcaggtttaatctaaggaagaactcatctaaaagagtgattaaatagtagcagaactatcagaagatagagtggaataattatctcagtaagatttgggccgggtagggtggctcacacctgtaatcccagcattttgggaggccgaggtgcgcggatcacctgagatcaggagtttgagaccagcctggccagcatggtgaaaccccttctctactaaaccccttctctactaaaaatacaaaaaattagctgggcatggtggtgggcgcctgtaatcccagctacctgggaggctgaggcaggagaatcgcttgcctcctggaggcagaggttgcagtgagccaagatcgcrccattgcactccagcctaggcaacaagagtgaaactccatctcaaaaaaaataaaaataaaaaatatttggatagtcacctgtctagaagcaggaggctggacaagatgacctcag

SEQ ID NO: 822100 - DNA, 583 bp, Homo sapiens
acaggtgctgagcttaatacctgcatgatgaaataatctatacaacatatccccataatacaagtttacctatgtaataaacctgcacttgtatccctgcatttgaaattaaagtttttaagtcaaaaaaacagtttggttatttttttgtaagaaaaagtaaaaaagcattatgtagaaaaaaaaaacggaaacattcaaatatgcgggcagtgcttggatctgagtggtgggctgtggggatatttccctaaatgctgatcacttatttactgctggttttttgttgttgttcttgttgtttcggctttttttttttttttttgagacagtgtatcattctgtcagccagactggagtgcggtggcacgatctcagctcgctgcaacctccgtctcctgggctcaagcaattctcctgcctcagcctccccagtagctgggattacaggtgygcgccaccacgcccggctaactttttgtacttttagtagaaccagggtttcaccatgttggccaggctggtctcgaacttctgatctcaggtaatccatccgccatggcctcccaaagtgctgggatta

SEQ ID NO: 822101 - DNA, 583 bp, Homo sapiens
acaggtgctgagcttaatacctgcatgatgaaataatctatacaacatatccccataatacaagtttacctatgtaataaacctgcacttgtatccctgcatttgaaattaaagtttttaagtcaaaaaaacagtttggttatttttttgtaagaaaaagtaaaaaagcattatgtagaaaaaaaaaacggaaacattcaaatatgcgggcagtgcttggatctgagtggtgggctgtggggatatttccctaaatgctgatcacttatttactgctggttttttgttgttgttcttgttgtttcggctttttttttttttttttgagacagtgtatcattctgtcagccagactggagtgcggtggcacgatctcagctcgctgcaacctccgtctcctgggctcaagcaattctcctgcctcagcctccccagtagctgggattacaggtgtgcgccaccrcgcccggctaactttttgtacttttagtagaaccagggtttcaccatgttggccaggctggtctcgaacttctgatctcaggtaatccatccgccatggcctcccaaagtgctgggatta

SEQ ID NO: 822102 - DNA, 630 bp, Homo sapiens
caaattggtggactttgagtaatgcacattgtccatcataatgtggctaggcctcggccagtgagtggaagctttaagagaaaaaagcccgagctccctggaacaaagaggagatgtctaagcagacagccttcagatgccaattgcgatgttgctgttccctgggtctcgggactgccctctcggcctgcaggatttggaacggccacacgtacaccctaccggttctgtttctctggagaatcctgactaatacactcactaaggccatgcgtgtggggacaggagtgagtgtgtccccagaacaaagctgcctctggctgaagagctgttctttgatagtgtttgaatgaacccacatctctcagttgatgaactgggaaatatgtgtgctccaggacggaatttgtgttaaggggtaaaatcaggaactgctgtttcatgctttgaggcatgggagagggagggaaatgcaattttatcctaacttttttagtatctgttttttttcaacagggtgccttgaagccagtcatctgtggaatgtcctttgacamcacccacaagggcacacctccagagacaggaggcaagacttcaggggctgctgccttctggatcgggaagggg

SEQ ID NO: 822103 - DNA, 623 bp, Homo sapiens
atggctttagtataattattaggagaaagtaaaagacatggagatctgtaccatttagtaaccaatccttcaaaagatgactcttaygggaataatgaggatccatgatccgtgcaagaccaaagtcgcctatcttcagcaccaagtcttcagtattaatgaaaagattagttggtttgagatctctgtgcagtacatttgcagagtgaatatacttgagcccccgtagcagctgatacatgaaaagcctggcatgctcttccagtaaagggccctgctccagcactttagacaagtctgtcttcatgtactcctgaacaatgtaaacactgtttagttccgtaagagagcccacatcatctgttaattggctcccactgggaccaggaatttcaaacactttcacaatgttatcatggtcaagtcttctaataatcttgatttcacatagagcatgtttgacactctggggattggtaaggacaattttcttgatggctactcttttgtcacaatcattgtctacagcagaaaaaaacaagtaattgcctccacaacccagtggttttaagtccatatacgtagaatccagatcaaaaccatgaatgttcatgagactttca

SEQ ID NO: 822104 - DNA, 468 bp, Homo sapiens
tgctttttacgtatgttccaaagaatgcgtgctttctgtcactaagagttttgcttctattcagttccttaaagaatcttcatctggaggatacaaaaactgaagtataaacaatttatccaaatatttgaaagcaaaaactgcaatctaaggtgtttggtttttcctttgcttaaattattatattgttctcattaaaatagtgtgttctaatctctcatagtcattggctcttaaagcttaaatccataagaatgcgctggagaaattttttaaacttactaaagtacagaagatccctgatttatgatggtttgactttcggttttttactttactatgggtatgaaagtaatatacattcagtatgctcctggacttacaayggggttaggtcctgataaacccatccctgtttgtctactgccctaccttaattattatagagggcccttctcactctcaaaa

SEQ ID NO: 822105 - DNA, 647 bp, Homo sapiens
actctaattttattctttaatataaagcttcttgagaaacttattttaagtataaattgtgtaaaactttcaacctgtcatttattacaaaactaattcgtatgaatcaaccaactagcaattttttattttaacagagaaagtggtaagattatcttttgaagaagagttaaagtttttcaaaatttcagaatgttcacatgtataatattctgattttgaatttgatatattaaattttaataataatagaaattgaaaaggacttatagtatattctctgagtttagcaatatatcaacttaagaggttaacaaatataacttagggatatttgcccttattttattatatatataccagtataaattttgaatttaggttgttatggaaattacacttgcaaatatacaaatcttaaaaattaacatgaatgtgacactaaatcatgcaatggttaatattcaagttgatacatttccatttttaaataaaaaacaaaggcctacctatataggtggcatatatctttgaaaattttgcaattaattgtatttggcaaattttttgataaattgygtaatataatgcatttcccactcaaaatcaatattcacatttagactctatgatctattccagacgtg

SEQ ID NO: 822106 - DNA, 620 bp, Homo sapiens
ctgtcacagaaacaaacatagcgggcactcttgagcagatatggaaggcttccagagagggtcacattgagctgagtattgaaatgtggttaatgacagtcgtgcaccaggaaaaggatagcattctagcakgactgaactgcacaatggctttggcatttcctcctagtactctgctatgaagcgtccactgaattcatggaacttagttctcatagaaattatcttgatgtttttgttagactgtctacaacaggaaagatgaactagaaaatttactgagttgtttatactcttattatgatcaaataagtgtttttgaattaaatatatataaaattagagtcattattgtcttaaggtacatagtggaaaactcaataatagttgaaggaagctgatttgtttgcattgctgtgttttggacatagagaattattactggggtaatgtgttttgttttaaagagtaatttggcttaggtattgctattcttcagaatatgatttctgccatttttaaaccctattattcttacagcttcatgtcttctgtcaggtcttcacatcatttatcaaaatttccatcctgaggatgataaaagttcaggtatctcattc

SEQ ID NO: 822107 - DNA, 647 bp, Homo sapiens
atgatggaaagctaataaggtttatgctagaggctcttactgctgggactctcttcctgtttttggtttttaggaaaaaagctagaaaatccaacttcagctagagtaacagtagtaactgacttgaaagtatgtcaaaacaaaaactgttaaggtcatgaggattttaaaagattagtgaatataaatgaagatgtttaaagatgacactgttagtaaatatgctgccagtggtcagcattttaaaatgtgtgtgaagcaaaaaacaaaaacaaaaacacaaaaaaagagggagagagatttgcttcgtgcttcaaggaacttgcaacttaaatgatgagaaatccagaggggtggtgatgcgagggtgtggtgatactgtaagtagtggtatgacgtcggaaggtcattgaaactcttttttccgcttgtaaaatggtgacatgctctcctctttctgttttattcagctgcgaggctcaaatggagaacttttaaaaaccatagttatacaaatgcaagtttgggttattttactatttggtaatgcaggaagttctggcggggttcctggcgccattttatctagcgcygccgctgtaggcgtggaagtaccttccctgccctggggtatagcggaagtttgg

SEQ ID NO: 822108 - DNA, 593 bp, Homo sapiens
ggccagatgcacccagtgcttaaataggttcagagtgcttttataaatcgaataaaggcaggtatcgaatggattcatgtttcagacatctaattataagacrttaccacctgtacattctataggcaccatagacatctaatgagcaaagctgaacttgccatattcctcatcccataaacaagttttctatccttccctctgtatccacctactctactgccataaccagaaacttctttctccccttttctcccattaaaacaccatttgccttacacaagtcttgtcagtcaacttcctaaatttcttttggattcatctctttctctctattcttgcacattatccctacctaaatattcgcacttctccaagtgtgctccctcttttgctcaagctcctctgtatgttagaaggccttttctcctttgcccactcctctttgaggtttagcttcgggcttgtttactctggggaacctcctctcccttctccaaaataaaattaggagccccttaatactctttgtagccaatgcttgtgatgctgtgtgccacagcttcttggcctgcctgggaagggggctcatg

SEQ ID NO: 822109 - DNA, 562 bp, Homo sapiens
actgaacaacaaagcatgccttttaaaagaaggaaaaagacacccagaggcagtagagatgctccatatgaggaacacaaactctttgccttgtatatactgtgtgttgcaccagcttcctaacaagggtccatgtttctgtccttgtaccactacaatccactgaaatccgagtagcccaaggatgattttaaattctaaatcatatccacacaggcccccccccccccaccccgccaacccactcccttggctttccatctcactcagggtaaaacctgagtcctcacgatggcctgttagggtttcatgcctgggctccctgtgatgtctctgacacctaccactgacttgggctctgctgtcatcaaacattgctgacttcctcactgtggccttttctcctgttattccttcagcttggaattcttttccatcagctatctgtcagaaccttgctcaaatgacattcttccttttttcagcctctcccaatcccacsaataataaaaatattgatgacaataacagtagtaatagcaataaaaacatggtcttttct

SEQ ID NO: 822110 - DNA, 564 bp, Homo sapiens
ctgttcttccgccctggattattgtcattcttgctgttgttctagattctgggggtggggcgttgtggaggtggccagctatcggtcagatctaaacacactagcatctactttggtgcccactgcccacatctggctctgggctactgctgtccattcgccctccaccgtggcatcaggtatagaccaggtggctgaagctgcatctgctaatggggttgcctaatgccgacccagagcttccagctggctgtggattctttccatgaaaccggagtctgcttcctggaccccagccagtgaaggtgccccaggcccatcggcctggcacaccttctacctctctctctatgctcctgtgtcacgacagcaaagagaacgtccttgttctcttgctcccctaccttctctgcggccagcccaaggtgggcggggctctggtcctctgcacgatgttactcccaccagctctcctctgtcccctgctsccttctctcctggagtatttttatctcctctaaagcaggaaaactggctcttggatcaacagtcattctttccaac

SEQ ID NO: 822111 - DNA, 571 bp, Homo sapiens
cgggtcactacaagctccacctcctgggtttgcaccattctcctgcctcagcctcccragtagctgggactacaggtgcccaccaccatgcctggctaattttttgtattttcagtaaaggtggggtttcactgcattagccaggatggtctcgatctctgacctcctgatccacctgcctcagcctcccaaagtgctgggattacaggcgtgaggcactgtgcccggccacaacagaaagttattttcttattgttctggtagctgacaatccaagtttaagaccagggtgtctgcatggtcaggttcagggtctcttctggtcttaataggcagctgcctttttgccatgtccttatctggagagagagagagaaagcaagctctctggtatctctggaaacaaataactatatgaaaaatataatacactgtgagaacacaatggtagaaataagatcacagtattgaggaagcaggctaagggacacttaactatatttgaacatgattaacacagttttaagttgtagattgaaggaaatgtagagtttagtcaatccaaaaagat

SEQ ID NO: 822112 - DNA, 571 bp, Homo sapiens
cgggtcactacaagctccacctcctgggtttgcaccattctcctgcctcagcctcccgagtagctgggactacaggtgcccaccaccatgcctggctaattttttgtattttcagtaaaggtggggtttcacygcattagccaggatggtctcgatctctgacctcctgatccacctgcctcagcctcccaaagtgctgggattacaggcgtgaggcactgtgcccggccacaacagaaagttattttcttattgttctggtagctgacaatccaagtttaagaccagggtgtctgcatggtcaggttcagggtctcttctggtcttaataggcagctgcctttttgccatgtccttatctggagagagagagagaaagcaagctctctggtatctctggaaacaaataactatatgaaaaatataatacactgtgagaacacaatggtagaaataagatcacagtattgaggaagcaggctaagggacacttaactatatttgaacatgattaacacagttttaagttgtagattgaaggaaatgtagagtttagtcaatccaaaaagat

SEQ ID NO: 822113 - DNA, 298 bp, Homo sapiens
gcattattgtgcctatattacctcctatatttacaggagaggaaatcgagcttcagtggggtcacttggtcaggatctctcaaagtgttaagtggcggagctgaactatgacrctgagtaattctgacttcaatagcagcaatctctctccctcacacctggtgggtgtgactccttattccagcaaactaagtgtatcttcatcaagtatctcaaaaagagtaatttggagcaaataagcgagctcatagatagcaggatcttaaagctgactgttttgtcccagaaatctcaactt

SEQ ID NO: 822114 - DNA, 298 bp, Homo sapiens
gcattattgtgcctatattacctcctatatttacaggagaggaaatcgagcttcagtggggtcacttggtcaggatctctcaaagtgttaagtggcggagctgaactatgacactgrgtaattctgacttcaatagcagcaatctctctccctcacacctggtgggtgtgactccttattccagcaaactaagtgtatcttcatcaagtatctcaaaaagagtaatttggagcaaataagcgagctcatagatagcaggatcttaaagctgactgttttgtcccagaaatctcaactt

SEQ ID NO: 822115 - DNA, 637 bp, Homo sapiens
tttcccctaagaggtgggcgtcctgccacaagaaatggctcatcgggaaacactgagtgaaaacccacattcagagcaaggcttcccagtaactgagatccagcctgaggtttccaggagctgagcctcagatggaatgagggcgggctcagagctcagccaaccctttgaaactgagcctgcgggtgaagtcaggtcaatacattcacaggcgtttcaggccctatcgacgtctggggtgggaaacccacccgaaagctgttgaaatacaggggccagcactggttctgcagaacagtggctctttgagtggaaggtgttcgagaattaagtttccccagtgttcccagggctcagactttaagccaaggggggctggggcccccagtgcctgatggagccgctgataggtccctgctggctaaaagtgatgacattggcaagaaactgatctttctggggagcagaaactcaagagcactcaagtgaagaacacaaggcaagttgtgttacctgccacaaagccccagctttcaggaccaggggagggktagatggggaccacttggtattgggtatcaggagacccagaccagaccctgaaggaggaaacggctgaagcgagacctcttatctt

SEQ ID NO: 822116 - DNA, 555 bp, Homo sapiens
cagtggaaaaacccagagaaatcacacaaatagaaaatatccacatcaacttgagaagctaagcctgcgcttgaggcagttcttggagcagcttctagcaggggcccagaccaacaccatcagcaaggagctgccgggggctcggccccctgaaggaggtttttatgactggccttagctgccctcctgaggctgacaagggctccactggggaacctctgggcaagtcggtggagggcccctcagcatcatctgggccttgctggcagcaaaagtgggtctcagaaaccaactcccatgagaggagccacctggatagagagtgggcagtgagagcaggacacaggttccaccacagagcagcagagacacccagaggctcctggtccatggtgcctgggggatcagaaggactcacacccggaggggaacgggcctgtkgagaatgttaccctggccaggacccggctggcaccacacgccccaatatccctgccttggctctgtgaggagggctctgccagggtttgaggggcctgcgtgggagccagggca

SEQ ID NO: 822117 - DNA, 488 bp, Homo sapiens
ccagccacaagtcccagattctactggggaccgtcatcctttgtggggattgggagggtttggccaggagcacccctgggaagggcagattttagggggttcttctcaggctgaacctggcctggtctggtccacaggatctgtaatggtgaagtcccccatgaatcgggagctggttgccacctatgaggtcactctctcagtgattgacaatgccagcgacctaccagagcgctctgtcagtgtgccaaatggtaaggttccctgcagacatctctcattggtcactcagagccaatcagggcagggggcaggtggggaacaggcactggtctgtccccagggagggagcaacaagacccagttgctctgggggccaggagtcaggcaacacaagaggcatgaaaggtggcagccaccgtsaggcccagggtggtgatggctacatagagctcagcagtggaggatccagaagctcagaattgtgt

SEQ ID NO: 822118 - DNA, 591 bp, Homo sapiens
agtattgtccatattttcaacacatttctacacagtataacttttataatgagaaaaatattttaagttagctatgaggaagtacttcacgagattaaatcccgtcaatgcttatctttacctacttcaggtgcatgtctctgtaagctgccttttaactgtttttagaacatggtagggtgtgagtaataatcccaaataaactactcctcctcagcttgcttgagtggttacagcaggtcagagagtcaatctttcaggctccttggccataagatctggctgcaactactcaactgtgctgctgtagcacaaaacaggcgtcgctgtgttccaaaaaaataccctttaagtacaaaacatgatgggccagtttgctgacccctggatcagagaacaaactcaaacgctggtatgtcaatctcaagtagtcagaaagcatgacagacagggaaaaggtgccccccacccactcagccctgccaatcagatctaaggaggcagtgccygttcccaacgtgagcaggccgccctgctctgcgtggactagcgagctcatttcctgaatgggtattcttgattctaatgaag

SEQ ID NO: 822119 - DNA, 591 bp, Homo sapiens
ccctttcttcttgtgcctgtttacttcccaagaggggagcctcggccaagggctctgtgaaagcagctctgttctgggccttgctgggccctggctctcttctcaactcctttccgggaaattgtgacrtctctttctccccgctactctgaaaggcccttctgggtggggcgggagatatgcagggggaggccaagtcttcctcctgtttgtggggagccagagccctatcctcagctctgcaacctgggggcccacactccctgggatgggagagggcctgggtccccctttccccacagcaccttccagagcagcggacccaccctgggcccccacctgcttccgcctctggtgccactgagcatgtgccctcagggccgtgtgtggctccgcctcccccagcccaccacctgccccagaggccacgggccacctgcctgcaagatgctgtggccttcagggatgtcctcagggacgctggcctcatagctgctctgcagaaagatgggccggttgtcattcacatccaggacagtgacgaacacggtggctgtgcccgtgtgtcgcttccctacagggccgttgtct

SEQ ID NO: 822120 - DNA, 523 bp, Homo sapiens
caggcgggaaccgtccagttgccgtgctgctgtcaagacccaggccccccgcccgccacccgccacctgccaccaggtaaggaggcagggccacctagaggaagagtgccgtgaacctgggaaagcctgagtctcaggagtaaaactctcgcttggattgcaacgtcctggggcctcagtgtccacttagttgtgccctcattgtgtgcccttgggcagatcccacccttctctgagcctccgtttcttcatcttaacctgagggctgccagctctaaaatcctgtgggcaggagggaagagctgtcttatgaccatgtattatgtgctaggctcttgctgagcatcttatacctgtcacatttagttctcataacacccccaacatgggtggtatcatcccyattttaaagatgaggaaacagactcagagaagtgacttgcccaaggccacacagtgctgtgtgactgagctgagattcacaccttggacaggccagcactgcagacaggaagagccaccc

SEQ ID NO: 822121 - DNA, 523 bp, Homo sapiens
caggcgggaaccgtccagttgccgtgctgctgtcaagacccaggccccccgcccgccacccgccacctgccaccaggtaaggaggcagggccacctagaggaagagtgccgtgaacctgggaaagcctgagtctcaggagtaaaactctcgcttggattgcaacgtcctggggcctcagtgtccacttagttgtgccctcattgtgtgcccttgggcagatcccacccttctctgagcctccgtttcttcatcttaacctgagggctgccagctctaaaatcctgtgggcaggagggaagagctgtcttatgaccatgtattatgtgctaggctcttgctgagcatcttatacctgtcacatttagttctcataacacccccaacatgggtggtatcatccctattttaaagatgaggaaacagactcagagaagtgacttgcccaaggccacacagygctgtgtgactgagctgagattcacaccttggacaggccagcactgcagacaggaagagccaccc

SEQ ID NO: 822122 - DNA, 590 bp, Homo sapiens
cttttgagcttctaagggtccaggtcctggcagtttagggtttccaaaggtgcttttggctttcaaccccctttctgcctgctaagaagtgacagatgttctgccagggcaggtgtctatgcagataagcmtgggtatcgtgtagaccctcactgcctgctcttctccatgctatgctcctgcagtgtggattttgtgaagtggtcctcgcaggggatgctgcggatgagtccagatgccatgaacgccctttttaagccgaccatcgatagcatcattgagcatctccgtaagtatcagccaggctcggccactcggcgaggcagagctgagaaaggggatgggctttcccagcatcaccagctggtgcctgtggagtcaggttggcctggatctgggagccacaggcaagggccctgcaggactgggcagggcttgggcatgtatgggagaggttactgggcataggctctggatccctctcctcgtactgcaaagctgctgagagcttgtctcacccaagctttccgtttggcctcaaaagtcagagagctggtaatgacaaagaggaagaattaaataaacaaaca

SEQ ID NO: 822123 - DNA, 562 bp, Homo sapiens
agtctcaaaatggatgccaaggcaacataaaatttttgaactcctggcctcaagcgaccctctcaccttggcctcccaaagtgctgagattacaggcatgaatcactgcacccagccaggatggggctaggagtgaaagggtcagtgaacttgaataggcaaaagtttatgtccttattttcattaatctctggctgaaatgtagcattactttcagttataaatgtagaggacaaaccaaacaatgttagcaatgcctgtgactcgtcacccatagaaatcacagagagttttacatcctattactttgcttgtagatattttgaaatatccacttaaaaattatgattgttatataattctactagatccttgttattcaatgttttaatgaagaagcacgcatcataatttttaaaaggatttgataatygtattaacaaataattaggttccctggtaatcctacctggtttattttatgcatttaaaaacattattttccagtctgggtaacataggtagacaccatatctacgaaaaataaaataaaataaaataa

SEQ ID NO: 822124 - DNA, 564 bp, Homo sapiens
ctttttattgactttcaagagctttgagatctttggaggaataagaaattagccaccattcagtttgcattctctttctattttaacttggtccacctctggtacacagaattgatttaaacgtaattctcggctcacgattaacattggtccatgtgtagctctcttttgtttcattcttagccttaataatattgtggatgcctgtgaaactcaccagctcacctagagcaagaccatcacccatgccttacctcgccttacccacaccttattcataccttacccacaccttaccctcaccttacccacaccttaccacctgtgtgttcctcctctaccccattccctgcctcccatcctccagaaccacatatttgaatcctgcattctcttattctcttccttttggcaaatatcttatcgcatatatgtggatgacatattgcttgaatttagttgtctttgaacwttattttacaaatatcatgttatacataggctcctgggactcctattttatcctcgatagtatatatccaagactcatccatgctgtcaggt

SEQ ID NO: 822125 - DNA, 532 bp, Homo sapiens
tttctgatttaattctgctagatttcattttctaagtgctaaccatgaacsactagattgatttcatgaccaactaatggatagatgttcaaccaaactaagtttgaacctctctagaaggagccttctctgcttcaccatctgatgaggagaaggaaggtagtatcaacttgtatttctctagtgttcactacagggagcaaagggataaagaccgcgtcctccagacttagatcacccaggtttaccctgactcagctgtttcttttcttttcttttctttctttccgttttttttttttttttttttagacggagcctcgctcccttgccaggctggagtaccatagtgcgatcttggctcactgcaacttttgactccctggttcaaacgattctcctgcctcaacctcctgagtagccgggattacaggcgcgtgccaccacacccagctaatttttgtatttttagtagagatggggtttcaccatgttggccaggatggtctcgatctcctgacctcgtgatcca

SEQ ID NO: 822126 - DNA, 597 bp, Homo sapiens
gcggctccttccagctctcttctccaccacccctagggtgtgtccctcatcttcatggtcccagggggttgccagaactccagccatcacatccgtctctcaagctacaggatggaggaaatgaaamagggaacctcccctcccttttaaggatacctcctggaagtgctttgcaaacttctgctttcatctcacttcactggtcaaaatttcgtctcacatggctgtgcttagctgcaaaggaggctgggaaatttagcatttttagccaggtagcattgtgtccaccttaaaaaaaaaaaatcagtttctgttaatttgtgaaagttagggaaggcatggctgtttagtctctgccagatcacctctgtgtgcctccatttcctcttttggaagtgcaggtggtgatagttcattgtagaattatgtgggcttcagtgaaatcatacatgtaaagtgcttagcccaatgcctgacacagaccaggtgctaatcaaatgataggtactaatattgaggacctggtgccaagctgcgctcctgtcacgtgtgttatcgaagcctcatgacaacctggtgaggctgaaattatcctcc

SEQ ID NO: 822127 - DNA, 587 bp, Homo sapiens
agcagcctgcatctagcaccaacttggaacacaaagacacacaccatcaaacactggggggtattttggtgcagtaaaatatgaataacgtaaaatttaccattttaaagtgtgcaattccgcrgcattaattacattcacagtgttgtacaactgtcaccactaggaagttgtagaactttggggattattttttaaaggaacttgtattgaccttttttttttaaaaaaaaaaagaaagacaacaaatgtaattcagatcaatcaaaagagaaagttgaaatggctggagcaatggttcttcattggggcgattgtgcctctcaggagacatttggcaatgtctggagattattttgattgtcatatctgggggaaagtgctaccagcatctagtgggtagaggccaggggtgctgctgaacaactcacaatgcacaggactgcctcccacaacaaagaattatccagccccaaatgccacagtgctgagtctgaaaacctctgtcctagcactatcactcagataatctgtgttcacattttgctaacatttcattccttttttctatgtgcacattttttaag

SEQ ID NO: 822128 - DNA, 595 bp, Homo sapiens
ggagccctttcttcttgtgcctgtttacttcccaagaggggagcctcggccaagggctctgtgaaagcagctctgttctgggccttgctgggccctggctctcttctcaactcctttccgggaaattgtgacrtctctttctccccgctactctgaaaggcccttctgggtggggcgggagatatgcagggggaggccaagtcttcctcctgtttgtggggagccagagccctatcctcagctctgcaacctgggggcccacactccctgggatgggagagggcctgggtccccctttccccacagcaccttccagagcagcggacccaccctgggcccccacctgcttccgcctctggtgccactgagcatgtgccctcagggccgtgtgtggctccgcctcccccagcccaccacctgccccagaggccacgggccacctgcctgcaagatgctgtggccttcagggatgtcctcagggacgctggcctcatagctgctctgcagaaagatgggccggttgtcattcacatccaggacagtgacgaacacggtggctgtgcccgtgtgtcgcttccctacagggccgttgtct

SEQ ID NO: 822129 - DNA, 563 bp, Homo sapiens
agtctgggataccctttctttatttttttttttttaagatggagtctcgctgtgttgcaagtctggagtgcggtggtgccatctcagctcactgcaacctccgcctcccgggttcaactgattctcctgcctcagcctcccaagtagctgggaccacagatacctgccaccacacctggctaatttttgtatttttagtagagacagggtttcgccatgttggccaggatggtctcgatctcctgaccctgtgatgtgcctgcctcggcctcccagagtgctgggattacaggcatgagccactgcgcctggcccctgggatagcctttctaatacctccagataactcatcttccaactataatccaaagagctctggaaagtgcatccctccatgaagccttccagattgattgccagaagctgctagcttacagagcttccatttctactctgtgccttgccataacccaactgtccatgctctctgccccaatatacattwcttttttttttttttctttttcttttgagactgagtttcgttcttgttgcccaggctg

SEQ ID NO: 822130 - DNA, 602 bp, Homo sapiens
gcactgccctttcaaatcagtcttcatcacattccaaagaatacaaaatacgcaagttaattttaatttccaatgaattcttcaggagaaatttttcttcctccttcctaaaaaaaagaataaaaaatgcagaatagagattcaaaatgaggggtggcagcaaaaattctgactcgcagaaggttgagagggtgcctttttcaaatgtatttattttacagttccaagaaggtaagactaccttctgttttgattcatgcttcaccattccccacttaaatttttaaaaattacatccttgcctatgtctgtcttgctatttgactggtcactcccaaacataaactgccctagtttgaagcttcccaaagccaagcaaaggtgacagactagtacaaagaaggccgctagtgagtttttactgagtgaatctacattgttccatggccttggtctggatatagattctaaagcttcttacrctgacacaaatggagtttctagctctccaggtaattttcggtgaaagaaaattatagaagaaggcataaaccttggctcacaaaataaatacgcactcagacccatgtacttcatgaaac

SEQ ID NO: 822131 - DNA, 602 bp, Homo sapiens
aattgacagtaataagttaaggatccatcttgtactctatctagaagmaaccataaaaaattaacacaaagcaaatagaggaatgaaaatggaatataaaaaatattacttcagaagacaggaaaagaagaaacagataaacaaaactagataagataacttggaaataaataacaagagggtagacttacacccaaccatattattaattatattaaatgtaaatgaattaaactttctatttaagaggtagaaactatcagactagattaaaaagcaaaaggcagccatataatcctaaaggagacagaaaaacaatttaaataaactggcacaaatagatgaagagtaaaaggatggaaacagtaagcataagaaggatggtataggtatatcaacagaaaataaacttccagacaaggaatattaccagtaataaaagggtactgcatataatgataaacaattcaattcaacaagaagatatagcaatcatataacttatgcagttaataacagaggttcaggatacatgaagaaaaaaactgacagagctaaaggaagaaatagacacacccacaaacatagttacagattttaat

SEQ ID NO: 822132 - DNA, 602 bp, Homo sapiens
aattgacagtaataagttaaggatccatcttgtactctatctagaagaaaccataaaaaattaacacaaagcaaatagaggaatgaaaatggaatataaaaaatattacttcagaagacaggaaaagaagaaacagataaacaaaactagataagataacttggaaataaataacaagagggtagacttacacccaaccatattattaattatattaaatgtaaatgaattaaactttctatttaagaggtagaaactatcagactagattaaaaagcaaaaggcagccatataatcctaaaggagacagaaaaacaatttaaataaactggcacaaatagatgaagagtaaaaggatggaaacagtaagcataagaaggatggtataggtatatcaacagaaaataaacttccagacaaggaatattaccagtaataaaagggtactgcatataatgataaacaattcaattcaacaagaagatatagcaatcatatawcttatgcagttaataacagaggttcaggatacatgaagaaaaaaactgacagagctaaaggaagaaatagacacacccacaaacatagttacagattttaat

SEQ ID NO: 822133 - DNA, 590 bp, Homo sapiens
gtggataatctgaactcaggagttcaagaccagcctgggcaacwtggagaaatcctgtctctaccaaaaatacgaaaaattagccgggcatggtggcgcacgcctgtagtcccagctactcagaaggctgaggcaagaggatcacttgagcccaggaggtggaggttgcagtgagccaaggttgtgccactgcacccagcctggatgagagagtgagggcctgtataaaaaaataataaaataaaataaatgacataaaaaggaaagttacagaatacaaatgccaataagcgtgaaaaaaatgttaactcttacaagtgttcatggacaaatctatcctttgttgataggtttgacagagtttaaaatgattgacaatgttaactcttggtgaggttgtgaagatttcctcacacactgctggagaaagtgtaaattgccctctccttttgggaggacaatcatgtaacatctaacagaattgtaaatgcacatagcttttcatccagcggttcccttcttggaatttacccttagatggggtccaagaagaccatacacagaaaaaataagctacataaggtggaaca

SEQ ID NO: 822134 - DNA, 590 bp, Homo sapiens
gtggataatctgaactcaggagttcaagaccagcctgggcaacttggagaaatcctgtctctaccaaaaatacgaaaaattagccgggcatggtggcgcaygcctgtagtcccagctactcagaaggctgaggcaagaggatcacttgagcccaggaggtggaggttgcagtgagccaaggttgtgccactgcacccagcctggatgagagagtgagggcctgtataaaaaaataataaaataaaataaatgacataaaaaggaaagttacagaatacaaatgccaataagcgtgaaaaaaatgttaactcttacaagtgttcatggacaaatctatcctttgttgataggtttgacagagtttaaaatgattgacaatgttaactcttggtgaggttgtgaagatttcctcacacactgctggagaaagtgtaaattgccctctccttttgggaggacaatcatgtaacatctaacagaattgtaaatgcacatagcttttcatccagcggttcccttcttggaatttacccttagatggggtccaagaagaccatacacagaaaaaataagctacataaggtggaaca

SEQ ID NO: 822135 - DNA, 623 bp, Homo sapiens
tgctattttgcagatgtttaaggwtaataagattgacattcaaactagacaattttgaatactaaaataccagtaacaccataatgcagaagttccagaataccatgggggggaaaatgagcattattttgaaaataaactttgactttttttagagagaaaaatctgagttattaaggaatatagagatgaaattgttaggaaatactgcaggtattcattttttaaaaattgaattctgaacagctcatcagagtataaaataatatgattttatcttctgcccctaagatctacaacttttgtcataactgtttgaggttaaataaaataaactttagagtttatttttaaaagtctcgttaatttatgtatcatcaccattagaaaacttcggggaaagtggtagatcgacttatcttttaaattctggactagagtttaaaactgtgaaagcaacatattttggtaaaacttcctataacacttaatagcagctttagattatggaggttttcgaggaaaaaacttttgttcctttaattggtactgaaacattgtattttttcctatggccatggtctataaacatgaaagcatgggagttgtccacacaccccaca

SEQ ID NO: 822136 - DNA, 596 bp, Homo sapiens
agaagataaacaaacaaggaaactatcggagtgtaatgtgctgataattaaaatgaagagatgagagtgcaactgcgtgctccatcaggggatggctttagattgggtggcttttgctgcagctcttgtggtgttgagggtgggggggagttgacaatttatgatccacaacaccattaatcaggttgagaaagtatcagatacaccgcagagttctgcaattttgactctaagttacacaaaaagtaagttttcttatctataccagacagagggtgtaaccaggccttgttagaaaatgaataaacagtgattccaagtgccatttcctttgtctgtttagagaatttttagttatcacaaagctttcttatgaggtctttgataaggcaatggcatggtattaaaagctattatctaagaaaacaaaaccaatagatgcatattttacctgatgctatctttaagtggcagacatcragggacactggaaagtaacttgggatattaaagccaggcactgtcccttgggcctcagccctaagtccagggtgtcctttcaggtggggcacctttgtagaaacatcctcttgccc

SEQ ID NO: 822137 - DNA, 596 bp, Homo sapiens
agaagataaacaaacaaggaaactatcggagtgtaatgtgctgataattaaaatgaagagatgagagtgcaactgcgtgctccatcaggggatggctttagattgggtggcttttgctgcagctcttgtggtgttgagggtgggggggagttgacaatttatgatccacaacaccattaatcaggttgagaaagtatcagatacaccgcagagttctgcaattttgactctaagttacacaaaaagtaagttttcttatctataccagacagagggtgtaaccaggccttgttagaaaatgaataaacagtgattccaagtgccatttcctttgtctgtttagagaatttttagttatcacaaagctttcttatgaggtctttgataaggcaatggcatggtattaaaagctattatctaagaaaacaaaaccaatagatgcatattttacctgatgctatctttaagtggcagacatcaagggacamtggaaagtaacttgggatattaaagccaggcactgtcccttgggcctcagccctaagtccagggtgtcctttcaggtggggcacctttgtagaaacatcctcttgccc

SEQ ID NO: 822138 - DNA, 572 bp, Homo sapiens
ggcttgtgttgtaagttaagtcaacatgtagcttaagtgcattttttaaaaattttattattattatactttaagttttagggtacatgtgcacaaagcagagcaaagctgaaacatttaaatattcagatatctccctctaaaatatttaagccaatgggggatgaaacattgagtaataatattgtgaaatatgtgacataagaattttgtcctagaaagtacccatgttaggaatgttgatgggaccaccagggtcatagtgatctttctccacatggctttcaaattttcttctccttttgctgaacattacttcagaaataaagtgaccccattttccagaataaatttatcttttaagcattggtaacattatttttagcatggaaataaatattgaaattttcagttgtctaattattttacccccaaatatccccttttgaatttcagcattttaccgtaggagagagaaagtagtataatttcctcacccttcacaagggtcacagctaamaaccctgtaataaaagatagattagcaagagaaaagcatattcatttattta

SEQ ID NO: 822139 - DNA, 520 bp, Homo sapiens
cgttccccttgccggcctgggctcaaacaacagccggagctgcgccgccccgccccgccccgccccggtcccgggagcaggccggctgagggcggccatggaccccacaagggcttgggccgccgcggactyccccctcggggctaggagacggggaccgagatgggccagaagcccccaagccagcccctggcgagaagccggaaagacgcgccctccgcctcctcccacccaagcctcgcgcagtcccagcccggcctgggatgggcaagtcgcgggggaaaggggcgggcctgccccgcccggggagccggagcctctccggggcaggctcccctttgtcccgggactcgaagcgccccctctccgtcctcgccctgccccgcggggccgcggccgggcgcctcaccgtgatgttgcagtggagcgtgagtggcggcggcagcgagtgcgggctgccctgctgcggcaccaggaactggcagtgcagctcgtccagcttccaactgacgatgcggaa

SEQ ID NO: 822140 - DNA, 585 bp, Homo sapiens
cctgaatttcccagtaccttgtctattacagcacttatttaactctgcctttgttatgactagctggtttctcatttgtctcctctgcgagattatgaacaacttgtcctaatcctcttcatgtctgtagcacatagcctggttcctgggacatagaaagcacccactaaatgatcgttacgtgaatacagcctactgaaggtgaaacccatgtaacatccttacttagaaagactgcaagtaaattgtgagagaagtgatctagtttgactaaaatgtcagggaagtggtgaggacctctccctgtctaaagtgagcacacatcagcatgtggccactaggcccagacaaccacagcactacccaggaggcacaggaaactgagcccatccctgttgaaatgaacaagtgactcattattcaactgcagccaactcagccagaaagtttttytaagctacaattttcacaagtttggactctggcttataacaaaactcctatctttgattttagttttagttagcaacactcatcatttctctcttgcctgtattataaagggctttcagaccaagatgtaaa

SEQ ID NO: 822141 - DNA, 578 bp, Homo sapiens
gacccccgttcttgttaaaacgtgccttccccattgactgacagagaacagtggggtcaaatgyggtctgtcttagtgccaggggacatcctctccatcccctgcacgggcctgtttcagtgtctctggactgtccgtcctgcaggaagacccaggatggctggctggatgtgaaaaggaaagcactgaccatatacaggtggacgaacaccgtaaataccacacacaaataaagcatttatggtagaaccctgtttcccctggaacaaaacagaatttattggcaggaaagaaacttaagaaatattggcattcagttgtctgggaagaacagagaagtttctacagtgtggaaagcagggtggctgatgtgggtggagatgagtcatctcatgtgatttaggggagagcccatgggatgtctcctccagcagggcccccaaaaggcctgtggttaacagtattcaaggaagaaggaacccttttgtccccagccctaaagcagaatgggggattgcttcttcccatttcccctcagactgtcttttggcaacctctccctttgaggctgttcagtt

SEQ ID NO: 822142 - DNA, 578 bp, Homo sapiens
gacccccgttcttgttaaaacgtgccttccccattgactgacagagaacagtggggtcaaatgcggtctgtcttagtgccaggggacatcctctccatcccctgcaygggcctgtttcagtgtctctggactgtccgtcctgcaggaagacccaggatggctggctggatgtgaaaaggaaagcactgaccatatacaggtggacgaacaccgtaaataccacacacaaataaagcatttatggtagaaccctgtttcccctggaacaaaacagaatttattggcaggaaagaaacttaagaaatattggcattcagttgtctgggaagaacagagaagtttctacagtgtggaaagcagggtggctgatgtgggtggagatgagtcatctcatgtgatttaggggagagcccatgggatgtctcctccagcagggcccccaaaaggcctgtggttaacagtattcaaggaagaaggaacccttttgtccccagccctaaagcagaatgggggattgcttcttcccatttcccctcagactgtcttttggcaacctctccctttgaggctgttcagtt

SEQ ID NO: 822143 - DNA, 614 bp, Homo sapiens
ttttttttttttttttttttccccttgagacagagtctcactctggcccaggctggagcgcaatggtgcgatcttagctcacggcaacctctgcctcctgggttcaagcrattctcctgcctcagcctcctgagtagctgggattacaggcacctgccaccacacccggctttttttttttttttttagacggagttttgttctcgttgcccaggctggagtgcaatggtgtgatcttggctcactgcaacctctgcctcctgggttcaagtgtttctcctgcctcagcctccctccggagtagctgggattacaggtgctcaccaccacacccagctaattttttgtatttttagtagagatggggtttcactgtgttggccaggctgatctcgaactcctgacctcaggtgatgcactcgcctcagcctcccaaagtgctgggtttatagtcgtgagccaccatgccctgccctaatttttgtatttttagtagagacgggcttcaccatgtcagtcagactggtctcgaactcttgacctcaggtgatccaccccgctcagcctctcaaagtgctgggattacaggcatgagccgccgcgcctggccgagg

SEQ ID NO: 822144 - DNA, 719 bp, Homo sapiens
tgacaaggacagtcactttgctgactggtgcaaatgatgccctctaaaccttggtggggagggaatgtggtataaagaaccaaaaaacctggggcctggcactggctctggctttctcgggctatgcactagtgggcactggtgtcttcatcttaaaattgaggcagttggattaaatcacttaagtttcttctcctctccgagttaagaaatatatggctgggtgcagtggctcgcgcctgtaatcccagcactttgggaggccaaggagggtggatcacttgaggtcaagacttcgagaccagccctggccaacatggtgaaaccctgtctctactaaaaatacaaaaattagccaggcgtggtggcgcatgcctttaatcccagctactcaggaagctgaggtaggagagttgcttgaacccaggaagcagaggttgcagtgagccaagatcgcgccactgccctccatcctgggtgacagagtgagactcagtctcaaaaaaatcataaaaataaaaataagaaatataacatgctatatgagttcatcacagaacccaagtctctcaagaggcaaggggaccaagtcccagggccattcccagaagcaagtatgaaaattagaagtgccaagttatcagtcaccaatctttgcctcttctgagcaacaaaatccatatggccaaatggatatgkccaattcaggggatcctgca

SEQ ID NO: 822145 - DNA, 658 bp, Homo sapiens
aggccctaaatcccttgacctsggatccagggttccttaacctgctagccccacatctacccagcaaacctggcttgtggagcctagagtgatctgaaaatccaggcatcgtctcttcctcccggctcaccccacaacttcagggaaccctgttctcctgcacctctgttcctgaaaagaaatattggggaaggggggaaagaggaaatatagaaaagatattgatgagattgacagcatgagaggtggggacgataagggcagaggggcaagagaaattgggtgttgagagatggagagaacgggcagaaaggagaacccagaccaggtcgaggaaatggtagaaaccgaaaacacccgcaggccacaagcccgggatctgtctcccgaggctggtggctggctctgactgtgactgagatggcgctgggtggtctcgatgtccctgctgaccccgctgctttgctcccgcacttgcagggagaacaacgagaactccaattctaacagccacaacccgctgaatggcagcggcaagtcggtgttaggcagctcggaggatgagaagactccatcggggacgccagaccactcatcatccagccccgcactgctcctcagcccgccgccccctgggctgccgtccctgcacagcctg

SEQ ID NO: 822146 - DNA, 616 bp, Homo sapiens
ccaaggcctcagcccagagggactrtgctggtcccagaaacagcccacatagaaatggtttggacgattggctggccttgtaagggtggctggacgggggccagctggtaaaacatcgcggtggtgaggaaaggtgcctggagctaatgtgtatagataggagtatcattgtgccaccgggccaggcattccccacccagctgacctgattatggatggaggacaagatgctgctgctgccagcttccccagacccccagaccatgcagcacttcctggcctcagacagttcctcctctatgaagatttgtccaatcagagcagccacaggctgccccagcctctctgtattcacatcctggaccttcctggcctgacaccctcaattttatactgcatcttgtttgcttccataaatgtcatcctgtgtgtcagatcacatgtccccctttttttggtctcagaaaataagattgttatatttacattacttcattgagttttattttgtggaaggcagagggagagcgtaagtaatgagtttgttgtgtcttgctttccaacccattgtagatttcctattttttctttcctgttgtaaatgttaatcaatcaa

SEQ ID NO: 822147 - DNA, 616 bp, Homo sapiens
ccaaggcctcagcccagagggactgtgctggtcccagaaacagcccacatagaaatggtttggacgattggctggccttgtaagggtggctggacgggggccagctggtaaaacatcgcggtggtgaggaaaggtgcctggagctaatgtgtatagataggagtatcattgtgccaccgggccaggcattccccacccagctgacctgattatggatggaggacaagatgctgctgctgccagcttccccagacccccagaccatgcagcacttcctggcctcagacagttcctcctctatgaagatttgtccaatcagagcagccacaggctgccccagcctctctgtattcacatcctggaccttcctggcctgacaccctcaattttatactgcatcttgtttgcttccataaatgtcatcctgtgtgtcagatcacatgtccccctttttttggtctcagaaaataagattgttatatttacattacttcattgagttttattttgtggaaggcagaggsagagcgtaagtaatgagtttgttgtgtcttgctttccaacccattgtagatttcctattttttctttcctgttgtaaatgttaatcaatcaa

SEQ ID NO: 822148 - DNA, 623 bp, Homo sapiens
tgaggtcactgaactccactacaggggtagccgatatctctaagtggtagagttgggacacagcttcacagataattagttcagggctctcaaactgctawgtacattagaatcacctggagagtgttaaaatccccatgcccaaaaccgtcctccagaccagtgaagtcatcagtggttggaaagtttcccaggtgattccaaattgcagccaagtttgagaaccactgatctaggtcactccccttgtttctgcagatactgggacctaaagaagatgagagaattttgctcaagttcctagagctagtaagtgtctgagcggggacaaaccttttcttttctgactctcaattttgtcctttcctttctctgctttctcagttcactatttttttaatttgagacagagtttagcttttgtcgcccaggctggagtgcaatggcgtagtctcggctcactgcaacctccacctcccaggttcaaacgattctcctgcgtcagtctcccatgtagctgagattacaggcacctgccaccatgcgcagctgatttttgtatttttaatagatacagggtttcaccatgttggccaggctggtctcgaactcctgacctcagg

SEQ ID NO: 822149 - DNA, 504 bp, Homo sapiens
cacactagatttactcttgcctgaaacaaccgaagagcaaaatatatggagcaatagtttttatggcaactaacagcaggcaataaagggcagcaatccctgagacacaggaaacaagtgaggtgagccctgactatagggcaggaaagcaggcccagtggagtccaggagactccctgagagcaagagacatagctgagagtttggggaggccaaggtgggcagagtcccagagaaaaccagagagctacacagagagagaactctgaagatatgcagagggtcccactggaatactggtgagctcagtattgatcagaacatgcagctgagaaaactacccaaggccaggaaagaattactcaacggaattagaggaaacagtgctccatgctcacacagactaaaacttcactgctcaygtagcaatggatatagtaggcaaagggtcttgcctcagcagtagggactaattagcctaaaaaagaggcttaatcaataaaa

SEQ ID NO: 822150 - DNA, 627 bp, Homo sapiens
ggacccgcctcttcttgtgcgtgttgtcttgaatatcgccattctgctgscaacagttcctgttctctttttaacctaaaaacactcatcatgccattacctcgctgattaaatgtatctttatgagactaatagcttaaaagcctgtaagaaagatataatttgatagaactggctaggatttgtcaggcattgtaatgtactgaccctgaagtcccggatgcttccagggcgctaacggccggggacgcccaccaggtgggcggggcgagagtggggcgcgtcagggagggggtggggcctccacgtgggagatcttgcctggaggtggtggaaatgcgagtggagagggttcaaggcttcctgcagagaaaggtgtgcaaatcctggcggcgggagaggggctgttaacagacctcagtttttacttcattctttaatctctcctctactcgtataagtgatatacctgtgctttgtttgaactttacggcagccctataagggaggcattgtaagagacctctttttttgtctatttgctcagtgctctctgctgtcagtgggctgtgctcagccctctgccagcattaaatttcctccttaaaacaaccctgagtgtaatag

SEQ ID NO: 822151 - DNA, 556 bp, Homo sapiens
tttactttttaattttctcagcatcaagagaactatgtaagcttttttaaaaaaagcacaaatcaaatgacagttacgaggagagtaacacactacatatgttttttttaaaaaaaagtatagtctaataaaacagtctccagcttaaagattccatctattggactgatatggtttggttctatgtccccaccgaaatctcatctcaaattgtaatccccatgtgtcacgggagggacctggtgggaggtgactggatcataggggcggatttcccccttgctgttctcatgacagtgagtgagttctcacgagatctggtagtttgataagtgtccagagctccctccttcttgctctctatctcctgccaccatgtaaaattgtccttgcttcccttttgccttctaccataactgtacttttcctgaggcctctgcagctatgtggaactgtgaatcaatcaaacttcttttctttataaattacccaatcccaggtagtatctttatagcagtrctagagaactcaattactataataatgctgagataat

SEQ ID NO: 822152 - DNA, 599 bp, Homo sapiens
gtttatcagccaccccaaagttactttcaacgctcttttttttttttccacatctcatatgttttctcagcctccattttaagtagagatacccaaattgactcaatcttcattcagagacttaagctgggggcctctgagaaaatttatttttttccagttaaaaaaaaaaaaaaaagatagatgtaactggcatgtctcttccttctatttcattccttctgccttgaatgtagagaagatggcaagaacttcagcaattatctggcaacaaagaaataaaggccaacagggctcccacccttgacactgttaagtcacagaactatgacctacaatttctggacttactgttaaatgagaaaaatgaactccaattcatttaggtttcttgagtcaaattactattacttatagccaagagttatattaactggtccaaacatcttctgccctcagaaataaaacakaaatttaggaaggtttaaaaaaattataataatgcaatcatcattagtatttcagtatattactattcagtcttcaaatttacatatgcattaatattttctttatatagttgtcattatacaaaacct

SEQ ID NO: 822153 - DNA, 699 bp, Homo sapiens
tttttcatttattacatttccttttttgtcagtgattagttgactatatttatgtgggtttagttctagatcctctattctttttaatcaatctgtccattattttgctaccacactgtcttgataattgcaaacttgtagtaagtcttgaagtttgttggtgtcagtcctctcactatcttgttctgcttcaatattgagttaattatttgagtattttgcatctccatgacaacattagagtaagtttgttgacacaggtatccacaaaataaccttattgaggtttttaaagggattgcattcagtctatagattaatttgggaagaccttaaaatcttaagaatattgagcctttctgtcaatggacatgaaattcctcttcattaatttaattatttatcagagttttgtaattttccttatataaagttgcgtgtattttgttatatttctacctaagtgttaaattttggggtggtacaaaagtaaatggtatttcatttttaacctcaaattccacatgattattgctagtatatagaaaattgattgcctatggtacattaacattgtatcctgtawccttgttataattgctgttagttccaggagtctatttgtcaaatatttttaattttctacgtagacaactatgccatctgtaaacaaagacagttttatttattcattcccaa

SEQ ID NO: 822154 - DNA, 699 bp, Homo sapiens
tttttcatttattacatttccttttttgtcagtgattagttgactatatttatgtgggtttagttctagatcctctattctttttaatcaatctgtccattattttgctaccacactgtcttgataattgcaaacttgtagtaagtcttgaagtttgttggtgtcagtcctctcactatcttgttctgcttcaatattgagttaattatttgagtattttgcatctccatgacaacattagagtaagtttgttgacacaggtatccacaaaataaccttattgaggtttttaaagggattgcattcagtctatagattaatttgggaagaccttaaaatcttaagaatattgagcctttctgtcaatggacatgaaattcctcttcattaatttaattatttatcagagttttgtaattttccttatataaagttgcgtgtattttgttatatttctacctaagtgttaaattttggggtggtacaaaagtaaatggtatttcatttttaacctcaaattccacatgattattgctagtatatagaaaattgattgcctatggtacattaacattgtatcctgtatccttgttataattgctrttagttccaggagtctatttgtcaaatatttttaattttctacgtagacaactatgccatctgtaaacaaagacagttttatttattcattcccaa

SEQ ID NO: 822155 - DNA, 618 bp, Homo sapiens
agcgcagaaacacaaagaattgtgagagactattataaaagattgtacaccagtgaactggataaccttgaagaaatgaataaattcctggaaacatacaatctgcgargaccaaatcatgaagaaatagaaaatttgagcacatcaataatgagaaaggagactgagtcagtaatgaaaatctctcatcaaaaagaaggccagccctgatggcttcactgatgaattctaccaaaaatttaaagaataattacaatagatcatttctcaatttttctaaaaatatgaagaggagtgaacacttctgagctcatttcatgaggccagtgttatcctgacaccaaagccaggaagaacactacaaggaaacaaaatcacaggctaatatctttaatgaacatatacaaaaatcctcaacaaaatacgcacaaaccaaattcagcaggaccttagaaagatcatacaccatgattaagtgtggtgtatcccttggatggaaggatggttcaacatttgtaaatcagtaagtatgatacatcacattaacagaatgaagaatcaaaattatatgatcatagtatgttatctatgattaatcccataaaacatggactttgt

SEQ ID NO: 822156 - DNA, 286 bp, Homo sapiens
ctcttgggtttgaaagctccttacacatttctttgttaaaagcaattcctttattcctacctgtttccttctgggcaacaggacctggcattactttaatcctagttaatgctgattwaaaccttgcttcaatttcttataatgtcctggggaaataatatatcttgtatgagagaccccatacttctctttaaatccctatttttaaaatattgaaaagaacaatagttcataaattttatttatataattttatctttttatttgcaatacaatacacttttac

SEQ ID NO: 822157 - DNA, 635 bp, Homo sapiens
acacacaaacacactaagcatgatgcagaggattgtcaaatcccatgcagggaggacctgaaggaaggatcttcattcaggaggtttcatcccctctaggagtctttctccatttcttcccagggatgtccctagtctcctggttgtatgatgatgcccaagtatctccacctctcctgaatacttgtgctactcatcacctccaccagataatatggttttggtctcaacccccgagggttcaaactgccttcccatcaccatcagactctggggcggtggttattgcaatggaggagctatctctcaacatcttcagattggatattcatacctgcacaaaactcatgacaaggacatctttgcagaatttccaggctgtgggtacatagcccagcagtgtcccagctcttctgtgcctattcctaccaaggcaattacggcattgattgacagtgtccatatctatattgtctcctataggagactgcattccccagggcttagcccagtgcctggcaccttgtrggtacttcatatatgttttttaatttgcctgaatggaaggaagcaaagctgagagtccccacccttgccaggataattttactttctagtctactgggcctgttctt

SEQ ID NO: 822158 - DNA, 626 bp, Homo sapiens
gtcaagggtcaaggcagtgggacagtggtsagagccagactagaattccaggtatttggatcagcacaatgataacaacagctcacttttatagaacacttgccaatgccaggcacatagtaaaggctttataagcattatttcatttaagcctcaaatcaaccccactatccctattctaccgatgaaaaactgaggctttgagaggataaatattttgcctatttaatcaacacaatctaaatattagctatcattattatcataattgttactattattattaacttcagacatcacatctcaactaacctcttctggtgaaacaggtacggattaacctcccctaatgataagctcacaccattagtaatgagctgcattaggatttgaactcagtactcagattctggagatgaaagaggtcaccaggcgggggaacggcacctactcagtctcctggtgtggtgcagggaggggtcataaagcatcagttgggcagggctggtcctgagtggcatgaaggctgtggaaaggcacccatgaaatgttccagagggtgaagggcatgacagcctgtggctttagaaaacctcctctggcttcattatgaagaatggattcaa

SEQ ID NO: 822159 - DNA, 620 bp, Homo sapiens
acccttgtgggaggcagaatattaacctaaaaagttgtccttgtcctaatccctgaaacctgtgaatatgctaccacgtatgataaaagaaagttttgcaaatataagtaactgaaaggtcttaaaaaggggagattatcctgggttatctgggtgggccaaatgtaaatacaaggatctttataagaaagccaggagagtcagagtcagagaaggggatgtaatgacagcatcagaggtcagagtactgtggccatgacccacagaaggcggacaacctctggacgcagaaaaacgcaggaaacagattttccattaaagcctccagaaatacatggctgtgctgacaccttggtttcagccctttaagtcccattttggacttctgacatccagaattttaagataataaatctgtgtagcttaacatctacatattcatagcaatttgttacagcagcaataggaaactaataaaacttcattttccctaatatgccttcaattaatttttgaccaaaakatattacttaacattaagcatattttacaacctgaagaacctgagaattttcaaaccctgggggtctttacttttttatattcaattattcgttttt

SEQ ID NO: 822160 - DNA, 633 bp, Homo sapiens
cagtaagatttttaacatagaacactgaacccaccaagagaagaggatattactgtagccagtcagagatgtaaccaygtaacagaaaatttacaaggtgggtcattcaaaaccaggtaactaaagcattactagactggattttggagtttgagtagaaagataacagaatttagcttgtatgaatgcttttatgtgattttatgatttatcccagcaacatgaatatgaggcattggaaagctggtaatatcagggagatgctgcttgtcagatagagtaaaagaacttcagaaattatctgcattctgtattacatctctgaaatccaaatttccactaaaattagtcagaacatttcactaatagaaaatgtcctcagagctggaacacaaggaaatattggatattgagtaatgagtcttggttcaggcacttttaaaaatgcattactttaaactactgatgttactttgtcgtctgcaaagtgggattattaactagcttactaaagtcattatgaggaattaactaattaaatgtgaaaatggctggtatatttgaggaaactcagtgttaggtgagtcttaaactgttagctaatcatgaaaaaagtatattattgttttataa

SEQ ID NO: 822161 - DNA, 601 bp, Homo sapiens
tgttggccaggatggtctcgatctcttgacctcgtgatccgcccacctcggcctcccaaagtgctgggattacaggtgtgagccaccgcacccagccgtaattgtattttaaataaaatacttatctttaaaactcaacatgaggctgtcctcctgttggttctctgtacctgcacatgctggtgactcccgtgggctgacctctcccggcccctgtaaggtcccctgggactcattctcccaacccctcctccccgcaacaccataagctcctcttgggcaggaaattatcacattcttccagcacaggggtcagtgaggttcccacaagctaaagccggccagcacctgcctttggaggtcaagttctttggagactcccattcattcatggactgtccgtgactaatttcaggctacaaaggcagagtacagtcttgtgaaggctgcaacactaaaaatatttattawttggtcttttatactaagaatttgccggcctcttatctgacccacaggagagaattgactacattcaggttcataaagaaataaacatatagcatgaggaatgcggcagtaagtcaatacaaataggtta

SEQ ID NO: 822162 - DNA, 527 bp, Homo sapiens
tggggccctcaccctgaactcagcgtctacacccagagaactaatctactaacaatggtgggtgcagctctgttctacatagagaaactcaaagtcccttctgctgtcagactgggagcctctctctatcaaacaagaagcatccccagtgacctctgccaccatgatgcctctggtttatcatacgagagacctttaagacactcaggagttacatcttataataagtcctaagaatgatgtggttgtcaacacttattttcccccaattatccatccattcctctatctatctatctatctatctatctatctatctatctatcttttatctatccatccatttatccatccatctatgtatccatccatccatccatgcgaccatttatctatctatttacctgcctattcatycatccatccatccatccatccatccatccatccatccatccaccatcgatcctgtcattcatctgtctatctatccatccatctacccatccatacatacatacatcctc

SEQ ID NO: 822163 - DNA, 673 bp, Homo sapiens
ctccctgaaagcctgtaaggatcccrtcgctctttcccatcagggagacacccacgccctccagggcccaccttcctgccccctccccacgccaccagcccataagccttctccttctgaccctgtctcttcctgaagggagcctctcccaatctccttgcttatattagtgtagagtgtgagcgtcagtcatacatatttgttaactggaattaaatttcagcagaagaagaagttatctaagggcccacgcgtgcggcatgatgagatatccctgattaagaaatgtagcctggctgtaatgcctcctggaagactaagtcaatcgaaacgttggttttagtttacagttgttgcagatgcaaagaccgcatgtactctggctcctgtagaaactccaggaacattaagtaagaccaaagtctcacaccttaaatgcagcaacgcttgcagtttcagactctcagtgaagtgtctgcgtcctgagcagtgacccagcacctacacacccctctgcagcgatgtccacccacagttgaggggttcatgtagcacagctgtgctacaagcttcttctgcaagcttcagagcaaacctaagtgtttaggggcctacaggaccaagactcattccacagaaactgagaaggtgtgggtgcaaggtactgagtcat

SEQ ID NO: 822164 - DNA, 515 bp, Homo sapiens
tgccaacacagcttcctgatgctccgctggcagccacagcccagacacccgcttgggtytgagcccagctgaagggcgcagtgtagtggctgatcccggagcttggtggtgtgtcatcagcctgtgtgtgtcctccttcctgtgcctgtgccggcaacacacatcacactccacaccctctgtgtgtgcatcggcactttcccgggcacgcgctgtgaacactgtcacaggggacggcccagcccatctacacccgctgcagagtcagcacttcagttggagccctactcaactgtgcttgtgaaataagtggattttaggtctttctgcaaggcgacaactttttgatatgacctttgatgaagagatttaaaaacaaaaaccaactcgcagcagtggcaggaaggaaatgaccttccgttttccctggtttagctgaacatcctatgggtatttagtcattatggatccaaaccatagactcccagttcagcaggtagtgtaaaagctacata

SEQ ID NO: 822165 - DNA, 559 bp, Homo sapiens
gtatttagtcattatggatccaaaccatagactcccagttcagcaggtagtgtaaaagctacrtattcatctcagcccagtcaagaaaacaatccaagccagttgatgggacaggggtgttacaaaggtaccaggaaaactgaaaagtcaaaggattcagcaatcggcaggggtgatggcagcaatccacttagtgcttccgggaaggagaggctgaggtgaggtgttgccggaacacagggctggtgggactgaggaaggctagacccagggacctcacaaagggggaccatctgcagctagaggaaccttggactgtggaatgcactgacggaggtgcagtcaaagcagaaaaggaggaggaggaacaccctggctccccatctcccactctgcagtctcctgccagcatctgcctgtgcctgccattgtgtaggcacccagagccactggacagtgggtgagggagttggggaagacagacaagagcagggagggcccaggcagtgaacgtgagcacggccagaccagcaccagcttggtgaccgtgcagaaccca

SEQ ID NO: 822166 - DNA, 630 bp, Homo sapiens
cagctgtcattcacctcctaacttcaccrtaagagcccagatgagccatttttttctgcctgaagacatcctctgccccacgtttgtggcaaactcgctggagcttgaactactttgagtctcatcctcaatacttctttagtccccgagacataggtgaggctacagaggtggccggagaattgctgattccgtggcttcatgaccattgtctggctggtttgtcaaccaacagtttgaagccctatctggccaccgagattcagtgcctggggcagaacccacagtacctcgatcctggggcagtgagggtgtgcactgggatggtgcagtgacatgcaacacatattacaaatcaacaagacctttaattctcccagtgaacacaggggcaagggctgcacacaggctattaataacccaaaaatgaacagaagaatcataaggacttgtaaaactgttaaggatgtaaagaaagcaaaggaaatcagtaaacaaattctagtagccgggatttccaaggatccagaagcagtttgaggcctttttggcagaaggaagtttccctgtcttctcctcgaaaaggtagaggaggtgatgatgctggccccgcatcctcctgagactcct

SEQ ID NO: 822167 - DNA, 523 bp, Homo sapiens
cactttcaattattgctacctttttaaatacaatattggtaaatttagactctagtcattttggctatttattttctttttatctttttcttattaagttttttttttcctttagtttgagggtattgactggtatgacagcagggatccttgaacactatatattcaggactaattgttctcatttctctcataaaattatttttctctgagctatgagggacatgcaatcttacaacttggtttgtctctactgaattgttttagttgttgttaaattgttgagccacttttgtgtgcctgcacaatgggatctctattttttccaaaaattaagttgagctttcccaggctggcaggtctgtgatgacaatgtcaccctttatctttaggaagaaccaaccctgaattatttattcaacagtgttgtttccaaatcatsaatagatgaagttggctttagaattagagtaaacaatcaggtggctaacttggagtgttaaggctgttttgcgaaaacaaa

SEQ ID NO: 822168 - DNA, 620 bp, Homo sapiens
tggtctttgagagtcattatcatgtaggagagcattgaaaccttgaagaatgaagaagtggctcagaaagagtttgtagagtaatatatagaagttggcctaagacaaaattgcaaattatttgtaaaataggagaggaactaggagacagtaattggagaaagcagaggaggagagtttcagtaatacagagctgtcaatagcaggctatttatatattaaaaagatgtataaagagtcctttgctctcttctgcaagagccattttaatataattgttggcctgagaatcagatttaagaggcacccaaacattttggctgtcaatttttgttataatgcttcaatttttattcatatgtcttaggtgatcataaatcttatcaatgttttcatggtagatgtattcaactcaacagttacttattaagaacttactatctgactactttgtgtatttttaccttgaagtagttactttacttcttaaaagatcatatcaagtccttatgcacatatatttcaacaataaggagtttatttttataccataattaayttgataagcaaagatgaacgtttagatcttagttaaaagatgatctgtgcagtacagtgat

SEQ ID NO: 822169 - DNA, 611 bp, Homo sapiens
ctcctcacttctcagatggggtggctgccgggcggaggggctcctcacttctcagatggggtggttgccaggcggagggtctcctcacttctcagacggggcagccgggcagagacgctcctcatctcacagacggggtcgcggccgggcagaggtgctcctcacatcccagatggggcggggggcagaggcactccccacatctcagacaatgggcggtggggcggagacgctcctcacttcctacatgggatggcagccgggaagaggtgctcctcacttcctagatgggatggcgcctgggcagagatgctcctcactttccagactgggcagccaggcagaggggctcctcacatccagacggggtggtggccgggcagaggctgcaatctcggcacttgggaggccaaggcagcggctgggaggtggaggttgtagcgaaccgagatcacgcctctgcactccagcgtgggcacaattgagcactgagtgaacaagactccatctgcaatcccggcgcctcrggaggctgaggctggcggatcactcacggttaggagctggagaccagcccagccaacccagcgaaaccctgtctccaccaaaaa

SEQ ID NO: 822170 - DNA, 611 bp, Homo sapiens
ctcctcacttctcagatggggtggctgccgggcggaggggctcctcacttctcagatggggtggttgccaggcggagggtctcctcacttctcagacggggcagccgggcagagacgctcctcatctcacagacggggtcgcggccgggcagaggtgctcctcacatcccagatggggcggggggcagaggcactccccacatctcagacaatgggcggtggggcggagacgctcctcacttcctacatgggatggcagccgggaagaggtgctcctcacttcctagatgggatggcgcctgggcagagatgctcctcactttccagactgggcagccaggcagaggggctcctcacatccagacggggtggtggccgggcagaggctgcaatctcggcacttgggaggccaaggcagcggctgggaggtggaggttgtagcgaaccgagatcacgcctctgcactccagcgtgggcacaattgagcactgagtgaacaagactccatctgcaatcccggcgcctcaggaggctgaggctggcggatcactcacggttaggagctggagaccagcccrgccaacccagcgaaaccctgtctccaccaaaaa

SEQ ID NO: 822171 - DNA, 583 bp, Homo sapiens
gtcactcagctacaagtgaccaagccacagtttgagcccagtcagtccccagaaataaagctggaaagcattgctccacgcagcttcctcttagcaaaattaaagaggtactcaaccaataacgcttttttatctagtttaacatatgtcccagatgggtagaatcctgtcaattctaccatttgacagcattctccaatcctacttctcatccggctctctttggcttctgtacaagcgctgccccttcatcccctctctcggtatggcagcacccaccacatggagctgctctcgaggctccagatctcctcccctttttacctccatcccacacgtcacagcactctagaaaaaatggtctcttctatttttaaacttcactatcccaccactgcctaaatattgcaattaaccctcataccgggtcctccatgagcttgtcccagttcacctttgtaatctcatttccaaaagctccttacccccagcccaaacttgcccctccagcaaacctggcccacttgccttcttggcatggctmcataccctttcatggtgagaggtgacagcgtgctggcag

SEQ ID NO: 822172 - DNA, 504 bp, Homo sapiens
tttgatgttccctctctatgaaatggggaaaatatgctttatgagattctcgtggagatataaccatatatatatattctcgtgaggactgaataatatccacccataaagtttcactgctgttattgttatttctttctcaacattcttaatataaagtcagaagcaaggatggccagagatgctgggaaaggcatatatacggacggcaaagaagagaagctgctatgatgagaagaaagagacttggagtcagaaggttgtgcttcccaccagctgtgtgattgtggacaatctatttcagcttcctgaaactccactttctttgctatagcatagagattaaattgtgaggattaaatgcaataactataaaagtcttgagtacaatgcttagttcatagtacawgctcaatgttaatttccttccattgttccctgcttatcaaagaagagagaggcttacgtacagagaagtaaaccaagagttggcaaatacagcca

SEQ ID NO: 822173 - DNA, 586 bp, Homo sapiens
atatgtagaatgctgaaactggatcccttccttacaccttatacaaaaactaattcaagatggattaaagacttacatgttagacctaaaaccataaaaaccctagaagaaaacctaggcagtaccattcaggacataggcatgggcaaggacttcatgtctaaaacaccaaaagcaatggcaacaaaagccaaaattgacaaatgggatctcattaaagagcttctgcacagcaaaagaaactaccatcagagtgaaaggcaacctacagaatgggagaaaatttttgcaatctactcttctgacaaagggctaatatccagaatctacaaagaactcaaacaaatttacaagacaaaaacaaccctatcaacaagtgggtgaaggatatgaacatatgcttctcaaaagaagacatttatgcagccaagagacacatgaaaagatgctcatcatcastggccatcagagaaatgcaaatcaaaaccacactgagataccatctcacaccagttagaatggcgatcattaaaaagtcaggaaacaacaggtgctggagaggatgttgagaaataggaacactttt

SEQ ID NO: 822174 - DNA, 609 bp, Homo sapiens
aagtcttcagcctactgactcagggtcctaccatacacaccactgtcttctgagaacagcacacatggggcagagcagagtcagggggagagagaaagaacagttaacaactcttagaaaccygaaaataaagaggatacggctggaaatgggacctcagaaagttccacatgctagaatgcctttccttttgctttcatggcactctctttcaccctcaactgaaagtgtgagtgtatacacacacactctctgttctctgggatttcctaaaactggagctaaattataattaggacattatatagtttattttcaagaatttttggttgcagcaaattagaatatatgctttggtttcatagaattaattcatgtagctttatcatgttcacatagagcaatgcaaactttctcatgcatatataatgaagcaggaaagactataaaaggaccaaaaagaaaaaaaatggacaaaaaggccagaagaaaaatgctaatgagtctgttgactactgataggaaaaaaaaaaaaaagctaaaagtagaagagcagtggtgaagccagaatttaacaaattaagggaggaatattgggggaaagatgat

SEQ ID NO: 822175 - DNA, 510 bp, Homo sapiens
gagggggaggagcaaaggaaagatggcagaagcagaggtggagcatgtgcaaaggaccagaggcctggaggtgcatttcgagaggcacagaggcacagtttcagaggcacagaggtgcatgatttcggrtgtggccactgggccattatggctggaactcatgggaaatggaaggagttgtgacagaggaggctgggaagctgggcaggagatgtccatggaggttctaggcaggaaagtatgtggtcactctacctgtgtggctttcctgcctgtaggggctcaattggagtgtccttttctccacctagcttcagcccaagggaaacaggggaccagacagctggtgagggggcagctcaaactgtggaagaagagaggctctctcagccctcctccctctccagtgctgaggcaacaacaggcccaggccacactgggggatgtggagatctggagagccacgggcttcattcacagaagctgacccaccaccccaccacagccccc

SEQ ID NO: 822176 - DNA, 469 bp, Homo sapiens
ccctcaccctgagcagggccattgcttcgtaaggactggcagaactgcctcagggcctctgggccagccaaggcctgctgaaggggccctaggagttcacggttgcacgaagcccagcccctcctggaaaggcgcagactcaggcccagacccaggccccttaggcatcaggagctcagctcggctgctcctgcaggcccgcctgtcccttccttctcctgtgtcttcctgggttcatgccactcctcagactccccagagtgggggcaaagcccctgccttggtttccccaatagtgcctggccaggtggggcaggtctgcagcaggggaatcccctgggagggcagcatcgtgacccccatgagtaggagttggggtggtgcaggcggggaccrtggaggcagggtggaccctgcacccggatccaccttagaaaggagccggccaggccaggggcggtggctcacg

SEQ ID NO: 822177 - DNA, 650 bp, Homo sapiens
ggtattagagtattcttttttaaatttttatgggtagatagtagatgtatatatttatagggtacatgagatattttaatacccacgtacaatgagtaatatcaggatgaatggggtaaccatttatcctttctttgtgttacaaacaatccaattatgctcttttagttatttcaaaatgtacaataaattattgttagctgtaatcaccctgttgtgctattatcaaatactagatcttcttgattctatccaactatatttttttactccttaatcatcccctccctgccccaactacccttcgcagcctctggtaaccatccttcttgttaagtgaaacaagccaggcacaaacaaacaaacatcacacgttcttacttatttatgggagctaaaaattaatacaactgaactcatgaagacagagagtagaataatggtattagttcttgatggaaatgtcccttaaagatttttctggaagatttaaaggctggggtaggtaatttaacacttayataacatgggaacagttatcttagtaggtatgctgtcatatccaagaagtttgaaaagctgaaatttgttactcttaaaacagctcctttcacatgttgtcacttttgacaattgcttttgggggtcaa

SEQ ID NO: 822178 - DNA, 613 bp, Homo sapiens
tcaaccttcaacctaaaaattgaatgcaaaatcttgtagtcaagcatttctattcatgttagcctggagtaagaacaaaaagcataaaagactaaaaagatttcagttgaaacaaagggcatttgggaatggagtcacatactgagcatatcaaagattccaaagctaggttcctgcttttcggttttctgtagaaatgacatctcagaggagtaaatataaagaagaacaatgaaagagagagggtattggtaggaggagatcaagaaaaacattataaaaaatgagattttgaatagttcatatggattttgttcttcttttatcctgaatgggaaccaaaatctatctggttgggagacaaaaaaaaaaaaaaaatagagaaaactttgattcataacaattgactagcaaagaatctaagagaatctaaagttttgggtgataaaatgatttttcagacactctttaatatacttttmacaatatttctgcctctgttttttcatattttctggttatataataaagagaattatctgattacagttttctttttcctaggctttttatatctccaatgcattttaatgtttctatagagtcaacccaa

SEQ ID NO: 822179 - DNA, 583 bp, Homo sapiens
acagcaaacaaaataacatatacgtaactggggtccaagaaagagaaaagagaaaraatgaagaaaaacgtatagaggaataaaggccaacaattttccaaaattcatcagaaacaaacacacaagcaaaaaacagaaatccaaagagttaaatgaaacagcaggtttagagtcaatgaacgctgttaaacatcttacaatacagagaacaggtttcttacaacaaaatccaaattgtctaaccaaaatatgtcactggtgctgaggatgacaaactctgctcaagaactatcatttaaaaacatttaaagtgatatatctaataagtcaatcaagacccacccaaatatatatatcatatgaaacccaatttaaacatcaagtcaccgattggattaaaaaaaaaaagagaatggcaaaatatgttccatgtaaacattaacaattttaaagtggcatggttatattaataacaaggtaggtttaaaacaaaacctattatcaggtataaagaaagaaattgcatgatgatatagggcttaattcattaaagaacacataatgcttctaaatttgtatctac

SEQ ID NO: 822180 - DNA, 601 bp, Homo sapiens
caatagccgaatcaatcaagcagaagaaaagataccagaaattgaagaccactttgctgaaataaagtgtgaagacaagattagagaaaaaagaatgaaaaggaacaaacaaagcctacaggaaatatggtaytatgtgaaaagaccaaatctgcaattgattggtgtacctgaaagtgatggggagaatgggaccaagttggaaagcatacttcaggatattatccaaaagaacttccccaacctagcaagacaggtcaatattcaaattcaagaactacagagaacaccactaagttaatccacaagaagatcaaccccaagacacataatcatcagattctccaaggttgaaatgaaggaaaaaaatgttaagggcagccagagagaaaggtcaggtcacccacagagaagcccatcagaataacagtgtatctctctgcagaaaccctaaaagccagaagagagtggggaccaatattcaacattattatagaaaagaattttcattccagaatttcatatccagccaaagtaagcttcataagtgaaggagaaatacaatcctgtccagacaagcaaatgctgaggaattatgtca

SEQ ID NO: 822181 - DNA, 647 bp, Homo sapiens
  misc_feature 633: n = A,T,C or G
gaagaactggttgctggcccggcacggtggctcatgcctgtaatagcagcgctttggaaggctgagacgggtgcatcatgaggtcaggagtttgaaaccagcctggccaatatagtgaaatgccgtctctctaaaaatacaaaaatcagccgggcacggtggtgtgtgcctgtagcccccgctactcgggaggctgaggctggagaatcacttgaactggggaggcggaggttgcagtgagctgagatctcaccactgcactccggcctgggcaacagagcgagactctgtctcaaaagaaaaaaaaaattggttgctgaaaagagcctggcaccttctcctctgtccctgtttctcactctcaccatgtaatctctgtgtacatatgccccattggcttttgtcatgagtggaagcattctgaggctccccccagatgcagatgcgagcatgcttcttgtacagcctggacaaccatgagccaaatataccacttttctttataagttacccagcttcaggtattattttatagtaacamaaatagactaagacaagataactaatcactatcaatgttaactttgatcacgtggatgaggaagtagtgttggtcagctttctttattatanaattactttttgtt

SEQ ID NO: 822182 - DNA, 595 bp, Homo sapiens
gatgacaatgcaagtcacacggcaatatgccaagctatgcaaacctcttaattgaaactggaagagaggggcaaatgattgggaactataacacaattaatgtaccttgttgacacatttcctagcagggagggaaaccccttatttttctaaaaccatggaggcctttgaagcacatttcttatgctgtaaaagttacagaaaatagagtagagacatgttgatactataatgttttaggtacttagaaatttaaagagtgtaacaattcagagaaagccagagtaatcattgtaatacagatggtacaatgtactgacttaagatggttcaagtttttctactttaagatgatacaaaaacattcagtagaaaccatagttggaattttgacttttgatcttttcccaggctagtgatatgcagggtgatactttctcatgatgctgggcatcagcagtaagccrcagctcccagtctgccacatgatcatgacagcaaacaaccaatactctacactgtactgtgttgccaggtaattttgcccaactgcaggccaatgtaagtgttccaggcatgtttaaggtaggctaag

SEQ ID NO: 822183 - DNA, 595 bp, Homo sapiens
gatgacaatgcaagtcacacggcaatatgccaagctatgcaaacctcttaattgaaactggaagagaggggcaaatgattgggaactataacacaattaatgtaccttgttgacacatttcctagcagggagggaaaccccttatttttctaaaaccatggaggcctttgaagcacatttcttatgctgtaaaagttacagaaaatagagtagagacatgttgatactataatgttttaggtacttagaaatttaaagagtgtaacaattcagagaaagccagagtaatcattgtaatacagatggtacaatgtactgacttaagatggttcaagtttttctactttaagatgatacaaaaacattcagtagaaaccatagttggaattttgacttttgatcttttcccaggctagtgatatgcagggtgatactttctcatgatgctgggcatcagcagtaagccgcagctcccagtctgccacatgatcatgacagcaaacaaccaatactcwacactgtactgtgttgccaggtaattttgcccaactgcaggccaatgtaagtgttccaggcatgtttaaggtaggctaag

SEQ ID NO: 822184 - DNA, 629 bp, Homo sapiens
caaggttgcccctcctaacctctttgcagtttaaaaaggggcctcctaaagttggggaaatgttccaggcccaaaatattgacgctggaatggaagatatttagaccccaaggtggccccaggagactcactctggagttgaggcattcacccagtgggcctcaaacacaccacatgggaacagccattgagccctcattttcttaaggcctttgcctgggaagactctctgggggctctttagaccagagtacttcacaggaagcaagaaaagaaatccttggaaacatacagcagccaactacgtgggggtgaacaagaggtaaaagatttttgttccgaagggaggaagcttggtggaggatgctttcatttagcccatgatgacaagataaggaattaatagatgtaagctgcatccaggaacgctgagataatagcaggcgataaacctcctagccagatggtgctctggacaatgcaggaggattccagggcgccagccagcctcccctagagtcacaaggctcgggaggcactagcaaggccagtctgttgccttggragccagtgggaggcagtcatcgagctggaaagggacacatgcaatgaggaaggtctgctgcagc

SEQ ID NO: 822185 - DNA, 502 bp, Homo sapiens
tgggcacatgtgggtgggttatggggacaagctgggagcaccatcagctatgaatggggaggtgacagttactcagtgtgtttctttgtgtctgggttgggggaggactggggcttgacctgcatgrgatggggggaggctgggacttgacctgcatgggatgggggtgggggacctaggatttggcctgcataggtttgggaggtaagacaggcaccatgtcattccagggacttggaggttgttgtgcatagaagtggttaaagactgcatctctgtatttttggattccaagtcaggacacatggtctgatacaagtaagctcacagcagaaatggcacagaatatgtgaaaccaggagcatgccaggaaacccaagacacgtgatcactgagcctgttccatctcctgagaggagttggttatattcatttagaagtttgctgatgctttttctgggaacttgtttattttcctttcctcaaggtagacagaaagaag

SEQ ID NO: 822186 - DNA, 502 bp, Homo sapiens
tgggcacatgtgggtgggttatggggacaagctgggagcaccatcagctatgaatggggaggtgacagttactcagtgtgtttctttgtgtctgggttgggggaggactggggcttgacctgcatgagatggggggaggctgggacttgacctgcatgggatgggggtgggggacctaggatttggcctgcataggtttgggaggtaagacaggcaccatgtcattccagggacttggaggttgttgtgcatagaagtggttaaagactgcatctctgtatttttggattccaagtcaggacacatggtctgatacaagtaagctcacagcagaaatggcacagaatatgtgaaaccaggagcatgccaggaaacccaagacacgtgatcactgagcctgttccatctcctgagaggarttggttatattcatttagaagtttgctgatgctttttctgggaacttgtttattttcctttcctcaaggtagacagaaagaag

SEQ ID NO: 822187 - DNA, 562 bp, Homo sapiens
  misc_feature 120: n = A,T,C or G
tgttctcttaatgtttgtttagtcccttcggtctatcatgcagatttagtcctatgtttctctgttgattttcgtgtatagatcatctgtccaatgctgaaagtcrggtattgagtttcnccaggtattattacattagggtctatttttctatttagctctgctaatattatctgtatgtacctcagtactctggtgttgggtgcatgtatgtttacaattgttacatcttcttggcatattgatcccttcatcatcatataattattttcctctttttattatttttgacttaatagcttattatttttctgatataaatacaggtactcctgtagacttttggtttctttttacatgaaatattttttccatccttatactgtgtatgtgtctttaccagtaaagtaagtttgctgtaggcagcatataattggatttatatatttaatccattcaattcatctgtatattttaactggggaacttaaaccacttacattaaacattgttattgatggggaagacttactcttgtcaccttttaaattgtttcctgatt

SEQ ID NO: 822188 - DNA, 516 bp, Homo sapiens
tttggaggtggggcatttggaagacaattattgctagawgaaatcatgaggttggggagcttacaatgggattattgtctttgtaaagaaagaagaggcctgagctggcaagctctgccatgtgataacacttgccatgtcacgttgtagcaaagacacctttagcagatgctggcactatgctcttggactttccagcctccagaatggtgagctatataaactattttttataaattactcagtctgtggtatttgcctactgtaacagaaaataatttaagacaccgaataactggatcaaatgagtatttcctttcattaccaatattagttttctctacaagcatcctagtaataaagtattctaatcatcagtcctgaaaccaccagtctggtcatatgccatcattgaggttccattgtgctacattagattgtccttgcaggcatgtgccaggattatgtaaaactctactgcaaacttaggtgtgctatctcaaaagcttttccatc

SEQ ID NO: 822189 - DNA, 516 bp, Homo sapiens
tttggaggtggggcatttggaagacaattattgctagatgaaatcatgaggktggggagcttacaatgggattattgtctttgtaaagaaagaagaggcctgagctggcaagctctgccatgtgataacacttgccatgtcacgttgtagcaaagacacctttagcagatgctggcactatgctcttggactttccagcctccagaatggtgagctatataaactattttttataaattactcagtctgtggtatttgcctactgtaacagaaaataatttaagacaccgaataactggatcaaatgagtatttcctttcattaccaatattagttttctctacaagcatcctagtaataaagtattctaatcatcagtcctgaaaccaccagtctggtcatatgccatcattgaggttccattgtgctacattagattgtccttgcaggcatgtgccaggattatgtaaaactctactgcaaacttaggtgtgctatctcaaaagcttttccatc

SEQ ID NO: 822190 - DNA, 662 bp, Homo sapiens
cccaggatccagtcttctggtgagacactggggatgacacggggattgacagggctccaggcatcactgccacattactttggatcttgtatctgaactctagaatatgtcacatagtcatcaaaccacagtttagtctgcttttccacaaaggaaaactttatctgttggcctgtgttacactataatgtgtgaggggaattggatggtgttacatcgggaagccaagcaaagtttattgtttcttgggattacattcttatatttttatattctttaataaagcacaggctggagcataagtaaaaggaagcaagttcttaactactaaaaattgactgcatggccctgtctcacaccgtagataaatactagctaaaaatggaccgtagacccaaatgtcaaagctaaaactataaaactcttagaggaatctgcaggagtattctttgtgacctggcgttatgtaatgatttcttagacatgacagtaaaagcgtaagtgacaaaatacaaaatagataatattggacatcatcaaaatcaaaacttctgtatttcaaaagacactagtaagaaaatgagragaaaatccacagaatggaagaaaatatctgcaaatcatatatctgataaggggcttgtgtccagaacatatagaga

SEQ ID NO: 822191 - DNA, 630 bp, Homo sapiens
gtcctatatacaagattgtgtcatctgtgaatagagacagttatctttttcctttacaaactggataccttttatgtcattttcccgttcagttgcctccatgtagaaatggaggttttagccaaggaaactgcttgtctggttcctgcttttagggggaaaacagctgtcaggttttcttagatgcctttttttttttttttttgacggagtctggctctgttgcccaggcagaagtgcagtggcgcaatatctgctcactgcaacctccgcctcccaggttcaagagattctcctgcctcagcctcccaagtagctgggattacaggcacgtgccaccacacccagctgatttttgtatttttagtagagacggggtttcaccatattggccaggctggtttcaaactcctgacctcaagtgatctacccaccttggcctcccaaagtgctgggattacaggcatgagccactacgcctggcctattagttttctgagtgtgttttatgacaacaggatgttggatttttttcraatgccctttctgtgtcaattgagatgatgatgtggtttccttctttgttctgttaatgcagtgtgttacattgaatgattttcaaatgttgaa

SEQ ID NO: 822192 - DNA, 628 bp, Homo sapiens
caacaggatgttggatttttttcaaatgccctttctgtgtcaattgagatgatgatgtggtttccttctttgttctgttaatgcagtgtgttacattgaatgattttcaaatgttgaatcagccttgcatctttcaaatattgaaccagtgtggcataaagtccacttgttttatggcccaaggtaaagtgttctctgtatgtctattaggtacagtcagtttatggtgttgttcaagtcttctattccctgttaatcttccatctaactgttccgttctctagttttcttgttagacttaatttttcaaacagttattttatgtaaaccatttttgcatcttgtgaatattatgatattagacataatgtcagattctatgcacatataattttatgttcacattaaatattaactaatatatttagccatttttcttttagaatttaagatcatcatagttttatttaaaattaaaactggtatttttgcgtttaagagcttctctgtatttggwgttgtttcataaggtagttgaattactggtaaaatagtatggcaattaaagcattcaccaccaaccttcatatacttcagcctgaaggtgggcttcacatggcccaatagc

SEQ ID NO: 822193 - DNA, 604 bp, Homo sapiens
atcagatgcccctccctgtgcattcccatagcgcctcgaagtcatctctatcaatcattcatttagtcktaaggaagtcttgtttgtatatgtgtatccctgacatgactgagacctcataagttctctaagtgccatatgaataaagaaatgaattggtgttcatcttaagtcatagtctctgcagatattgcttgatctaagggagtggcaccctttgttttgattttcctttgatctttggaagaccatgcatttctatttcagtgatgcttttaaaaagccatttttgtcattaatccagatttgttctcatttgattctagttgttgaaatggatgaaaacaacggacttttgcttttagaactgaatcctcctaacccttgggacttacagcccagatctcctgaagagttggcttttggagaagtacaggtaaggaaatattaaaaggataatattattaaaaacgtgaccaagatgtccatttaacatctatatctgtaaacatcctatattaccttgaatactgtttgagatgggtatttaggacatatggtaaaaagtcatatgataaaacaaattctttaaggaacccccaga

SEQ ID NO: 822194 - DNA, 604 bp, Homo sapiens
atcagatgcccctccctgtgcattcccatagcgcctcgaagtcatctctatcaatcattcatttagtcttaaggaagtcttgtttgtatatgtgtatccctgacatgactgagacctcataagttctmtaagtgccatatgaataaagaaatgaattggtgttcatcttaagtcatagtctctgcagatattgcttgatctaagggagtggcaccctttgttttgattttcctttgatctttggaagaccatgcatttctatttcagtgatgcttttaaaaagccatttttgtcattaatccagatttgttctcatttgattctagttgttgaaatggatgaaaacaacggacttttgcttttagaactgaatcctcctaacccttgggacttacagcccagatctcctgaagagttggcttttggagaagtacaggtaaggaaatattaaaaggataatattattaaaaacgtgaccaagatgtccatttaacatctatatctgtaaacatcctatattaccttgaatactgtttgagatgggtatttaggacatatggtaaaaagtcatatgataaaacaaattctttaaggaacccccaga

SEQ ID NO: 822195 - DNA, 613 bp, Homo sapiens
gaaccacttgccctgagttggaaaagactggtagagcaggttttcagaagaagagtaggtgggagtgatagaggagacagaaaaatactggccctctggagtaggggctggaatattagtgggtgtggaggcaccggctatttcttttgctgtcctgtcagcataggcatttccttttgcaataagatcagtaggtttctggtgtcgtttacaatgaatgactccagcattggctggcaggagagcagccttaaggaggatctttattagggaggcattgataatggaagagccttatgtgataaggaagcctttttcggcccagatggcagcatggttatggaggatgtggaaagcatatttggagtcagtacaaatattaatgtgcattcctttagcaaaagagagcacataagttagagcaatcagttcggcttgttgaaaagtggtggagggaagaagtgcagcagcttctataacagaggtgtgggacacgacagcatatscagctttagctggtgaaaattgattgggtttagaagaactgccatcgataaaccaagtgtggtctgggtttggaattggaagaatagaaatataaggaaagggggaa

SEQ ID NO: 822196 - DNA, 614 bp, Homo sapiens
cttagtgcaacaacatgaacaaatctcaaaagcattatgttcagcaaaagaagccaaatcaaaagcactacacactgtrtgattccatttaagtaaattcaagaacagaaaaaactaaacattagttatcttggggttagtgttgggaattaactggaaggtgggacagttctatatctgcattttaatgtaggtctgattgttgtacacatttataaatctcatcaaattgcaccatctgtttcattgtaacatttatgttaaaaacttataaagaagggatgtacattttttgtggaaatagttttcgtagtatggtgctggaggtaaaacagaagcaataactatggatagttcatggggccagcaggatggaaggaaataggcaggcagggagagagggaggaaaaaggacaaaacatggaaatataataagcctggaaactttgggtgaaagaaataagaattatttttctcctttgttttctgtctttccaagtcttccacatggagcattaattttatttgcgaagagggcaaagagtgtatttttaaaagtgttaaaatgacacaaaaaagtgtgacaatcagattttcatagaattcaactatat

SEQ ID NO: 822197 - DNA, 607 bp, Homo sapiens
aaaataaaaaataaaaaaacagtggggcagactaggagagaggatgagttattaaagtyaactttttctgattctaacacctttatgcagtgtttatggagagaagctatttcctcccctttccattgtctagagagaaagaccctaagagattcacttacaaattataagaggcgtctgcaagaagaaaggtatattcagttcctgagttaaatgagtacttggtcattatgcttattaaccttcactggtgttattctcgcaggggactatatattattgagcaatggcacaaaggcctgaccaggtggagaagaaatgaggttacctttctaggtccctgatcttgacaaacatggaagatggatcctgcaaattgttgatggatacagagacagagatcaagatgctagaaagaacctggatttaggaatcctgatgcaatattagtctctatcagagacgaattaaaatctctggagtgattcattcaagtttgaaacaatggctgtttgaagtagatatttgagtactgttggataattttaatagcgaataactcaaatcctcagaaaataaaaagtggttagaagaataagcttactcg

SEQ ID NO: 822198 - DNA, 632 bp, Homo sapiens
caggcaatagaaacagaccatgaaatgaccacaatgttggaattagcgacaatatgtgaaatcttttatcataatgatgttcaaatatatttttaatatgaacataatgagaaaacataaaggaaataccaccagagtaatggtaactataaataagaacaaaattgaaactctatgatagaatagtttaatatttaaaaatttgaaaggtactagatgggattaaaaatggactgtagagttctagttctgggcaggtagcatgaagagctctgtagatgcacttcccagagaaataagcataactggtgaaaaactagaaaaactaaactatttgagatcttggaaatttgtcctaaaggcatacagcaaatgaaaaaaaaattcaagaaaatctacaaaaactctacagaccactgagagtatgtaacatttgaaccataacccacaccttcactcactccttccagctaagaatgattgaaactccactaggtgggtgtagacaagaacacagggtttcttcttttcccaggtctcagttgaggactacagtatcttcccaggaggggcaggccaccagccttyatcatcatcttcagatgtatgcagcagagtctgaatatacaatc

SEQ ID NO: 822199 - DNA, 590 bp, Homo sapiens
accaaatagaaaggtttataagtgagaacatgcaatatttggttttctgttcctgcattaatttgcttaggatgatggctccagctgcatccatattgcaaaggacatgattttgttcttttttatggctgtgtagtattccatggtgtatatgtactatattttctttatccaatccaccattgatgggtacctaggtggattatgtctttgctattgttaatagtgttgcaataaacatgagtgcatgtgtttttcggaagaatgatttattttcctttgggtatatacccagtaatggaattgctaggtcaaatgatagttctattttgagttctttgagaaatttccaaactgttttgcacaggggctgaactaatgttacattcccatctgcagtgtgtgagtattcccttttctccacagcctcaccaatatctgttattttatctaatcccaaagytagcagaagaaaaaactaaaatcagagcagtactaaaggaaattgccactccaaaaccatacaaaggatcaacaagatgaaaagtttcttttttgaaaggagaaacaagaacaatagataattagct

SEQ ID NO: 822200 - DNA, 554 bp, Homo sapiens
ctggtttgggtaggtgtaccagtcaggataggcgtggttatactgtggtaatgagcagccccaaatctcagtggcttaagacagcaaaagagcagtagctcactcctgtaatctcagcactttggtaggctgaggtgggaggattgcttgcacacaggaattcaagatcagtatgggcaacagaccccaaaacctcagctctacaaaaaaaaaaaaaaaaaaaaaaaaaaaaagcagctgggcgtggtggctcacgcctgtaatctcagaactttgggaggccaaggtgggcagatcacctgaggtcaggagttcgagaccagcctggccaacatggtgaaaccccatctctaccaaaaatacaaaaattagctgggcatggtggcacctgcctgtaatcccaggtactggggaggctgaggcatgagaatcgcttgaacctgggaggcagaggttgcagtgagcygataccacgccactgcactccatcctgggagacagagagagagattctatatcaaaaaataaataagtaaaataaataaaaaataaat

SEQ ID NO: 822201 - DNA, 655 bp, Homo sapiens
gagttctaggtgaattgtgagtccatccttcttagatttcctatcgactgtgaacagtttttttgcttgttmttatgaaaaaatgcaaacagaacccattaagtgggtttaggggaaaaaagaattttttgaagaatattagtgcttcacgtctccaagatggctggagagtcacactgggaggctctatggagaaggattacatccataccatacaatgggaatgaaccagtacagactccatcgatgctatgaggacagagaccccagctcacattctgggctcaggatgtcagaaattccacttccagccatcactgccatctctagccaaaaaatagtttctacccagcatcggctctctcatcttgctcacttttcagtgatactctcactcattgtggttggtatggctgaggtggagcattacaaaggagaatgggaaagtgagtttcttgtttccaccttggggatgtgaaaggtttcttagatgagggaagggtgtttaaaaacttctgagcagtgggaaaactcccaatgtctacaatggctctttaatgctggatattattatattaaaggaaatcagggaaagtataactgctgcttggatctggctattagatgtcgactgtagaccagggcatctcaacct

SEQ ID NO: 822202 - DNA, 624 bp, Homo sapiens
tcatgcaataatagattatatgcagtaaktttttaattaaaacattaaaataattttgatccttaacaattaatgatcatttactcaccccgtaacaatatattatgtgctacaagtagagacaggtactgctgtaggaaactgtgccgtaagcaatggggatggatccactgcagtctgaggataatagtgtaataatgaaataagggaggggagtgtttttaaaagaagggggaagaagagaggaggaagaaactacagagaagaaggaaaacgtggagaaaaaagagaaggaaaaagagaaggaaaaataacaacaaagtaggaagagaaaagagaagaaacagagggaagaaaaggcagtaggagatgattactatgagctcaaatttgtttctccctttgttcccaagttccactccaatgctgcagtacaatcagctcagagcctgattatcatggctgacatagcctagcgcctgcttatttttagatgaaattaatcattttcatgtgttatttttggtttagataatagctcgagtacacagcagcttcttcattagctgccaacaagaatgtaaacaaggttgcatctctccttggcaggttctatattcagct

SEQ ID NO: 822203 - DNA, 600 bp, Homo sapiens
gattgatttttatttacttatttttattttcaatcccttcgtcaatttgaatgattttaaattttaaatttaatttaaaattaatttaaataaaattataaaataaaaaatggaaatagccacatacagttagtgactactatactgaacagtatagttcaatctcaagatgatccagctgaataagaaacatgactaagagttaactagatgaaaagaagtaggagggtttcccaggcaggtggtatagcatatgcaaaggcccttagttgggagggaagatggctgtaatgctaagagccaggattacaaaaatgaataagattccatctctggcctcaaagagttcattttctaatggagaaagacagataggtaagcaagtaattacaatacaaatacaaaatactgtgagatacagagagagtagacttgcctgatagaatgaacaattgagatggaagtktaacggtaagtgaactttgtaaaatgtagaacagaagaatattaacaaatttcttgcattctggtggaatcaatcaaactgtagtttaaatgcaaagaaaattaactttaaatagaaagggatgcattacagaa

SEQ ID NO: 822204 - DNA, 551 bp, Homo sapiens
tatgccgcaaggtttcattcccacatggaagtacgcatgctcgtttctcctgagactgcataaagtctgaacattccagtttcccttttaagtcacttcatagccctagcagcagtttakaaatgcaaaagtttggttgctttaaagaatagttcttgagtggattcttaattaagtacaataatattttctctttgattttaaagagctttactgcccagaatggatacacaataaaattttgaaaggaaaaagaaagttagctgtatcccagttttctaaaccctggcaagctggcagagctagaattagctttacagatggcatttggcaacatatctacatatctctaagccctcaactcctgcgttttgttatgcctgtctatcaattacaatatccaatcactgctcagagatggagaaatgggacgatcacagctcacacgatgctgttttgttagaaacgtcagtgctgcacaacccacggctgagtcagtgtctgtgagaaaataaactgaattaatatgtagagggggttgtatctctgaa

SEQ ID NO: 822205 - DNA, 593 bp, Homo sapiens
attttttttcttgcaaatatatgcctttgctgaatatttggaatggcactttgcactaaaatatctgggcttatatcttaatttaaraagaaattatacaatttgcttgcatgttctctctctctggttgaggcactctttttcagtttgtggcattaaactagtttggacttgaggacagagactgtatctttttgactttgtgtctatagtgtgtggcacatcctaaggactcaacaaaatgtttgctgaactaataaattattgtattcccttgtgcgtttttaggaccctcttccactggttgtcctctctggtatcatcagtctttccctttctctatgtagtaaacctcagtctcaaacatactcaaatctgacttatgtctattctagacgttcaaaaacattctctttaaaaaaaacttgagcttttcattggaatcctttgaagttaactttttagaagaattaacatatagctccaaatgctgtgtcttcccatttattcacacttttgtgtctttaggtagagttttatcattttcttcatatagtttctgctctggtcttgttaatattttgtgtttttat

SEQ ID NO: 822206 - DNA, 497 bp, Homo sapiens
cacatgcacacataccaactgcaccatgaagcagcttctcttaaggyaatgacctcaggctctccctcagccttccgtagggccatgggccctgactgtacaaagtattgctctgccacagaaaccacagtccagggcagacggaccatcatgacctgccatgggcagtcatcctcagagtgtgtgcagatcaagaggaccaggagaagggcagctggctctgccctgagagacaaagggggcccctttccttgaagaaggacaacaaaggggttgtaaggtagagaaaagggcaaagggagtgggcagaaggaacagaccttaacaaggcacagatgtttcctcagcacagctggttctgatgcagaaccatggaagtgagggtgacggccaaaccccatgcacgcactcagtgagctccagaaagggggaggcctgggctggctcttttatggtcctagcccaccctcctgtgatgcaaaaggcaagaagcagct

SEQ ID NO: 822207 - DNA, 559 bp, Homo sapiens
ggccttctctgggcatgtgcgcaatggactggggattcacctacacactgggagaatagggtggagccactgagaattcacaccttatgcagtggggaggagtctggcctcytggtattcaatctgtgaggtaggagcctgttggcaggaccccttcttttttgctgagagctttcttttaataaattccactctcctcacctttcaatatgtccgcgtgcctaatttttcctggttgttagacaagaacccagattttagctgaactaaagagcaaaaaatcctgcatcacaatgactacaaaataacatcacaatgttaggctcattctatctctttgctctgccagccttagcatgctggcttgttgcctcttggttttaaaatggttgctgtaactacaggtatcataactatgttccaaataggaaatggggtggggagagcaaaaaggtgaaggaggccttctcccagtgaggttctgcctttttatttggcaaggaggtagttcacgaaccaattttgtgcctcactggccagaactggtcacatgccaccc

SEQ ID NO: 822208 - DNA, 559 bp, Homo sapiens
ggccttctctgggcatgtgcgcaatggactggggattcacctacacactgggagaatagggtggagccactgagaattcacaccttatgcagtggggaggagtctggcctcctggtattcaatctgtgaggtaggagcctgttggcaggaccccttcttttttgctgagagctttcttttaataaattccactctcctcacctttcaatatgtccgcgtgcctaatttttcctggttgttagacaagaacccagattttagctgaactaaagagcaaaaaatcctgcatcacaatgactacaaaataacatcacaatgttaggctcattctatctctttgctctgccagccttagcatgctggcttgttgcctcttggttttaaaatggttgctgtaactacaggtatcataactatgttccaaataggaaatggggtggggagagcaaaaaggtgaaggaggccttctcccagtgaggttctgyctttttatttggcaaggaggtagttcacgaaccaattttgtgcctcactggccagaactggtcacatgccaccc

SEQ ID NO: 822209 - DNA, 559 bp, Homo sapiens
ggccttctctgggcatgtgcgcaatggactggggattcacctacacactgggagaatagggtggagccactgagaattcacaccttatgcagtggggaggagtctggcctcctggtattcaatctgtgaggtaggagcctgttggcaggaccccttcttttttgctgagagctttcttttaataaattccactctcctcacctttcaatatgtccgcgtgcctaatttttcctggttgttagacaagaacccagattttagctgaactaaagagcaaaaaatcctgcatcacaatgactacaaaataacatcacaatgttaggctcattctatctctttgctctgccagccttagcatgctggcttgttgcctcttggttttaaaatggttgctgtaactacaggtatcataactatgttccaaataggaaatggggtggggagagcaaaaaggtgaaggaggccttctcccagtgaggttctgcctttttatttggcaaggaggtagttcacraaccaattttgtgcctcactggccagaactggtcacatgccaccc

SEQ ID NO: 822210 - DNA, 675 bp, Homo sapiens
cagtgggacaagatgtggaggtggaggacagtgatattggtgawcctgattctaatgtgtgggtgtctctgttaacttttaacaaaaaaacgtttaaaaatttaagaaaaaattaaaaatagaaaaaagtttacagaataaggatatgaagaatggaagtatttgtctgcagctgtacaatgtgtgttttaagctgtggtattacaaaagagtcaaaaagttttttaaaacttaagtttataaagttaaaaagttaagctaaggttaatttattattgaagagataatttttttaaatgtttgtgttttttttttgagatggagtcctcgctctgtctccaggctggagtgcagtggtgcgctctcggctcactgcaacctccgcgggttcaagagattcttttgcctcagcctcccgagtagctgggactacaggcgtgccaccatgcccagctaatttttgtatttttagtagagatggggtttcaccatgttggctaggatagtctcaatctcttgacctcgtgatctgcccacctcggcctcccaaagtgctgggattacaggcatgagccactgcacccagtctttaaaaataaatttagtgtcgcctaagtgtacagtgtttaccaagcctacagtgatgtatagttatgtcctaggccttcacagtca

SEQ ID NO: 822211 - DNA, 675 bp, Homo sapiens
cagtgggacaagatgtggaggtggaggacagtgatattggtgatcctgattctaatgtgtgggtgtctctgttaacttttaacaaaaaaacgtttaaaawtttaagaaaaaattaaaaatagaaaaaagtttacagaataaggatatgaagaatggaagtatttgtctgcagctgtacaatgtgtgttttaagctgtggtattacaaaagagtcaaaaagttttttaaaacttaagtttataaagttaaaaagttaagctaaggttaatttattattgaagagataatttttttaaatgtttgtgttttttttttgagatggagtcctcgctctgtctccaggctggagtgcagtggtgcgctctcggctcactgcaacctccgcgggttcaagagattcttttgcctcagcctcccgagtagctgggactacaggcgtgccaccatgcccagctaatttttgtatttttagtagagatggggtttcaccatgttggctaggatagtctcaatctcttgacctcgtgatctgcccacctcggcctcccaaagtgctgggattacaggcatgagccactgcacccagtctttaaaaataaatttagtgtcgcctaagtgtacagtgtttaccaagcctacagtgatgtatagttatgtcctaggccttcacagtca

SEQ ID NO: 822212 - DNA, 513 bp, Homo sapiens
gctctgaagtggagaagcagaatggtgaggagttcaaaagctgaggagcttctagctcgcctgtgaataagaagcggtgtcgctggtgcctctatatstgaagacccaagaaaggtggtaggcagggttaattcacagtgtcaaagaagccaccaaccattagtacctagaagttaaaaagtccaaatatttttggtaaaaatttgtgggtacagaaaaggcagttgccactgcctttataaaagtttagctaaggctccttttagaatagtcccaatagccatttctgtctttgacatgtggctggcaagtccttcactacatgtttctacttagaccagttacagtgcctgagattccaccattagatggtgtttctgtggagtaccttgaggataaggattagttaacaactagtttagagggattagttaacaactagctgatggcaagaagggtagtctgagtttgagggtggctaggaagtcaaaagaaagtgaactgtactgaagt

SEQ ID NO: 822213 - DNA, 550 bp, Homo sapiens
attaattcattacatttcaaaaactcttcagggacattaagtgagtagaaatttagtcactaggtacatagcataagaagtaaacygtagttaggtgatgggtgtgaagacacaaaacagacaacaaatgtgcctccaaaacatggccagtaaaacttgatgctcatggattgaaaacacaaaagccaaggtaacagtatattgcaaaatctaagaagctataacaacttcatagttattattggaatctatcaaaatatcattaaaataatcttctcatgaactatatgagtctaccaattcccatttgatatgtatatgatttgtactttttttttaaacttactttatatttggggatacatgcgaaggtttgttatataggtaaactcctgtcatgggggtttgttgtatggataattttatcacccaggttaagcctagtgcccaatagttattattattattattattattattattattattattattattatttgagacagagtctcactctgttgtcaggctggagtgtagtggcgcgatc

SEQ ID NO: 822214 - DNA, 299 bp, Homo sapiens
tacattgggtaacttcggctactattattctctgtaacaatcttcagggctcacatgaaatgaatccactaaattctggctttgggaggtgggagtaagggggttatagcatttttactcaaaagttttgtttttgttttttaataaagcaaccatatcttaaaactttgtagattttattagaagatattaaacagattcttattaaaacagtgtaatacggatcaggaaccagraaggccaactccactggaagtattttccattgatgtcattggtttgagttcaaacgatagcta

SEQ ID NO: 822215 - DNA, 672 bp, Homo sapiens
tatatgaaatgatctcattatttttagacaaattattttcttaaggagattctaaatgacaaagttcaaaatttgtaaaatactttaattaaatctttattccaggaactattttttctggaatttatataaatatggaagctaatattttattgcacttttaaatatctataattaaatgattccgttttagcctaaaaaatatgcaaaatattttcccaaatgtttctaaccggtatactttctttggttcttcacaaaatttttaacctagtgtgtaagatgtcatttataattttataaggataaggaaatgtgatatacatttaaattgtataaatctactttttatattacataaattgcattaaaattttaatataaaatagcatatataaattaaaagtatgtaaaatacataggtttgaagagtaaaatgtgattgatctcaaaattaatgagttttaaaatgtcagcaagagtaaattgagataaaattcctagagaaaaatacaagtttagtagtattgaaaatggtgaatgtagtaagaataatgaaaagattttaaactatggaagtacaaaytgattttctgaaataatagtttaccaatatgcttttttccattattagtgtaatcacattaagttcattcgtacacactttaagca

SEQ ID NO: 822216 - DNA, 376 bp, Homo sapiens
ctttttctgtttgtcttctgtgacatatcttgcttatcactttttataacttatctatcaatgccatggttttggaatttggataggggaagttgctcaaggtatgaccaaaagtagtataatctttaaaaacagatccagaattaactctttttcatatttaagaaatgttgattcataaggtattcatatttttccaatttatataatattgtaagcatctaatagcatattttagtttattatatgcttcattatgttgcaatagaacataatccttgattacgytgtatggaaatttcaactgattacacttctttgcaaccttgtcagtataggtcacacacatttatttttgcaattgctgtttgcaaga

SEQ ID NO: 822217 - DNA, 505 bp, Homo sapiens
gtgcaaggaagggattcagtttcaatcatctgcatatggctagcccgttttcccactaccattttctgagtagggagccctttttccactgcttgtttttgttaactctgtcgaagaccagatggttgtaggtatgcagccatatttctgagctctctattctcattggtctgtgtatctgtatttgtaccagttccatgctgttttggtcactgaagccttgtagtataatttgaagtcgggtaatgtgatactttcagatttgttctttgcttaggattgctttatctatttggtctcttttttggttctatatgaattttagaattattttttctaattccatgaaaaaatgtcattggtaatttcataggaatagcactaaatttgctttgggcagtatggccrttttaaccatattgatttttgctattcatgagcatggaatgtttttccatttgtttgtgtcatctctgatttctttcagaactgttttgtaattgtt

SEQ ID NO: 822218 - DNA, 536 bp, Homo sapiens
tggcaaggactcactgagctcgatacggggtagacaggtgtcttcccaccccctcagtgccctcatgttygggcttcctgggctgactccctcctgctccactcctggcccctgtggggaagtccccgctgcctctcacctcatgaagcccaggaacaccagcaggacgaggctgacaagccacccggcagtggcgaatgccttgggcatggtgagtgcgcccgtgcccacgatgaggttaaacatgtacaccagcccaacctggaaccgacagaggcaacattcaagcccggaacttaatcaacttctccccttaacagctcccaaggaacgaccctggtgatggcaccactgtggaggccagaaggccacactgtagacagggaaggaggcaggacaggagaattacacctggggcctaaggagccaggcttgcaaccacagagcctgttaaccaaacatgaacacatggatgactcaagccctggggttcagtttcagtctctgctcctgctgtcatcattgccgtcccctcc

SEQ ID NO: 822219 - DNA, 609 bp, Homo sapiens
aacagtgtccagcatatggtgatcctgtaatcattgctggatattgggatctaytgttatcaaaaacctttctaagacccacgtcatggtttgtgctgacttgcctctccgtgagcactttgcctggtgctttgcacaatctagttactcaataaatatttgctgaattgaattgaatagtgttccagcagcatggctgagaccacccaccagctggcagaccaagcacatgtaggattatcagttccatttcccctgccaaacaccaatgcactccactaagcatccctcagctgcgattctctattttggcaacctaattgaccttaatgtaaatgttcccagccacataaaacatgttgtgaagtgcacaacagcagtcacagttgactgccagctgccatcacactatgtgtatgcaatttattcctccacaaaccctcttgaacataataaataacaatgcctttcttagaaacctcccaacagtcagcacacagggtaccagtggcacattttaatgactgcaacaaaagaaaagaaaaagaaaaaaaaatacatgccagactttaaaaacaagagcctaccttctaatataaagacactctt

SEQ ID NO: 822220 - DNA, 549 bp, Homo sapiens
tcaggagatacagatttaaacagtccttgctctctatctgagccagcaaaacaagagttgtcttttgtaaaacaaagagtgagagaggcacaagtctctcatattgacccaaatttgwctttacaatttttagtttttccttccatccactctcctacgggacttatagtacaaaatgattctctagttgaatgggtatttcttcctaattcagcctttaaaactctttcaatatatcttgatcaaatagccactttgattgggttaggatgtcaacatatcactaaagtttccagctttgatccaaacattattgtagtccctttgtcaaaaaatgaagttaaaaatgccttttctacatccttgtgctggcagactaatctggctgacttcattggcactattgatgatcatttgcctaagtcaaaattctttcaatttctaagaaatacttcctggattctaccaaaacttactcgttcatcaccactagagacagccattaccatttttagtgatggatccagtaatggaaaggcagggtatgta

SEQ ID NO: 822221 - DNA, 646 bp, Homo sapiens
caactgttgaaaccttaatagtcctttcccctccaataattttatcaactggtgccacaggatagataaaattactgcagctttcaagttcaaggtaataaaggagatggggaagatgccatggtgatggtgggagaaatacagacttttcaatgaatagggaagactacagaaatagaaaaataacataaagggcttgatgcctggaatcccagcactttgggaggctgagcctgacgtgggagcattgtttgaagccaagagtttgagagcagcctgagaaacacagtgagactccacctctaccaaaaaaattaaacaattagctgggcatgatggcacgtgcctgtagtactggctactcaggaggatgcagtgagatgattgtctgagcccaggagtttgaggctgcaatgagctatgatcatgacactacactccagcctgggtgacagagcgaggccccgtctccaaaaataaataacataaaggaaggtggtgagaagacccagcaagtacttcagaatggtgatagtaaaatgtcawaatgcactcatggctttaaaattttggggcagaattattagaagttaggaggaggctcagaatcagactgcctaggtcaaaacttcactctactattttc

SEQ ID NO: 822222 - DNA, 569 bp, Homo sapiens
tttagaaggaaatgaaagagcacctgcaggtttggggatggctatggtaaattcatttttatagcataagaatgaggtactggtggactggtttgaggtgtggtgtgaggccatttgacagygtccacaaaaaaagctaggttggtcctgctctgtgagcagcatgctgtacattcaggggcctgatctgcagcaggctgccacttctgtgagcccacaccaatagcacatgccaggcaataatgctgcaatgatgcctatccatgccccactgttttcatagaggggagagccctgcctgccaagaaaaatatgccatagatactgccggggggaaacaaatcctccttgtgagtgttcaactgggggaaataaatctttttaaaattttctgtagagacagggtctccctgtgttgtccaggctggtctcaaactcctagcttcaagtgatacttctgtcttggcctcccaaagacttgggatttacaagcgtgagccactgtgcccagctgggaaataagtcttctttatgagtcttccagatttaggattaaatgggcaggactt

SEQ ID NO: 822223 - DNA, 613 bp, Homo sapiens
atatattatatatatatatttagagtgctagaaagaaaagtagatggggcagaggsaatactgggttagataatggttaaaaattttccaggactgatgaaaaacagcaattcatagatttagaattgtgattcccaagtaggataaacaaaaacaagtcccaccaaactatatacagttttggcatacaaataataaatcttaaaagcagctagagtaaaaaagcttaccttcaaaagaacaatagttacactgacaaatgactgctcaagaacatcagtgctggccaggtgcagtggtgcacacctgctgaggctggaggctctcttgagcccaggaatttgaggctgcagcattcagtgatcgcacctgtgaagagccatggtgcaccagcctgggcaacatagcaataatccaactattaaaaaaataaataaagaacattatggaagccagaaaacaggagaatgttatctgcaatgcagtgctaacccatactccaaaacctataaaacataactttaaaatgagcataaaattaataatttttttttcaggcaaaccaacatgaaaagagcttaccaaaatgagtcctgattagaaagaaattcta

SEQ ID NO: 822224 - DNA, 643 bp, Homo sapiens
  misc_feature 325: n = A,T,C or G
acgattattatccacaattaggtaaacaggtacttcyagcaactcacaggaagtcacacagataattgatgttgctgagattccatctaaaacaggatctattccaagagtctatatttctactcactttgctatcctgcttccagactgtggtctagaagtagcaggaaaataaagcaattaatttatgcaaaactgtattgatgaagattatttcttttaatgaatctagatatgcagatttttttcttgacatgttggctatttggtatttgattagaacgttgtaggtgacgaaagtaatctgaattatttctccactttntttttcctatttatttgcttctcaatcctgttgataaaaggggttacgaatctatagcaattggccagacgtgggattttccaggtttcagaatttcctagttagctgagggttacttgaatatcctcctcctgacgggggggcgcaaatacatagagtttttattaaaaatcagtctatttgcttatttaaaaatacaaatatgtgtgtatttttattacttgaaaaacagaaattctagaatagtaaatttttattcctattttgttcatctggcttcatctggtgatcagcaccttcatccttcattttcaatta

SEQ ID NO: 822225 - DNA, 657 bp, Homo sapiens
ggttacgaatctatagcaattggccagacgtgggattttccaggtttcagaatttcctagttagctgagggttacttgaatatcctcctcctgacgggggggcgcaaatacatagagtttttattaaaaatcagtctatttgcttatttaaaaatacaaatatgtgtgtatttttattacttgaaaaacagaaattctagaatagtaaatttttattcctattttgttcatctggcttcatctggtgatcagcaccttcatccttcattttcaattattcattttggaaacggcagtggagttagttttatttttgaagtttacagtgaacctgaactcaagaatcaaccaggagcatctggttggtgcagattgtaagcctgatagtatccttctgtgaggatgaccacttaggtgctcagaaatgtgttacttgataaggcaaaaagttcagttcctgctgagttaagaattagagaacagcgcagcttgcgtcattgagaagcctcgacctccatgaggttcmtagctggcgtttcagccttaaacaatggcaacagacacagcagagcattaactatttgtatgcctcgagtataatgtaagtgaaaggaacactatagcaagatgatttttcaggactaaatttctactaat

SEQ ID NO: 822226 - DNA, 638 bp, Homo sapiens
atggactatgcatacccagccctggcattttcccacagaggaattctctggccaacttcttcttatccaagcagatgaaagaggtgaaaacctgtgaacagtagttatgcctaagtttttctggaaagacatgtctcatttttttacattaaactttaagtaaactctaaaataaatatttaaacataaactctaaaataatatatcgctttcataaatatacagagaaccgtcatataagtgaatttgcctacagaaaacaccataattaatagtaaactcttataaaattcccttgaaagtcaagaacaggatatactccttggttttagaagtattgtgtaacattgctttgaagatcctaacaaatgcaaaagtatatgaaaatgatatgaattagaaatattataaagagaagatagttgacttttagcaacaatcagttcagtaggtggctgcattcaggataacaggtcaatagatttccgcataggatataacttattagaaatacaataaaaacatgtagggtaaaacamaaaaacacaaaaaaattatccaggaataatatatctagcaagaaatgtaaaggcctatatacatacatacatatatattcatacatacacatgtataca

SEQ ID NO: 822227 - DNA, 521 bp, Homo sapiens
tcaaagtgactgagtgagtcagagtcttatgacgcttaagctgctccctgagagccaagtcaggcactcagaaascgggttagctcttcgaggatcagataggcccacttagaaaattatctccgtgcctggagtggtacctacattgcatcacaggggagccaagtggctgcaactttatatatatatataaaatctcaggccagattctcgggaagcataagaaaacttaagcagtttttggaagctgttgtaactttctcaagttattaaagtatcctttcatgtctgaaatggcaacatacccatggttgtttctaatgtcttgaaagagttattgcaatttaaaaaggcacaggtttttttttttcaggaaaggtgtttaaactcatcacacatttttaatgatcttctttgtttaagagatgatttcactctagtgcacccattttaagatgtctataattatgttaaatagggaatggtaaaaatagtttaaaaatatatgatggagttttttc

SEQ ID NO: 822228 - DNA, 341 bp, Homo sapiens
gttcttatttccagcctgcagatgactgtgctagtttactgatcctgcttgactctagcaaaaccatactatgcaattgtaagaactttctgttattyttaagagagcatcttggaattactgccttttaactctcaaaaatacgtatccatcgcgtatgacaaagtaaaataataaaaacaatgaaatgggttcatcttctgcatagaataatggaagtaataatatacttctattattagaaaatgtactttctgagcaaaagtcttataggatatattactaaaattatgttaacctgggcaatggagaaaaggatccttgctagaaaaacagggtta

SEQ ID NO: 822229 - DNA, 341 bp, Homo sapiens
gttcttatttccagcctgcagatgactgtgctagtttactgatcctgcttgactctagcaaaaccatactatgcaattgtaagaactttctgttattcwtaagagagcatcttggaattactgccttttaactctcaaaaatacgtatccatcgcgtatgacaaagtaaaataataaaaacaatgaaatgggttcatcttctgcatagaataatggaagtaataatatacttctattattagaaaatgtactttctgagcaaaagtcttataggatatattactaaaattatgttaacctgggcaatggagaaaaggatccttgctagaaaaacagggtta

SEQ ID NO: 822230 - DNA, 341 bp, Homo sapiens
gttcttatttccagcctgcagatgactgtgctagtttactgatcctgcttgactctagcaaaaccatactatgcaattgtaagaactttctgttattcttaagagagcatsttggaattactgccttttaactctcaaaaatacgtatccatcgcgtatgacaaagtaaaataataaaaacaatgaaatgggttcatcttctgcatagaataatggaagtaataatatacttctattattagaaaatgtactttctgagcaaaagtcttataggatatattactaaaattatgttaacctgggcaatggagaaaaggatccttgctagaaaaacagggtta

SEQ ID NO: 822231 - DNA, 570 bp, Homo sapiens
ctgtacagcactccacagagtagatggagaggccacagtttattcaatcagtcttccaacccatctrttgatgagctctttccagttctttgctataagaaatagtctgacatgaatagccttgtgcgtgtatcctctcacatttttttgcagcagaaggtgacacgtggtgtgcagtgtacactgctcactagtggatgtctgctagaaaaggcatcataagtacaaatgcaagtccatggccttgatttgataattagtcacatatacaaactcatattcattgtaattatcattttaaacagaaatatgcaagttcctatagaaagaggacaattttaatgatttaaattaataaaaccatgtttaaagaaaaattgacagcaattctacacatactcagaaaatagatgggggaatacttcacaagtaatgtgtgaagttataatattctgaggccaaaaccaggtacagacataacaaaaaaaaaatctatgtactaatatctctcataaatatagacacaaaaattcttaatggtagcaaatagaattcaaatatatatgtacg

SEQ ID NO: 822232 - DNA, 600 bp, Homo sapiens
aggctgtttacagtgatttttttttaatgtaagtataaggagcatagtctaaaacagtgatggatagtatagcatagtaaatatataaagcaatgtcwtagtcacttattattatcaagtgttacctgctgtgtacagttgcactgctccgctttcacatggctggcagcacagtaggtttatttacaccagcatcaccaggaacacatgcgcaatgcattgtgctatgatcaatggctactatgtcattaggtgataggaggtttttaactacattataatcttatgggaccattgtatacatgatccatcattgattgaaatgtccttacgtggtacaggattttgtgtgtgtgtgtgtatatatatatatatatatgaaattatatgccataagcaaatgaagtgttttccttgtaggaatgaaagactgttcaatatttcaaaatcaatgtcatttattaaattaacaggataaagaagaaaaatcacatgtttatatcagtcgatgcacaaaaagcatttgacaaattcaacacccctattagtttcctaaggaaactaaccaccacaaatgtactgtttgaaaacaatacaaat

SEQ ID NO: 822233 - DNA, 600 bp, Homo sapiens
aggctgtttacagtgatttttttttaatgtaagtataaggagcatagtctaaaacagtgatggatagtatagcatagtaaatatataaagcaatgtcatagtcacttattattatcaagtgttacytgctgtgtacagttgcactgctccgctttcacatggctggcagcacagtaggtttatttacaccagcatcaccaggaacacatgcgcaatgcattgtgctatgatcaatggctactatgtcattaggtgataggaggtttttaactacattataatcttatgggaccattgtatacatgatccatcattgattgaaatgtccttacgtggtacaggattttgtgtgtgtgtgtgtatatatatatatatatatgaaattatatgccataagcaaatgaagtgttttccttgtaggaatgaaagactgttcaatatttcaaaatcaatgtcatttattaaattaacaggataaagaagaaaaatcacatgtttatatcagtcgatgcacaaaaagcatttgacaaattcaacacccctattagtttcctaaggaaactaaccaccacaaatgtactgtttgaaaacaatacaaat

SEQ ID NO: 822234 - DNA, 622 bp, Homo sapiens
agtctctcaaagctctggaggccacargtccaaaatcaaggtgtcagcaaagccatgctccctgccagatctcccggggagagaaaccattcccagccttttacagcttacagtgtctcctatgctcctcagctaacagtggcaccgctggaactcctacctctgtcttcatatcacatgtttctcttggtgtctgttttctcctctatgtgtttcatacaaaggcattcgtattttggatgtggggacaccaacataatccaggatgatctaatctcaggatgtttaactacattccatctgcaaagacccattttccaaataaaatcacagtcaccacgtctggggacaagggagtggacatgtcgttatcgggggccaccatcaagcctgctgtaacgtctgttcatgacaacgtctcagcaaggcaggaggaaatgggtcgtcctcagtttgtgataaagagcacttacaaaacaacaaaacaaaacaaaaaaacacttagaattaaccttactgatgaaagactggatgttaccccctaagagtaagaacccaccaaggatatccactcttcccattcagtatagtgctggaagctcaagtccattcaaaattgcaa

SEQ ID NO: 822235 - DNA, 559 bp, Homo sapiens
tataagccaagtatcagatatgtcctgacaaaatgaaaaaagaacgtgattaagtcgtatgttacttactggtataggtgagttgaaaaccttggtcggtgtcagatccattggtgttgaactctagccayaggtgattggatgtgctgtttaggatcagccccagaagttcatttttagtgaacgtgcccagtggacgtgaggaactgtcttttccatcatatacctgatgaaaattcacagcatgagtccctctatgccttcattggattcttatgttagcaatgttaataaacaatccaaatcttcaaagatgcagttttaaacaatacttaaaaaggcatatagtttacagaaagataaatgaaggacttagagctaaatcatatttgttctttaaattttatctttaccattaacactggaggcaaaagattccattcttgttcagatcattttatattcattactttaagagctctttctgtgttcatttaaaattaaataaatatttctttacatttccaggtttcattatctacctttttattccttttct

SEQ ID NO: 822236 - DNA, 560 bp, Homo sapiens
tatgaatcaaggaatgttggaaacttgctgatttttttaaaaatgtaaatttgttagtctgttagtcctttatggttttttcaatgcagctgggacactgaagttgaaaaaacattcagtgtttaaaatcctaccacttggctgcttggtagatactgacttctgacttcctctgagacagtgagaaaacagcttggcgggaaaaatgaagatagcaaaagcttacaggatgccactgaggaaagaaaagagcaacacctcagactatcataaactgactgttgtagagcattctaaagaatcaacggagatagattgcctacaatcccatgtctttcaggaagattgccaagtacagaatttctactttgcccacgtcattattctagtaattttcctccacaacttgaaatctagtgagatagttaataatacttattctgaaagcagctttcaaaaaygccaatattcccccaaagtttcaatgttcaccaaactgattttttttagtttgcaaagataaattatgactgatttaaaacataaagtagtttgagctt

SEQ ID NO: 822237 - DNA, 560 bp, Homo sapiens
tatgaatcaaggaatgttggaaacttgctgatttttttaaaaatgtaaatttgttagtctgttagtcctttatggttttttcaatgcagctgggacactgaagttgaaaaaacattcagtgtttaaaatcctaccacttggctgcttggtagatactgacttctgacttcctctgagacagtgagaaaacagcttggcgggaaaaatgaagatagcaaaagcttacaggatgccactgaggaaagaaaagagcaacacctcagactatcataaactgactgttgtagagcattctaaagaatcaacggagatagattgcctacaatcccatgtctttcaggaagattgccaagtacagaatttctactttgcccacgtcattattctagtaattttcctccacaacttgaaatctagtgagatagttaataatacttattctgaaagcagctttcaaaaacgccaatattcccccaaagtttcaatgytcaccaaactgattttttttagtttgcaaagataaattatgactgatttaaaacataaagtagtttgagctt

SEQ ID NO: 822238 - DNA, 600 bp, Homo sapiens
gtctaaaattttaaatcattctaatgatakatcaactcagatcatatgtattaaaaacattatataaccgatatcaaagttatattacaaagatcatattttgagatatctcagttgaaaaaaaatcctacaatgaaaagcatcatccacacatgaagaacacaatgtcacagcaaaaaaatcactgcaccattgctttcataaagaattaacttcagatgggctttggtattgcttatgtacactttagctgattaaaaatgtttcatattctttgaaaaaaaagcatgtatcataaaaatttatataaatgcttttaataagaagtaaaatgatattttttaaaaaactgttagatgacataggtcatattttaattgactatttaataacgaacaactaatttaggtaaaactagaatcttgtataagtaattcactttcactttattttctttcaaacattgtgaaagattaaaaaaaaacctcaagagaaaaacatgtatcttttttttgtaaaaggtaaacaaaatgtacttttaaaaaaatcctagtcaaaatgttattctctatgaaaaggcattttcctatcctgaatcaa

SEQ ID NO: 822239 - DNA, 677 bp, Homo sapiens
catctatttaaataattatgatagaatatatatttgtgaatttaaataatcatgatagagtatgatatatatggaagtttctagaactgagcttcttaacactttttttatattagtttargaaacttgtataagtttgcttattttttcttaaacatgccaaaaatggagatatctacaatgataactttgctgtctattttaaaaagatttgaacttggatttaaaaaaataaatgtgaggaaacataatgtaaggggaacctatttgatttgagccctaattctaccacttacctgtgtgattttacataagcagattaaacactctgagcttctgtttcaagtgtaaaatgagaaaaatattattcctactttacaaggactttttgaggttaaattagatagttaaatgcaatcttgtaataaacattgtaggagagaaaagatttctttttcttaaccattgctagattgatagctgaggcacccataacaaaagatagaataataacagcaaagcatgcaaatttatttaatataagttttccatgacatgggagccctcattaaaaaatgaagacccaaagaaataagtaaacatatgtttttatgcttgggtttgatgaagatgtgggtagtcatagaaaagtatgattggacaaaagagatgtggtt

SEQ ID NO: 822240 - DNA, 585 bp, Homo sapiens
acattactaacctttcttatttccaatgggaatattagtatttaataaagaygcaaaagaactctgtttagataactgagccttagctgctagtgcgttattccacagtgctttaattaacatggatgccaagtacagtgtctaaaaaaaagagggagagatttcagtttgagaattccaggcaacactaacaaatttaatatcctttttgtcaaactgaaatgccaagacaataaaatgaaagttaaattatctgaatcacaaggaaattttcacttcacgggaaaaaaaaaaaactatcatgttttgaatgtattacctgttcagtatgaacacttggctcaagagctgagaccagattaagtagatgtctaagtggtacgggatccaaattcttgatgagtgaaggaaataagtcatgtatataccgactacaatgtttcaactagaaaatcaagttagagagaatggtcaaaaataattgcccaatacatgtagattacctgatataaaaacagtttgaaagtcaaaaagttggccagtacactaatattttttaatatgacggtaaaatgctaattatct

SEQ ID NO: 822241 - DNA, 575 bp, Homo sapiens
cggatcacgaggtcaggagttcaagaccagcctggccaatatggtgaaaccctgtctctactaaaaaacaaaaatacaaaaattagctggccrtggtggcgtgcgcctgtagtcccagctactcaggaggctgaggcaggagagtcgcttgaacctgggaggtggaggttgcagtgagccgagactgcaccactgcactccagcctgggcaacagagtgagactctgtctcaaaaaaaaaaaaaatttcatgtaatgtgcccaggatgtgggaggtattatactaacatactttgaatagtgagtcgtgcagtgagcatgatgaagaaacaggaaaaaaatctgccacaacagatcaaaacatcacaggaagcttcttgaagagattcaataaataatctactggtgcaggttttttacagatttgctttgtggcttgttttggaagcagatgcttgtaaaattgtatttataatctctttgtatatctatattttgttatatattgcaatatttactgaaattctgttgattttcaaatttctgtgagaatgtaattcctaccaactccagttt

SEQ ID NO: 822242 - DNA, 596 bp, Homo sapiens
ataatggatatatacatatatagagatacacatcttataatctgtataaaccaataatttccataactcatagagcaacttattacatactaatactataacataactgagaaaccaggagcctttttttttttgaaacaatgtatcttgctctatcacccatggagtgcagtggtgccatctcggctccctgcaatctctgcctcctgactcaagtgattctcccatctcagcctcccatgtagctggcaccacaggtgtgcaccactacagctggctaacttttttttctcttttttagtattttttgtagagatgatgtttagccatgttgcccaggctggtcttgaactcctggactcaggctatcctcctgcctcagcctcccaaattgctgggattacaggcgtgagccaccacatccagccacaaggagatttctgtttgaatacctttttctctatcrgactagttttattcacattatgagaaatagattcggatgtggctgaatagtcaacttgttaattactctctgaacaagttctaaatgtgtcattattatctaaataatgaataagtgtgggtgtgatttc

SEQ ID NO: 822243 - DNA, 561 bp, Homo sapiens
ccctgtgatattgttcataatatcagaaaaataggggatgatatttctcccagtatcrcaggggtgtatactcccctgtgatatttttcataaaatctataataggaggagatgatattactcttaatatcgtagggggtgtacatcttcctgtaatattgttcataatatacacagggggagggaatattacctccaatatcacaaaaggtgtacaccatctgttacatttttcataatatccaggagaagaggagttgatattactctcaacatcgcagtgggaatacatcccctgtgatatggtttgtaataccagaaggggaggggatgatatgactcccaatatcgcagggtgtgtacaccccaccgtgatattatatgtaatatccagggagaaagaagacgatattactcgcaatatcacagagggtggacattcctctattgtactgttcatattatccaggcaggaggggatgatgttactcccaatattgcagcaggtgtacacaccaatgtgatatttttcataatatccaaaagaagaggagattatat

SEQ ID NO: 822244 - DNA, 561 bp, Homo sapiens
ccctgtgatattgttcataatatcagaaaaataggggatgatatttctcccagtatcgcaggggtgtatactcccctgtgatatttttcataaaatctataataggaggagatgatattactcttaatatcgtagggggtgtacatcttcctgtaatattgttcataatatacacagggggagggaatattacctccaatatcacaaaaggtgtacaccatctgttacatttttcataatatccaggagaagaggagttgatattactctcaacatcgcagtgggaatacatcccctgtgatatggtttgtaataccagaaggggaggggatgatatgactcccaatatcgcagggtgtgtacaccccaccgtgatattatatgtaatatccagggagaaagaagacgatattactcgcaatatcacagagggtggacattcctctattrtactgttcatattatccaggcaggaggggatgatgttactcccaatattgcagcaggtgtacacaccaatgtgatatttttcataatatccaaaagaagaggagattatat

SEQ ID NO: 822245 - DNA, 600 bp, Homo sapiens
tcctcaactttggggtcaagtcattcatttttgagcaaaataaaagttttattcagttgtccggttccaagatggccaaataggaacagctccagtctacagttcccagcgtgagcracgcagaagatgggtgatttctgcatttccaactgaggtactaggttcatcttactggggcttatcggacagtgggtgcagcccatggagtgtgagccaaagcagggcggggcatcgcctcacctgggaagtgcaaggggtcggggaattccctttcctagccaagggaagctgtgacagatggtacctggaaaatcgggacactcccaccctagtactgtgcttttccaacagtcttagcaaatggcccaccaggagattatatcctgcacctggctcagagggtcccatgcccatggagcctcactcactgctagcttcacagaggagaagctgagcagctgactgctgagattgaactgcaaagtggcagtgaggtctgagattgaactgcaaggtggcagcgagactgggggaagggtgtcccccattgctgaggcttgagtagctaaacaaagcagccaggaagctcgaactgggtgg

SEQ ID NO: 822246 - DNA, 600 bp, Homo sapiens
tcctcaactttggggtcaagtcattcatttttgagcaaaataaaagttttattcagttgtccggttccaagatggccaaataggaacagctccagtctacagttcccagcgtgagcaacgcagaagatgggtgatttctgcatttccaactgaggtactaggttcatcttactggggcttatcggacagtgggtgcagcccatggagtgtgagccaaagcagggcggggcatcgcctcacctgggaagtgcaaggggtcggggaattccctttcctagccaagggaagctgtgacagatggtacctggaaaatcgggacactcccaccctagtactgtgcttttccaacagtcttagcaaatggcccaccaggagattatatcctgcacctggctcagagggtcccatgcccatggagcctcactcactgctagcttcacagaggagaagctgagcagctgactgctgagattgaactgcaaagtggcagtgaggtctgagattgaactgcaaggyggcagcgagactgggggaagggtgtcccccattgctgaggcttgagtagctaaacaaagcagccaggaagctcgaactgggtgg

SEQ ID NO: 822247 - DNA, 685 bp, Homo sapiens
aacacatggacacatagaggggaacaacacacactgggacctatcaaagggtggaaggtgggaggaagggtaggatcgggaaaaataactaatggatactargcttaatacctgggtgataaaataatctgtacaacaaacctgcatgacacatgtttacctatataacaaacctgcacatcctgcatatgtacaactgaatttaaaataaaagttaaaaaaaagaccagaaaagaccagaaataattaccaaaaaaaaaaaaaaaaggagctttaatacctgggagaaaaaaaatactttggtctttagtagggtaaggatctgagaagggagggaactgatggatgcctaaggggaaaatcttaaaaatgaagaggaatgtcgataggtggtaagttaagagatttgcaggctacggttgggaataggttcttacaaaagaaaaaacactttataggtgacaggaacaccatgaagacagtgaaaggcttgttaccattttggtcaagcaactttggcaaaagggatctgaatctcagaagaaactcaatgggaagtttttcctcagactttcagtttctaggtcttacgtctgataattaatttagagaattaactgagctagtccagaacagggagggtgtcagtagaaatgtctgcattctagggaaagtattatactgc

SEQ ID NO: 822248 - DNA, 621 bp, Homo sapiens
aagaagttttctcctatgttttcttctaggagttttatggtttcagatcttacttatcttacttttaaatctttaatccattttgagttattttttctgtattgtgtaagacaaagatccagttttattcttttgggtgtagtcatccagttttctcaacactattgaagagactgccctttccccatcgcttattcttggcactcttgtcaaaaatcagttggctatagctgtgtggatttatttctgggcccttaattatgttcccttggtctatatatctatttttatgcctgtaccatactgttttgattactgtagctttgtaatatattttgaaatctggaagtgtgatacccccagctttgttcttcttattcaaaattgctttggctatttggagtcttttctggttccatatgaattttaggattgctttttctatttctgtaaataatgccattgagattttgataggattgcattgaatctgtagattgctatgggtagtayagatattttaacaatgttaattattctaattcataaacatgggatgtcatttcatttatttgtgtctgctctattttctttcatcaatattttatagttctatagttt

SEQ ID NO: 822249 - DNA, 628 bp, Homo sapiens
ggcatggtgtggcgtggtgcagcatggcatgacgtggtgcaggggtgtggcatggcgtgccacagcgtgcctccttctcttgggaatgtaaataataaatacttctttcaatggcattgccttctctaggacattccctcacaaattaaaatccccccagtacaaatgaggcatatacctacccagcaactctgttactagagaaataagtgcatttgcctgccaaaagcacaaactatgatgttcagaccaactttattcatagcagccccaaacctaaaacaacccaaatgtccattaataactaaatggaggctgggcatggtggcttatgcctgtaatcccagcactttgggaggccgaggcgggcggatcacttgaggtcaggagttcgagacctgcctggccaacatggtgaaaccctgtctctactaaaaatacaaaaattagctgggcatggtggcgagcacctgtaatcgcagctgcttgggaggctgaggcaggagaatcgcttgaacccaggaggcggaggttgcagtgtgccaagatsgtgccactgcactccagcctggatgacaaagtgagatactgtctcaaaaaaaaaaaaaaaaactgaatggatacatca

SEQ ID NO: 822250 - DNA, 339 bp, Homo sapiens
aacttcagttactgtgaccagtacacaagtcattgttctagatggtaagttagrcccaattaaatcaataaaaaatacagaaatttgagcaagatctccactgacttgcttaaatttcttctctgaaagtcttacaggcagagaatggtggctcatgcattgtaatcccagcactttgggaggctgaggtaggtggattgcttgatcccaggagttcaagaccagcctgcgcaaagaggcaaaaccctgcctctacaaaaaatacaaaaataagccaggcatggtggcacatgcctgtagttccagcactcaggaggctgaggtgggaggatcacctga

SEQ ID NO: 822251 - DNA, 500 bp, Homo sapiens
aggattgatttgttctagaaccccttaataataaatatcagaacagcaattcaaactaatctcaagctggttccaatgtctatgttcttcgctgccttccaaattcaagaccctgttttcttcaatgcaattctcccacttactgagcattttctatacctctaccctcatgcctgtaatcagaaatgagttgaatatcgttgcgcaacaaaatgcatcctattccagccaagtagctcagtctcccaagattcctcataaccaaattaaccagtatttggaatggaagtcagacaacaaaccccagtgcactggattaaaaattacaacctcgctgggctggtgtggctggaaaaataatatgagacacacagataataaacagcagattttggacagaaaagcatggcattaaataattgaagccagtgaaagtggaatgtggggccaagtccacacagctatttatkaaactgagaaatggaatattgatgttttgt

SEQ ID NO: 822252 - DNA, 637 bp, Homo sapiens
ataaagaacagaggcatgtttattcatgctttttattgcatttaaaatgcaaggtatattttcatagctccccagagaaatgctcttccattgactgaraattgttgatgtgttggtttataaacttgaaaagtaagggaaccactcagaaaattgcagatataatttaaacagtcattaaactggacactcagagggaactggcttaaaaaaaaagaattcggtatataaaatttcccttctctcctagtgaatttgttccacagagtctttggtcttgcagttgtttatgttcttatctgtcttctgtaatatttatagctttctgaagatatgatttcatcaaacttgctattcacttcttcccagtttctcattaagaaagcttagctggtaacccacctgtgtagtctctatttttatagtcctttgtaggtttccaagaagatgtttttaacatgtgtgtgtaggaaagcaggggcatgggagatgcctagaacactgtccacggggctgctattgcacaactctcctcctcctacacacacacacacacacacagagaaaagtgtgcgtgggcatgaggacatgtatagatatccatatgtatttttagaaagttaggaaaagaagtaca

SEQ ID NO: 822253 - DNA, 624 bp, Homo sapiens
atgtaagtggctgacctgcaacgaaaggtgcatgcacagcctcgccaggtgtctactcttaaagtgagggccctgaytggaaaagaatgggaccctgcaacttggaatggggacacgtgggaggaccctgatgatgctggggacacagagcttgtaaactctgatgagactttttgccagaagaaacagcttcgccatccccagtagtggtaacatcacctcaggagaagagagccagccctgtttgcttctagacctataactggactaaagtcccggtggcctcctagaggtgaagttcagagtgtgacccacaaggaggtgtgctacacttgaaaagaactgctagagttttctaatttatataagcaggaatctggagaacaggtgtgggaacggatgttaagggtgtgggatgatggtggaaggaacatagagttcgatcaggctgaatttattgattcgggcccactaagtagggactctgcatttaatgttgctgctcagggaatttaaaaaggttctaatagcttgattgcttggttagctgaaatacggattaaaagatggctcactctgagcgagctggaaatgctgatctcccttggtttaatgtagaggaag

SEQ ID NO: 822254 - DNA, 593 bp, Homo sapiens
tcttgctttctcagacacctcccttctgctcaactgtttctgatctctctggagttggagccttgggagggagaagaggttaaaagaacaggtaagttttctcttgataggtattgcagtaaawcaacttcaagagctctgggcctggcaggtatctaaagttgtcttgcctctcatgacactctcatggcttgtcagaggccctgctggaaaactaacagcatttcccacgaccctgactcggtattgccttcctgttggtcacccccctttcaatgcctcggttttctgacagtctactccacatgggttctctctgttggatttccactgcgatccttctggatttaggtcagttctctctcccaccggtgcctatatggtccataaaaagcactcctgcttcttttgttctgacaaatcccaggagtataggccagtgtcaattcagcagcagctttccttaacttctcaactgaagcagctggtctgccaagccctcctgccttcgaggtttcatgggcaggagtccagcaccagccttctgggtcctcctaactgcagggaataatgtcaagctgcctaagtggtgt

SEQ ID NO: 822255 - DNA, 593 bp, Homo sapiens
tcttgctttctcagacacctcccttctgctcaactgtttctgatctctctggagttggagccttgggagggagaagaggttaaaagaacaggtaagttttctcttgataggtattgcagtaaatcracttcaagagctctgggcctggcaggtatctaaagttgtcttgcctctcatgacactctcatggcttgtcagaggccctgctggaaaactaacagcatttcccacgaccctgactcggtattgccttcctgttggtcacccccctttcaatgcctcggttttctgacagtctactccacatgggttctctctgttggatttccactgcgatccttctggatttaggtcagttctctctcccaccggtgcctatatggtccataaaaagcactcctgcttcttttgttctgacaaatcccaggagtataggccagtgtcaattcagcagcagctttccttaacttctcaactgaagcagctggtctgccaagccctcctgccttcgaggtttcatgggcaggagtccagcaccagccttctgggtcctcctaactgcagggaataatgtcaagctgcctaagtggtgt

SEQ ID NO: 822256 - DNA, 643 bp, Homo sapiens
agcaataaatgctgaaaaattattaaattttaaattaataaggccataggaaaggtatctgcccagtggggatttccagcacagtctcagacaaggcctgcctcactgttccagcaagttttcagcagactcagtgaccttttcctaagaccctctgcaatccatggggtgcttggtagaaatttgtacctccatgcttgtcaaactacagccattcagtgaatataatggatggtacaataaaataaattatttaaatagtagtaatagaacaaaaagcactgtatgtttttggggatacaatatcattgctggaataagcaattccttgagcagtaactaatgctaatgggaagacactatggctgcatgtcattctcggagttactctgattctgaggttcaaagctactattgtacaatctgggacttttactggtctgcaagtcttagtcttcagggtacctacactcagaaatcaagtaacctccttttgtctctgttagaactttctcatgcaagcttagtatgtttcatttcatgagtaattgactcgagaatatgattgtgasttgctatagtccttcttgtcacctgggcagaagcctgcaaagggataatatcctaatggattcacccttat

SEQ ID NO: 822257 - DNA, 535 bp, Homo sapiens
agcattttcaggggcactctcagcagtaaacacaaagcatccacacctggagactttttaagtgtccatatttattagtgaggatttgtgagaatttctcatttatcctatgggcatcattaagatcgctaccaaaaaaaaaacacgcatcggctcctgccacataagaaaaattcatccattcgcagaaatgacttgtggaagcattacacagaacaatggaatacaaagtcctcatcaaagatcatgggcaccgcaaaaatcaagccaatgagttagacaagctaatttcccatacccaattctgcagccagcttgattccttaaaagcctgaaattgctgcctttacacaatttagagaccacaaatacgaatgttccatgcagttatttttcttaggtttatcttacatgaaaaattatatataatatatatatakagagagagagagagagacagatagagagagagagagagagagagtgagtgagtttctctcttgttgcccaggctggagtgcaatggtgccatctc

SEQ ID NO: 822258 - DNA, 633 bp, Homo sapiens
gactgggtgacctgaaggttgctaagcatgactatgaactcaatgaagttcaagaaccgtacatttccaacagagcccatcagcatggttatacggttgtctctgacagtaatctgaggattagcatggtgggtggaatagagggtgaggaggaccagagaatagagagtatggctgacatgattaacaataccagttacttcaccatcaatatgcattggcctgcccatatcatttctgagtttgctaggtgcctgtaaccttcaacttaacttgacctcaggcacctactcattcatccatacactagaccttcatgtctttttaaactgctccctctcaaagcttttggtttctgaaattgccctctaaccacattcatacacttcttaccacttccactccttctttccattaacatttcctctttgccttcaacttgaccttcagactcttaacctggattctctcacacttttcttttcttttgaattaattgactttcctggccagccaatactctgcatttagcctttgcatacttttactttcatatttacataaacaycaagcagaaattgccattctttttctttactgcatctccgtcatagagaaacttacagtttgaga

SEQ ID NO: 822259 - DNA, 582 bp, Homo sapiens
catttcaaattgctcctttgtgaaccaagttgggaaattctcattttcacacatcacctattttgatggattctgctcggttattttctgttttcatgattgaccagcagccgtttatacattttttcaaccatcatctcctttgcagcagtaggccttcgacctgtgatcgctttcaaggaggtaaattaccaattgttgttgtttttttttggactgcagttccctggtagcttcagttttcaaatgaaattgaacaagatgaatctttgtcacttccaaatctatgaaatcttagcatacatatacatacatacacacagatactgtatgtctgtgtgtgtgtgtgtgtgtgtgtgtgccaaattttcagcaccttcattagtactcatggggaatgtactaatgggaaatttgctagtcatttaagtggtggatgtgccagttacagactttcctggyggggtggccaagatggtttttataaataaagttttattggaacacagccatgccatttatgcactgtctgtggctgcttttgtgctacaatagtagggttgagtaatcacagcaagagaa

SEQ ID NO: 822260 - DNA, 576 bp, Homo sapiens
cctggtggacagagtgagactctgtctcaaaaaaaaaaaagaaaaagggcaagatttgtacactaaaaccacaaaacatcattgatggaaattaaagaagttataaataaatggaaagacatctcatgttcatggattggaagattttttattgttaagattgcagaactctccaaactgactgacagattcaatacaatctccatcaaaatcctagcctgcttcttgcagaaattgacaagctgatcctaaaatttgtatggaaatgcaaaggactcagaatagccaaaacgatctcaaaaagaagaataaagttgaaagactcacaattctcaacacttactacaaagatgagtaatcaagattgtaatactgccataaggatagatatgttgatcaacggaacaaaactgagagtctagataaaaacccatacatttatggtcaattaattttcaacaagggtgtcaagaaaattcaatgtggggtaagaatagtcttttcaacrattggtgctaggaaaaccgcatatgtacatgtaaaagaataaagctggatccctacttcacaccatat

SEQ ID NO: 822261 - DNA, 618 bp, Homo sapiens
ataagactaaggaaagtggttttctttcaagtactataattaattcctggggtgaaagggaaaaacaagacaaggggaaaaaaagaggaagcaaaagaaccayaggtttagtcatatgctacaaaggaaaaaaaaagaatatttaaccttccatcaataaaaacttgaagccaaggataaaaagaacaggaaattcacaaaaactgttaagagccaggcagccactccctcgataccaaaccaagtaatttaatattcggcatttctttaatgcccataaattccagaaactgactcccaggtccagctagttttatatggtggtaataacttttaaaattgtgtgttattttttaaattccatgtgtccatccccaattctctgacacagccacaaagaaaacatggtaactaaactagagtcgacttggcctacccagctacatgaaattccatgagtttagtctgtttcccatcctcctctttaccccacctcttggcctaaaccgccaagatcacagtatttcaagagtcaaaattcaaataagaacaaacatgtttgcatgaggctgccaaacactcctagatgaaatcctcttcccttccaaagaattttac

SEQ ID NO: 822262 - DNA, 558 bp, Homo sapiens
ggggatccaaagacaggtcccttgacttagtatgctattgattacacgtagattgtccaaggataatctaagctatccaccctttgccccaagggttcttcctggagtcaacaagtgttgcagaatgtgacttaaacataactcgaaggtaaacctacttcagatcagagacatcaagatgtatgcaaaaccagattggtcttgggttatctataattccagtcaacatgggagtttatgccttttctttgacaaaggtaagtacatccctgtttttcacacaggtctgcagaaatatcctcaagaatttgaagttctctataaggattgtttttccagtttacatttttacgttaacctttaaaaaattaatctaagtgagttctatttctcatggatggccmctgataactgaaccttgccatgagatttcgatgttggtgttacaattgggtgttgaccttattgacactaaggtgattatccagacctacaagtgctaacttttaaggaagaatctctcaagctggacatttgtacgtatattctcatgagtcc

SEQ ID NO: 822263 - DNA, 613 bp, Homo sapiens
  misc_feature 423: n = A,T,C or G
gactgggaatcctgagaattcgcagcaatttcacatttgcatcttccaggtacccagggtgattctgagtgagaagcacttgagattaatttttctttgsggttccttatgtagaagcagtatattttcaaaccccttctatgggaaggaaggcttgtgcttataaatttccaggaagctttttttttttttttgagagagggtctcactctgatgcccaggctggagtgcagtggtgcaaacacagcttactgaagctttgtcctcctgggctcaagcattcctcccatttttgtagagatgggtgtctcaccatgttgcccaggctggcctcgaactcctgggctcgagcaatctgccctcctctgcctccaaactactgggattacaggtgtgagcaccacgcctggcttatttatttanttaatttttttaaccacaacctgtagcctgagacagacaagtttcccagtcagcctctacattgacacttcctcacagtcaccactcttcagggcgtaactcctcagagatcgtggattcaggtagaggtctcacgtcccatcctccaccttgggtctctcagtgccttggatctttcatgagactgtta

SEQ ID NO: 822264 - DNA, 642 bp, Homo sapiens
ctgccctgggaagcactatggaatatacagacaattctccagcacccagctgagccaatggaggatctccaatagaagatgagggagtgaaraggatgagagcgggatatttattctcctggctctctgcctgcagggctgcttggggttggctgtgttcctctattgaagatcacatgtcttctcaaggtggccctcttgtcccagctccttccttctggattctggtaactgctctccctctgcccctgtatgccttggggtgataatatccccagtgacgcttgctctgggatacggcacttttccttgtgatttcctagaccctgtctatttcatgtgtagatagtctctgtatcaaaacctccttgattcctcctaattggaatatgctgttggtttccagctgggatcctgattgatatggtcacattgagattttgattgagattgcattgaatatatagattgttttggagagaaatgaagtacagtatagaatctctccatccaagaacatgatcaatcttcctttattaacatcttttaaaaaatgtctttctataaaatggtgtgttttttctcaaaaaaggttttgcatatttatgatagacttacttgtaggtagcttgtagcttttgt

SEQ ID NO: 822265 - DNA, 611 bp, Homo sapiens
caaaactgatatgggggagacactaaaagctagattttacgtctgcctgatatcctgggctcttagtgttcttttcaaaattctttctgcaaattcatggagtcacctgtacccttcatgatgggtactgattgatggagtttaattgtgtcccttttattcaaacaaacatttctcccctatcaagtatatttttaaattctgacaagaaacatgggaaaatatagaaaagattaaataagggaacaaataaaactataattaataatcccacagatagggactgttaatatttatggttttttctttcacatatttttccattatatattataaatgtatacatatgcatatcatattattctacatgggtgtatatattatacacacgtgtattatataattagtttatgtagttctgaatcccacttttctcttcacaagattcttatatattcccagccattaaaattcttggaaaacatcactctaatgggtataattgcccatcataaagwtatatcataatttatttaactgcttcccaattgttggacattattctgtcttcaattttttattattataagtggcaatgtcatgaacatctg

SEQ ID NO: 822266 - DNA, 535 bp, Homo sapiens
agaaatataaatattcattgaagaaaatttagaaaataaacargcaaataaaaaatgtttaaatttccattttctaccactcaaccattttaacagcttccatattcttttatttttgctctatatgtcaatataggcatagaaaaatatgattggcataatataaattatataatttatgtatataacataaagtacataatgcatatgcttaaaaattatgtttacaaattaaaatatattggcatataaaataattatatactataaaatagattatacaattgtgaaagctacactttttactttttagattataactatatttctattaaatatttttctacagcatggtttttcatggctgcatgctattccactgtataaaatttacagtagtttaataaaatccttacataacacataggtcatttatagcttttcactatcacatgcaaaagtgagatgagaaccttatagcttaaactttatgtagttaatttttccttagaataaaatcctagaagtgaaaata

SEQ ID NO: 822267 - DNA, 535 bp, Homo sapiens
agaaatataaatattcattgaagaaaatttagaaaataaacaagcaaataaaaaatgtttaaatttccattttctaccactcaaccattttaacagcttccatattcttttatttttgctctatatgtcaatayaggcatagaaaaatatgattggcataatataaattatataatttatgtatataacataaagtacataatgcatatgcttaaaaattatgtttacaaattaaaatatattggcatataaaataattatatactataaaatagattatacaattgtgaaagctacactttttactttttagattataactatatttctattaaatatttttctacagcatggtttttcatggctgcatgctattccactgtataaaatttacagtagtttaataaaatccttacataacacataggtcatttatagcttttcactatcacatgcaaaagtgagatgagaaccttatagcttaaactttatgtagttaatttttccttagaataaaatcctagaagtgaaaata

SEQ ID NO: 822268 - DNA, 659 bp, Homo sapiens
acctgtaatcccagcactctgagaggccaaggcaggtggatcacttgaggacaggagtttcagaccaccctggccaacatgttgaaacccggtctctactaaaaaaacaaaaattagctgggcgtggtgatgcacgcctgtaatcccagctactggagaggctgaggcaggagaatcacttgaatccaggaggcggaggttgcagcgagctgagattgcgccactgcactccagcctcggaaacagagtgagactcctttgccaaaaaataaaaaataaaataaaataaagaaacaggggattacagctgaaacaatagcaaggcttatactgtacttaaggtggagtttctaggaaaactcaggacaattagggagataaaaaggacattaaaggaaattttagcctctgaaaccacagcaacagcaaagagtaaacacagccttactcctagccaagtaaacataaaccctaacacctaaaatctgtgtttctcaattgcttttacccagggcatcatgtctcactgtcaacaaaaatgtatgctaagaaacaaacaacaacaactgaacacccacagtckggagaaacaaagcaagcatctgaagcagtctcagattttgtgattctcagaccaggaatttaaaataactctaaag

SEQ ID NO: 822269 - DNA, 495 bp, Homo sapiens
tacagtattgaaaacattctcctcttctttcatggtgacagaggaggctgaaggcttcttacattaagccaagtgaaggggcatcaacaaaacagctcagagagcttgatatgcattttttgaatttggagaacagagacacttctgtttcaatctgctgggagaagcctacacacaaaaggtgggttagctgggcattaggtgggagagagaaggtatgaaaatttaagtggcttatgagaaagctgctttattcccatcaatggagaagccaatatgcatgtgtcctagaggttggccccagagctcacctgaaattgtcttcacagggatgtcatctaagatgccagtccacaggggccaagaaacccctgcagaagggaagtttargggaagcccatgggctgagaaggggagtgtcctaaaaacctgttagtgtttagagtgcttcaccaggcattcctcagcagaagaatctctccaaaaaccatgtga

SEQ ID NO: 822270 - DNA, 603 bp, Homo sapiens
cttagcaattccacatatccatatttatagaaaccgtcattcatgtgcagagggtgacatgtgagacactgtgcactgttttcaagtagcaaattaatagaaacarcctaaatggccatcaaaaaacctatgctgtatccgtgctatccagtattatcaagttagaagtttaaaagtatcaagttaaaccatatttcatgacctagaaacatatcttaaaaatatattaagtgaaaaagtaaagttgcaaagcaatacaggttatgtgatacaatttatagtaaatacacactcacacagaaaagcaaaacaatgaataatttataaatatacctgtatacgtaagcacatggaaaatagtctggaaaaaatgtatgtcatactaatacagtggctttaagggagtatctttaaggaagggaataggatgaggggtggccaagtaagagtttatctttcttgtagaattcttatttgaattctttacagtaagaatttattcagatgttacttacacagttaaaaagtattatttaaattaaaagcaaatcaagataatatcaagggtaggaaaagtttataaatattgagaaaaaatatatg

SEQ ID NO: 822271 - DNA, 590 bp, Homo sapiens
ggagtgaaaggtgtcagggagagaaggatgaaggcaccataaggttattatatataataactggcatataggatatagtacaggcacctcagtagacctattttcagttcgtgctgtggagcatgtgaaactattttaaatagaggcctttgggacttaagtaacttcaactctctgaatgaggtttaaggcaagcttgctgtgggctggatctatcctgtataatccctactgatttgggtgatgtataggtacccttccctgaaattcttccctgagaataattattgttgtcatctactacggaatcctgggcccactttcttccttcttcttgggggaggaaatctcccagacatcttgccaagcatttgcttaagtctttgaaccgctgcactagctaatttctccacctgaaacaatatacaaacccctcctcttctccacccgctaggttcttaygctggcagctcatatttttacaagaaaaagaagttagaatgtattgagcacctgctataagcctggcactttgctagtcactgtgtggcagatgactacatcagtcatgactgataaaacataacttc

SEQ ID NO: 822272 - DNA, 534 bp, Homo sapiens
cagtattcacagtagccaagatatgtaatcaacccaagtatctatgcaatggatgaagggatgaasaaaatgtatatataaatgatggaatgctatacagccttaaaaaaaaaggaaattctgtcatttgggacaacatgagtaaacctggaaagcattatgacaagtgaagtaagccacgtccagaaagacaaatactgcaagatctcatttatatgtgaaacctaaaaatgtcaaacttatagaaccagagagtacaatggtagttaccaaaggcacgaaatggggggtgggagttgaggggggaaggacaagagagatgttggcccaaaggtagaatgttttggttagagaggagacataaattttagtggtctattgtacagcactgtgaccatagttaataataacatatatttcaaaattgctaaaagagtagattttaacattgtcataaaaaaataggtaaggtgatgaatatgttaattagcttgatttaatctctctacaatgtatttatatttctaaacatca

SEQ ID NO: 822273 - DNA, 498 bp, Homo sapiens
ttgaatttttcacaaaatttttgttgattgactgtaatgtcaaattagacatcctttccttagtctttgtggttattttaaaaattaattttaattggaaaaacttctttctgcagaggcagtagctgctgaaattgtcaataaaatacttaaagcattactttgattaggaaatgaaacaaaaattttacatgtaaatacaaacattgtaatgtggttgcatgacaaattattactgctgaaatacaacaaaatattttgacttcatcaaaaaatgcttatcaccatcaatttaaagcaatatctagatccctacagtaagttcttttttcacacttttcaatgcttagatattataaaaactgaaggcagaatttawtccacaattttttcaaagctccttcaatcaagacagtaccttgatctataattgtcaaaaaatagactatacaaattattcgggggcttatttgtatgtgaatcctttccttcatattc

SEQ ID NO: 822274 - DNA, 624 bp, Homo sapiens
agtgcaatcaaattagaactcaggattaagaaactgactcaaaaccacacaactacatggaaactgaacaacctgctcctgaatgactactgggtayataatgaaattaaggcagaaataaagatgttatttgaaaccaatgagaacaaagacacaacgtacagaatctctgggacacatttaaagtagtgtgtagagggaaatttataatgctaaatgcacacaagagaaagcaggaaaaatctaaaattgacaccctaacatcacaattaaaagaactagagaagcaagagcaaacaaattcaaaagccagcagaaggcaagaaataatgaagattagagcaaaactgaaggagataaagacacaaaaaagtcttcaaaaaatcaatgaatccaggagctggttttttgaaaagatcaacaaaatagaccactagcaagactaataaagaagaaaagagagaagaatcaaatagacgcaataaaaaatgataaaggggctatcatcactgatcccacagaaatacaaactaccatcagagaatactacaaacacctctacacaaataaactagaaagtctagaagaaatggataaattcctggacacatacaccctcccaag

SEQ ID NO: 822275 - DNA, 618 bp, Homo sapiens
agtccgctcaccaagacatgaactccaagaggagaagatgatgtgtccgtctgggctctgctgggtttagaaatcctgagactcatccacatgaatgcrccagggagctgtgcataaggatcaaagctcagggaggtggtctgccagggggtctggccctccctgcccctgcccagctcatccctatcccagctctggaggcctccttgccagcattgcccatgggctgctctggagagaaggagcaggagagctccggaatttgacactgtccatttctccccttggggaagctcttctcagggggaatttgggattcaattttcataagtaaataagctttggggttaatcacacctccatttgcatagggagggatggggagtgaatccttccttcctcctggctcatcctccccagaaaaaacgagagtggatccattaccagcagcccaccctccaccactcctgggggaaaaagaaatgacattttccttttacattggaaatacttaaaagtcccaagaatagatttataggaatattttaacctttctttgatccttgaaatgtcattgttctgtgggctgaatcgccaaatgtgaccttttccagtaac

SEQ ID NO: 822276 - DNA, 602 bp, Homo sapiens
ggccaattaggaagaggaggccactggaagagaggtgaccatgcctgaggcagtgaccatggagacagggaagagtgagaatgtggatgttaacaatgagatcaaatctgtaagacttagagattccgtgagccataagagggaatgtgtgggctgaaggcagcagtagggcgatggaaagcctggccaagggcttctagaacttgaagctcaccatttttggatgacattctgtgaacgaagtgttctctatgagatactaagagcaatatagggtaatcactggtgacagaaacatctgctcatgcaggttcatgtcaaagtccagggttgaaggagaacccctcatcccaggtaattcttgcccctctgccatcccagcacctgtgaactagaatctggagcccagctgtgtgcagctcccacaccaaaaagaggcacagactccagagcaggaatttcccactgatggggcagaggaggggtaggataacttcctgctgccaccttcctcctatttctgctggactagggtctgtccctttggaatgaatggttcwggtacaagagaccagaaaaaggagtgtgtgagagattgcctt

SEQ ID NO: 822277 - DNA, 631 bp, Homo sapiens
acataaaactataaaaaatacagcaaagtattcatttgttaaggtatacataaataacaaaacattacccaggctttttaaaagcacattttggaagactaatatagaggaactgtctgaaaaattcacttacattaaaaatctgaaactctatgtaaaatataatttcaacttatttgcttatctaccatgcgtattcacatgcactaagcttattaaaacacatggcagcaatattttaatgctggtaatatctgaataacaagtttatgaatgacatatatttcctgctaattttctgtattctctacaataacattactattatcattaagcaaaatgatgtttttaataaaattgtaatatcaatctttaagaggtgattagaaaaacttttttattcaaagaattactcagatttttgaattcacaaaatataaagaacattttgtgtttaaatttatttttttatttttgagaaaacttttattgattttgtatttttagaaagtaactactaaattaattttatctacaagaataaaattatgtattatttgtaatatgcccattmctaagataaaaagtgtctttaaggcacacaaatacaaatccgatgacagagtgttta

SEQ ID NO: 822278 - DNA, 428 bp, Homo sapiens
tgttctcattgttcaattcccacctatgagtgagaatatgcagtgtacaaacaaaaaaccaagtaatacttttataatttgttatgcctgtctttaatctcttaatcctgttatctttgtaagctgaggatataggtcacctcaggaccactgtgataattgtgttacctgtacaaattgattgtaaaacatgtgtgtttgaacaagatgaaatcagtgcactttgaaaaagaacagaataatagtgatttttagggaacaagggaagacaaccctaaggtctgactgcctgcggggtcaggcaaaaagagccatatttttcttcttgcagagagcatataaacrgacgtgcaagtaggacagatattgctaaattgttttcctagcaaggaatattaatattaatactctgggaaaggaatgcattc

SEQ ID NO: 822279 - DNA, 641 bp, Homo sapiens
taattgtgccaccctaaaatatcagaaaatgaagttttgaaactttattatagtcacacaaatcaactgatgttcctttgtttttatagtgcaaaatatttctccttkttgaaaatgagtgcatcagcataaaagcctcttgagcgagaaaaatgtatattgatcactgtaagtgcttttctgtaataccttgaagttattgaaattgaccctaaaccatgttctatttctgacaatggattcttttcatgtgttatttattgatttacagcttaatagagatgcagaagtaatttctgttatgaaaaacacatgtaagaccttgtcttactatttgaatttgtttgtagctttaagaaaacatcaaacacattatactcaatataagagctaacagattaaccaacataactcttataacactttcatccttcaataatgtgttgaaataaatacacatactgaatcatctattggaccacaaagtacaatctggctagtgcacatgtggagaaaataaattctagagtaaaaggttgtttgtgttataacctgaattccactctttctcagatttagtatatcattcctttgcacctcagcatttccatttggaaaatagtgataacattagtcttctt

SEQ ID NO: 822280 - DNA, 510 bp, Homo sapiens
atattattcactaaaatactaaaccataatcatgatgataataataacaatctgtccataggagcaaatggcagtatagaaaccaacgataatcaaagaaataaactgggaaagaaaaccaagaaattttacctgtaaaactataaaatagtccccaaagtactttaaaattttgaagttatagcccagaagaagataagccaattacacaaattgtctgcataagctcacacaaattaatctcttgatggcccctcatccttcagttataaaagaagagtcatgttgtttcaaattctatccaattatgaaacacatgcctaattgctcatttattttaaaaatcctattttcttctagattcagactgggaatcaaatatttattttcagtyattataaatatttcatatttaaatatgccaaaataaagttttctggaaaagagctgagaagggacattattctgagcctggaaaaaatactattaaaaattatcaaatattgagat

SEQ ID NO: 822281 - DNA, 644 bp, Homo sapiens
ataatccactgtcattctccaagatccatctgtcttctgcacaggccaaataggagaattgaatggggatgtggtaggaatcaccacccctgtgtctttcaagtccttgatggtggaactaatctccacagtgcctccagagattaggtagtgtttttgatttactatttttctaggtagaggcagctctaatggcttccagtgggtctttcccaccataatagtcctcactctatcagtcagcgagccaatgtgggagttctgccagccgctaagtatgtgtatggcaattacgcactcaggtactggggaaatgacaacaggatatgtctggggacccacaggacccactgtgtgtcagtactgagctaaaactccattaattacctcacctccataagctcctacctcaactggaggaccacaatgacgttttgtgtcccttgaaatcaatatcagcacagagccagtgtcctgtagtccctgaaatgtatgttcatttccctttccccartacacagttactctggtaaaggcaggaggtatccttggggaaggatggaagaaatattcatagcataaattgtcagtaatgtagtggagtccttcctcaaggggatccagtcaccctttcattcagtggg

SEQ ID NO: 822282 - DNA, 566 bp, Homo sapiens
ttcaagaatcctaattccctctcttgtcctccagcatttgttctctgagctcttgaaagtagtgcctgtgttcttccccaggaagtttagcttggaacaatgcataaaatagcacaaaaaatagctgatgagcaagtgtttatatagtttaaaaattaaagtcactggcagaaaaagagtttgatgttttgtttctaagttacttttaaattggtggtgatcaggttctcttttctttcctatttggagggcctgactccaccaataagctccatggacttaatcatgcacgtattcaacccaaatgcctttctgatacctagaaatggaataagaagcatatggaggaaaaagcagtaacttaagttagaaacatatgtttctcaaaggagttgccagaaaaaaaaaagaatataaaactggcactcatctagcagctatcttaaaaaaawttttttttaagtagattgcagagtgtactggaagaagagatatgtaggcaggcatcctttttgaaatctgagatcatgcacgttgaagatgacaaaaagaatatttttatcgat

SEQ ID NO: 822283 - DNA, 609 bp, Homo sapiens
atggaaccaagttagaaaacactctttaggatattatacaggagaactttcccaacctagcaaggcagaccaatattcaaattcaggaaatactgagaacactacaaagatactcctcgagaagagcaaccccaagacacataattctcagattcaccaaggttgaaatgaaggaaaaaatgttaagggcagccagagagaaaggttgggttactcacaaagggaagaccatcagactaatagcagatctgttggcagaaaccctacaagccagaagagagtggggccaaaatatacgttcttaaagaaaagaattttcaacccagaatttcatatccagccaaactaagatttataagtgaaggagaaataaaatcctttatagacaagtaaatgctgagaggttttgtcaccaccagacctgccttacaagagctcctgaaggaagcactaaacatggaaaggaacaaccggtaccakccactgcaaaaacatgccaaattgtaacgaccatcaatgctaggaagaatctgcatcaattaatgggtaaaataaccagctaaagtcataatgacaggatcaaattcacacataacaatattaacctta

SEQ ID NO: 822284 - DNA, 576 bp, Homo sapiens
tgatatagtctgggacatggctttctggtcagcttgcctttttcctcttctgctgtcttgatcctctagtgtcgaagtatctcagagtcccattatgagtttccacaacacatgccatgccccgcacatgacccaaaatgaggccagttgtcagatgtcatttagtaccaggcttgcatggtatttcttatctccatagttgagaaatagttctaaaatatgtctattaaagaggagaaacaaaagacaggtcaagaatacacttgatttcaaaaaagtagtagggaccatattattttataaaagtgaaaaaacattcttaagtatttaatatgtagccatgaggtcctagtcacttatttacagcttctgccatggccccttatattaattttctgttgaagataacagaaactatgttagcattttacagaggaagtgatttaacaggaaatttgatgtttacaaaatcattgttgatcagaagactaagtcttcaggattgattcccagcaaacaatacagaggtggacagccacaggaggctggctgtawtttgctatacgcaagaggtgc

SEQ ID NO: 822285 - DNA, 399 bp, Homo sapiens
tgtttatggatatgtaaacacagtataagtgaaaaaagcctagatgataaaagctaacttccaaggtggttacctaggaaaaaaggggarcagagctctagttatatatgtaaatatttcattctttaagagacacaaagcaaatatggcaaagtattcacagctgtttattcctagtgataggtagttaggtttatattttattttatcctgtgtgtctgaacatttctatttgattaaaaccatttttcaagaaagatcactgattggtctgagtgtagaagatgaactgaaatggcggcaaaattggagaagagtagactggccagagaactactgcattagtccaataagaaatgacagcagcaggaactaaagccatgaaagtgcaagggagag

SEQ ID NO: 822286 - DNA, 626 bp, Homo sapiens
ggcacatgcctgtaatctaagctactcaggaggatgaggcacgagaatcacttgaaytcaggaggcggaggttgcagtgagccaaggtcatgccactgctctccagcctgggggacagagcaagattctgtatcaaaactaaataaaaaagtaaaagggggtggagccaagacagccaaataggaacagctccagtctacagctcccagcgtgagcaactcagaagacgggtgatttctgcatttccaactgaggtactgggttcatctcactggggagtgccagatagggggtgcagcacagtgggtgcagcacactgtgcgtaagccaaagcagggtgaggcattgcctcacccagggagcacagggggtcagggaattccctttcctagtcaaaggggtggcagacagcacctggaaaatcaggtcactcctaccctaatactgcgcttttccaacaggcttatcaaacggcacaacaggtgattatatccctcacctggctaggagggtcctacgcccatggagcttcactcattgctaagacagaggtctgagatcaaactgcaagggagcagcaaggctgggggaggggcacccaccatttctcaggcctgagtaggtaa

SEQ ID NO: 822287 - DNA, 573 bp, Homo sapiens
cattcactaataatatattcagttacttactaatcagcaattatttacccatggggaygtgttgatttaagaaactgcctatgaaaagtttaaaatattcaatctatacgctttttgaatatgtagaacatactcatttcagtaatacataaatttaagaaatcactgcaatatctctcaaagaaaactctggtaattttatacatatattatatataaaaagtatatatatatacttttttaaaggttaggataatacatacatattatttagtaacttgcttgtctccatcactcctcatttaacaatgtggaccttaaatattccgcaacaccctgaatatgacattccattcaaaaatactgtatttaatttcctaagagtaaatatttgggttgcttctattttaaaattcatatataataatttttctaagaatattatatattcttgtataatacttttcccaagataaaaaataaaattcccacaagttaattttagtgaaatggcttgtcttcacataaataaaattaggcctaaaaaattatggagccataattctcaagtgc

SEQ ID NO: 822288 - DNA, 573 bp, Homo sapiens
cattcactaataatatattcagttacttactaatcagcaattatttacccatggggacgtgttgatttaagaaactgcctatgaaaagtttaaaatattcaatctatacrctttttgaatatgtagaacatactcatttcagtaatacataaatttaagaaatcactgcaatatctctcaaagaaaactctggtaattttatacatatattatatataaaaagtatatatatatacttttttaaaggttaggataatacatacatattatttagtaacttgcttgtctccatcactcctcatttaacaatgtggaccttaaatattccgcaacaccctgaatatgacattccattcaaaaatactgtatttaatttcctaagagtaaatatttgggttgcttctattttaaaattcatatataataatttttctaagaatattatatattcttgtataatacttttcccaagataaaaaataaaattcccacaagttaattttagtgaaatggcttgtcttcacataaataaaattaggcctaaaaaattatggagccataattctcaagtgc

SEQ ID NO: 822289 - DNA, 587 bp, Homo sapiens
atggggtctcattatgttgcctaggctggtctcaaactcctgggctcaagcgatcctcctgccttggcctcccaaagtgctggggttacatgagtgagccactgcaccacccacacacttcttattgttctgaaagaatcgtcatcaatgctatgacaaagaatcatctttgttatagtaattactattgtagtaattaatgccttctaaaatgttagaagacataaactatccttggatagttggaggaaggtcagctatagttctaaacataaaaatctgttatttcttcccttgtcaaaattatttatgaacaaatcaacctcatcagaaaatattaaaggtacattattttaggttctacagcatgtaacagatatggtaatagaattagtctgccatatggtggcagcaaataccaaagaaaattaatttcttgagtacgtccatttaaaaagttaatgtcttccctgrgtcatgtattttaaacaaaggtttcaaatagaagaggctttacaggttttcataattatgttttaatcttgttatattaatagtcaagctcaaaacaatatcacgagcgtatt

SEQ ID NO: 822290 - DNA, 594 bp, Homo sapiens
aatcaaggttttagagtaatagtatatgagcatgggagtgggtagctaaggtggggtggagaaaaagatcattagagatgaggagtcaagaaactgaatgaccagagtgtcagatgtatcatttagtgcttgttgaagtcaccaagaataacaagtcacagtggagagacagggacctgtatgctaaaattttgaatgaatgagaggaaatgactgaaaggtcagtagatgattgcaacatagaggggtggcaggtgccattgactgatggcaaactattcctttatttaataaatatttatttacatatggccaactaattactgtggggagaacaacttaccacatcctcaaggattacatgctaattggaagataatatactcctccatcaaaaacgaaacagtaaggcaaacattgcagtatggtgaggcagaaataccacttgcctaagggtcagaaaatccgatttctattataagttccagctttgtcagtaattagctgtgagcctgggtaaatcarttaacctcattaggcctcagtttccacatttggatacagatgagatgattctcaagcttctgcagggca

SEQ ID NO: 822291 - DNA, 613 bp, Homo sapiens
cagtgtgtggtgttcaactgttctgatgggctagattatctagcaatgggaaaggtagttaaattgctgaatcaataatattaaatgtttcaaacttacagctaggtctaattggataaatggaagcaaactcatgtttaaacatgaatgtggtttgaatattacttggactttcattttaggagtaaagacattgtttttatccttggaacttttactaaatttaactttcaattctgacttaaaatattaggtatttgttttaagagatgatatcctttcctgagaaaaaaatcactttcctttttctttgtccttagttttttaaaggactggcttcttctggtgcttgggcttgctttgatgaattcaatcgaattgagttggaagtgttgtcagtggtagctcaacagatcctttgcattcagagagctattcaacagaagttggttgtgtttgtttttgaagggacagaacttaagctcaatccgaattgttttgtagctattaccatgaatcctggctatgcaggacgctctgaattgccggacaatcttaaggtaatwttatttatttatttatttatttatttattttatgtttttgaaacagt

SEQ ID NO: 822292 - DNA, 558 bp, Homo sapiens
taatgattggcatatatttttgcacaacattgcagagactttattttgtgtctttttattttttattctttttttttttttttttgagacagagtctcacttagttccccaggctggagggcagtgrcgtgatcttggctcactgcaacctccacctcccaggttcaagcaacccccctgcctcagcctcccaagtagctgggactacaggcatgcaccaccacacctggctaatttttgtatttttagtagagacgggtttcaccgtgttggccaggctggtcttgaactcctgacctcaagtaatccacctgccttggcctcccaaagtgctgggattacaggcatgagccaccatgcttgatctatttttattttttgagataaggtttcactctgtcactcagtctggaatgaagtggcacaatcatagctcactgcagccttgaacttctgggctcaagtgatcctcctgcctcagcttcccaagtagctaggactacaggtggcatgccaccacaccaggctaatttttttacttttaacgttttaaagaga

SEQ ID NO: 822293 - DNA, 615 bp, Homo sapiens
tggttattgaagcaatatgaacagatgaaactaccctcaacttccccagtaccaaggaactaaaaccataaattatattattgtgtcacttgctactcaccagactggcaaacacagaaaagcccatgggttgttgagggcagaggagaggaggacctggggcctttcacaccaaggtgcaagtgggaggggcacacagactgggggtgggggaagtgtcagcagcacccatcacaggaagtgcagctgcctggcctctgagcatctgagcagttgtacttctgtgaatctgtcctgcagaagggcttgcctgaggccaccacacaggccccaccaggagcaagtattttttcttagagcaaaaaatggaaagtgaactgagggaggggagctggctgatggcgcacatgaggatagatgagtcacacccactgtggccacaccctctgcaaagtgactttgctgtcctgctgaggaggctggggatgtggttcccaccctccaacaggtgctggcctgggacacacagaatgtrccagagtggccttgtgcaagtccagggctcgggcctggaggggcccttcaccctttgagagccctgagcccaccgtgcta

SEQ ID NO: 822294 - DNA, 605 bp, Homo sapiens
gatttaaaattggtgagatgttccttgggctggtctgaggatccgacgtcataggtggatctcctcacggagagagggcaaggacaggggattgatctcccgagggagatcccctgtcccaggtttttcagcaccaaatgttacaagagtccatgtgaagagaccaccaaacaggctttgtgtgagcaataaaactttttaatcacctgggtgcaggcagactgagtctgaaaaagaagtcagcaaagggagataggggtgggacagttttatatgatttgggtaggtagtggaaaattacagttaaaggtggttatctcttgtgggcagggacggggctcacaaggtgcagggtggggagatcatgagactcgttgcccaggagaaggaatgtcacaaggccaattgatcagttagggtggggcaggaacaaatcacaatggtggattgtcatcagttaaggcaggaactggctattttcacttcttttgtggttcttcagttgcttcargccgtctggatgtatacgtgcaggtcacaggggatctgatggcttagcttgggctcagaggcctgacagacagcagagctaaaagagcactgga

SEQ ID NO: 822295 - DNA, 595 bp, Homo sapiens
tctgcaatgtagtgtttgggtatccaagattgatatatgcagttgcaagagaatatctgtctgtggtcaggttccctagaagcagcatctaaggtaaaaattcttgtgcaagtgatttattgagggaatgttccagaaaatcatgcgaggcagtaagggcagaggaaagcaaagcaaaagtaaaggttcaggagaagtctagcctggggctgctcccagggtgggttttggagtattaactgcaccctccaattatacctgcctgtccccacctctgtcagcctttggtttcagtggcccctggggtggggtggaggacccaccaggcataatccctcggcctctttgtgtacaggagctcttatccatccacagcaagcaaggatgggacagtgcaggccgttatcatccagcccttgctgcagctggaggacagggcaccagccacaggggtctgagcagggcacccacagcatctgyccagagacctgcaaagacaggaatgcaaagaaggcaattaagtgtcttaagaggaagctggggttatcagctctctcacaagagctttgtccactgtccagaggtggtcagggtg

SEQ ID NO: 822296 - DNA, 582 bp, Homo sapiens
tctctgttctcctttcggttgtccttggtcactccacttggtcacatggagagaattggcagctttcggaggcagtccctgagtgctctgtgatggctgaggctcccccagctrcagagctttaggggaagttcagtttatctggtggaagaaggtgaatggccctgacagcctctccccagagctcagccctgggggagtgagccgtgttcagtgggtgaggctcccccatgcagcctgacaagagctgcaagtgttctgctgatcaggaaccccgaggccggggagaagtgatctgcccaggaccccacagcagactgtgtggcagagtgtggttcccgcactgggcttctggcagcctttgctccagtcagcatgggccatgcagctgcaaatggttgtagatgccacttgtaggactgctggatgttggtatcttggcatcattcccatttgttaggagccttggagccatgttttccttgggaattgattatatgtgtccccaaactaaattaactcattgatatttgagatcttgggatcttgagtatgtgtcttatgtctcaccccaactttgtt

SEQ ID NO: 822297 - DNA, 548 bp, Homo sapiens
tctataggctccccgacggggtgatcacacgtgggtccccggagactgggcaaacactccagaagcttgtctttattgattttacattcagcacaatagatgcacctggcagccttgcctaggtggagcyctgagtctgctctgagacccacttgtggctcccacaggggacccagggtgggcttattcagatggctgtgggtctcgactgggctgcatcttggagtacatgagggacagcggttaaagcttgggccagacccacacagccccagggagcttctccaaaagtcacagggactgtcaggggaactctgatggttctggaagttggtaagacgcaggctgcgcttggatcctcattgctggggggtttctcccgcggtcagtggagtggaagcaccaggcttggtgtgatcctgcaggctggggccacagtgacagcccggttgtgcatggagggggaccgccctcccctgcggccctgctggccacactgccctctgctccaggagtctctggcccctttgctctgctgttttttcctg

SEQ ID NO: 822298 - DNA, 548 bp, Homo sapiens
tctataggctccccgacggggtgatcacacgtgggtccccggagactgggcaaacactccagaagcttgtctttattgattttacattcagcacaatagatgcacctggcagccttgcctaggtggagctctgagtctgctctgagacccacttgtggctcccacaggggacccagggtgggcttattcagatggctgtgggtctcgactgggctgcatcttggagtacatgagggacagcggttaaagcttgggccagacccacacagccccagggagcttctccaaaagtcacagggactgtcaggggaactctgatggttctggaagttggtaagacgcaggctgcgcttggatcctcattgctggggggtttctcccgcggtcagtggagtggaagcaccaggcttggtgtgatmctgcaggctggggccacagtgacagcccggttgtgcatggagggggaccgccctcccctgcggccctgctggccacactgccctctgctccaggagtctctggcccctttgctctgctgttttttcctg

SEQ ID NO: 822299 - DNA, 609 bp, Homo sapiens
atttattctgattctttcgtaagaaccttctactgcatctgactgtggatatttaaatgctctcatcaccagcctctgtggcatccctgcctcacactcaatccatttgcccgaccctcatgtgttcagagggtctgactgcaggcacatctacctgcatctgtcattccttccccacatatatggagtgatgtccagtcagcaggctgatgtacacctttgatattctgtgttgagtttggggctagagatgaattcaggagtccatagcacataagggggagctacatccctgtacaagagtgggcgaggtcaccagggcatggcagatggggtatgcaaggagaccaggctatgtcttgggacaaccacgttggagctgccagtggagtatggaagggtggaaaggatgagataggaggagtgggagctgagttaggagaatgcagtgccctggggcagaggatttcaagtaggcaatgagctaggaggacctggacgagcgaagaagcccaggctgtgtggggyctgctgggattcctatctgctgcccttgcttgttaatttttacccaaaccccatgaatatatgttctcaaatcttggaaat

SEQ ID NO: 822300 - DNA, 405 bp, Homo sapiens
  misc_feature 225: n = A,T,C or G
gcaaccactggagggttctgtgcaaamgaacagcatgatcaatgtacaggaccactgtagatgtttttaagaatatgctgcagggagcaagcaaatggaagcagagagactaatttgggaagttattacagtagccaaggttaatgatggtggtccaatcagggagagagcagtggaggtggtgagatgtggtcaggttccaaatatctttttctgacaaactgngtgtggggtgtgagaggagcagaagaggatagggaaaccaaagtttagccttaacaaccaggacagaatttccatttaaggagatggggaggcagggtggtttttttcttctttttcttctctgtttgaatttggggtggggcaatcatgaatccagtttagaccatttcaaatttgaga

SEQ ID NO: 822301 - DNA, 339 bp, Homo sapiens
gtatataaggttgatccctgtactcttgttgggaacttgagtggtatgaatagagaaggtgagttcttggggacagaggctacagtttagcaagctttcctatgcggaccttggtaatttctttacattttatagaccaaagaacaatcttaacttgcccttttttctaaaggcattgtttaaaaactgtcatcaaatcattgcagtttatggcaaatggcctttttttwaaaaaaaaaaaaaagcaatctaaatcttttcttcatcttggaaaaagacttctcttggatttctgatagaatatttccagtatgctatgttattgcaagacagtaactt

SEQ ID NO: 822302 - DNA, 556 bp, Homo sapiens
aaggcaaggtgggcgtagctaccgtaatggacagcagaggcaaagtgacaatcagaatagtctgactcatgtagagctctggcattggctaattaatcacggtattcctagaagtgaaacggacaggaagcctactgcattcccacttaatttatacaaacacaaaacttctaggtcgaatggacaaaagactaatttgaattataaaaagagaatcatggcccctcactcaatccatttccagacttcagccagtttacagacccagaaccccttgaatgaaggggaggccaggtacccacttgagaaaggaccccactactttactgacaatttatgcagtgaatctttctcccatccttccccaaggagacctccatccaacctttcactttggggactactggacactggctctgggctgatgatgactccaggggacttaaaacatcaytgtggtcttccagttaaactaggggctcatggaagtcaggtaattaatgaagttttagcttaggtctgacttacagtgggcccagtgggtccctggactcat

SEQ ID NO: 822303 - DNA, 584 bp, Homo sapiens
gagacatgcttctataaggcagggggtggggggtagattgccacagaaacaggaatccccggggaaatgagayggagtttccctcttgttccccaggctagaatgcaatggcgccatcttggctcactgcaacctccgcctcccaggttcaagcggttctcctgcctcagcctcctgagtagctgggattacaggtgcctaccaccatgcccagctattttttttgtattttcagtagagacagggtttcactatgttggccaggctggtcttgaactcctgacagatgatccacccgcctctgcctcccaaagtgctgggattacaggcatgagccaccagcctggccccagggggaaaatttgatttgagcttggtttgagataggttgagtttgcagacccagaggaccatctaggtaaacatcggcagaacacagaggaacaggctctgaagctcaagaaggggtggaaggtggagatgcagatttgtgggttatctgggtattggacagaggtacctgctaaggggtgattaggagtgaggagcaggagcgaaaccatggaggtcaggctaaccagact

SEQ ID NO: 822304 - DNA, 605 bp, Homo sapiens
ggtagattatttgcaaagatggctactgtgatggaataaatgcttgtgtcaccccaaaattatactgaaatcctaacacccaagttgattgtattaggaggtaggacctttgggaaktaattaggttataagccctcatgagtgagatgagtgcccttataaaaaggatgccagagagctctctcatcttctttccaccatgtgaagatacactagaaattgttcatctgcaatcgtgaagagggccctcaccagaaccttaccataccagcaccctgatctaggacttctagactccagagctgtgagaaataaatatctattgtttataagacgccagtctatgatactttgttatagcagcctgaattaagacagctacaataatccttcccctccctgtatgcctacccttttgcaatgtgacattattatacttcccagcaagaggtgaagcctatttccctatgtattgaatctcagctgcccttgtgataatttgaccaatacaaggcagtgagagcaatgttgtctggcttctgagactggacctcaagaggccttgcatttctgtccccactctcttggaatgctgacctgtgagc

SEQ ID NO: 822305 - DNA, 605 bp, Homo sapiens
ggtagattatttgcaaagatggctactgtgatggaataaatgcttgtgtcaccccaaaattatactgaaatcctaacacccaagttgattgtattaggaggtaggacctttgggaagtaattaggttataagccctcatgagtgagatgagtgcccttataaaaaggatgccagagagctctctcatcttctttccaccatgtgaagatacactagaaattgttcatctgcaatcgtgaagagggccctcaccagaaccttaccataccagcaccctgatctaggacttctagactccagagctgtgagaaataaatatctattgtttataagacgccagtctatgatactttgttatagcagcctgaattaagacagctacaataatccttcccctccctgtatgcctacccttttgcaatgtgacattattatacttcccagcaagaggtgaagcctatttccctatgtattgaatctcagctgcccttgtgataatttgaccaatacaaggcagtgagagcaatgttgtctggcttctgagactggacctcaagaggccttgcatttctgtccccactctsttggaatgctgacctgtgagc

SEQ ID NO: 822306 - DNA, 512 bp, Homo sapiens
ttgcatttctgtccccactctcttggaatgctgacctgtgagcaccatatgaagaagccactagggaatgagaagctacatggattaaaaccccacctgtgccccccagaacaatcagccaacagtcagaaccaatcaccagacaggtgagtgggcccatcttagaccatccatcccagtcaaggaactggatgaatgtggtcacatgggtgacctcagatgagaaccacagaactgcccagctgagcccagcctaaattgttgagccacagaattgtgagctattaaaacaaccgttgtcttaagcccattatgttttgggggtagtttgtgacatagaaataggtaactgatatactcccctgatttttttttacctcttatctgaatggagttgatgtrtgtgagcgtgtgtgtgtagaagcagagtcacatttactgtaacttggttggagcaaaatccatcagattttggtcaaatcaagaaaaaaatgactatgtctgagggtact

SEQ ID NO: 822307 - DNA, 489 bp, Homo sapiens
acctggaatttgaggcacttctaactagaaccttccttcccaaatatctgtacttgaatacattttaatcctcaagcctgagtgtactagaacaaatttttttacttttttctgtaactaaaattattttctgttttgatgctttactatgctgggtaactgaaactaagtctctttccctgggaccgtgtccaattcctggaggccttggagcacgaaggtgtcacagacagagccctctgctcttggttgttagttgggtacgctgattcacagaggtgatatactctggatttcaagcatgtgtccacacacttcacttctacacccttgcttgtcctggcagcaaagtagcaccagggatgccagcaggctggggcatgtctgtgccactctcaggcagtgggaagcattctgctcacccccctmccattgtccaatacacacacacacacacacacacacacacacacacattctggggatgct

SEQ ID NO: 822308 - DNA, 605 bp, Homo sapiens
gccaaggaaaactccatgcctgcatccaagctaacctgcatgtttgtgtgtgtcttcctagtracagtgctggccattttccatgaactgcacgtcgaccctgacctgtacacactcttgtttggagagagtgtgttgaatgatgcagtggccatagtccttacatagtaagtaccagaacttggcctatgtttctttaatcatgtgaaatatgctttcacttgtatcttttctcttatgtcacagagatacgggcagtctctagcttttttcaaggaattgttatcacagaaaatctccataatgggcacaattcattaggcatctaatttctaatactattaatgggttttatgtttccagcttattacaagatactacctagagggtaacttatttttctcagtgcatatatttagctgattcacttaaggttcctaaaatgcacataaatgagcttttttcatttcaaatcaatatcatttaatttttcgccttatataagtcactttccagataatagtctaatagaaacccttgtatttatgggcagattggcagattggagccagaacctaagggtcagaatactctttatttctcaa

SEQ ID NO: 822309 - DNA, 595 bp, Homo sapiens
ggctaatacgataaaaaagagaattcaaaacaggtggaatgggggccagmtgtttctagaagcctgtgaatagtttgtttccatatcaccagagataaaggtggactgctgttctctctgctaatgagagagatctctggaatctcattttctttccacataaggatggggtggtgtgcactctgctgctgcagctgaggagatttctgagaactctgtggtttattttaaaatctctcaacatcactttgaagtaagtctactttgaagtaactcagaacctgtttctgaagagtttgatgtgtgtctgaaaggcgatttcagtagtcctctcctcccagccctggttcttccctctccccagctgccatgttggcctgaacaggttttcttacagtcagcctcactgaggatgccccaggccctggcccagaatcacactccactcaacgcagtgctgaggagaaaggcaaacattgcctatttcatttgagtcttcgctgtggtctgcttctccctgtacccccagctgctttctttcacttcctttcagcatttgcctgttgatgccatgtctgcccgatcttgagtagtg

SEQ ID NO: 822310 - DNA, 514 bp, Homo sapiens
gcagttcacctccccagtaaattgcatattgcagtaaaacgtgatctctcatagttctcatgtatttttcgtggtgtttagtgcaataccataagcctcaaataacaccatagaacccatmtagtgatgctggaagtgctcccaagaaacagaaaaaaagtcatgacattacaaggaaacgttgagttgcttgatatgtacctgattgaggtctgcagctttgtttgcccaccattttagacagacaattgaccttgaaaacagaaaacataaacttatggtgtcaatcataattaagaaaattatgaggaagagaaaatacactgcagtgttataaatgtgttttctcttcctcttaattttcttaataactttttcttttctctagcttactttaagaatacagtatataatacatatacaaaatatgtattaattgactgtacattatcagtaagacttttgatcaacagtaggttattagcagttaagtttttgggtagtcaaaagttaa

SEQ ID NO: 822311 - DNA, 622 bp, Homo sapiens
ctctatcaattgctgacacaactaacatttcaaagtgaaccatcagcagaaaagcttggggcagagagatttgtggaacactgtctaaaccatcactagaagayggctctctaacctgaaagaaggatagatcagatccagttcccagtctttcttaaaagtaaggataaacatgtcaatctttaaagtaatctaatagctacttccacatttaaaatgcagctgggcctgtgcaagcctttctgagtccactttctaattcatcaaaactttccttcttaccacaataataaagataattttccttgccctacggaaacctcacctagaaaatggcctacagcagaaaaacagtcacctatgtgaggtaaatgcactgttacaaagcactaaattatttcaaaattactgcttttaggtttctaattgttggctacgtaatttgtggagttaacgaacttcatactggagaaaagttcattatagtataaaatttccccatctcagttgaataaaattcttccccatcttcaggagattaattcagattttagacactctaggaaaaagacaatacactaagaatttctaaaaaaacaacaacaaaaagctgaagcaaggg

SEQ ID NO: 822312 - DNA, 621 bp, Homo sapiens
atctattttgcactaaatttccactattagatctgtcatgtcgaaatggtagagtgtatactataaatggattatgtattatatcatttttagtgcttctttaaatgtgacaactttgagaattacttasggacatttgtcaaaaatgcagagtctggagcccacctattcagattctgtttctggtgagatcaggaacctgacttttcaaaaaaatctagagctgattcatggaggtagtttcagcatacactgagaagcactgcctttcagtatttgaagagtgacatttgctaaattctaatatgtttcctcaccccccaaaggaacatgtattggattaactccatcttggtaagacatgtcccttgtaggtactcttctagttccacttcccttagtggaaagcttcttctctacttttctcacttaaccatgagtaaaaagataagtcttaggagaatcctttggcttggcaaaactataacataacctaattcattagatgttagccttttgagattagtactacaaaataattaaaaacatggttttttaaacttaattatttaattctgttttaattagaaaccatcccacttttatttacctagtactgct

SEQ ID NO: 822313 - DNA, 631 bp, Homo sapiens
aaccaaaacgatgcacgtgaataacagttaaattagtggatctgcttcccaaatctttttttccaggcacatccagggtatgtctttaacagtcctgatacttcaatgaaaaattgaggtgccaatgatttataggtgaaattaatgttaaatacttcaaaggagtggacaaataagtcagcagcaaaaattttatgagttcacttccttcaagggaacttagagagcgggattttattgctgtgaattctggtcaccctttctacccctcagcatctgtttgaaatatgtagtagacaattgcttttttggctgtgactcaggtggtggaaacacaggacaaacagactactgtatataagctttcctccagcactgaaaaattttattaactctcttgcatagcaaacgtggcggctgctcagtgcccaatctctgcagcattatcaaggaatttggctaattatgaatcgtgctggccaagcaagaggtgaccatgttgaaacttgtcaactcgatattttctcacawttcagaacaagcagggaaacaacaacaacaacaaaaccttatattctgtttagttcatcattcctatgtgtaaaattccaagttaaatattacatgtgag

SEQ ID NO: 822314 - DNA, 635 bp, Homo sapiens
atttaaaatagcacatgttacatggtataaaatgtcttaaatgaataataaaagccctcaggaaaattcctttgtggttccaaacagaaacactgcaagagtccattaaaatgctcagtaagtgaaaagtagcrcctcattctcttactccaagagtgtccaacagtgggattgctctgttacagctaagccttcagaccaccctgagacttcattttggcatcaacaagcatttcaccttctacatgggtccatcattatcccactccacttttcttaaaagaatctatgtgcatgttttgatggacaatgtccttaacaaatataccaagagacaacccaccacctccacccaaagtcttcacagagctatgccttctgtaaaatcaacgcataccttgagcaagaggttgaaggggaagggcaggctgcccgggctgaattgtcagaaggccttggcgctgcaaagacaggaggtgctgctgctgtaactgctgcatctgtaaaagctgctgctgaaaagccaactgctgggtagccacctgctgttgctgtaagaaatcaggaagaaaaaatgagatggccacttcccaaggaaggttaaaagtatggacacttcaaaactcaccatcatc

SEQ ID NO: 822315 - DNA, 620 bp, Homo sapiens
ccaacatcatcataatataatgatcagaacaacagctataagaagggcaggtaacattttgagctacaggtgccagattctgtgtgtgtgtgtgtgtgtgtgtgtgtgtgtrtgtattcttaaattaatcctctgaattaatctgctgggtagacatttctactttatagaagctcaaaagtgagctttagcccaggcacggtggctcacgtctgtaaccccagcactttgggaggccaaggtgggtggatcacctgaggtcaggagttcgagaccagcctgaccaacatgaagaaaccccgtctctactaaaaatacaaataaaatgagctgggcatggtggcacatgccagtaatcccagctacttgggaggctgaggcagaagtgcttgaacccgggaggcggaggttgtagtgagccgagatcgcaccactgcatgccagcctgggtgacagagcaagactccgtctcaaaacaaaacaaaacaaaacaaaacaaaacaaacaaacaaaaaaaaaactgagctttacttggacaaggtcccagagatggtaaatgatggtttttagaatttgggtctatctactccaaagagttaccaaattaagcttaattgtct

SEQ ID NO: 822316 - DNA, 702 bp, Homo sapiens
gacaacatagtcaatgtcattctttattagagaattatgaattaaataacaaagatacacacttattagaatgtccaaaatccaaayactgacaataccaattcctggcaacaaggaactctcatttgttgctgttgggaatgcaaagtagtacagccactttcaaagatggtttgtcagttgatttttttacaaagctgaacaaattcttgacactcctaggtatacattgaactaatttgcaaatttatgcccacaaaaaaaacctgcatatgaatgggtgtggcagcttatttaataattggccaaaactggaaacaacaaagatgttcttcaagagacagatgaataaacaaactgtggtccaacaacaacagaacactattcatcaaccaaaatatttacttatctaggcacacaaaaacatgaataaatcttaaatgcttaattctaagtaaaagaagccagtccgaaaagactacatagtatatgatgcaatttatttgacgttctggaaagacaagactataacgacagtaaaaatacctgttgtggccagggatcaggggtggggaaaaggtatgactaggataagcagaaggaatttattagacaggtgaaactattctctaggctactgtaatgattgattttgtcatgtcatggttgatgacatgctgtcaaaaaatggaatatattatg

SEQ ID NO: 822317 - DNA, 593 bp, Homo sapiens
acaagaatagtctgagaaactatcacagcttagactaaagtagcatggtatcctagatgggatcctcaaacaatgacaggaatgtgcaggtgaatattgatttatgaattatgaagaatgtatcatattattgcatgatgttaataataggagaaactggacatgatgtataggaaaaccctcttaactgtcttcgcaacttttctgtaaatttaaaattactctaaaatgtttactaaaaaaaaaaaaacacttaaaggaatggggaaaaaagccaaaaatggggagaaaatacttgtaaaccccgtgtcggataaaggattcatatactgaatgaataaacaccttataacatgcaaccacataaaaatgaagagtccaataaaatagtaaatgatttcaagacttcaccaatgaagatacacagatcacaaaaaagcatatgaaaagatgattaccataattattcaataaaaatacaaatrtaaacagcagtaacattcttctacccacctgttacaattgatacaatgcaacaacctgaaaataccaaattgtacaaaagatgtggcattctctttcattgctggtag

SEQ ID NO: 822318 - DNA, 635 bp, Homo sapiens
tgttgacaccaaacatgctagcttttggcatcagcctaccttctcctgcatttgtctacatctacattcctaatcactctaaaattatgaaatcagcaatgttaggagttaaaaaatacattttaaatggacagtttaagaagaaaagaaaggaaagaggtaacatattaaatctggttttgttcgccgttttttttttttttttaatatatccatgtcaggaagtatatagagcatttaatactaaaaggaaaacaaacaaacaaacaaaaaatgttctaaaatattcaggcagtgcttggggtgtaggaggtaaggcttatacattttatagaactaagtaagcgtcggcattttggttgatattgaaagtatcaccaagtttcctataaaatttcaagtccaatagatttgtttcacgtaaagaatttgaggttttaggtgccaaagttagatttctttgtgaatttaagatttctaatcatctttctttgcacaatgtttagcwttaattacctgcacacagcaatataccaactacacacagcaataattttatacttctgttgacaagagcttaactacactcagagcaccacaaaatccagcatctctaatcccaatggctctggaaa

SEQ ID NO: 822319 - DNA, 525 bp, Homo sapiens
cagtgatcagactttttggctcataagtgctctaaacaattttaaactatatgttccccattctttaatatctcaaataatttttcttattatctaataaaagatagaaaatgttcaatatttcataagattacataaaaacgactgtagttataacaaatattctacagcatgatttaataaaaataggtttttatgcactactgaataaagcacagtaagtttgaaaaaaaaactatgtaaaatttttatccatagattttgtccaacatatctcaaaaatttgtaagcccctgaagcattttatttaaattttaaaaaatgagttatcagacactctactgctgtggctgttatgaatttgaaaaatccccatagagaccaaaatacttctctctcttagctcaggaccaaacaatattatcagtccatgtggaaattacaaattcagactggagtgtagcrgccccattatggctcactgcagcctcgacctcctagactctggtgatcctcccacctcag

SEQ ID NO: 822320 - DNA, 614 bp, Homo sapiens
cggagaaatatacatgcctagcagaacacttggggcatggcatgaaatcaggctattcctacttgggtattgaagagaaggctgaaatctgaagaytgtgaggttgcttcagctcattttagaaaaacaaacgtgcacgcaaaaaagaaatcacacacacacacttacacacacaaatacccacaatcctatcttacctgtcgagatacactttgtttataccttgttgtattagtccgttttcacgctgctataaagaactgcccaagaagaggcagttataaaggaaagaggttgaattgactcacagttctgcagggctagggaggcctcagaaaacttactatcatagcagaaggtgaagcaaggaaggaaaagtgcaaagcgccaggaaggagaagtgcaaagtgaagaggggcaaaccctttacaaaaccatcagatctcatgagaaatcactctcatgagaacagcacggggaaatcgcctccataatctaatcacctcccaagaggcccctcccccaacacgtggggattataattcggattacaattcaagatgagattttgggtggggacatggccaaaccatatcacttgttttatttttatt

SEQ ID NO: 822321 - DNA, 560 bp, Homo sapiens
cattgcagcacagtggtgctttgtgatcaactggcataggtgtrttgggtggacaatatcaagcagatgggaaattcagagaaaaatgtaggaaagacatctattttaactgggagaaaaataaaagagaagcaaattaatatatacagaaagggttatgtagctcttatagagaagtaaaaagaaagcaatcaaaactatggactgcattgcattgctctaaggattttaaagtgcagaattaaagttttggaaaactgcacagagtccattcccaggtgctcttgcaatgagagcactcctcatggtaatagcattacaagtctggagatgacttggggaagaatttgtgccatgaaaataaagagacaatgaaatttaaaattatatataaaaagtactgcattaaaatgtcaggtcagtgcaggtaataaagccgtagttgcttatccatatgacatcacctgttccactaattgatatttcttcctagaagcaaatctcaggagccaaaggtgcacaggtgccccatgtcactgggcctcgaataggaggaatta

SEQ ID NO: 822322 - DNA, 601 bp, Homo sapiens
ccaaggatgaactcttaatctgggtttatcttaagttggatttacatgatattttctgatgattatattgagtttgtgtattgttgataacaatatcacagaggtgataytgtgttctgtatgcatcatatcaaagagtacctgatattgctatttcaaggttaattggagatcttaaccttgattgcatggctagggtgatacaggctagatttcatccctgtaatgctaatgttattcagtttgtagtggatatttatcttggggtggtatgtcaaaactatgcctgtatcctgtttctcttcagactgtgggctactgattttatcattgattagtatattttgcctgcaatagttactgtggcttatgtccaatggtgattttgaattttcgtcagttcttctatatgtattgattagaatatttttataaggaagagttaattattctgcatttacatatttattcagcttttaatttatgttagactcatgggtattttattctatgggcataatccagcagtagtattcattttgccgctcaaatgatcttggctttggccactgtgcactccctcaggttggctcttctgtcc

SEQ ID NO: 822323 - DNA, 617 bp, Homo sapiens
tctaatttaaccctttatcttgaaaattagtgaacaatcctataatgactcatttggaaktcactgcttagcatacttactgaaaaacaaagaaaatatgtagttggaaagctaaattgagtaactccttgtttttagcagattataaatttcttaaaggcaggtacagggctaaatctatctttgcatctcacaatttttagcagacttttttacacctagtaggagctgggtaaataatagtttatcaacttcactggcataacaaggcctaattacacacatgatcacatacacatggattacctgtacaattgaaactggaccctccaggagagcgagtgctttactttgaccaatttaaatacaaatctcagccttgtaaaacatcaaatacagaatataatttaatattctctcattgattcattgtcatagtatgaaaatcagttattgagctatatcgtgagaatggtgaatttgtgctgttaaaacttcacctcctccaggcatatccacaaggagaaatggcaaacaatgggacaaaaagaggaaaagagataaagtgactctgtcagtctttaccagtaaaagtcatggaatactgctcagcacat

SEQ ID NO: 822324 - DNA, 602 bp, Homo sapiens
agtgggtagaggtgagggatgctgctcgatcgtgagccccgtaatcaagaattatcaacccaaaatgtgacgattgccaagtctgagaagccctgctctgcagacaatatgtctcasagttctggtgctgatcagacagcacgtttctggggctcaatataggcgagccagagataatgcccacagaaaagggaattgtaattaggagaggacgatctttggcagtatgcatttgtgagcagacactcctgaaaggacagggctgagggtaccttatggttctgtttctcccttaggatggcagcatctgataaccagatacaaaacctgagaggaaatttttaagctgtgactagtctgattcccagctggccagctgagccaccctacttctgtgttttctggtgcaaagaacaaggttctaccgagtgaccttagacttggcttctggataaaattgtcagagagctcctagcattttgcctgagccatcacagggaacctgggtttggaatctcaaccactcatggcaaagttattttcattccccttgctctcacctgcccccatgggaatcttccataggagaaatgttctaattg

SEQ ID NO: 822325 - DNA, 602 bp, Homo sapiens
agtgggtagaggtgagggatgctgctcgatcgtgagccccgtaatcaagaattatcaacccaaaatgtgacgattgccaagtctgagaagccctgctctgcagacaatatgtctcacagtyctggtgctgatcagacagcacgtttctggggctcaatataggcgagccagagataatgcccacagaaaagggaattgtaattaggagaggacgatctttggcagtatgcatttgtgagcagacactcctgaaaggacagggctgagggtaccttatggttctgtttctcccttaggatggcagcatctgataaccagatacaaaacctgagaggaaatttttaagctgtgactagtctgattcccagctggccagctgagccaccctacttctgtgttttctggtgcaaagaacaaggttctaccgagtgaccttagacttggcttctggataaaattgtcagagagctcctagcattttgcctgagccatcacagggaacctgggtttggaatctcaaccactcatggcaaagttattttcattccccttgctctcacctgcccccatgggaatcttccataggagaaatgttctaattg

SEQ ID NO: 822326 - DNA, 539 bp, Homo sapiens
agaaatgggaggaaaagaaaaacaaggaattttttaaaagtcaactttatccattttaagatgatgtagtcttaccaccaaagtagaaagcatccgcacttctgaatatcatcagatcagcaggcatgagaaacaaagctgaggctttgaggtccccagtgacagccctggccaaaggaaggggtgagggcccctgctctaacatgcagcagagaaaaacaccataactcaccacgtttttagcccaggcaggggcttcggggtgcaaaggaaaagacaaactcttctcaccagggagcttcatagaaacaggccaagggcagttagatgttccaaggtccaaaaggcaagttcaagaatgtttctgttaagtgctgaaaaggaggctcggcctagcatgagactctgggccagctgctttgaggtgtctatagctggaggaagcttcctaccagaaaaggccagaggccmcttgcatagaaaaatatttatttcttatctgcagaaacaaaagaagaaatttaagccccggtctgaga

SEQ ID NO: 822327 - DNA, 297 bp, Homo sapiens
tacagaacaataaaaggccttgatacactgatccgggcatacgaggttatcaggaaatcctcaagtcagtgtctctccccatgggaccaatcctgtacctctttttccttcacctccattttgacttgaaatgcagtagacaacagagccagttcagtgccttgccatgctcccagcacttagcactgttcgataaatacatgagggataaacaaatkgtaaggaaactcccatcccatgagaggagaaggattctaaagtgcatgaccacacggacacacaggtaacatccatctc

SEQ ID NO: 822328 - DNA, 297 bp, Homo sapiens
tacagaacaataaaaggccttgatacactgatccgggcatacgaggttatcaggaaatcctcaagtcagtgtctctccccatgggaccaatcctgtacctctttttccttcacctccattttgacttgaaatgcagtagacaacagagccagttcagtgccttgccatgctcccagcacttagcactgttcgataaatacatgagggataaacaaattgtaaggaaactsccatcccatgagaggagaaggattctaaagtgcatgaccacacggacacacaggtaacatccatctc

SEQ ID NO: 822329 - DNA, 577 bp, Homo sapiens
cagcaatgctacaatataaaggagacccagtgtccattagcagtcattcctcattccttcctcaccccagcccttggcatccactaatcttttatctctatggatttatttayactggatattacatatcaatcaaattatacaataggtgtgtcattttgtgtcttttttcactatcataatgctttcaaggtcaattcaagttgtagcatgtatcactacttcatttctttttatgtctgaataatattccattgtatggataacacagactttgttgttttagaattggaatctatttttgtaaatggtgtgaggtagggctttaatttggtaaagtgatagacattaaagggatattttatttttattgtagacatcaatgcccaagaggaaatcaaaatgaattagtattctccaaatgcatttatattccatcacccacattaaccagagacctaaacactttcaacacatcctgtagtgacagttggcagagataaagcaagatattacttaaacaatgaattaccagcctttactttagccatctaagaaatcacaccgattcatgggc

SEQ ID NO: 822330 - DNA, 624 bp, Homo sapiens
atgtagagcttgagttacagctgtgaataatgttttgggtcactattttagtaatgtatattatttatggatcagttggtatgcacaggcactacgctaagtgcttttcatgcttcaygtcatttaatcttctcaatagcatgaggtgggtatgattactgttcccagtttttagatgaggaaaccatacccttgagtggcaaataacttgcccaaggtcatccaactaagtttgagaagtggggtatgggcacagctcttcctgactccaacacccctgctttaagccaatactgttctgtctccccaagtcttcttcatactgccatttgcctcttctggaattgaagccaccactgacttcagacatggaccttgtaataatgatgcagtggtggcaatgacagtgatagcaaacacatgtgccaggctctctgctacgtgctttacatatatgtagtccactaataatcctaggacacaggtcctattatgatttccattttgcatgtgagaaaactgaggcacagagaagcctcacagccagaaagcagcagaggcagatgggagcccgggctgttagtgagctttgccattgcagtcgagatggctcagtggtacaat

SEQ ID NO: 822331 - DNA, 629 bp, Homo sapiens
ctaaaacaaaaggtaagagaggcctgccagagggaggaatggtatgggtaaagacactgcagagagattacaggatacattaagaaaacatgaagtaccacgctttgtgtatggcatgggsttcaggaacgagattcctgctgctacgataactgatagctacacattgctggcattacctatttattaagtgctttatttgtattacttcgtgtagtttttactgctcctgtttgtctccttctgtgttaaataatttgcccagtttctaatggctagtatggggtagagttaagaatttgggatccgtctgaccccaaaacctctattggaagatttgagaggtgtaaggaaatgtcaagactggcaaagactctaaagatttgggacaaaattgagggcaggtgtttatttctggctgggtaatgcactttacaattaagtcagtgagaaatgatcgcttgtgcaggttttggagaaaaaaagcataggaagttatcagagttctgttttgagcaactaaaaatttatgtaatatttcaaaacatacctgatattgaggcatatgtggtagttgtaaaatctgtcaaggacagctataaaggcaaatcctttttataaatccacct

SEQ ID NO: 822332 - DNA, 599 bp, Homo sapiens
ctattcaagcttgtgaatgcatcatgaagttctcgtgctgtggttttgagctccatcaggtcacttaatgtcttctctacactgcttattctagttacccattcatctaacctttttcaagatttttagcttcattgcggtgggttagaacatgctcctttagctcagagaagtttgttattaccgaccttctgaagactacttctgtcaactcgtcaaactgattctctgtccagttttgatcccttgctggtgaggatgtgtgatcttttggaggagaagaggtgctctggtttttggaattttcagcttttctgctctggtttctcccatctttgtggttttatctacctttggtctttgatgttggtgacctacagatggggttttggtgtggatgtctgttttgttgatgtttatggtattcgtatctgtttgttagttttccttctaacagtcaggccyctcagctgcaggtctgttgtagtttgctggaggtcccctccagaccctgtttgcctgggtttcaacagcggaggctgctattttcttagtgaagtaaaaatcatcatcatcatagtgtgacaatagagggaaga

SEQ ID NO: 822333 - DNA, 604 bp, Homo sapiens
acatactttcagatggactttcagatggacttttcaagaggaagcataattctgcgtttttaaatacaatttcctaaccaataaatatgggtagttgagtgtgaattaataataataataagcgcttgcaccaaatatgatatatagtcatcattttgtggctgcagtattacaccactcatcctatggccaactggcctatctgttgctgcctatttctactttaaatacatcagtatctccttactttttgttatcttctgtgttttaccttttcatttttctggtgtttgcccctcttctttgtatggttactagttaaatgtttacataatggcttacttaaccaaaagcttctcctttattggtagctatttacattttacaaattgtatttgttgagccaggcaaagtgatcagttttactgtttatgtttattcttttgtcctaaagctaacaaacaaagacaacaaaaccmcgagccctttgatgagctaagagtccctgatgagctgaataaataaatatattcttgaataagaagagaaattatcaaaatggcttaaagcttactgattgctattaagaggtgcactactgtgt

SEQ ID NO: 822334 - DNA, 604 bp, Homo sapiens
acatactttcagatggactttcagatggacttttcaagaggaagcataattctgcgtttttaaatacaatttcctaaccaataaatatgggtagttgagtgtgaattaataataataataagcgcttgcaccaaatatgatatatagtcatcattttgtggctgcagtattacaccactcatcctatggccaactggcctatctgttgctgcctatttctactttaaatacatcagtatctccttactttttgttatcttctgtgttttaccttttcatttttctggtgtttgcccctcttctttgtatggttactagttaaatgtttacataatggcttacttaaccaaaagcttctcctttattggtagctatttacattttacaaattgtatttgttgagccaggcaaagtgatcagttttactgtttatgtttattcttttgtcctaaagctaacaaacaaagacaacaaaaccacgagccctttgatgagctaagagtccctgatgagctgaataaataaatatattyttgaataagaagagaaattatcaaaatggcttaaagcttactgattgctattaagaggtgcactactgtgt

SEQ ID NO: 822335 - DNA, 577 bp, Homo sapiens
aatgctattcttgaaaggaggtcatcaatcaggataaatcaggcaatgtagacaacctttagaagctggaaaatgcaacatcctaaagccttctgagggaacacggctcagctgataccttgactttagtctataatacctgttttggactcctgacattcctgaactatgaaataatatatttatgttgttttaagtcaataagtttgggtaatttgttatagcagcaatagaaaactacatacttagtttaaagtactcgcttagtctaataaaaccatattcaactatagtcactaataagactcctggatgtaaaaaactaatttaatgattgtcatttgctacagaaatacaagtaggcacttaatttatgtatgactaacaggtaagctcatagaaaacacctggatcccttctttactaaaggtctgtatttactttggctatgtaatgaggctttgatttgcttctctcttcccaaaatctgactaattgctgcyctccttaagaaattggaggagccagtattgctcttcttgtgtcacgttctaaggtcaaacagcctttgatcata

SEQ ID NO: 822336 - DNA, 544 bp, Homo sapiens
ttcttttcaaggctgcccttgatgtccatttatttttaaatatgtaattaaatggctatgcagaggaaaagtacctgatattatttgccatcaactctaagccctttggtttatgatctgcttgcttttaaacattttaaaattgcatttccttgctatctacaaattgcatgcctctataatagatactgcaaagcatacagccatgaataagataaggttcctgggcttcaggagctaacaacactagaaatgggagagaagatgtattcacagctgccatagactgctgttgtggtgagtagcttgagtgatacgaaagaagcactttaggaattgaggcagaaggaagcatatcttgcaggtgccagcaaggctgacttgatggacaagctgacatttttcttagacttaaacccatccaagtgggataatttgttttcattgcaataaaaatatttaattatatgaagtgcacmcaagtgtttaataatagaaatatatttatttctataatatttgttcaagaaatgcaaaaataaaa

SEQ ID NO: 822337 - DNA, 639 bp, Homo sapiens
aatatatgtaggtataagtctattttatcatgtactactatgacatgggtataaatctattataaaatgttaaaatttgtcaaaactcacataaacatttacttaccatgcatcgcaccacccgcagtcaagagaaatgtaaacaagtaaagaagcagtattaaatcataaccgcgtaaagttaactgtagtacatactgcactactgtaatcattttgcagacctctcgtgttacggtgtagtgaggagtagagcaaatatccgctgaaaacacccagtgacatgggtctgcatgcgagtggttcctctctccagcaaatcgcatgttgcagtaacaagtgatccttcggggtggttctcctgtatttcccgtgtgatatagtcaacgttgaataacaccaagggacccatatgaagtgccactagtgatgtcagtagtgcttccaaggagcagagaaaagtcaagactttagaagaaaaagtcgaattgcttggtaagattgaggtctgcggctatggttgcccmccatttcagactgatgattcggtttgtaaacagatatacgtatctataatacagtacctactataaaactatttccccttccttataatttcattaataacatttcttttct

SEQ ID NO: 822338 - DNA, 432 bp, Homo sapiens
tctctatgaaaagtacaaaaatcagctgggtgtggtggcacgcacccatagtcccagctactcaggaggctgaagtaggaggatcgcttgaacctgggaggtggtggttgcagtgagctgagattgtgccactgcattctagaataggcaagagagtgggaccctgtctcaaaacatcttaaaaaataaaagaaggagaagctttagagacaggtgctccaaacttcctacgtaaaatacaaaacaatacagcttactactaaaaacctacaaagtcttcacctaacacattaatttgtaactcagagagcaaatgatttctagatgcagagttaggggcagagattaggttttatcaacyttctactttaaattcttggacagtgccaggcacgtgcaagttctaaataagagtttcaaagaaaaacattg

SEQ ID NO: 822339 - DNA, 504 bp, Homo sapiens
cagagccagggagtgccttcctccacagcttaacatgatgggcctacctgtaacccagatagcacttctgctaccccagcgaaacaggggctcaaactggraatgaacaggagtaaaagcaaataaagaaagctgcattttcctacccatgtgagtttgtgttcggattgagtcgtgccccatgcatatttgaaggaacataagcattggagcaggcttcttaagtttgttttcgtctccaattcttctgacagctggggaggctggtccctgcttagagcagctctccctccctccccccatctccacttcacagcactaataatgatcatcatgacacaccaaatttacataatacacttctcagaagacactccatgaggctctgtagaaactcatctccatgattattaaaatgtctccgccaggtgggcctgaaacaggggcaactgaatccttgtggcggagttgggaatcggggtacaggaaggtgcagtgctttct

SEQ ID NO: 822340 - DNA, 628 bp, Homo sapiens
gatacctgcctacccttgatgaacacrcaagatgaggaagaggtaaatttgtgctgttttaaggcattaagagttggggagtttttgttattgcaacacaacctagcccccgctgaccagtgcaggtacagttaatcatgatgatctaatgacaaaaatctagcatggtcagagtgctggtaagaggagcaccatgtgggaaatgagatataaaaggttatttggggctacctttgactaccaagaataaagcagatagtgaatctgtgtttcaggagaccccagtgtgttagcaatggtttggtacaacaaagatgatcctgtaaggtctgataccctgcttgccctgtgcttatatcccttgattaaggcttgaaggagaggaacctgttgagctcatggataaagtaccttgaattcccaggaatctgtttctttggcttctcctcactcacaaaggttcctagtacctttattctgaaggattgtggcagaggaaatattgtccctccaaggtgatacaatgttatgacttacgagcagcaggcagggaatcctcaagccatataatacttaagcccctagcctagcctggtgccaggtaactcatcttacatgaagacacaca

SEQ ID NO: 822341 - DNA, 628 bp, Homo sapiens
gatacctgcctacccttgatgaacacgcaagatgaggaagaggtaaatttgtgctgttttaaggcattaagagttggggagtttttgttattgcaacacaacctagcccccgctgaccagtrcaggtacagttaatcatgatgatctaatgacaaaaatctagcatggtcagagtgctggtaagaggagcaccatgtgggaaatgagatataaaaggttatttggggctacctttgactaccaagaataaagcagatagtgaatctgtgtttcaggagaccccagtgtgttagcaatggtttggtacaacaaagatgatcctgtaaggtctgataccctgcttgccctgtgcttatatcccttgattaaggcttgaaggagaggaacctgttgagctcatggataaagtaccttgaattcccaggaatctgtttctttggcttctcctcactcacaaaggttcctagtacctttattctgaaggattgtggcagaggaaatattgtccctccaaggtgatacaatgttatgacttacgagcagcaggcagggaatcctcaagccatataatacttaagcccctagcctagcctggtgccaggtaactcatcttacatgaagacacaca

SEQ ID NO: 822342 - DNA, 628 bp, Homo sapiens
gatacctgcctacccttgatgaacacgcaagatgaggaagaggtaaatttgtgctgttttaaggcattaagagttggggagtttttgttattgcaacacaacctagcccccgctgaccagtgcaggtacagttaatcatgatgatctaatgacaaaaatctagcatggtcagagtgctggtaagaggagcaccatgtgggaaatgagatataaaaggttatttggggctacctttgactaccaagaataaagcagatagtgaatctgtgtttcaggagaccccagtgtgttagcaatggtttggtacaacaaagatgatcctgtaaggtctgataccctgcttgccctgtgcttatatcccttgattaaggcttgaaggagaggaacctgttgagctcatggataaagtaccttgaattcccaggaatctgtttctttggcttctcctcactcacaaaggttcctagtacctttattctgaaggattgtggcagaggaaatattgtccctccaaggtgatacaatgttatgacttacgagcagcagkcagggaatcctcaagccatataatacttaagcccctagcctagcctggtgccaggtaactcatcttacatgaagacacaca

SEQ ID NO: 822343 - DNA, 587 bp, Homo sapiens
ctgaggagcttagggagtagaggaacgggaatgtgagctgggcatgatgatgcaggtgacaggtgcagtgacagtgacttcagttcactctcactggtgaatatgatcactccatgaayttcctggttcatcccttaccaatgggaaatgaacactatccgtgaagtccccaaatgtagatcaaattctgatgacttttctttgtgcatgttagtgaaggcttacatcttagtccaaacggaatgctgatgccaactcccatcaaaaattacaaatcttggctcttctttagcttgggaggcatagagaatagtggttaccagcagaacctccaagtcctgtgttgtatgatcttgagaaaattacttaccttctcggtgcctcggtatcttcaatggaaaaatgaggctaataatcacatgtacctcataaagctctgtgaggatttaagagttaatgcagaaaaagaatttggcagagcatctagcacaccgtcactgctttataaatgacagccacactgtattagcatttcgacacaagatggaagccaatccagaagtgtgctccatacccaggttataacc

SEQ ID NO: 822344 - DNA, 682 bp, Homo sapiens
gactgagagagcagagagggctccttggtgcccttgaatgtggcttccagcactgaggcctcacacacacacacacacacacacacacacacacacwctcccttgtgttcctcaccttctctttcagcagctcaggatgaggaggcagggggaacccagagctgggaccagcaaccctaagggagatggaagcaggccccgaaaacctctttttccaagaagagctaaattagatgtattttttccactttcaaatcctgcaaatttttcatctcaactcccccaggcttataaagtggctcatctcagctgctcaagctgacaaaggtgcagaaactgttgaaaggttcaaaatgtcccctgggtttccaggcatgaaggaatttacatgtaggttttctttactaaagaaaaaagtccccacttggagagggcggaggaatgaagaagcagccaggaaggagaggacagcaagcgtctgacaagaggagagcctaaggcagtgctggtgggatcaccagccataacttgcagagagacaccaaatgggaagacaggcacatcgagagctgttctgttcttctgttagagttgtaaaggccctgccaatgtccagagttagaatggtcataggtgatctgagagccttctggaaaacctacacagattcccagttaaagtc

SEQ ID NO: 822345 - DNA, 484 bp, Homo sapiens
taaaattaaaattaacatttgaatagcttatggcaggcagtcacctatgaaatgatcattttatctcatatgcatatttaagaaagtgtgtgaaggatcatatagagtacagccaattttcactcttgcatttatcataaatatagtacataatttcccccttatggcaccagttatgtgctgtatttatacaggctaaaatatttctgctgatgttaaaatattagattataaacaatttccttccaaaattgtgacatgagctcatcaaattacagtcatatcatttggatgatttgatttaattagtgcttataattgatcaaaggaaagtcatctagattatatttatcatatgacaaaaacagtgcttgwgcaaaatcagtgtttacatgtatatcaattgttgtgttcatttggataaattttccataatttctaaatgtttagcttagtattgctttttatttatgaaatactgtat

SEQ ID NO: 822346 - DNA, 485 bp, Homo sapiens
atctgtgagggaaagtggggtgagaattctttgacaaagtcctttctcatgacacaaacatagacaagatccacactgttttcattacacttcagaagacagattcatagttcacccttgcmgcacactagcacccacatacgcagggctacattttcattctgcaactccacctgccgagtgacatctgggcagtgtgacattcagggcagagatatcccttatagcagttttgcctgtctgaaatttccctcctttcattaaggagaacagcaggttggaccttcgctgtaaccaccgaaaatctggcatgcctgcctctccaaatgtcacctatctatctacttgtgcttctctgctcctgacaagatgaaaagcctggagagatggctcagccctatcggactgcatttaggtggtaaatcagagctacattaattttagggtaaacattcaaaaaagtagttgagatcagcaaatgtacc

SEQ ID NO: 822347 - DNA, 553 bp, Homo sapiens
ccacttaatactttgtaagtatttaatacgattgctgtctaacatagcagtttgcacctaggctttggtccaagctgcttcttggaaatcatatttttcagtagctaccaggctgaggtgtagtcagtaactgaggtatagtcaggtttcagcaaggtctatttggtattgtacccactagactatataaaccaaaatttctgctacaataaagagttaaatagtactccataagacgtgttgcacgaggcatatggagatttcaagtgtgcatcgcagtgtgagcattaacttaaatgtgtcattttatagttctctagtgcagaactatttggtgtacgattgtatgtaacatgcaaatcccatcagttcacactactattatttgtaggattattttaacaaaataatagttccatttcctgtttggtataaaactaaggctttatttttaaaagtggaggaagatgttaatacamatttctctgtggtttattttccaaaattgatactttctcatatgtagcatgttgttgttgttgttgtttccaaa

SEQ ID NO: 822348 - DNA, 565 bp, Homo sapiens
acttcagtcttgtgtccacctgcctgcttgacagtgtcttgaatgtctaagagtaactcaacattaccaaaatggaattcatggttttcgccatacaagtctttatttcckcaatcttccctgtctttgtacatggtatcatcttctatgaatcgctcaaggaattattattactcctccatttctgtcacccatgaacacactcacaccatcctgaccattcgtaagctccaatgactgtgaaacttattcagaatccacccgattttcctcacttccgcccctgtcattttgtctgagtcaccaacatctctcagagtacacagcagccaactcaacaatcttactcttactcctgtccacactacagtcaattcttcctgcagcagacagaggaacctcttcaaaattataaaaataaatgttaacatctttttacataaaattctccgaaggacccccccacccactccaccacccccatcacatttagaaaaaagtgaaaatccttatcctggcctacaaggttcaagagatatgacctctcatctcgtagtatctaccc

SEQ ID NO: 822349 - DNA, 628 bp, Homo sapiens
tgcatcaaaaatgaagaaaaattatttgaaggcaggaaatgcttgtttagttttgagcctatcacaagtattgataagcatagcccataattttcaaaagaataatcaaatcgtgagtttgcaaatgtgattaagaacactgacctcttgtgttgtggtttgctatggacggattcacaacgtatgttgatttatcaccttataaattataaaaataagtactaggagttgaattaataacttatcttgaattacatcaagtgtttttaaatacagttctcatttttaagaaagcaattacaacttttaacatggggtatttgcaaattgcttttctgctaaggcacggtccatattccaaatgttcataattcacaagaacatgtaacttaatgttgaccttaatattctaccaaagaacttattttgagccaatatcctttaattttctgggaagtattaaaactactatacaaaacaatgacaattatgtaaacagccttcacagagatcagcrtgtataattaaaatatgaaaaagatgaaactcatatattcccttaaagtatctgaaactaatttgaaaatccatttgaaagctaaatttaaagaacaacttaaaaattaac

SEQ ID NO: 822350 - DNA, 598 bp, Homo sapiens
gcaacctggatgttttacattctgagatgctattaaaccaatattcatcacaaatgtattgataattttttagaagaacagaagagatcccatcatattaaatgaagtgtatyaattataagatgcatgctaactccagaaaaagcaaagcatgaaaaaaatctgtcttagaatggaaaaatacagtagttaaactatttttaactggaatttaaatgcaacattttaggatatgaagctgtcaactcattttgaaaactgctggctcagatgacctcagcgataggaaacctctaaaagatcatgaatctaatcaggtaattttctgtgcctttgcctgagagtctagctgaaagtggtgcagtttttacagaagaggaataacgtgtcccgaactgggaacccttcaccggccaccactccaggcggcgcttcactgtggagttttggtcgccagagggctccaggggactgctggggaaggccaggacatggaagagggcctagagccagggttacccgggagggggtggacccattttgccaagcacctgaggaccataccgtacaggatcctctcaaaaccacccgcacacta

SEQ ID NO: 822351 - DNA, 655 bp, Homo sapiens
ctttcacaactgcagactatgggaggaattttgttttttaaggacaaaagatgtctttgacttcaggcacttgagagagtcaggtcttgagtgtggacatttaaaggtgcctggtcaggtcaagaagtgaaaattggagcatctagtctaggcgcggtgactcatgcctgtaatcccagcactttgggaggctgaggtgggcggatcacaaggtcgggagttcaagaccagcctggccaacatagtgaaaccccgactctagtaaaaatacaaaaattagcccagcatggtggcgtgcgcctgtagttccagctactcaggaggctgaggcaggagaatcgcgtgaacccaggaggcggaggttgtggtgagccaagatcgtgccactgcactccagcctgggcgacagagtgagactccatctgaaaaaaaaggaagaaagaaagaaagaaaattggggcctctaataaagtgcaggggcaggctgggtgcggtggctcacgccataatcccagcactttgagaggccygggtgggagaatcacttgagcacaagagtttgagatgagcctgggcaagaaagtgagaccccatctctacaaaaaaataaaaagaatttaaaaataaataattagctggatgtggtttgctcaca

SEQ ID NO: 822352 - DNA, 599 bp, Homo sapiens
ggtatctttattgatgggttgtcgataaacctcctgctttatcctgtatccaattaaaatgatccctcgtcagtttttcctctgattcaaacattttaccccacattgtttctgcaattagacagaaaartaagcatctgtgaagtcaacctttttgctttttttactctgaagtgctgcttttttttttcagtaagttgtggttttaaaaaaatccagttatttgaatgacatttattatttttgcagttaataaatgtattttaagtttttaaatccacagtgtagataaggccctagaagcaagtgtagacttcgtccacagctgtactccatcggccactgacagtcttattgcattatttcaacggcacaagcaatcatttacacttgttattacccaggggcatttcaaactgttactgaaatgcatccatccctggagtaaccatctgtgaatggtaatgccataaggtagagagactaaatctaattgatatgcaaaaaggagaatttcagctgtccagctatggagattcaaattgaacctttaataggctgaggatttcagctaaatttttaaaatcatgatatctagt

SEQ ID NO: 822353 - DNA, 599 bp, Homo sapiens
ggtatctttattgatgggttgtcgataaacctcctgctttatcctgtatccaattaaaatgatccctcgtcagtttttcctctgattcaaacattttaccccacattgtttctgcaattagacagaaaaataagcatctgtgaagtcaacctttttgctttttttactctgaagtgctgcttttttttttcagtaagttgtggttttaaaaaaatccagttatttgaatgacatttattatttttgcagttaataaatgtattttaagtttttaaatccacagtgtagataaggccctagaagcaagtgtagacttcgtccacagctgtactccatcggccactgacagtcttattgcattatttcaacggcacaagcaatcatttacacttgttattacccaggggcatttcaaactgttactgaaatgcatccatccctggagtaaccatctgtgaatggtaatgccataaggtagagagactaaatctaattgatatgcaaaaaggagaatttcagctgtccagctatggagattcaaattsaacctttaataggctgaggatttcagctaaatttttaaaatcatgatatctagt

SEQ ID NO: 822354 - DNA, 599 bp, Homo sapiens
aaacatatagggaaggatctgtcatggtctaagttacttgtagctgctacyatggtataagtgtaaatttgtgagattctctgttgataatggtaagtcattcttgcaaagtgtacactcatgtctgtcgctatctataatacatatacacatatatattgcacttgtactaatcatatgagtggtattctaagaaataataagtttaggatcctaaataagtacttaaattggcaatttcggcacattattttgtatcttgctgtttgttgctttgctaggagatcagaactttatgttattcaaagacggaatggtcactgatattttcctgtatttgaatttttgctataggttataattgttagtaaatacaattaaatcccactaaaatagtaagaaatactactactataaatagtactaacatactaggtactattgttctatttataaataccgcaaaatgcagaaaaattcaagatttcaggagttcctaagaattcatgggaattcccattttgttcttaaatcctgaaaattaatatctgttggatgtttggaaacagcaaattcaactaggtacttgatcttagatg

SEQ ID NO: 822355 - DNA, 346 bp, Homo sapiens
aatttggagctaactcatccaatcagttgaaaggccaraagggcaaaacaactttctctgaggaataataaattctacctatgggatgaaacttcagcttctgccccagaatttccagcttgccagccttccctacagatttcaaactagctaatctctacaattccataagccaattccttgaaataaacatatttatcatatctatctttctgcctagatctattctaattccaggagacccaaaatgttattgtgttctaccagtcagagtagtggcttatggaggtcaagttaggggcttatggagtcagagtaggagattatgggggtcaggttatcaatg

SEQ ID NO: 822356 - DNA, 623 bp, Homo sapiens
gtattagtcattttaatacaacctgctgccatcaaaagatctttattgattttaattttccttgcaagttctgaaaacttctgttttatctctactaatgttttaatatcccttactagcttttcttttgcaacacttgtgtccagtacttgatttgaagttggattgcaagaatccattattttctcttcattagtttgagcaagagtctgaacaccatccacagaagatctaatgggactgttaaaaggctgtttgctgttggtatttactttcaagttagtgaaatttccaattgtgctgacattttcattagggttttgccactgctgttgaaagctggtccttatttcagatgacagcatttctcgactctgaggaacttccatagacaagtgtttagtaatatgctgagtactttgcaaaggctggcttccatatctacagttgtaaggaggaggaggaggtcttttgtcagtttgcgtggcatactgctgtgatggtacagctgaggtctgccttgatggtaaagttaatacagaatttrgaagctgactatttttaacttgcaatgatgtatgtggtataaagttttgtttttgaatggtagaatctggtaaaaa

SEQ ID NO: 822357 - DNA, 643 bp, Homo sapiens
aaacccgtaagacccattggatacagagtaaactctaatgttagtgatggactttaataataacatatcagtatgactaatccaagttgctaatagtggaaccttagagttttggagatgggaggttcctataaagctcttatatgggaatgctctgtactataagctcagttttctttttctttttttttcagatggagtctcgctctgtcgcccaggctggagtgcagtggcacgatctgcaacctccacctcccgggttcaagcaattctcctgcctcagcctcccgagtagctgggactacaggcgcgcgccaccatgcctgactcattttttatatttttgctagagatggggtttcaccatgttggccaagatggtctcaaactcctgacctcatgatctgcctgccttggcctcccaaagtgctgggattacaggcgtgaaccaccatgcctgacctcaattttctttaaacctaaaactcttctagaaaataaagtctatcygttaaaaaaaaaaaaaaaaggcagccaccacatgctgacactcattttacaactctcaggcgttaggactctgttcctctcactactttgactagtccacaaggttggaagcagaatgggtcacagtgttcac

SEQ ID NO: 822358 - DNA, 581 bp, Homo sapiens
taataaagataaaataacaaataaaaataaaaatggaagatttcaccatgtgtcatttaacaaggtgagaagaaaatgggttgctctaggatatgcttcaatgtgaaagggcatatgtcatcgattggagactgaaaagttaattccacatggaaaacagaaagatttgtttataataatacaactcaaaatgatttaaaatttttcatatgacacaccagaataagaacattgctaatacattggaaactcaccaaccattgaatgtggtgccatttgtccatttccaagaatctccttgtttcctgcttagtccaatccagtgcatatcagttcctgcgtacctcttcaaaaattcctttcacaaaacaaagggaatcagcgattacttaatatgttacagcacattgctgaacatgcttcccaccccaattattctatcttttaggattcacattctaatttgtcttccctgatgcttctataacaacaaacagcacagatgttgatgtttgggttagttttatcagaaagattttcawtttgcttttttgcatcttaagtatctccagataattggg

SEQ ID NO: 822359 - DNA, 459 bp, Homo sapiens
aaggcaaagaaaaacctcctgcagtgtgattgcttctcctatcagagtcccatctygaaaacctgaaaatcaaacctgataaatgatgtagacatatcaagaaaagccaagaggacagaatcaagctatactggaggaaaacgttgcttctctagaattttaaaataaatatttcagcatcagaccatgacagcagttaaggcaagagggaaaaaaaagatacaagaactgacaaagttgaaggagatagtttcatttcaggttccttcaaggggagacaagctgacagcaacaaaacacaagaaagctgcactttggagatatagatctgagaagtattcaaaaagtaacagattatagagtcaaaatcaaaacctctcatccaatcaatattttaagaaaaccttgttctaacccaggggactaatctatatctctctcccctagttactggatcct

SEQ ID NO: 822360 - DNA, 574 bp, Homo sapiens
tgaagattattaaagtagaaagrcccaagggatataaagagagaacaggcagcatctgccctatgtcctaaaatagtgaatcccttactccttagctttgggtggtttcagactttcctgagcctcatctgaattggtaaaggagatccttagctagaagactagcctagggaaactgcaggctccattccaatgatcatctgttatagaggttctgcaaacattttccttcacaaagtccatggagttgtttaatccacaaggttttgtgcataggagaaagcatgaaaggaagagacaaaccacaaatatgatagccattatgtatgaagcccttattaagagtcaagtgttaggttaattgctttatgtgctctattatccttcaacaacactacaagttaggtcttactatttccatgatgaagcaaagaaactaaggtttaaaaggattacatgaaggactaggatttgaacctagtcagttataatacatagaagacattcttaagtatcatgttaggttgtgctgtgttggaagaagtaagtttgggtctctcaataagccatgttc

SEQ ID NO: 822361 - DNA, 606 bp, Homo sapiens
gccaccacacccagctaatttttgtatttttagtagagataaggtttcaccatgttggccatggtagtctcaatctcctggcctcaagtgatcggccggcctcagcctcccaaagtgctaagataacaggtatgagccaccaggccccacctctttatttcttttctataaatttaaatttttattttatttcattatttacttcttatttgtttagatggagtcttgctctgtcttgcccaggctggagggcagtggaacgatctcggctcactgcagcctccacctcccaggttcaagcaattctcttgtctcagcctctgcagtagctgggactacaggctcccaccaccacacccagctcattttgtatttttagtagagatggggtttcaccatgttggccaggctggactcaaactcctgacctcaagtgatccacctgccttggcctcccaaaatgctggaattataggcatgagccacrgcgcccggcccttttttcttgcttttactgcttaggagagagtcatagttgagtattgatatgtctctaggatcaagtcaaggagaaaatgaaagtgattcatcaagaatatgtgaaag

SEQ ID NO: 822362 - DNA, 622 bp, Homo sapiens
ggatcttgaaaaaaatctaaaatcaataaaaacactcattatgtagaaaataaggcataagaatattccttgtttgttttaaagaaaaggtctatggcaaggggcattgtggtactaggactgaaaactaaagccaccacataatgggacaaccattacccactctattaccttcagcatttgaaatttgtttggttgatttctttccagctcatttaatctcatttacatgttttaccaagacccattttatcccaccatttaattctttgcccaacctatgctgtttcaactactcttctctctttgtgcttcctgtaaacctcaacaaatgactaaacttgactctataagctagattatttggcccaaaccctacccattctataaccaaaaataagtgagtctgcctccttgaactttctagctgctcactttcagacacactaactgtcctggaaaaaaagtacactttctagtcatgagatcwcttataattggtgtattatcctatttcagaggtcggaagattattttaatctctctgactgcagtagaccttgtatgtacagtgtcctttggatgtgatactacatgcctgcttccagagatgtgacttttc

SEQ ID NO: 822363 - DNA, 587 bp, Homo sapiens
actgtgctactccctgccctccaggacccaaacaatacccatgctcagtcattctagggtacttgctgccactgcgcctggccacatggagtctgggatacagatatgccccaccattccaaggtctaaatttaccactacatagttcttcattctcagggacctaagctgccactgaaccctattggcttaggctcctaaattatagctgtaccatgcatgctgtgctcaaacccctaaaactctgcttctttcccagagctgagccagggctgtatcctattccccaggggtagaatcacagctacaacctgacccactgaatcaaagctggtaggggctgcctaacagtcatagattctggctctgtgggaaacctatatttgacccagctacagagagtgaacctgtaccccaggacccaagagccacaataggcttgtgaaactctgatattagcaccctgactccatagccacttcaagtaccaatccctggaactcaaagcaatggaactgcttgtaggccatgtaagagggatccwcttgtttaattatccccattgtgaggaaaatcagaataggagg

SEQ ID NO: 822364 - DNA, 651 bp, Homo sapiens
ttctatttgtagctgccattttaaaaattggggtataaatattatgtcagttaaataaaagaatgatgacttcactttctgaagaaagcattccccttcttttccatgaaatgtagcttacctgttacctgactgacatgccattatattatcctccccccagcagttacacatatttaataatttttacgtgtaaaaagtaaggttaaacagttacaaagtcaggttgttatgttttgcatgactttgagaatgctagtggaatggaaataaagttaggagcagcaggaggaggctctgttgaaacagatctccttcagtggcatggtactgttcatggtcagaggaagtcctagggcatatgctgggacagacagtgaagggtaggtcttacaaagaggctttacgttagagtaaaataatcacttatctgtatgcatctttgaatgatttcaccggatatgttgaatatgtatttttaaaaatagcagcaaagggcctgtaatcccagcactttgggaggccgaggtaggtggatcacttgaggtcaggagtttgagaccagcctggccaacatggtgaaacctcatctctaccaaaaatmcaaaaattagccggatgtggtagcaggtgtctgtaatcccagctact

SEQ ID NO: 822365 - DNA, 632 bp, Homo sapiens
agttccacattttggagaaaactgttgagcccttaacattttttttcactcataaaataatgctttggtagaaagccagactagaaacaaaggctagtcaattttaacgctgaaaatgaaggcagatttttttcatttgaaatgtaatcactagaaatggtcgttaatttttcttcctaaactaatttccagtagcagaacagagtaccatacatggcctattagcaaagggttgtgagagagtaagtataggaaagtgtttgaaaatgtaagaaatgaaacaatttcaaaatcacttttatattataattatcacaaaataatagaagcgtctgtgtgtgtgttcatgtgcacatgctcagatggaacatcatatacatttatcatattcctaattatagtaagatctcatataaggcttattatgtaccttcatgaaaattcaggcagttgtcatcctttaagcgccaaagcaacaaatcaaaattaaggaaccagagttgctaacctccaggaagccatgtggagcctactgatgaatggagatgatgaggctgcagagtgatgagtggaaagagtgctgacttsctatgggtaattcgcaactctcagcttcttcttattctctttaa

SEQ ID NO: 822366 - DNA, 604 bp, Homo sapiens
gcatttgtttccttttgactatttcaaaggctgcaggtggtgagtctccatccaggayagcagcaagtagactgttcttttcacagaaatccttatccctacactaaagaaacatccgtccctatctctaccagtagtatattttgcaatgaatgataaacctcaaaagtgaaaggttcagtcagaaacccaagccactccactttgatctgatctgtcccactgtgtctctcatttagcttaagaacatgccttccccatcacagagtcttgtcctaagctagcctgttcatccttcagccacagctaaaaggagatgctcttactgttggctcccatgccatcaggaatggttgtaggagtgagggcgttgcgctgctgagggttgataagctggctcacagaaggcagcttgttcatgctgttcattttgttcagaggtggggagctgttaccatatgaagatggagactgtattgaggtcctaggaagacaaacatggaaataatggtgagcaagggacactgaagagtggggactattgattttcaacaggtctctgtttaaaacatggcctcaaaccaaacatttgaaaacattcttc

SEQ ID NO: 822367 - DNA, 550 bp, Homo sapiens
ctctgtatgactctttccatactccccggctggtgccttcagagccacaraaacttccttactagacttgtgaggaaggagggagccttggtaagagggaatgtgtaagaccagacatcagaagagaggaattctagttttggctctgctggcaacctgtcgagtgaccttaagcaaaccattcaatatctctgaatctgctgcttcatctgtaaaatgaagggttgggccagatgattttatttcattattattttttaatgtttagagacagagtctcactctgacactgaggatggagtgcagggctgatcatagctcactgcaaccggcaactcctgggctcaagtgatctcacctcagactcctgagtagctgggaccacaggtgtgcaccatcatgcttggctaatttttaaaaattatttgctgacacgaaacctcactatgttgcctactttcctgagattacaggcatgagccactgcatctagcctaggacacatgatttttaagatgacttccagtttcctatgtttatctctttagtt

SEQ ID NO: 822368 - DNA, 564 bp, Homo sapiens
cacacagcttgcaacattctgggataatacaaattaaatataacatcctgagttcttcatgttaaaatgaataaatccacaataaactgcaagttatatgaagcaattttatgatactgttagagctacattttaaaatccataaattacaaggtagttgacactcatgaacatagatgcaaaaatcctcaagatactattagcaaatgaaatgcaacaacctacaaaaagaattatacatcatgaccaagtgggatttattttagggatgcacggctatttcagcattcactaaattaattaatttaatccaccacatcaacaggctaaaagcctgggcaacataggaagaccctgtctctacaaaaaaagttaaaaaaaaaagtagctggatactgtggcatgtccctgtagtcccagttatttgggaggccgagatgggggkgtttcttaagcccaggagttctaggccgcagtgaactgtgatcacacctggactctagcctgggtgacagaatgagaccttgtcaaaaaaaaaaaaaaattcggaacataggcataggc

SEQ ID NO: 822369 - DNA, 564 bp, Homo sapiens
cacacagcttgcaacattctgggataatacaaattaaatataacatcctgagttcttcatgttaaaatgaataaatccacaataaactgcaagttatatgaagcaattttatgatactgttagagctacattttaaaatccataaattacaaggtagttgacactcatgaacatagatgcaaaaatcctcaagatactattagcaaatgaaatgcaacaacctacaaaaagaattatacatcatgaccaagtgggatttattttagggatgcacggctatttcagcattcactaaattaattaatttaatccaccacatcaacaggctaaaagcctgggcaacataggaagaccctgtctctacaaaaaaagttaaaaaaaaaagtagctggatactgtggcatgtccctgtagtcccagttatttgggaggccgagatgggggtgtttcttaagcccaggagttctaggccrcagtgaactgtgatcacacctggactctagcctgggtgacagaatgagaccttgtcaaaaaaaaaaaaaaattcggaacataggcataggc

SEQ ID NO: 822370 - DNA, 682 bp, Homo sapiens
ttttttttttttttttctcctgaacctggttgatttcttcaaacacatcaaaacaagtaacatcarccactcattgagctcactgctgggttggagctgcagactcattctgtcagagcttcccctttacctcctcctccttgtaattcacagtgttttctgtgcccactgctgacctccgaggctgggcaaagccaagttgggaacaatctgactattgattctgtttcactctacaatggatggcatcagctgtaaaaagttgggttaatgaggcacctctggcttcaactatcttattaagggcccgcaataaaaataaccaaacaagatgttcctatcattttttttccagacatgttgctggggaggaaaatctaaatgaatgcttcgtttagtcaacatatgacacatgttttctagtcattttatatggtacatttaggagaagggagaacaaaaggtgaataagacatgctgtaccccctctctttattttggtagaatggccacagaggagagccagggtagcctagagtttgacagtctttctaccttaacagtcccttttataattatctgatatcttctgcttttgaaggacgaatcaatttcgaatagataaggccacgtgccttcttgatttgagcctcatttcaacagtgaattgagtgttacctat

SEQ ID NO: 822371 - DNA, 588 bp, Homo sapiens
ccatatgtaggtcacaaagcaaggttaaataattcaagaaagttgaaaacatatcaagtaacttcttgtaccacactggaataaaattagaaattagtaacaragaattttggaaattatgcaaacacatggatattaatcattatgttcttgaatgaccagtgagtcaatgaaaaaagtaagaataaaatttaaattcttcttgatagtatgaaaatagaaacacaacatatcaaaatttacaggatacagcaaaagcacaactaagagcaaagtttccagctataaagtgcctccaatttaaaaagtatataaacttcaaataaacaacctaacaatgcattttaaagaattagaaaagcaagagcacacagaacccaaaattagtagagagaaaaaataataaagagcagaacagaaataaatgaaattgaaatgaagaaaacaacccaaaagatcaacaaaatgaaaagttggctttttgaaaagataaaatcgacaaattgttagtcaaactaataaaaaaaagagaagtcccaaataaataaaatcagcaatgaaaaagagacattaaaaccactgcttcag

SEQ ID NO: 822372 - DNA, 617 bp, Homo sapiens
tgtcagttctaaacacagaagtgcagacsaagagactttggctattatctttgtacctccctcactgttgcaagcccctcctccttgggctgaattgacttccaagaaatttaaagaacgggtgacctttcttccctcttcacatccccttcatctttttctttttccactttggggtgcaggatattaatgattaggacattcaaaagaaagtaaatatatggggaaaattagaaagtgactaaaatgtatggtcaggtaaaggtacaagcatagaaaagacctgaaaaaaaaacttaagtttagaatgtaggctgattcttggcacagagattacctacaaaaatctttaaagaccgaaaagaataaaaacaatttaaaaaagcaaaccatgggaaagaagaagaacgtgattttgttttagcacattattatatataaatgtccagttttcaacaacaacaaaaaatcaacaaggcatacaaagaaatgggaaagtatgggcaattcaaagggtaaaaatatcaacagaaactcttcttgaaaaagacctgatagcagttccactggacagaaaaacaactaaaagatattcaaaaaggctgggcgcagtggct

SEQ ID NO: 822373 - DNA, 617 bp, Homo sapiens
tgtcagttctaaacacagaagtgcagacgaagagactttggctattatctttgtacctccctcactgttgcaagcccctcctccttgggctgaattgacttccaagaaatttaaagaacgggtgacctttcttccctcttcacatccccttcatctttttctttttccactttggggtgcaggatattaatgattaggacattcaaaagaaagtaaatatatggggaaaattagaaagtgactaaaatgtatggtcaggtaaaggtacaagcatagaaaagacctgaaaaaaaaacttaagtttagaatgtaggctgattcttggcacagagattacctacaaaaatctttaaagaccgaaaagaataaaaacaatttaaaaaagcaaaccatgggaaagaagaagaacgtgattttgttttagcacattattatatataaatgtccagttttcaacaacaacaaaaaatcaacaaggcatacaaagaaatgggaaagtaygggcaattcaaagggtaaaaatatcaacagaaactcttcttgaaaaagacctgatagcagttccactggacagaaaaacaactaaaagatattcaaaaaggctgggcgcagtggct

SEQ ID NO: 822374 - DNA, 603 bp, Homo sapiens
aatggactttgaagtaggggaaggttgcgagggaagtgagggataaaagagcacatatctggtacaatctacaattctcaggtgacagacacactaaaatctcagaaatcaccactaaagattggcatttggattgatttcatatcttagctattgtgaatagtgttgcaataagcacagaagtgcagacatggctttgacatactgattttatttgctgtggatatatgcccaagagtaagtttgtagatcttatggtacttttgtctttaatgttttgagaaatcttcctaatatttttcacaatggctgtactaacatattgtctcaccaacagtgtgtaagggttctcttttctctacatactccccaaccgtgttatgttataattgttgatagtagttattctgactggagtgatttgatatctcattgtagttttgatcttcattttcatgatgattactaatggcamgcatttttttccacatatcttttggccatatttgtgtctcattttgagaaaggtctattcagtttttttgcctactttttaaataggttattttgttgttgttgagctgtttgatttccttatatatt

SEQ ID NO: 822375 - DNA, 605 bp, Homo sapiens
ggataatttttaaaagaaatgtgtaaaccaatatcccacattaaagattttccaaaagcctaagtaaaatatyaacaaattacatgcaaaatataatcaaaagattaatcggtcatgataaaatagattgtaatccaggaattgaaagacagctcaagataatgaatgtaatattatccattattttcacatattaaataagaaaagtcatatgatcatttacatagatacccccaaagaagcaatttataaaatccgacatttgtttctgacttgtaaaacttctgattagtaagctaggaaatagaagggaaattcattaatttaacagagattgtccattagaaactcttagtaaacttgacacttaacggtgaaattttagaagcatccccatcagagttgggagaaaacgacaaatgccccctcccaccctattatgcaagggacttgagattccagggaatgcaaagccaacaggcattgcatctgaatttgggacttaggaatactctgggaccttcaagtctgagccctaagaagccctgcaataagaacaagaaagaagagtctctagacagaagtaataataataaactgtcatc

SEQ ID NO: 822376 - DNA, 591 bp, Homo sapiens
tttcagtgttcctaactggcacgacacatcatccaaaccacaaggaagacttctcagttatggaatcatgcagtacatggcatatgagggtggctcctctgtgcttctaaggttccagtggtggagaaacctctgacagctaaagcctggagccctctgaccatttgcacagcagcctggctcaggggagcaggtccaggctgagagtcagacagggcttggtgtccctgcagcagctccttcggctctctgggcctcagtcttcctcatctataaaataggcgtgctgacactttccccgtagtactgtcttaagaactggataaagcacctgctttgaaggtcagataaccaggagtgtgggattttagatccatgtcactagagtctagatgatcagagttggaaaatgtcatagagccctacattttcattatttgtgtagggaactgggaacatggaagggaagatcttaggcaagcagggacggcaggccacagcaraggcaggccaggtcccgtggcccagcccggagcctcagaatgccttccattcccattcagcaccagctttgcccgcaaccacagggag

SEQ ID NO: 822377 - DNA, 616 bp, Homo sapiens
tgggaacaaggagggactgaagtggctgttttgagaatgaagcaaacgatcctgcttcaaaagcrtatctttggcctctgatttgacagttctttttctttctctgaaagctatgaaaaagtcagtgagcaaagtcataagaaataagtgttggtgaggggcagcaaaatgttataagagagacaagttcaaagatgacatttacaagcctctcatgaatggcacactccccaaagggcacctgaatgccatttttaagaagtcatcaaacatacaaaataaaatgttccattttacataaagatgccaatatactgcccttaaaacacagattggtccattcacaaattaacaaattaacatgtaaagaaatggcaaagaaccttctcccatctgccatcaattcattcactgcttttagatttaactccctacactcacacgcttgtaaacagaattgtaatggacaaaggatgaaggggaagctgggaaaacctagcttggacatgatactgaaacatctggaaaaaagtggcgacaagacttggccttggggatgggaaacgggaaaaggtgggatttcggcacatcctgtctctctattctgttaactgga

SEQ ID NO: 822378 - DNA, 335 bp, Homo sapiens
cactgcttacatagtatgacatgtgaatagatgtaaggaaatccatcactactactccaagcatatgcctactgagtaatgagttagcaggatcaccttcatgtttgaagacascaggacgatatagtagaggagaacgtaagctctagtgtcagaacgcctgggttcttattccatctggctagctaggagactttgggcaagtccctcccctacatctcagtttccccatttatactcaatggcagtacttcccaaattagtcacctcatatttagagatatttatttattaatactatatatatatatatatatatatatatatattttttt

SEQ ID NO: 822379 - DNA, 643 bp, Homo sapiens
agtattcataaaagacaaactcaaaattcccaatgacacagagagtataatcacaccacatatcaaatccaagccacatagcacagagtgtgctattgaaatgaaacgcaatataactattgctctgggaattacagatgggatccagtaaaagacactgtattaattatattgttttccatggaacttttctaaggttgcccaggacagcaacactgtagaacattcatgatgaaactgtcaaagaggactagacttgaggggccttagggagaaaagagatttgaaaataatgtactgcttgcccatggttcagacgtgcctttctctgcaagtatgatcacattattgattctcaaaggaagaaagaaaatatgactttgtcccttaactgacatcaaagttacagtgttatgcagtgatgcccaaaagcatttgcaaatattcagaaacaaagttttgagtgtcctaggagatgactatcataccaattgatccaaaacacaatggtcaagaggcatggaaaacctatggttggggagggagaggaagggtcataaatatatacagtcatgcaccacgtaatgacattttagycaatttactggatatatgatggtggtcctataagattataatgtat

SEQ ID NO: 822380 - DNA, 624 bp, Homo sapiens
aaataaccatgctgcccacagcattccacagtttcagtgcaatttctatcaaattattaaaatcattttaaacagacttaaaaaaaattctaaaattcatacagaaccaaaaaagagcccaactagccattcaaaggaaaacaaacaaacctgaaggcatcacattctctgacttcgaattatagtacgagtctatactaaccaaagcagcatggtactggtataacagcagacacatagataaatggaacagattagagaatccagaagcaaagccacctacatacaaccaactaatttttgacaaagttgataaaaataaacaatggggaatggacatcatatttaataaatgatgctgggagaaccggatagccatatgcaaaataatgaaattggacccttatctctcactgtattagtcagggttctccagagggacagattatacatatatatatacacacacacacacacacattatatatatacatcatatagatatacacattcaggggagttttaactcackcaatcacaaagtctcacaataggctgtctgcaggctgaggaacaaggaaagccagtctaaagagtccaatgttccagggcaggaagcatcca

SEQ ID NO: 822381 - DNA, 601 bp, Homo sapiens
cctctacaaatacgcacacatacacatatgcatacagagtaataagtgctattagaaaataaagaattatgaagattgtttctgtattacacagggtgatcatgaaagtttatatgatcaagtacattaagcgcaaattagaaaaatgtatgtgaatgaaagaagtgcaaagtctctgaagttttgttctgattttctcttgcttttttctcgcagtccaggcagagataacttattcaggcagaaagagtagcaagtgtgaaggacctaagatttctgaggaatagcatggaggacaatgtgtctaaagtagctaaggaagcaagtggtaggtaaggaagaagaaaccttttcagtgatgttataatcatgtaagaacattaattactcagaatattaaatataggcataaaaatagtgtctagaattatcttttcatgacacatttttaatgttgtggatttctggtcagtaaatattatatattaagggatttttttggtmattttgttcaaaaaaagtctgtatttctcaattgtattaaaagtaatttctcccaattctatcaaatctgggctcaaatttggcttggtgttcacag

SEQ ID NO: 822382 - DNA, 471 bp, Homo sapiens
aaaaaaaaaaaaaagaaacaaaacaaactgcttatagtctaataagatctccctagtatgtgatgagtcacttttctyttgctgctttcaagattctctctttgtctttgacattttacagtttgataataatgtgttttggtttgggtcactttggtttatcctagttggagtttgttgggctttttgaattggtatgttcattttcttcctcaaatttgggaagattttggccattatctcttcaagtaggcttgctagtcctttctcccttttcttctgggtctcccatcatgcatatattggtctgtttgatggtgttctataagtatttttggcgttcttcacttttcttcattctttctttttgcttatctgactcaataattttaagtgatctgacttcaaattcactgactcttttttctgcttaagtgtcctgttgaactcctctagtgaattttaaaattc

SEQ ID NO: 822383 - DNA, 597 bp, Homo sapiens
ttataactcctctctcttacaggtattatgtaaaaaatagatttggaggctcacaagaaataaatgacagaaccaagatgaaaaagtagatttctctctcatccataatattttattcctgaatgtawttgaaatttaaaatttttagatgcagcacgcacaaaaaccccattttcaagagtgtaaatccagctatggaatatcttttcacggtatggtataaaatccagcaaaatctcgagagatcacttgagttagttttgccaaaacaacaacatccccataaatcagctgactttaaaaaatgactcaccgctccttcagtctttatcatggaagcagctctagactgtgagtcaggaagctcaactgggctctcaggatgaactagaaagaaatcacttaagagacctgtttgtgtttctcttctgtcaaggacactgtttacaatggtgtcacaagaaggaaaaagtgagaatattcaatggatcaaaatactacataaattatttccatcccaaaatctcttctttgaactgtactttccaaaaccacagtattctctttgataatggctcatttttaatcaaagctgct

SEQ ID NO: 822384 - DNA, 478 bp, Homo sapiens
ttttaggagttggtaagtacataattttatgtcttttatgtgagctcacaatcttgaattaactagtctaaattctgtattcatatactatatgatataayatcatataatccctattttttaataatttctcatctgtaatccctaggaacaggtaaagtgagacagctttggttatcatgaagcctgttgcaagaaatatcaatctccctgtccaaattgatgccatgctgattaatgatagccttaactgtaaaatggtggctcatttctgcaaaatgctattaagtaaagatcaaattatctgacattttaatgaaactgaggctggataatcatccatattatttcaaattcagaacttcctttatataaatatatataaataaattatatatgtatatataatgatattccagtgttttaatataactatttatgggcaagggtttgttgttttctataggactatgaccaa

SEQ ID NO: 822385 - DNA, 415 bp, Homo sapiens
aaagcaaataatatcatgaatcaaaaatctaataatatggtaaatgcctataaaaatcaaggcaactgtacaatatagacaaaagtgttataaacttttagttaaaagaacatattataagktagtattactgctcaggttgtttatgcaaaagtcttgaaagatttataatcttagaatgaacatgaggattggtggtaggagtaatttcacatttgtcaatcagctatgagttacctaatagccaaagggaatgaaaaattgtcattaaggagagataatgtcataattgtcaaaaattagagacaatgagatagtttataggtaaaagggaagaaggttgtagattttgttttgttttgtttttactttagtcatctgggagatttgagagaacaagtagaagttactaaac

SEQ ID NO: 822386 - DNA, 375 bp, Homo sapiens
aaggacccagcagctcccccttgccagcgctggagaccctggctctggggcccagtcccagccctagtccagcagcgacggacagtgcatcagtcaagggcactgctcacctccctccggacccaaccrccatgaaggccaaagccgagcccccatgcaggccagctcacgtcccattctgccatgtctcgggctggagcgaattgtattgatagaaaataaaatgtcgacataaaaaagaatgccctgacttttttcatttgaccctttcgccaaagcaactaataggaatgatataacaatataatgatttaataattagacccaggacacatgtggtcttcattattacaatgattacttttcagtaacatg

SEQ ID NO: 822387 - DNA, 640 bp, Homo sapiens
tggacatggtttttctttctttctttcttttgttttgtctctccccttccaccttggattgattctttctttgactgtcaattcttttttcttttttttttttcttttgrgcaaaggacaacacatacattcctaattctcttttcttctcaacatttctgagtttaccaaaggcggtagattttaaattcctagaaaaaaaggttagctgtgtatcaagaaagttattccaccagagtctaaattctcaaaagcattttctttcagaatttcatgttaagtaacactctgctgtcctaaagtgaaaaccaacaactatcaatcatttaagtcagtattgtcagaataatgaaaattaaaattatactgataaaagacaatacctgtagccatcacaacaaagaaacatttatctgtgtcctattattaaacacttcttttcatgctgcatataatgtcattgaactttcaaaattttattatatctcataatatttttctattaggttggtgctgtatcttttttaaaaagctaaagaaagtacaccaagaagctaaaatgttggcactttatggatacaagggtagatttcaaaggcttataaccctcactaaagtgtataacttttgggcaattctt

SEQ ID NO: 822388 - DNA, 633 bp, Homo sapiens
ttatattactggaaggaatggaggacagccctttttctcaaactcagcaacaaagtttggtttgktttataaaatattttctacatgtgtttattttttattttcctgaatgtttgaaaactatcatgtgcgtagatgcaccatcatgtatatttattcttgaatctgaaattccatctaggtggcaacaagtctgttgcatattttatgctcaattaaaaagaagtcttacaagatttttatgtattacggaaagatcaccatctgtcccctatttaattaggtccatcctgattatgttacatgtgttctggctccctttaagaaaattttctacatatacatgaaggagaggcttgctaaaaatgaattgtcagcaagaaacaggagagatttaaacaaagaaactccaagaaaaccttaacaaagagaaatatctcaaacctgaatccttagattcagtaaaataataacccttccccttcacctctcatgacttctataccaaaatacaaatgcaacttgaatcctatcattttagaagcttcaagagttaatttttctttcctgttacttttcagtttggaacacctttatgctttcggaacaattttagccgggaggggaaatgcc

SEQ ID NO: 822389 - DNA, 614 bp, Homo sapiens
atatccccagataaaaactagaaagaagctatctgtgaaaacactttgcaatacgtggatttatctcagamagttaaaccttttcttggtccagccaattttaaacactctttttgtagaatctataaagaaacattttggagcactttgaggcctatagtgaaaaactgaatatttcacaattaaaactagaaacaagctatttgtgaaaatgcttcactgtgtgtggatttagctcacaaatttaaacctttattttgatctagctggttagaaacactgtttttgtagaatccaggaagaaacatttagaagccctttgaagcctattgttaaaaacagaggctgggtgtcgtggctcacactggtaattccagaacttagggaggctgaggtgggtggatcatgaggttgacaaatcgagatcatcctagccaacatgatgaaacctcatctctactaaaagtacaaaaattaactgggtgtgtttgcatgcacctgtagtcccagcttcttgggaggctgaggaaggagaatcacttgaacctgggaggctgaggttgcagtgagctgaggtcatgccactgcactccagcatgtgtgacagagtgata

SEQ ID NO: 822390 - DNA, 540 bp, Homo sapiens
caggaggctgaggtgggaggatcacttgaagccaagaggtggaggttgcagtgagccaaggtgatgccactgccctccagcctgggcagcagagtgagactctgtctgaaaaaaaaaaattaaaaaataaaagaaagaaaaagaaattaattgcaggaattcaacaaatgatgctgaaacattttgaccatatctttttttttctatcatggtaaaacacacataacatgcgattcagtgccattaattgcactcacaatgttgtgcaaccatctttgctgtctgtttccaaagccttttcgtaactccaaacagaaagtctataatcattaagcaataagtattcattttcctctctcaccagcctgtggtaacttctgatctactttttctctataaatgtgacttttgtaagtatttcatgtcagtagcattatsataatatttgttcttttgtctgtcttattttacttaccatagtggcttcatgtttcgcctatatgtagaaagtgtcaaaactttttctttcctgactgaata

SEQ ID NO: 822391 - DNA, 540 bp, Homo sapiens
caggaggctgaggtgggaggatcacttgaagccaagaggtggaggttgcagtgagccaaggtgatgccactgccctccagcctgggcagcagagtgagactctgtctgaaaaaaaaaaattaaaaaataaaagaaagaaaaagaaattaattgcaggaattcaacaaatgatgctgaaacattttgaccatatctttttttttctatcatggtaaaacacacataacatgcgattcagtgccattaattgcactcacaatgttgtgcaaccatctttgctgtctgtttccaaagccttttcgtaactccaaacagaaagtctataatcattaagcaataagtattcattttcctctctcaccagcctgtggtaacttctgatctactttttctctataaatgtgacttttgtaagtatttcatgtcagtagcattatgataatatttgttcttttgtctgtcttattttactwaccatagtggcttcatgtttcgcctatatgtagaaagtgtcaaaactttttctttcctgactgaata

SEQ ID NO: 822392 - DNA, 501 bp, Homo sapiens
taccaaaaaataactgagaaattaacaaacatattaaacttgtgtagctcttttgttgttatcctatcatcaaatttcatgacatttagactaatatatattgctgatttataaccaaaatccagatcattttgaaataaaatactgacaggcagttcaaatttttaaaattcataaaactgacctggaaagtagaatacactaactcatgtgtcagttttctctgtgtttttgctgaccacaagtttacagcaattacatgatagagttcccctcctttcacccacacttgataatgaattcattatatataaaatatataattaataagtgagaatacactggccaggaggtggtgatttctagagctgacaygaagctttcatatgaaagttttcccgggtcctcattcacatactaaatctacccactaactgttggaaaatgaaattggacaaattggtttgaatatatgggtactggattaggaaagatgtagtt

SEQ ID NO: 822393 - DNA, 584 bp, Homo sapiens
aaggagaggccaggctcctacccctgcaaacagcatgaacttcccaaggctccaccctgtcaccctagagctcaggacgattggagattctccgggaccagcagtctggtttttcagcctttgagctgttttaggcttgagggtggggcttcactagggaaacctttggctgcttccatctgtatcattcccccttctaactgcccttagaataaggataagggtaaggataaggatagaagatggccgaataggaacagctctggtctacagctcccagcgtgagcgacgcagaagacgggtgatttctgcatttccatctgaggtaccgggttcatctcactagggagtgccagacagtgggcgcaggtcagtgggtgcatgcaccgtgcgcgagccgaagcagggcgaggcattgcctcactcgggaagcgcaaggggtcagggagttccctttcctagtcaaagaaaggggtgacggaggcacccggaaaatcgggtcactcccacccgaatattgcgcttttccgacyggcttaaaaaccggtgcaccacgagattctatcccgcacgtggctcggagg

SEQ ID NO: 822394 - DNA, 580 bp, Homo sapiens
cacaaataagcaattcaaaaatttatcagagaaattcaatgaagaatttgaaataatttttaaaaatcaaacagaaatcctagaacttagaggtatatttgcttaactaaaaagttcattaggggcttttaacagtagaataaatcatgcagagaaaagaatcagtgaagtcaaagacaggcaattggaaaacacacagtttgtgagagagagagaaaaaaagaatgaaaaggaatgaaaaatgcccactgttaagaattaaagaaagaggaaagaaacaaaaagttgctccacagtcaaggacaggtttattttagagaaaacaaacctgagaggggcgtctggctgagttaggtcgtgcccactctcttactaagagtttttaaggatttagggtaggagagcttatcagaggcttggactgcttctgtgtctcttttgtgtctttgttgtgcttatctgggagggagagttgtgtgtctgttcccatacatccctgcagctgaaggcatacctgcagggtctgcttttagcttccctatcttagtgcacctraagggaaaggaatgtgattattaag

SEQ ID NO: 822395 - DNA, 452 bp, Homo sapiens
aaggcaatttgatcaatgtatacacatcatatttttgcttcatgatctcattcttaatctgtaccacaagtgattcccaaacttatattagaacttcttcctttttaatcttataataatttattgtttggaagcaacaatagcttccaaacactgagtccctgaattaggagtgtttaattaccaggcagtgcaggaggattgcaggcttctgttgctgtggaagaaccttagcctcgccactgatagcatggctaagagcagaagagagtatacgctcgatgcaggcaagtggattccaaagagaaggggccctggctaacctgcttgtcaccgtgcattaaccattcctacaagatattcttcttgctgtgagggtaggtaaataaaggaaacatcagaaattactcyacgccacccacatccaaatacaatctttatagtacatataa

SEQ ID NO: 822396 - DNA, 530 bp, Homo sapiens
taactaagttgccaataatatatttatctattggaagatctcttgtaatgccagccattctaatggtatgatacagatatacctgttatcaatcaggaaacaggtaagggcaaggttaaaagagccaaaaaratgtcctcaggactagcaacagtaggaagttgaaaccgccttcgcaaaaattgtaactgaggaaattatgacagtgaaagagatcaaacctaactgattccatcctgcctcgaacctttaagctgtccttgttcattcctgggtgtaggctgaactaaccttgggaaggaatttagtgtatgatttgactctgaaacaaaattgataatagccttttcctgaaaagacccactttttgcctggggaccagactgcgtttgtaggactaacaaattagctacaagattagaaattttggtttaggagtcatgcggcctctggctgcaagagtctgaacctctccaaattgttcctcgggataacatcactattgtaaaaccaaagatcagggcttgaga

SEQ ID NO: 822397 - DNA, 606 bp, Homo sapiens
acacctgtaatcctagcccctttggaggccaaggtgggaggatcacttsagctcaggatttcaagaccagcctgggcaacatggtgagactctgtctgtataaacattttaaaaattagctggacgtggtggcgtgtgcctgttgtcctggctacttggaaagctgcggtgggaggcttgcttaagcccagcaggtcgaggctacagtgagccataatcatgccactgcactccagcctgggagacagagggagaccttgtctcaaaaaaaaaaaaaaaaaaaaaaagagtaaatatgggtgctgcagtgataaacagggcttctctaaataaatgacatttgaacaaagacctcaataaaataggggattaagccacacaaatatgtaaggaaggggcattccgtgtagtgagaagtgccaagtgcaacggccttgtggaagagcacatttggcttctttgaggaagaacagataagccagtggggctggactggagtgaatgaagggaagaaaggtaggaaataaggtcagaatagtggccaggatttagatattattaagttatgaaagtcctcgtaagaattttggattctactttgagata

SEQ ID NO: 822398 - DNA, 577 bp, Homo sapiens
acatttacgtgactgccaggcgcagtgccctttcatatttgcattttgccctgtgtgaacatcgttttaccagagtatggaaatgttttcattttggacataactttctcttctaatattcgattgggactatcataggccatttgggggaaaataataaaacatatcttcaagttttaaaattttacttaattttggacatgtgcaagaaaatttactgctactggtacttgctctgaatttctaggtttcaattttggtgagactagactagttgctctgaaagatctctgcgctgtattcatcttacaagtctacttttatactgatactcattccttgggaagacataaaagaatgaaaaggtgatgcagttcattttccacagcattgaacactcatttgtcaccagcgtagaagggatttggggagagattaagcagtagcagkaatagtcaataatctgcgtctaaagtggcttgctggctttacttcagtaaattctggccatgtgaagaatacctaaatcaactatcagagttcttaacagtgaacctgtcataactatgattttttt

SEQ ID NO: 822399 - DNA, 624 bp, Homo sapiens
gctgaaatcccaccagcatctctgagaccttcacaccttctattctcaggttaagtggacagtgggtctggggttttgtctctacagagccacatcggccgggcctcacagatgcgttttccagagattcctgagctgccatacttctttggtcccatacgaccttttcctcccctcagccctcaaaatcaccctctctcctgcctccagcctctcagggctcttacctgaggtaaaaatcgcctcctgcatctcttcctggggtaaaattcccgcccgctggacacgtgaccactgagcctgcactctgtgcttccattggccagaccaggccccgccccttgggctccgggcacttccgtccgcgagtgggcacagcctacggaggtaaggattgtggggattcgaggctgcagcctgggcagcgccgaggtcctcgggagtgagcagaaccctcataacactgggcggagtgtgacggtggagaagtcggcgtgaggctagaaagagctggttgtgaagrgttgggaagacccggcaaagcagtccggacttctttgggagtggcggctcccatgttgttagcgaggccgggcaaaacgcggcagggttagcaggagggcg

SEQ ID NO: 822400 - DNA, 611 bp, Homo sapiens
atattttatagtaactacgtgccatgatttatctaaacattccactactgatggattaacagattgtttccaattttttggaaacaatgacaaataatgctgcagtaagaattcttggacatatgctcttgaatactttctgtggcatagatttgttttggcttgctggctgaaattgtaagagcatttcaaatttaatagatgttgcgaattttccttccaaaaatgtatagcagtttacattaacaataccagaaaggggtcatcattctcctgaatacccaacagtactgaatatattgctctttagaaatttttgccaggctgatgcatgaaaaattctatcttgttttagtttgcatttctctgactactgctgagattaaacatgttttagatgtttatgaatcctttggatttcttcttccatgaattgtctaattatgcatgtggctgtgtatgtgtgtatatgtgtatgcatctgtatgtttgtgtgtgtatgagatcaagtgattttcctattgggtaggttgtctttttgaaaatctagtgtaaaggtgcattagttaamatcaggcctagctgtataaataacagaaaattacaaaata

SEQ ID NO: 822401 - DNA, 598 bp, Homo sapiens
agccaccacacctagccggaaacagtatttttttttttttctaaaatgaggcctcactttgtagcccaggctagagtgccgtggcccagtcatagctcactgcagttttgaactcctgagctcaagtgatcctcctgcctcagcctcctgagtagctgagacagtaggtgtgctccaccaggcccagttcattttttaattttttgtagagataggagtctctctatgttgctcaggctgatcttgaactcctggcttcaagcaactcctgtctctcagcctcccaaagtgcggggattataggcatgcgccaccacacccggccctaaagtccttttcagtcagtgaaattatagcctgtccacctgcgtcagccacatgcagggcagtcacccatgttcctctgggagggactccatgggcatcagacccatgagaacgccacctccttgatgaggtcaagtcctgcattttctaagagaatctcatttttaatgggcaaggatctttcgaaaagaccttgggacatgktgaggtgagttgctttgtgaatggatccgtttaaatttgttcagtcagcctgtctgttttgagcacc

SEQ ID NO: 822402 - DNA, 561 bp, Homo sapiens
tggcctagaacaataacatccacagataagactgcttataggagaaatgtgttctgtaatttgtccattcattcatttattcaccaagtatttgtttagtgtctgctatgtgcctggamcttggacgcaacggtagacaaaagagacaaaaatttctgccctggtgaagcttatgtcctgcgggtagagacagagagaataaataggtagaagacacagtatgttaaaaggtggagaaataagcccgtgtgaggggtccctgagtgtgcggagtggcagctctaactgaaatagtaagggtagagctaataagaagtggcttttgagcaaagccttgacaaggtgaggaaccactcacactgtaaaagacacctgcaggtcaaggtgtcctcaggttgagaagtgcctcatctcatgccaacttttcagcttaaaagatacagtttttgtatgatactgcacagatactgtcttactgggcaattttccttccatctcaggataataaaaggtaaaaccagagggcacttcacacatcacagcaagaatcacagtaaatat

SEQ ID NO: 822403 - DNA, 561 bp, Homo sapiens
tggcctagaacaataacatccacagataagactgcttataggagaaatgtgttctgtaatttgtccattcattcatttattcaccaagtatttgtttagtgtctgctatgtgcctggaccttggacgcaacggtagacaaaagagacaaaaatttctgccctggtgaagcttatgtcctgcgggtagagacagagagaataaataggtagaagacacagtatgttaaaaggtggagaaataagcccgtgtgaggggtccctgagtgtgcggagtggcagctctaactgaaatagtaagggtagagctaataagaagtggcttttgagcaaagccttgacaaggtgaggaaccactcacactgtaaaagacacctgcaggtcaaggtgtcctcaggttgagaagtgcctcatctcatgccaacttttcarcttaaaagatacagtttttgtatgatactgcacagatactgtcttactgggcaattttccttccatctcaggataataaaaggtaaaaccagagggcacttcacacatcacagcaagaatcacagtaaatat

SEQ ID NO: 822404 - DNA, 573 bp, Homo sapiens
gcgggtagagacagagagaataaataggtagaagacacagtatgttaaaaggtggagaaataagcccgtgtgaggggtccctgagtgtgcggagtggcagctctaactgaaatagtaagggtagagctaataagaagtggcttttgagcaaagccttgacaaggtgaggaaccactcacactgtaaaagacacctgcaggtcaaggtgtcctcaggttgagaagtgcctcatctcatgccaacttttcagcttaaaagatacagtttttgtatgatactgcacagatactgtcttactgggcaattttccttccatctcaggataataaaaggtaaaaccagagggcacttcacacatcacagcaagaatcacagtaaatatgtgtttccttcttataagtgctcttttaaagtttgatagctcaacaagtattgtagactgtacagttgtccttcagtggaaggagaaacatctacacaaagtatgtcatttattttcttctcaggctctttctttaaaatacctgccrtttgccatggacctctaagactgtctggctcataatgttagca

SEQ ID NO: 822405 - DNA, 610 bp, Homo sapiens
ttagtcaggaggtaagatgaatcttccaaagttatgttaaattttgtttaacttgacaaattaaactttgttcttattaaacaaatacgtaaacaaatactggaaaagcaaagcttatatttgggagtaaaatgtatcttaaaatgcatgttcatcttttgctgagggaggaatagcttcttgtatgtccactggatagtaacagtggttcttttttggaattttatttttacctcttttgaacttctaaatcggtccctttattttcttaaaacatttgctctcttttttgtttacagattaaagaagtatggatcaattttagtcagttgataatttcatttaggaaacattgtcttgctcattatagagagttaagactgtgcataaaatactgaagtgcctcttttttattaggctcatatgtttgttcttgcaaagcgagatgcctattgtgattggtgttagatctgtaagaagctgtgttttttccacaagaataatcgacgaccrgtttgagagcatctctcgcgttctttttctgtctgcttactgtccttgacaatgtgatcctgcacagtatcaggtgccagttatgcgtccctggaag

SEQ ID NO: 822406 - DNA, 612 bp, Homo sapiens
cctgtcctctatgtctgtcttctctcagtctacatccatctagccttctgtcaatcatctacttttttttttaatagaacaagaagtttacttatcaagtcttgaaagggggacatgtttcaattggtgttcaaacaaaaattccagcttgtattagaaccttgaaatggtgaagttgtggaggttttctttgttccataatacagagacaagttcataatttttagtataacagctaagttgacaaattctaagtttcctcaggtaaatagtcataactgtccttttccctagagaagtgcttgctgggatagtaaaaacatacaccatttcatgacttctgcaaatactttccagcggaagtcagtgtaggtttgtttttggctaacatggtcttgctgcgcaggaatgtaaacactgtgtttgaaactctggaaatcacgtgtgtggggagatggggacgcttcccatgttgtggggagctctgtggctgtgatggctgcagttgccgtgcctctgttggaacgcyaagtgcctgcaactcacgtcaatcatagaattgtgacgcacagttggcaaaatagttctttatgctatttctcaaaatttgag

SEQ ID NO: 822407 - DNA, 598 bp, Homo sapiens
aacacatttgtaagtcacatatctgacaaagggttagtatccagaataataaagaacacttaaaactcaacaataagaaaacarcccagtaaaaaattgggcaatagtttcggtgaacctgtacttcaccaaacaacttgcatggattgcagagaagcccatgcaaataagcagagaaaaataagcatgtgatgcccaacttaatttattgttagggaaacaaatgcaagcaatccggaaggtaaacactgcagctagcctgaggccacggtaccatttggggcaagcagctgaccagctagagatataacagtatgttctggggaatgagactgccacagtgggcctaggtgatttggaaggctgtgcaccttcctcataaggtaccagcagaggcctacgtcagtagctaagatgaaagaacaatcacgaagcatcccagtgctggcaaggacagtgccaagtgctggcaggaatatgctctccaaccctgctactgggaatgcagaatggcacagccactctggaaaacagtgtggcagcttcttactgtgttacactgccttaggagctggcagtctcactcctaggtgtttac

SEQ ID NO: 822408 - DNA, 621 bp, Homo sapiens
gagaagaacaaatgaccatgattcttgatttgtttttctaccaaaagtctggtaaagttgtatgtcatctatttattagacatggccctttaccacttgaaagccaggagctgggcytaggagcaaggaagatgagaggtcaaccttgcatttatggattcattctttaagttacccatgtatccacttaacataaatgcactactgatcagctgtattttaagagtatatgttgaatttctttattcaatcaacaaatattttttgagcacttactctctggctatctaggaaggaaaaatacaagcaaggtccctgctctgattggacctatactcaatgatttttttaacagaatgtttaaatcacttcatttataaaagcagggtgcattctagtctgaagatataaacctctgagtataattttccttgtttgtcagcagatttaatttgcattgctcattcttatacttgaaatatcttgtttattactgccagtgctaaacatcttcccaaggctctactccacttgcataaatactttgtacttgtatgatcatttatattagtaatcactttcaattttatccaacaaatacacaaactttctctagaaggt

SEQ ID NO: 822409 - DNA, 664 bp, Homo sapiens
aagctcatcatcactggtcattagagaaatgcaaatcaaaaccacaatgagataccatgtcatgccagttagaatggtgatcattaaaatgtcagtaaacagcagatgctggagaggatgtgcagaaataagaatgcttttacaccattggtgggagtgtaaattagtccaaccattgtggaaaatagtgtggcaattcctcaaggatatagaactaaaaatatcattcgacccatcaatccccatcaatcctgggtatatacccaaaggattataaatcattctactataaagacacatgcacacgtatgtttattatagcactatttacgatagcaaagacttggaaccaatgcccatcaacaataaactggataatgcccaacccaaagacccatcaacaatagactggataaagaaaatgtggcacatatacaccatgaaatactatacaactataaaaaagaatgagttcatgtcctttgcagggacataaatgaagctggaaaccatcattctcagaaaactaatacagaaacagaaaaccaaacactgcatgttctcactcaggtgggagttaaacattgagaacacatggacacagggaggggaacatcacacrccgggacctgccggggggtggggggcaaggggagggagagta

SEQ ID NO: 822410 - DNA, 664 bp, Homo sapiens
aagctcatcatcactggtcattagagaaatgcaaatcaaaaccacaatgagataccatgtcatgccagttagaatggtgatcattaaaatgtcagtaaacagcagatgctggagaggatgtgcagaaataagaatgcttttacaccattggtgggagtgtaaattagtccaaccattgtggaaaatagtgtggcaattcctcaaggatatagaactaaaaatatcattcgacccatcaatccccatcaatcctgggtatatacccaaaggattataaatcattctactataaagacacatgcacacgtatgtttattatagcactatttacgatagcaaagacttggaaccaatgcccatcaacaataaactggataatgcccaacccaaagacccatcaacaatagactggataaagaaaatgtggcacatatacaccatgaaatactatacaactataaaaaagaatgagttcatgtcctttgcagggacataaatgaagctggaaaccatcattctcagaaaactaatacagaaacagaaaaccaaacactgcatgttctcactcaggtgggagttaaacattgagaacacatggacacagggaggggaacatcacacgccgggacctgccgggggstggggggcaaggggagggagagta

SEQ ID NO: 822411 - DNA, 581 bp, Homo sapiens
acaaagcttaactctttcaaccaactgccaatcagaaaatctttgaatgtacctacgacttataaacccgcatttcaaaatatcccaccactttaggctaaaccaatgcacacctttcatgyattgattaatgattttatctacaatgcctgtctccctaaagtgtgtaaaaccaacctgtgacccagttgcctcgggcacacgttctcaggacttcctaagaccataagcctgggccatggtcactcacattggctcaggtttaaatattttacagggcttttgtgtttttctctgcatcaacacagacatagcctccattatatgaaaacgcctagtttctacccagaagaaactacccttgtttgtcatggggagatgacatatgggaaaggaagggagaagaatgagaggatgtcagaggacacaaataaagagaagaagcacctggcaggatagagggggctgcgttggtgccaggaccctgtggcagagtttgctctctctgcccgctgtgctgggaagtagaaagaggcaggatttgtgaggctctctgagcatctttaaaggagtattacaat

SEQ ID NO: 822412 - DNA, 621 bp, Homo sapiens
aaaccaccatatccttaggcacaatgtcatcacctaactctgtgaatttcaaactcactccagcaacccatagggcagtcagagtgggagggtagtagtgtgtgaggccaagaaattgaccatcctttactgataggaagggagagaccaaagctgcctgaacctgagggcccacaggcccattataagagtctttggtaccatttgaaccaaaagagttgatagatcactgctatggatattcacaggttgaaggaaagataccaatgagatcgcacttgttttgacgttggaaacctagcttcattttcagaaccataacaaccaaaggttatctcaggctaggaagggactttttcttctcaataaactttctgttttggaataatttgagaagtacagaaaagttgcaaatatagtacagagagttcccatatgcctttgacccagttcccactagtgttaacatctttcattactatgctacatttgtcamaactaagaaatgaacattggtacagtaccatcaattaaactgcagacgtgattcagatttcatcaatttttccactaatgttccaggatctcatccaggatcccacattgaatttagtcaacatg

SEQ ID NO: 822413 - DNA, 457 bp, Homo sapiens
aatcaaatgggacaatgttgacgctgagtacatttgggtgtccaccggtgtcttcaccaccacagagaaggctggggctcacttgcagcagggagccaaaagggtcataatctctactccctctgctgacgcccccatgttcatgatgggcgtgaaccataagaaatatgaaaacagcctcaagatcatcagcaattgcctcctgtaccaccaacttcttagcctccctggccaagctcatccatgacaactttggtattgtggaaggactcatgaccacgacccacaccatcactgccacccagaagactgtagatggaccctccaggaaactgtggtgtgatggccacggggctctccagatcatcatccctgcatctactggtgctgccaaagctgtaggcaaggtcatcccygagatgaatgggaagattactagcatggccttccgtgtccc

SEQ ID NO: 822414 - DNA, 457 bp, Homo sapiens
aatcaaatgggacaatgttgacgctgagtacatttgggtgtccaccggtgtcttcaccaccacagagaaggctggggctcacttgcagcagggagccaaaagggtcataatctctactccctctgctgacgcccccatgttcatgatgggcgtgaaccataagaaatatgaaaacagcctcaagatcatcagcaattgcctcctgtaccaccaacttcttagcctccctggccaagctcatccatgacaactttggtattgtggaaggactcatgaccacgacccacaccatcactgccacccagaagactgtagatggaccctccaggaaactgtggtgtgatggccacggggctctccagatcatcatccctgcatctactggtgctgccaaagctgtaggcaaggtcatccccgagmtgaatgggaagattactagcatggccttccgtgtccc

SEQ ID NO: 822415 - DNA, 532 bp, Homo sapiens
aaattctcagaaatcagggtcaaatgyttaaattatgtcataaaaagttaccaaaatactgcctatcttttttatcttcaaaccagtggcatagcctacactttgctctctaagatctacccattcttcaaagcacgacaaagcctccctcttccatgaagtattcctcaacaactctagcacacggcaatttctacttcagaacatataagcttaacgataaacttaactcacaaatatgcataaagtctctatgatctacgtgaaagcttagaacaagcatctgtctacattattttttgtaggtattcactataagcagctcaaaagcccttttataaggtaggtacacagtatgtcaactaaaactatcaagggaaaaaagctaattatttgtctaagtatggtcctctatttgcctgtcccattccggcctctagtcccaaaagaaaactaaccccagccccttcatgtcctaccctcaagagaagagatgataactttgtgcacttagtacatgccaaacacttta

SEQ ID NO: 822416 - DNA, 591 bp, Homo sapiens
gtgcaggactggcaggcagccccacctgcaaccctggtgtgggatccacttggtgaagccagctggactccagagtctagtggggacttagagaacctttatgtctagctaagggattgtaaatacaccaatcagcaatctgtatctagctcaaggtttgtaaatgcaccaatcagtgctctgtatctagctaatctagtggggacttggagaacttttgtgtctagctcagggattgtaaatgcaccaaaacggaccaatcagctctctgtaaaatggaccaatcagcaggatgtgggtggggccagataagggaataaaagcaggctgccccaaccagcagtggcaccctgctggaatacctttccgcgttgtggaaactttgttcttttgctttttgcgatagatcttactgctgctcattctgggtcagccctgcctttatgagctgtaacactcaccgtgaaagtctgcggcttcactcctgaagctagcaagaccaygaatccacggggaggaacgaacaactccagacgcgccacgttaatatctgtaacaccccgtgcgaaggtctgcagctgcactcttgaa

SEQ ID NO: 822417 - DNA, 635 bp, Homo sapiens
tactactctggctaaactccatgtcattacagttggctcttcatactaacctgctttcaagggtggatatgctagaagagtttcaatatctggatttccagcagttaccttaagtttccatgtcttagcaaaatggcacattcactcactgaccagcaacaataaatttactgtgctggaactctaacatgacactaaatcttcattctcaaaattcactcccagcattaacaaatgatataaataaccaactcttttcatgtacctgtaatcataccaggcttctgattttacaatccgggtttaagctgtttacatttccaaagtaatcaacttttgctctcctaaatccctcgtaatattcaaagtaaaactgatggaattttttgataagttactacaagtttagcatcactgattaccttcaatgcacttgcaagtgaaccacagctaatctgtaaattaagaattcatctacaaatggaagcaagaaagaaaaaaagttgtttttcttaagcaaagttggaaataaacagaaaatctttttctttaaaggayggtggagtttcaaaaagtgaagttgtctatgcaatttaagtgtagaaattacctgaatcagtaatactaatctctcc

SEQ ID NO: 822418 - DNA, 537 bp, Homo sapiens
gcattcacaactcttttttttcaagacaaggtctgtctctgttgtccaggctacagtgcagtggctccatcacagctcacttgcagcctcaacttcccaggatcaagcaatcctcttgcctccatctcctsagtagctggtattacaggcatgtgccaccatgcctagctatttttttatttttttattttttgtagaaacagggtctggttgtgttgcccaggctggtcttgaactcccgggctcgaagatcttcctgccttggcctcccgaagtgctgggattacaggcatgagccaccacatctggccctgcattcacacctttgggttaagaaggtttcaatatcctaaaagacttatgtataaatgtcctaataccctgaacaaatcataatggacaggtaaaaaactgattttgaattaacattatagtttttcttttaagctgaatactggggataaatacatagaagcacacagaaaccagtaaataatccttttattttgttcccacaactaaagtggtatgtgaaaa

SEQ ID NO: 822419 - DNA, 540 bp, Homo sapiens
taaactgcagcaagaaagccttaacgatttggagaaatgtattctcttagcgtgcagttaatcattttagttactgagggaggttttgaaatctctttccckgcagatatttttttaattggatagattttaattttctagaatgtcatgttagaattctgccctacgagggcaagaaggagggagtgaggatggagattatctcaacaaggtccctcatccagggaccagggcttccaatctttccttctccccccagtcaatttcccttctttctcctttttcttctctctctttctctcatgacattaagttggtttgtgcttacatgagaagcaataaactttgtttctctttgctttatttctcatgaccacatgctttcacctatgtccattctataatgtgccacagattgcaaaatttaatggtaggaacagtgtgtatgtgtatgtaggtgtgtgtatctgtgtagggatgtgtgtgtgggggggtggggtggggaatagtggggtggagctagaaagggagtttcacaat

SEQ ID NO: 822420 - DNA, 643 bp, Homo sapiens
ctgcaccaaaggggtcttaactcatccctgaggtggcaggagatgtcttgaatcatccctggggagacagcactactccaggaggtgtcttcggtcatccttgaggtgtgagcacggcaccaaaaggtgtcttgtattatgcctgacatgtgagcactgcactagcaggtgtattagctcatccctgaggagggagtactgcacaaggaggtgtcttgcatcacacttgaggtgtgagtgctgcaccaggaggtgtctaggatcatccctgaattgtgagcactacaccaggaggtgtcttagagcatccctgaggcgggagcatttcaccaggaagtgtcttgcatgttgcatcatccctgaggtaggaacactacaccagcaggtgtcttagatctttcctgaggtgggagcacttcaccaggaggtatcttgattcatccctaaggtaagagcagtgcaccaaaggggtcttggttcatcccttggggggggagtactactccaggaggcatcrtgggtcatccctgagatgttagcagtgaaccaagaggcatcttgtattatgcctgagtgtgagcactgcacttggaggtgtcttggatcattcctgaaggttgagcactgtaccagcaggtatctt

SEQ ID NO: 822421 - DNA, 610 bp, Homo sapiens
gcagactcattctgctgaaataggagatagcagggacagctcaastcgtgtcacatgtgtgggccttgattcttcttgacatggcatcctctggggattctcagtaacttatgtagatttggtgcatttttaaaagaagctaaccattatcccatcaagtatgtatgatgaactgtttatgtttccatttgaaccttctgagtctgtgagggtatttaattccatgaaatcctgcaggattctggggaaacaatttactggtttacatcagtccttcctgaacctccaacaatgcagttctttcccgacaagtctcccagtcctgtagctctggatggatgtttagatgaagcaagagctttgatgtgacagaaattaccaaggtgacttcttttactgccggtctagtgatcctagcacccgggatgatatgggtggaatagctagggtctggacagctcgctctctctctctctctctctctctctctctctctctctccaagtggcttcttgacatggctagcttgggttcatcatagaattgtggcctcaaggtagttggacttctcacataatggctgcctaccctcatcccctttcaagtgagc

SEQ ID NO: 822422 - DNA, 622 bp, Homo sapiens
aaactaaaacggaagaaaagagaacaaagatcatctgaaggaagccaaaggaatctccatgattagccccygaattgggtttgttacttctttagagaccaacttggaatctaaacttcctgaaacttagggaaaatcacatgtattgaaatatagtgaaggaatcacttttctcacgagaaattcacagaatatttaggaacgaatgacagaaatttagtgctaggtttcacaaactggggttagggttcattatcatctgaaggtcaaatatgaggttcaagactttcaccctcttttgactatattcccaggtcccgggggtcttccccattcaacttccctaccacaagggatcctagtggggaaaaacgagagaagtggtgactggattcaatttcctcgtcttgggtctgaaacaatcaacatccacaaatgcaagtgaccttcttagggtcatactggccggggccagaccggggccaaaaccagcctggtttctcagccaaaggtggcagaaataaagtccttttagtagcagggaggagataccttcaaccccagttgtagaaaagatagagaaacgctatttatatgggtgagtcttatatggaaagcgtct

SEQ ID NO: 822423 - DNA, 608 bp, Homo sapiens
gcaatactgctcaccttgagcccagagcagctactatccccggcccctccgctggctttctgggaggycccaggaagacgtgacctcttgtcaggcactcgtgggctcccccatagctgccggggtggttcttgcccctccaaaatcacacatgctcctcggcaaggatgcgtcagctaacacaggggatcggggctctgctttccttgcgaatgattttgttgcggaggggacaccacgtggctcatgctcacacctctgacacttccatgtgtctctgatttttaaaactatgaggaaacacattaggaattgccggtgcacagcgtggacacaaagcccataaggggccttgctggtggtgctgggggaggctctggggcctggggtcctgccagagggaagcagggagcagcccaggaggatgggtggcactggggaggcacccggagactggcactgctctccccacccacatgttccctgggcagaacctcaactaagctggagacacctacagcagcagatgtgtgtccctttcgtcccgcttgacttcatttctctctcccgtccttcaggagaagacagacctcccagggtccccctcg

SEQ ID NO: 822424 - DNA, 623 bp, Homo sapiens
gaaccatcgctggcccttcaccctgtttagaaactgaggccaggctgctggggatggtggggggtcctcggcaagctggggtggaggcagcatccaggctgaggatccagcctcaggcctcggcatccgtgtgggcttagcctgcctcctgcagctccaagccaaggcagtggtctctgttcctcacgtgtggacgtcttcctgtgagatgcctcccggaaagtccccactttgctgcctgtctccacaaccccctgtcagccactagtgaatgacggtggaccccttcggaatctgcccctccagccctctatcgccccacctggccccggcactgccagctctctcctggttgtagccttaagaacggtccccctgctctgcccatcagccctggtccctcctctgctcagcaccctcccacagcacccacctcacccaggtgacaaccagagtcctcacagtgggcacagcccctgcacgatgtgtcactatcacccctctgacctcataygttactgcacttcctcttgcccctccagtgtccccactagaacatgagctacgagagggcaggattttttttttcttttttcgttttcttttctttctttctttttttt

SEQ ID NO: 822425 - DNA, 556 bp, Homo sapiens
ctgcccacctcagaaatgtgagcaggcagctggggggcatttggactctarccgggacaacctagtggccgggcaggggatgcaggcaccacaggtcacagtagtttgctacgagtgtcagcttttaaaattttaaataatcctcttattgtaaaattgaggacattatttgaagcaacgcaaaaaccatgtaaaaaaaatgtctgtaggatatgaatagcatgtttctttaaggcaatatctgaagaaaatataaaagccccaggtgaaagacaccctgggagcagaggtgcccctgagggtcggctgccccaggacagaggagggctctgctggtgcccaggtggcactgcctgtcttgatgccaggtgcaggggtttagaagaaaagacaaggaagaaaataaaactcaccaccgacattcctaccactagagttacccactgttcccaatcaggcatatttcctcccaatcctgtcctctctgtgtatttggtaattgcgtaaaccatctctcccataattaatctcctttaaaatttggaataatatagtt

SEQ ID NO: 822426 - DNA, 619 bp, Homo sapiens
tccaatgtgggtaggcagggatggatgtagggaaattgctagagaggaaaagaaggacttctcgcaagccagtacaaaaccaagacctggattttctctttccaytgcttgggtcacattctatataagcaagagttgctgatgatttcgtccaccttcttcacacaaaagtagcactggcttacatgggagctcaggactgcacagacagctctggggacggactaggggagatagccgtgtgcacacagcctgccgtgctgcagcctgagcctgccaggtggccttgtagcatgggccagaatgtgaccaacaggcagggcttctgccaacttactagtcaaatggttggcacagaaatgagctgctcatgtgaaagcagtcaatagccagaaactcactgtaatccaccctctaccctatccgtcctctgccccatccccgtctcacacagtctcagccactttctctcctagacccctggctggactgttctcaggcctgtgctaagtaaaggtggaagacctagagagaagttcgaggtcagatactggcctggacattgacccaaagctgagcagtggcatcctgtgcagggctgcttctcaagggcatgttc

SEQ ID NO: 822427 - DNA, 627 bp, Homo sapiens
atatttcataggggttggtgggcagactcattcatgttcccatcccaggggtgcaggggacccttctcccttccccacatcagcccagggctacagaagctcctcaggaggcaaggaagggaatggagaggacaagagtgcctacagagtgggaaggagacaaggattctcaggtatttatccagggtaagggcaagggcttttctgcagtccaggacattagaagagtcctgaaccaagaactccacccctgccccgatatcagctgtttttactgactgagctgttggagaacagttttggtgtgcggaaacagtgagatccctaaccctacacccctgaacccagcagatatatccacactgaccagaaaggactggctaaccacaagcctgcctgtgcatggcagggaaaggaaagccattcttgagtaaatggtgttcaaaggttgggcaatatatgtgtatggtgttctcctgtggacataattgtgcacaaggrtcagaagaaattgctttcattgggcaagctacttaacctgtctaaagctttgtttttttatgatctgtaaatgaagacagatcctatctcatggctctgcacgtcacacagcgatagcagacaggt

SEQ ID NO: 822428 - DNA, 598 bp, Homo sapiens
agtgtttcagagcccaacacccaaggagcagtgcagggatsgtgcccagttacaggggacagctcagctctgaatgttacaaagggcacttcatggaccaccaccttttctctgcttgctctgtacccctaaagtactacaaggcatttttggttaataataatttgaatactatgtgatcttgtagattctactgcgtttggctagctaatgtctctaagtagcaagatgatttattttttctggacaataccaggactatatgctgatacaggactggcttgctctaaggatcagattttccagtgtaaaatatatactccttatagggttgtaagagcagaagcccgtcatagcctgtttctttttgctctctcttcagccagcagttggcctggatctttgctggtagacacagggaatgttctccttgatgagtggttcccaccctggcagcctcagatcccaccatgttggcagggatgctgaaatccacctgcctatcagcctttgtaaataacaaaaatcacaagtggctctagcatttatgtattctatgatattgggactcttgtgatataaataatacaaatgcttt

SEQ ID NO: 822429 - DNA, 465 bp, Homo sapiens
tccatggtgccactcatccaagctgcctaattagtggtatcaagccctctgtctgaaaagactgccttggatttayttagcacccatcttcctataaatgtctcccaaaagtcttgggagttcatctcctttgcattttcaccatatcacacagaccaccatggccacacattaatgcccctgccaccagcctccatcgtccaccagggataagcaagaaaacattgatttgggacttctgcagggtccttccttcacatggtgtatgctttgaaactgccacgtccccaatccaccaccatgggtggcctccttcaaagccctcagctctccacaggaaacctcctcctccaggacacctgtcatcagctccccagctgccttaatttccttcctcaaaacactctacattgcaatcatgcgaccatgcaattgttcagcatatatgttagtttcctatgactc

SEQ ID NO: 822430 - DNA, 613 bp, Homo sapiens
ccaggattttaaattagatccagccagttccagaatcattactttttccgttccgtatgcataccaggctgcctctttctagattatcctccaaaaagccctggggaggyggcagcagcatgagcggcagacaggcggccaagaagtgaggccccagacagggatctgagcgtgatctttgcccttgggacgcaaggcatccatccaagaggtcacagaaatcagcagctttcaccgggaagccccaagtcctgggattggggtgctgaagggggatccaaaaaaaacagtcattgatttggaaggagatgctgttctccatctcagccagctgttaaagggacatggattgaactcccaggcagggaggggcattttgtttcccttggccacatcagcatgtttttacagttgagagagcaggagatgactctccagcctgtggcagagagaaagtgcccttggcccaactccgtggaagatgttccccaccccccttccaggagaagctcctgctggtggatgcacgaacccagctggtggcgacacaaggccagtgggcactctctgccttgctgaggcctcagcctcctggctgcgaaggccccgggtt

SEQ ID NO: 822431 - DNA, 587 bp, Homo sapiens
tagcaagacagaaaactttcaggcaataaccatcctactccagccaaacacccaagaaaaactgtggctcagccactacccacaccagccaaggtcaagtgggagyctagccttgcaggaatgtgccccaatcacctgtcaggtggtgtcagagaaagttgaatagggagccaggacttctatccccaccaagcagtaacaagcatctcccatcactacatggtgcctttaaagatcacctggtcagtctggatttttacccctaactcagagttataaggcctcccgctctctgctagtgtagtctcaaaggagagtggagaaccaggatttcaccacagcccagtgtaagaaggcccacaccccatatcagtggtgtcagttgaggctgcatggggagcagaaatgagtcactcatatctttttcagctagggaggtatcagtagataccaacactgagagaaatgagatgttagattatctgacaaagattctaaagtagctgtcataaaaatgcttcaatgaacaattataagcacacgagaaaccaataaaaaattgaaattctcagcaaataaattgaaac

SEQ ID NO: 822432 - DNA, 609 bp, Homo sapiens
ttctaccaaaacatggctgaaaatttttggtgtgtgggggtgtaccctgggagcccatttagaagctacagtgaaaagagccctcattgcttcagctttgagccatctgggccctcscacctggctcatttcacctgacagtttctaaaacttctcacaaggaatttgtcggtttattacacatccatagaatgccctgaagagctattccaaaagaagagcttgaaagtcgaacgctaagcagaaaaacagtgacttccaaaccacagggtttgtttgaattatcaacttagtcctttattaacaacttcaaggtgcaaatttgtgagattccagacaggcagttcaatgagcagctggattttgctggttcccaagagcaaggaaaattcccttgttttaaagagccagatccatttggaatagtctttcttccccacatattacagcatgaacgtgactctaaagtacctgccgagggtctttctttttgtgacggtgggcgctgttccccactgtcgtggacttctcacagcgctcagtgtgcattcagttgcttctctccataacgcctctcagctaactgtgctgtttctgtgctcctgggtt

SEQ ID NO: 822433 - DNA, 575 bp, Homo sapiens
cctgagatggctcagggcaacacacggtgagaggacccaccagagacggccaaagtggctttcatatgagacccacttttgtgataacccattaatccattaatttatgaatgggtccattcatgagagcagagccctcatgacccaatcatctccgaaaggccccacctctcatattgctccattggtatccaagtttccaacacatcaacttctgaggaacacatttaaactacagcaaataccttgtcctgaacttttgaaactttaaagcaagaaggagactctttagttctgtgcattcttccctgttatttcttgcctgaggcaatcgctgtagccttggggtttttgctccagttgggcacccctgagcttaccacggtggctagaaaaaacatgcccttactgacataggcctgggagcccatctaggagccattcacagtggcaaggggtggcccttattttgcatagccaatgagaagactcccctggctatgagggtggagtccatcttaaccaaatgtcaaggttgctgccaakggaggaggaatggaatgaatgtgggggaa

SEQ ID NO: 822434 - DNA, 585 bp, Homo sapiens
gcacagtttgccaagctgtttgtgaaagaggactttatatgtgaccactcccagggtgtgtcaggaagagttycccctgatgccagaattcccttgtgtcagagccatttgtaaggtctctgagtttctaccgttgccctctgcttggaattcaaatttaaagctctctttacagtaggagggatccacaggaaaatagcttctgttgtggatttgaggaacttacaacttctctagaaactctatactcaaataaatacattaaataactgggggcttgatagagtaggtgtttctgactattcagtgaggcaagatttagagtagggagaggtcctggatagttttctgtaatagctttttattttctttttccttttttcctttcaatgttttaattggcctataataactgtacatatttcttgggttcactgtggtatttcaatacatgtatactatgtgtaataaaccagccagggtaattagcatatctatcccttcaaacatgcatcgtttcttttgttgggaatattcaaaactcactcatctagctattcaaaaatttacacaaaattgttataa

SEQ ID NO: 822435 - DNA, 671 bp, Homo sapiens
gtctgtgctcagtggggctgagggatccttcgtgtcctccctggtgaggagcattagtaacagctaytcatacatctggattgggctccatgaccccacacaggtgcgagtatatcctcccctctctgttacctctcaaggtactgttgttgcccaggcgcactccctgtccccagtccctgcccaggaagtactttagggagcactggagctcagattctgggggacatttgggagaataggaagtccatgaggcagctgaagagctgaattctacggagatccctagtctttaaagaaaattagtcggactcttgtaaaacttttacataattctcaagggaatccttacaaatcaattatctgagcttcagggagtctgtatctattattctgagggaattctaaattaagataggatcaaattttgcccccatacagaatagacattatctttgaggttcgcaggctaatcacaaatgctacaccaattattgttctgcaagtaacatattaccttgagtgattccaaagttcttgtgtttattggttgggattttcccaaagcaatgaggagttaaggaaaagattccagtgcagaggactctagggcagcatctggaagatcagaccaaaatccctgatgctggggaggaatcaggtgttacagc

SEQ ID NO: 822436 - DNA, 601 bp, Homo sapiens
ctgctggcgtcaagatgtgaactccggccatcgccagggatccaggcctgagtgcaaaggtggggcaggaagcactttaggaccagcctgcattgtasccacgaccccgtttccacttacagctgggacttcttgagaaaaaagagcatataaaatatgctgctgtaagcaaatgctcatgaactacagaaagaacagtgagcccaaccaagctgagcccctgggaccagggttctcccacccccaccctggccactgtgtgtggtcaaggcccagctctggctgtgggtgatggagcagtgagacaaacactgggccaggacccagggcctgagtttgtagcactggttgtagccttgtcctggtaaagtcaccttgctggtctgtgaccttatctggtgaatcagaatgacacgctcctgcttgtaggcttatttgaaggactaatgagatgtgcgtgaaagtagaaggtctttaacattgtcacactcactttcttcatgaaggaaccaagttcaagggaactgggtgaactatctgcccacttgcaaatgtctgagtccttgagaagctgacagctggggccccactgagtcacatg

SEQ ID NO: 822437 - DNA, 524 bp, Homo sapiens
gggagaagggtccagaggcacatctgttccccaaacaaggcaatcagctccacttccgccaaagtgaaggccctrggctggtgctgctgcccctccccaagcccttgctcctgccttctctacgaccctacaggcacatgctggtccccagcccctcacttgcccagctctggctctcctgtattgcctctttgggtggtgagtgcaaagaggatcgggagaggatggaatttcctgattggccccacatgccttgactttggtccccattatccccaccatgctagactctgtcagttcctctgccccggccagggatcacctaggacccccaacccccagcatcaacatagagtgcagattaatagccccctgcacaggtgggagagagtgggtagaaagtaaggccatttacgaaggtcattaacacggaccacaatttttaagaaggtgttggccagatgaggcccacagctcccatccccatggtgggtccaggtgcggaggagctggcctagacggga

SEQ ID NO: 822438 - DNA, 524 bp, Homo sapiens
gggagaagggtccagaggcacatctgttccccaaacaaggcaatcagctccacttccgccaaagtgaaggccctaggctggtgctgctgcccctccccaagcccttkctcctgccttctctacgaccctacaggcacatgctggtccccagcccctcacttgcccagctctggctctcctgtattgcctctttgggtggtgagtgcaaagaggatcgggagaggatggaatttcctgattggccccacatgccttgactttggtccccattatccccaccatgctagactctgtcagttcctctgccccggccagggatcacctaggacccccaacccccagcatcaacatagagtgcagattaatagccccctgcacaggtgggagagagtgggtagaaagtaaggccatttacgaaggtcattaacacggaccacaatttttaagaaggtgttggccagatgaggcccacagctcccatccccatggtgggtccaggtgcggaggagctggcctagacggga

SEQ ID NO: 822439 - DNA, 645 bp, Homo sapiens
gatcttaatggagctttgggtacttgggatgaaaacagaaaaaaagagttgaggaagaagtgctaatttaatataaatttctagtacacaaaatcttttagcaaatctgagttgtacatctccgtgaaggctaaataacaccaactcctcaaacatgtccatcacctaatccctggaacccttaaatgtcattttatacggcaaacgggactttgcatgtgtgattaaattaaggattttgagttggggaggttatcctggattgtccaggtggacccaatgtaatacaaggctccttatatgagaaaggaaagagagtcaaagaggaagaaggtgatgtgacaacagaaccagaggttggagtggtgtgctttgaagacggttgtccccaggcaactagaggaaaaggaaagaaaacagattctccctagagccttcagagagcccacagccctgcgggcacctcgctttcagccctagtgaaacccatttgggacttctgatctctaattgtaagataataaatgtcttttgtcttaaatagagctttgttacagcagcaacaagaaactaatataattgcttaatagattaaggcagsggtccccagtccccagtctgcggcccaacaggaagcgggcccac

SEQ ID NO: 822440 - DNA, 548 bp, Homo sapiens
ttgactcttaaacaatccaactgcaaaaagacatttttgagaaaatcagagcaattggaaaatggactggatattggattatactaagaattactgttaattttctgagatatgataatggctttgtagtgtttttttaagtccttataatattagaaaaacatacagaagtatttatggatgaaattacataatatctaggattcatttttaaatacttccaaaaaagggggagagctatagatagaaccagattggcaaatatatttcttattatagaaattttctaacatatacaagagcagagaaaatgatataatgaatctgcatgcacttaacttcaacattttgccaatcttggttcaagctattccttccacgcatacttttttcttctgatatattttaaagtaaatctcaaacgtcagagaacatatcatttcagtcataaatatttcaagatgcttctctaagaacattttttaaatataaccaccaaaccactatctcacctaacaaagttaawaatttttaatatcatctaatac

SEQ ID NO: 822441 - DNA, 622 bp, Homo sapiens
aaccaaaaaaagcccaggaccagacagattcacagccgaattctaccagaggtacaaagaggagctggtaccattccttctgaaactattccaatcaatagaaaaagagggactcctccctaactcattttatgaggccagcatcatcctgataccaaaacctggcagagacacaacaaaaaaaagaaaatttcaggccaatatccctgatgaacattgatgcaaaaatcctcaataaaatactggcaaactgaatccagcagcacatcaaaaagcttatccaccacaatgaagttggcttcatccccaggatgcaaggctggttcaacatatgcaaattaataaacataatccatcacataaacagaaccgtgacaaaaaccataagattatctcaatagatgcagaaaaggccttcagtaaacttaaacagcccttcatgctaaaaactctcaataaactaggtattgatggaacggatctcaaaatartaagagatatttatgacaaacccacagccaatatcatactgaatgggcaaaagctggaagcatttcctctgaacactggcacaagacaaggatgccctccctcaccattcctattcaacatagtgttggaa

SEQ ID NO: 822442 - DNA, 622 bp, Homo sapiens
aaccaaaaaaagcccaggaccagacagattcacagccgaattctaccagaggtacaaagaggagctggtaccattccttctgaaactattccaatcaatagaaaaagagggactcctccctaactcattttatgaggccagcatcatcctgataccaaaacctggcagagacacaacaaaaaaaagaaaatttcaggccaatatccctgatgaacattgatgcaaaaatcctcaataaaatactggcaaactgaatccagcagcacatcaaaaagcttatccaccacaatgaagttggcttcatccccaggatgcaaggctggttcaacatatgcaaattaataaacataatccatcacataaacagaaccgtgacaaaaaccataagattatctcaatagatgcagaaaaggccttcagtaaacttaaacagcccttcatgctaaaaactctcaataaactaggtattgatggaacggatctcaaaatagtaagagatatttatgacaaacccacagccaatatcatactgaatgggcaaaagctggaagcatttcctytgaacactggcacaagacaaggatgccctccctcaccattcctattcaacatagtgttggaa

SEQ ID NO: 822443 - DNA, 582 bp, Homo sapiens
tgcaatattacatctcatgcactatacataacatgttttcagcactggatgccatgatcaattgttgtatgcctgaatagtctttagagaakcatgctttcatttagtgtgacatccaaaagaatgctttagattgtactgaggaatagattctgacctactcctattatagatgtaatcagcccagcaaagttatgttgacattttgatagactccattccactgtattatactggtgtaacacgcctggacaaaaacctaaatatcatagttgttcataaaatcctttgcctatgtttcatagaacgaaaaaaaaaatcctgccaactttctgatgatccttcaagggcaacatttcaaatataatacccttctctggacgctgaatcgtatttcagttattacatttggatcaaatcccagaacaaaacattttaaaaatgaaatcatgcatgaaaagttataattcagcactatctacgaatctatttagacctagccaaaatggaccattttatgactagataaactgaaaagtgccgttgattagcctagaacagcaacataaaaaattcttagtt

SEQ ID NO: 822444 - DNA, 604 bp, Homo sapiens
accctggatccctccctgctaacaccagggccacaagagcacatcgcgcatgcagagccaatygtgttgatgttttctcaggttttctgttgtctgaccatccagccaaccagtttttttatgcagtcgttcatccagccctctacacagccaaccaatctccatgattgagtctctgccacgggacatactccctgctctcaagagactcatgcttcgaggcgggggaaagggggcataaataagaagcaattaaactggctctgccatgaggagtgggggcaagaggtgagctgaagggaagaacagtggagggaatgattgcctcaatctggaggtcagaaccgccctaccacggagatgacctgagttttgaaggatgcgtagaagtcaccatcagacaagagggagggcagctcaggcaggggaacagcaggggcaaaggtgtgggacagcactgggcacttggggactcactgtgactcagcctgtgactcagccctcctgtggcaccagggctgctggatggaaagggaagagcagggaaggccagagccaggcagtggggagcgagggcaggaggggagatgggaaagagggcctc

SEQ ID NO: 822445 - DNA, 594 bp, Homo sapiens
acctcctaatatgtagtgatccctccatatctgtgggggattggttccaggattcccccaagataccaaaatctatggagcctgtctcttatataaaatagtgcaatatttgcatataacctatgtatgtcctctcatatacagttaacccctgaacagtgcgggggtgaggggtgcccatcccctttgcagttgaaaatttgtgtataacttttgactccccaaaacctaactactaatagtgtcacaggatctttgggatgccgcttcaccagccagaaatcacggtggctggtggcaccttctgcctgagtattgcccatgcccactgggcttgttcgcctactcggcttggcatgctgtgcttggctcacactacaagcctggatcccacacctgccaagggcgagccaggcgcagagctgtgaggggtgtgtgggtgtgtgagcatgtggtccagccaccttgcacagccrgctgctgtagcggggtgggcagctccaggcactggcacaggtgccagttctgtgcaaggctgcagctggaccagatgtactgcatgcagcctctgctgtggaaacccgcatctggatg

SEQ ID NO: 822446 - DNA, 651 bp, Homo sapiens
ttttttccctattttatattattatagggctacaaataactattgaaatagcaaaaatattgaaatgaaagggaagaaaatatcatctccaagttgatgataagcactgtataagaaatctaagattaaacaaaataaccagatgcattggtttacatctgtaatctcaatgctttgggaaggtgaggtgggagaattgcttgaggcatggagttcaagaccaccctgggcaacatgatgagaccccatctctacataaatcaatttaaaaacaaacaaataaaatttaacatggaatatacctattggaaaaataaggcagtattgttatcatagcaaaaaatataattgtacaaatttatggttgttatgagttgaattgtgtcccctaaaaattcacatgatcaagtcctaaaccccagtacctcagaatttaactttatttggagattatttctttataaaatgagaaatttggagacaaaccccaatatagggagaatgccatgtaaagatgaaagcagagataagattcttcaagaaagccaaggaatacaaaacattaccarcaaaccaccaggagccagggagaatcttgggccagattctacttcaactctgaagctaccataatcttggattcctagctat

SEQ ID NO: 822447 - DNA, 651 bp, Homo sapiens
ttttttccctattttatattattatagggctacaaataactattgaaatagcaaaaatattgaaatgaaagggaagaaaatatcatctccaagttgatgataagcactgtataagaaatctaagattaaacaaaataaccagatgcattggtttacatctgtaatctcaatgctttgggaaggtgaggtgggagaattgcttgaggcatggagttcaagaccaccctgggcaacatgatgagaccccatctctacataaatcaatttaaaaacaaacaaataaaatttaacatggaatatacctattggaaaaataaggcagtattgttatcatagcaaaaaatataattgtacaaatttatggttgttatgagttgaattgtgtcccctaaaaattcacatgatcaagtcctaaaccccagtacctcagaatttaactttatttggagattatttctttataaaatgagaaatttggagacaaaccccaatatagggagaatgccatgtaaagatgaaagcagagataagattcttcaagaaagccaaggaatacaaaacattaccaacaaaccaccaggagccagggagaatcttgggccagattctacttcaactctgaagctaccayaatcttggattcctagctat

SEQ ID NO: 822448 - DNA, 418 bp, Homo sapiens
ggattatgggagatacaattcaatatgagatttggggggggacatagccaaaccgtaacacccccatttaaaacacamctcactgtgacaattgattccatgtgttcaggactagaatcacagcatcagtgaagaagccaagtatctgccagagaatttggccctcaaatgaatttctccatggacttttaaataaattatttttcttacctcatggcaaatgtttaaagaagattttacattaatctttagcattaaaaattaatcaagataaatgaaggactcattactggagctgaagtagactgttttatcagaaagtcaccaatctcagataattacacagaattttaaacagaaggaaagaaagtggagcttgtttgggaggtgcttacttgccaccctatgtttaaaggca

SEQ ID NO: 822449 - DNA, 588 bp, Homo sapiens
aaagtatagaggtgtcattattatacattttcttcctaagtgagtatgatgaactttatcggttgaaagattgctgctgagagtcagtggcactgagtcatattttaaccttttcaatatgacagaataaaccattagctgtaatcttattcatattgtttctgtggttgtcagagtctgccacaaagtcccagcactcccttcgtcattccaaagcatcacaattagtcttaatttctactcccacttcatctgagataggactcttttgtctgtgctaacactgacaggttttcaaactgtctttttaaacattatactttgtatttgtaaggcccctttccactgctagagccactggaattgcactttgaagtttgcatataatcctttattagtcttaatatgtgaggatcctaactatacactaaggcataaagaattccctccattcagacaatgcccccaatcctatgaagcagggagtgaacctggacatgaagcagggagraggaagtagctggatggtcagatggagccattcctccatgatgtgttcaaaatgatttcttatacctccagtgaatt

SEQ ID NO: 822450 - DNA, 632 bp, Homo sapiens
caacaattcaattagaaagcgacatgaagttctctgtgagggaacgctggggaattaccacacaatgaaccctaagcattttggccttggggtggagaggkgtgagaaaggccccagcagggacccccagcggttcctggatacagggcatgcctccctagtgggaagagtcaccccttccagcacccaggggagggaggagggaagaggttggcagaaatatgcaaatgcggagtgggtgtgagcaggaatgggccagggcaggcagggaagcccggggactggggcgggcgattgaggaacctgtgttttgcttctgaggtgggttggcttgggatgtgggttgcttggtagggttggagaatagatgttgaaatgtttccccacacaattaaaattcagacatgggtggtggcgggagaaagtgggaaggaggccacaggatgtggtggaaaaaaaccaggcttcgaaagcccaccccggtggctttgaatcagttttcccctcttgctttctgtgtttgagcttaagttcccttagcctcaattttcttgaccataaaacagagctcagtttgccagttagcagagcgacggtgagcactgcatcacgtagcgtaatattgggcacac

SEQ ID NO: 822451 - DNA, 612 bp, Homo sapiens
aatcaactgcagcacttcagcactccctctgccatggcagacattaccaatcaactgcagcacttcagcactccctctgccatggaggacattgaacccaccccttcaggcagcccctatcacygctgtggggggttggcacataagactaaacttatttgctactcctgatatagagataatattttggatgggaagttagaggaaaaggagggcagatggtctggtggtcagcaaagccttggagtctggctgggaaaggcatttcaggccgggcagtggcatacccagcattagctaacattcattgagacttagaatggttcagcccatgtggtaagtccattacatgaattaactgattaaactctgtcaacagacaactgaaagaggcaagtgctattattattcccttttttctttgaggcacagagaagtcaagtagtgtgtccagggtcacacaggtagggagtggttggtgtgaacccctgtgatctgaccatagagcttgtgcccttcatcccccacagctcactgcctctaacagacaaggaggggcccagtcaggccagagctaagggttaatttagggaagaggagattcatttaggg

SEQ ID NO: 822452 - DNA, 612 bp, Homo sapiens
aatcaactgcagcacttcagcactccctctgccatggcagacattaccaatcaactgcagcacttcagcactccctctgccatggaggacattgaacccaccccttcaggcagcccctatcactgctgtggggggttggcacataagactaaacttatttgctactcctgatatagagataatattttggatgggaagttagaggaaaaggagggcagatggtctggtggtcagcaaagccttggagtctggctgggaaaggcatttcaggccgggcagtggcatacccagcattagctaacattcattgagacttagaatggttcagcccatgtggtaagtccattacatgaattaactgattaaactctgtcaacagacaactgaaagaggcaagtgctattattattcccttttttctttgaggcacagagaagtcaagtagtgtgtccagggtcacacaggtagggagtggttggtgtgaacccctgtgatctgaccrtagagcttgtgcccttcatcccccacagctcactgcctctaacagacaaggaggggcccagtcaggccagagctaagggttaatttagggaagaggagattcatttaggg

SEQ ID NO: 822453 - DNA, 564 bp, Homo sapiens
tatccagtgcatcagggtgaaccgttgagtgtgtctgggttggagaggaagaggtgaaaaaaattcattatggctgacacaatgctttaaattactgtgatgaaatgattattagycacctgaaagttgatatgaccagacattttacaaatagcaggtttgacttctgtcaatgagtttaattccataaaaggtcaggttattttgagttatgaattgaatttttgtatcttagctttttaaaattaatatttattaccaaagtgatggatatgacaacagaggatctctgattatttccataaattccctttatttaatatttgctctctgtgctcacaagggcagttgaaatattgaacatccttccaccatctgttctcttgtccttggattacagacggtaaagttatgtgtgtatcttctgtgaactttgagagggttttatctggtcctcggagtggtagaaatgtcagagcctgattgttttttgtcagtgaacttttgattgcaaatagaagacacccaactcaaagtggcttaagggtaatttcctggctcgtg

SEQ ID NO: 822454 - DNA, 639 bp, Homo sapiens
agcagaaatcaagagaggttaccagatatagcaacaaaaagaaaatttatttagcttgtgcacaagggaaccaacactgtgtgtagggttagttttatagagtctttctatagggaagggtttcattagggcaggtatagaagaggtttctctagtgcttgtgcagtaattcaacatgcttcttcatagacagcatgtaatattagcattgtaatctcctcacctgggtgtgagttttagcattaaaatgaggaaggggtaactcgaagttgaagtttaagtctaactgcacatgtgggaccccaggggagtccatagccctctaaagcagcacttgtgcttaataacttcttgggtattttgttgctgaatggctggaagttaggtaagcctacagcttgattaagaggcttttgttcttttattctagaccacatcgaaacagaaaaacagtcagcctgcgtgtctcagaagtgtcaatgttttttatggcatagctttgggagttactagtcacttctggtatctcttagccagstgatccctcgttcagtgtgaacatgaactgcataaaggtaatgataccagaaagtaagaatcactggggtcaatcttggatggtgagttccacagaaatcc

SEQ ID NO: 822455 - DNA, 509 bp, Homo sapiens
taaacttaaataacttgtactaacttgttataayatgtctgaagagaatctactttgagggcctgaggagggtaatgtatcagttcgaatacagcccttatcatagtaacatgaattctgctaaaactgaagcaagaacagacaccaaatttatggtgaagcttgtgtggaagaatgatgaaattatcgatgctttacagaaagtttatggggacaatgccccaaagaaatcagcagtttacaaatggacagctcattttaagaagggataaaatgaggttgaagatgaagtccacagtggcagagcatccacattaatttgtgacaaaaaaattcatcttatttgcactctaactgaacagaactgatgattaacagcagaaacaatagccaacaccatagacatctcgattggttcagattatacaattctgactgaaaaattaaagttgagcaagctttttacttgctagattgttaaaactgttgtgcccagatcagctgcagac

SEQ ID NO: 822456 - DNA, 594 bp, Homo sapiens
actctaagctagctttttcttttcaaataataaagcttttttaaaaatctgcaaaccagtactagttaaaacagctgcttacatttcagcatctactcaatgtctcttgctaaattaagattctttgtttgaaagagaaataattattctatctttgggctttctgtaatctaagtttactgtgaaaaaagagaattactccattttggtctgtgattcaattgctcaaaagttaaggattggaaagtgaaggagtgaatttcagcaaatggactttctctgggaagaaatctttggtccatttaccataggtaggcaaccgctactggccattatttctaaagtagccctgctcagggctcagagactgcagtggtaaagctctgagagcttactctgtcactgaggcaatctgatcgaagactctctgccacctcagaggagagaaatccagtgctcatgcgaccttgrgacagggataattttaagtatggaagtaaaatatggaattttctgaggtttgtttgagcgttcactttcccatttgccagggattattttgtgtgtttatttttaccatagttacatgtccat

SEQ ID NO: 822457 - DNA, 420 bp, Homo sapiens
tatagtatagtactataatattatattatcatatatacagtataatatctactatataatagtattataacactataataayaaaaaaaatattattattactactacttttgcttaagccatcttttcctcctcctaatctaggcattccaaccctcaaaatatgtttcttgtgttttcctatgccacaatcatctaaaaaataaaaggactgtctattcctgtcaatgatttgacagaatcctcaggcattgctcatgaataagtaatcttagttgtgatatggcatctaccatttcccttctgccctgttcaggtgcttttgaattctctgttcctctcttctgcaggcttgtcacccagggtatccatgccaagggcgctactggcagaaacatcagtgtggccggtgggcttaac

SEQ ID NO: 822458 - DNA, 420 bp, Homo sapiens
tatagtatagtactataatattatattatcatatatacagtataatatctactatataatagtattataacactataataacaaaaaaamtattattattactactacttttgcttaagccatcttttcctcctcctaatctaggcattccaaccctcaaaatatgtttcttgtgttttcctatgccacaatcatctaaaaaataaaaggactgtctattcctgtcaatgatttgacagaatcctcaggcattgctcatgaataagtaatcttagttgtgatatggcatctaccatttcccttctgccctgttcaggtgcttttgaattctctgttcctctcttctgcaggcttgtcacccagggtatccatgccaagggcgctactggcagaaacatcagtgtggccggtgggcttaac

SEQ ID NO: 822459 - DNA, 420 bp, Homo sapiens
tatagtatagtactataatattatattatcatatatacagtataatatctactatataatagtattataacactataataacaaaaaaaatattattattactactacttttgcttaagccatcttttcctcctcctaatctaggcattccaaccctcaaaatatgtttcttgtgttttcctatgccacaatcatctaaaaaataaaaggactgtctattcctgtcaatgatttgacagaatcctcaggcattgctcatgaataagtaatcttagttgtgatatggcatctaccatttcccttctgccctgttcaggtgcttttgaattctctgttcctctcttctgcaggcttgtcacccagggtatccatgccaagggcgctactggcaraaacatcagtgtggccggtgggcttaac

SEQ ID NO: 822460 - DNA, 584 bp, Homo sapiens
gctgatacaggcataaactctcaggttaaacttctctctttgtagtacaagtttcaatttggattttaaaaagcttgaggccatcaattttcacatctttcctcactcccatttcagaaatcagggacccaagtttaggaaaatactggcaagttatatggaggcttaacatgttcaagaatgaatctgactgccattagggcaattccgttaaaataaagaacatttaatccaccaacaattgtcatgttttctgtctttaatgtaagaaccatttgtttaaagtcaaacaaagtaaatagtcatgttttttattaactactgattagattttaagaactcttaaatttgaaacaaaatcattaaaatgtttttgtcacttttaactacttcataaaatagcccgcaaggccctgcgttatcatctcacacacagcctcccatcactagcgggcgagtccactccaccattttgaactaagcctcttccagcctctcttgatcattggccatattgagatagccaggagggaagsggtgcccagagaaactccaaccagtctgggccccgggagaggtatgct

SEQ ID NO: 822461 - DNA, 525 bp, Homo sapiens
cctgactaatacatatagtgactttgttcatgtgtttcagtggtaaatctttaggactaattcacatgaataatttakcctagggtggcagagaacataaaatacaaatgttggactttgcctgctgcaacctgacaggctgagagagaccctgccacattacagctgatcacctgaaaatttttcagagatacaaggactactagagattttctctgtgatgtgtcaggacatagtaaatagtaagtacaggattggtacttatgggaagtaatttttagtaatagaatacactcatatcagaggtccaatatatacttttaatgatataagtatatatatcattatactgacataagtaaatgtcataagtatatctatcatatgtatcattaaaggtatatattggacctctttagtgcatgagtattaactccaaagtcaatcaaaattgaattatttaaacatttatttttattcacctatatttcaggcttctctgaattctttagttataacttaata

SEQ ID NO: 822462 - DNA, 580 bp, Homo sapiens
aaaaagtatagacaaatttttaagtttaaagtgaagacatacaactgatacaacattgagagaagaggcagaaactgatactatgataggaacaggaaagaaacaaattgaaagaaggtacgtcacaaattaatgggaattgcaacctgctgccacagagtaaaatgaaataattgtgtaaaaaattgaaaaggtaatgaagtggacaacactaaaacacatcttcagcaaatacatagggaatttgattagaaatttctatcaatagtcaaaaaagaatcaatgaaattggccacctgaaatcagaaagaaatgaccaacaacaactttcaattgacttctaactttggccagatatataatggtttgaatccttacaacaaaagaaaaccattttaaaatagaaaactaataagatatctaatatttgagttgtggaaattgtgttagaaaattagaagaataagacwaaaaatgatattttataaagtgcagaagcttgtcaattatgctaccgaacaattgcccgtggagtactaaggcctttctaacaattttaaggaggaattgattcaaactt

SEQ ID NO: 822463 - DNA, 559 bp, Homo sapiens
aggctgtaaggggtaataaaaattcattttttatataagattatattccacccacacagtttggagcaacatgctacatgccaaccactgtatggtatttatcatattatacgtaggagcaatcacagaaataacactagcactactctacagaagataaatatcatcatttatattataggtctaagatctataatatatttatttgtaataaataactaatatcataggcctatggcatataatcactgttaagtaggtagttgtgttaatacctagagtgccagtggagggagccacttgcaggtctttgagggcctgaaagacctttatggcaggacaatgcttggaaagtagagcctagggaacagtttccacccctgctataaaggtatcagagcccttagaacaaccccttaagccctcagagtgagggtttttcasaagaacaatctcattctgatgagagagagtttaggtgtatccttggcccaagaacagtgttcatagctgaatggaaagagagattgggtttctcatagaagaataaacctcagaa

SEQ ID NO: 822464 - DNA, 594 bp, Homo sapiens
aacttccccaactagacaaagagcactgatgaaatacctagagctaacatcatttttaacagcaaaatagtataagatcaggaacaagagaaaaatgcctgctctcaccayatctatacaaacgcatactggtctaggtaagaaatacagcaagaaaaagaaacaaaagcaatcagattgaaaaggaaaaaataaaaactgtttttattcatagatgtcataattgcctctgtagaaaatctaatggacactacagaagaagctactagaatgaataagtgagtttagcaaggttgcaaagtaaaagatcaatatatgaaaaataattgtatttttatgtactagcaatgaaaaccagaaattaaaatttaaaagactatgtataatactataaaaatataaaatcagactaaatctgtcaaaagatgtgctaaaactgaactctgaaaattacgaaacagtgctgagaaattgaggaggacctgaccaatgcagagaggcaccgtattcttggttgggagactccatattgtaaatatgtcaatttttccccaaattgatcaatagattcaatgcaatcacaggcaaaatccc

SEQ ID NO: 822465 - DNA, 591 bp, Homo sapiens
gattatttttgacaccctcctgggctgacatgctgtattagtccattttcacgctgctgataaagatatacccaagactcggtaatttataaagaaaaagaggtttaatggactcacagttccacgtggctgggraggcctcaggatcatggcagagggtgaaaggcacatcttacatggcagcagtcaagagagaacttttgcagggaactcctctttataaaaccatcagatcttgtgagacttactatcataagaatagcatgggaaagacccacctccatgattcaattacctcccaccaggtccctcccacaacacatgggaattatgggagctacagttcaaggtgagatttggatggggacacagccaaaccgtatcacatgctatgaaaccaaagacagttaggaacctgccccaagtcacacagcaggtcagcaggagagcggctcctgccctcagtctcctgccccctgcttagggcctaggccttctcctgctgcctcagtcacacccacaccctgccaggacacctcctgagcattaatctaatggaaaggctatttttgtcactttgcaaggccaaaa

SEQ ID NO: 822466 - DNA, 492 bp, Homo sapiens
gaacttttgcagggaactcctctttataaaaccatcagatcttgtgagacttactatcataagaatagcatgggaaagacccacctccatgattcaattacctcccaccaggtccctcccacaacacatgggaattatgggagctacagttcaaggtgagatttggatggggacacagccaaaccgtatcacatgctatgaaaccaaagacagttaggaacctgccccaagtcacacagcaggtcagcaggagagcggctcctgccctcagtctcctgccccctgcttagggcctaggccttctcctgctgcctcagtcacacccacaccctgccaggacacctcctgagcattaatctaatggaaaggctatttttgtcactttgcaaggccaaaaacattgcctatgtcaggagatccccaccctgccctctcacccacccctcctcaaatctccaggtccartccaaggccacactgccccagaagggc

SEQ ID NO: 822467 - DNA, 626 bp, Homo sapiens
aggacgagtgcttatttcccggctccctccctctgagccacagcagcaatggctgcatttctctcccatggccccagctccatcacatggctcctttcccaaggctgcagttctctctggggtctggtgacagcttcctcctttggtcccttcagtactaagattaaaacagcctcccactgttgctggccccaggggtctcaccatccctgctggcttcctgtatgcctgccacaccttggagaaccctccctccattccactcctttcagttcttcccacgtgggccatctgctccctgccagtgccgtggttttcactccatgatgaggaattcagattttgttttaaaacactaggaatttaaaacaggagcagggcttagtttggatccaaagtttgctaagatgtccctgcctgccatggaggagggacaggaaatggggtgagaattaatggggaacatattggggctactgcagggttccatagagtttgatgggatttggtttaagatggaggcagtgcagaaggatggggcccaggtcaggcaggaccaacagccagaacaattgagcttgcgtaggatcctgtgrccccagaccagggaggctgtagggccagga

SEQ ID NO: 822468 - DNA, 639 bp, Homo sapiens
aagactcaactttgaaccttgagggaaaaattagactctcaaccttgctcctttctgatgaatgggaacaaaaccaattctcagagggtaaataggatggggaaatgcagacaggctcatcagtgcccaaggaaaccaagaagggccaccggagtgtcaaggctctccagggaaaatgtgggtttctacagcatgggagactccagagactttaacacgcaccaactgaaatcaaggctgctcggtgcatgtgttggtttcatggcatggatatttatacaagaaagataaaccctctaggaagtgattaagagaaaaatcaaaagaaagactgaaaagcctgggcctggagtgacgcccacctacccttagatacctcccctgtacctaatggacttgatattctttgcaaataggcataatcactactgttttgcaatttcgtgaataatctacccttggagggaatgaagtttcttatcctattctgccagcctcctcagccaccctccctctcccccagcytataatctaaggactccacctctccccctcacacactattacagagtttgtttgaggagtgtacaagtgccttctagaaagaggcagactgggtattcgtttactctagtgcta

SEQ ID NO: 822469 - DNA, 622 bp, Homo sapiens
cagccatcacccagccacggccacgaccaggctactcagcagggggagcagcctctctagagtttgaaacatgggtgaagtggaagctctcctgatgctcatggatatgaacactaagacatcagaccagacacacatgcacacatgcatgcacacacatgcacacacacacacgcaccccacacactttagaattaagttttagttattagcttgtgaagcatccctgaatcttggtcccctcctctttaagatgggggtaacaccttaccaacgatctcctggtaacattaaatagggcaggatgtgagacagtctctggtacatcataggttttcaaaaatgtttagtcctttagctcctcacccaacataaaagaaaatcttgcgcttgttcctttgcccagataacaaaccttattctgatattttggggacagcacaggactggaagaaaaaaagaaacttttctaaccgtcacattgatttcccttttgggcacacagagccattactgaaaagtcacttgctgaagtggttgtactgtggcctctkcaggaagggggatgtgctaaggccaagccaggctgctggagtgcctggagcacaaagcccttctgagc

SEQ ID NO: 822470 - DNA, 622 bp, Homo sapiens
cagccatcacccagccacggccacgaccaggctactcagcagggggagcagcctctctagagtttgaaacatgggtgaagtggaagctctcctgatgctcatggatatgaacactaagacatcagaccagacacacatgcacacatgcatgcacacacatgcacacacacacacgcaccccacacactttagaattaagttttagttattagcttgtgaagcatccctgaatcttggtcccctcctctttaagatgggggtaacaccttaccaacgatctcctggtaacattaaatagggcaggatgtgagacagtctctggtacatcataggttttcaaaaatgtttagtcctttagctcctcacccaacataaaagaaaatcttgcgcttgttcctttgcccagataacaaaccttattctgatattttggggacagcacaggactggaagaaaaaaagaaacttttctaaccgtcacattgatttcccttttgggcacacagagccattactgaaaagtcacttgctgaagtggttgtactgtggcctcttcaggaarggggatgtgctaaggccaagccaggctgctggagtgcctggagcacaaagcccttctgagc

SEQ ID NO: 822471 - DNA, 589 bp, Homo sapiens
tacagtgatctgtgacaagattcccatcccagaacccaggatccttctgatacagagaacaatttaagatatttgccccctaaggacactcttaggcattattcttctccagaattaaaagaaccaaaactggaccatccgtgactcctgtcccaatcttcccatccaggctggatgttaccattttccccatccctgcttccttccctttgtcttcctttacctggctatgccttttgacctttggtgtgacaaatttcagctgccactaatgttcatgtagagcatgtttctctttcccttggatgactgtgcgcgcattgaaagactttgcagagacggctccctgaatagaaatgcatgccagacaaacaacgcgagcagctcagacatccccacagaggctctgggagcttaaaaagcccacgtcaccctagaaaagaggctattaaggtgtggcgtgatttgcactttcaggcagaagctttttaagctgctgcagagcccaatcacagggagatgaagacytcagtttctcaagatatgcaactcttctgctgatgaaggagaatgttcccgggtgcaggtg

SEQ ID NO: 822472 - DNA, 604 bp, Homo sapiens
ctctattccctctcatggcttcagcacgtgggtgttggggaggagttcggctgtgcaggtgtgggagctagacgcccagtgtggtgtctggggagggttgatggacagcagctctaacgtgyttagagagtcaaggctggctcggcctttggaaatccaaataatctttaaatgccaactttatgcttcatagttatagtgaaccattcaggggtggctgcaattcaggaaatgatatcactgcactccccagtccagttagtgacccattagctaaaagctgccctgagtgtccacaagcccccattctcaaagccccctcaggtgccccactccctttaattctttcaacatctaggaaaaaggcgttgttcatactctattttacagaggcataaattgagacccagatggtggtgatgtgacttgtcccaggttatgcagtgtgtgaggggctttcagagtcccaggcctaaggtatccccactgggctacactgacacactcaagaaatgcaaactagagtgtgtgtatgtgcttgagtgtgtgtgtgtgtgtgtgtgtgtgtctacacatgcacctttacattcacttaggtagggat

SEQ ID NO: 822473 - DNA, 604 bp, Homo sapiens
ctctattccctctcatggcttcagcacgtgggtgttggggaggagttcggctgtgcaggtgtgggagctagacgcccagtgtggtgtctggggagggttgatggacagcagctctaacgtgcttagagaktcaaggctggctcggcctttggaaatccaaataatctttaaatgccaactttatgcttcatagttatagtgaaccattcaggggtggctgcaattcaggaaatgatatcactgcactccccagtccagttagtgacccattagctaaaagctgccctgagtgtccacaagcccccattctcaaagccccctcaggtgccccactccctttaattctttcaacatctaggaaaaaggcgttgttcatactctattttacagaggcataaattgagacccagatggtggtgatgtgacttgtcccaggttatgcagtgtgtgaggggctttcagagtcccaggcctaaggtatccccactgggctacactgacacactcaagaaatgcaaactagagtgtgtgtatgtgcttgagtgtgtgtgtgtgtgtgtgtgtgtgtctacacatgcacctttacattcacttaggtagggat

SEQ ID NO: 822474 - DNA, 635 bp, Homo sapiens
aagcgcagggggccctggcaaaccactggtgtaggtcctagagtccaaaagttgaagaacttgcagtccgatgttcgagggcaggaagcatctggcatggaaggaagatggaagacagaagacttagctgccagtctaggccttccattttccttttcctcttttatcctagccacactggcagctgattagatgatacccacccagattgagggtgggtctgcctcttccagtccactgactcaaagttaatctcatttggcaacaccctcacagacatacccaggaacactactttgcatccttcaatccaatcaaattgacaatcaatattaaacatcacaggaatcgaggctcattctcatattatgttcacatagaagatgaaaagatagagaatcttccaggaaaaaaaataccaaaagcaaaaatgcaaatgtgtgaggtactgtatagcaggggtcctcaaccccagggccacaaaccagtacacgcccatggcctgttaagaacccggcctcacagcaaagtaaatggcrggccagggagtattgcttcctgagctctgcctcctgtcagaacaggagcggcattcaattctcataggagtaggaatcttattgtgaactgcgaat

SEQ ID NO: 822475 - DNA, 455 bp, Homo sapiens
aaacagaaaacaaatatttatattaataattgattactttgcaaatttgatgaaaattaataattcaaagattcaagaaaactatcaacctcaaatataagaaacatgaagaaaaccacacaaagacacatcatgactaaaagtctcaaaaccagtgataaagaaaaacatatttactgtagtcagaagaatggagaattataggcctagaggaagaaaactaaaagtgggaatattctatagaaacaaagcaatctggaagacagttgaagaatgtctttaaagtacagaaagaaaaaaaaattcaaatagaactctacattgaggaaaaatayctttcaaattaaaagataaaataatgacactttcagacattaaaaaaacaccttaaaatgtatcattagaaaactcacaatgcaataaaatttgaagtttgttcaggcagcaagaatatg

SEQ ID NO: 822476 - DNA, 613 bp, Homo sapiens
aatttacaattgaagatataaatctacayataatgaacacactgtggatttaacacatgtacactgaaccaataaattgactatttttgactggattataaaagcattttatcttctctgaatataaggttaaataaattttgtgtttagtagagagaaagaacattcttagacaggttaatgcaataacttgatagattaaaatagaaggtaaagaagtcacaataattttattctacctaatgattaaaaaggagattcttaaaaaaaatatgaattacaacaacaaggagaaaaaaatcctgggaattatataaaacactttttaaaaaagaaactgatgaatttgatcctgttatgatccatagctaatgacactttaacatcaatcacatattgacctacatgctataaatatactgtttaaggatcatttgacaaattacatctcaatatgctaaatgattaccaaagacttaatggaaaataacacattgattttaaacattatttaattcactgtaactaataattaaggcaatcttcaataaacttacttttgtctttaccttacattttgtaaaatgaggttattctgaatacatttattaga

SEQ ID NO: 822477 - DNA, 632 bp, Homo sapiens
gagtgcacattacatcttagacagaaacacgcaatagcatgcatattcactgctatttttcaaatgtgccgaaactgtattatgataaaacaaaatttgtctttaaagctactaaatttagagtagawcactgcattttcccaaataattgatatgaaaagtacaaatatcataaagtttggttttctttatttattgttaatgttatggatatgtagtagttgcacatatttgtggggtacatgtgatattttgatgcaagcatacagtgtgtaatgatcgaatctgggtaatcggaaaatttatcacctaaaacgtttatatcatttctttgtgttgggaaaaacccaaatcttctcttctggtgactttaaaatatataatacattattgttaattatagtcaccctattgtactagccaacactagaacttattcctctatttttgtacctaataacctacttctctttcccccaaacttattacgcttcccagcctctggtaacccaattctattcactaattccatgaaatcattttttttaagctctcacatgtgtgagaacattccctatgtgcctttccatgccaggcttatttcacctaacataataacctctagttccatc

SEQ ID NO: 822478 - DNA, 601 bp, Homo sapiens
ctctgatgtggagtcagacagaaccgtaggagctgacttcccttggcgggcagagtaagatttttccttggctgtctgtccctttgctactagcactgctgctgcctgtactcttagccactgtgggggttctaaaaccagctgcaaccaagtatctatgtatagaaactgatctgagtgtcctgatttacccgttactttgtgccatacctttgaaactagggacctgtctaggcttccttctgatggccatcccacttctaatgctggccaatttatctcacacaaagccttaagctttccaggtgtcatagcagttccatagtctccattgaatcctttcttgaaactctttaacgtagttcctaatggggtaggcttactctgtgttttacccattttcctctctcaggggacaaaacaacactcttaccacaaagagggaagggaaaaggggtaaaaagtcactcactcaccaagcaattcacaccagatcaaaattaaaactaaaaccaaamgacggataaggagttactcattcatcaagcaatttgagccaaatcagaaccgaaatcaaaaccaaaacaattcaaatccaaaa

SEQ ID NO: 822479 - DNA, 619 bp, Homo sapiens
agtcagaactgaaatcaaaaccaaaacagtgcaaatccagtcaaaatcaaaaccaaaaccaaagtgccggtaaaggcatgctgtgggtgatcaggccacacttccactaagatggagtgggcaaattccaagaccagccttaccgtgttccagatgtccagactctaagcaccaattcttcccagtgttcagctgctgtgttaatcctctgcgggggtctgccgcacactcctctggcaaggcattccagggaggcaattgcctatgctggagcactctcaggaaccatgtcgcttaagctggccggagtcccctccagagatgctccacagggcaggcttaagctgcctaaggggctgcctccactctccattaatcaccttgcttcccggccagggagccaagaaatgtagcaggaccagtggcagacaaaacctctcagacactggttttaggaaggaagaggctttaatcagctgggagcattggtagactcacatctcaagatccaggctccccaaagtaaagattcctgtcctttttaagggcttacaacactgaggggtccacaagaaagggtcatgatacattgtgcaagcrggggctacgtgactgaggg

SEQ ID NO: 822480 - DNA, 592 bp, Homo sapiens
tgtcttgcctgtatccaagtactagcagaaatggagtgccaaattaggggtctctgaaaacaaagatgtcaaccttgtaccaaagtctacagtaccaaagacaggtactaggtagagatctaccatcacgtttaaataaagcaacagagaatattcattactggagacagacaccagaggaaaaatgtaaatagaagcctgtaaacctcctctaaaagattacacatataagcccataaggatgtacacccaaaaaagtcttgagaggtctccagaatctctacccaggttgtgtagggaaactcctccttgtctgaaaccagactgcaaagtctgggagagatggctgattcttcagttgctgaaattccataacaacacaaaggaaacaagcagtcttgtcacatttaaaggcaccaattaaatccctaaaaactaaggccaaatgagtggagatatcccaatttgccaaagaaataaaaattactgtcatgaaaatgctcagtgaaytaaaaaaaaaaaatacagacaactaaatgaaatcaggaaaacacaaaaagaaatgagaatataaacaaagagatagaaacca

SEQ ID NO: 822481 - DNA, 583 bp, Homo sapiens
atataatgcaaatattattagaactaaagagaaagactccaaaagaagaatagtttaagagtttgacactttattttctacattgcayaaatcgtccacacagaaaatacatcatccagacagaaaatcaccaaaggaatgatgtttcttaacctgcagtatagaccaaataggcctaacagatatttataaaatatttcatagtaatgactacagaatacgcattcttctcctcagcacatatatcactctcaaggatagcttatgtgttaggttataatataagtcttaaaacattccaaaaaattgaactaatatcaataatcttttctgaccacaatggaataaaaaatctgattaaaaaataggcaaaaaaaatctcaatagacaattctccaaagaagctgtacaactggcaaccaggtatatgaaaaggtgataaatatcattgacaatcagagaaatgcatatcaaaactacaatgagatatgatctttccccagttaaaatggctcttatctagaaggcaggcagtaacaatttctggagaggatgtggagaaaagggaacccttatacatgtt

SEQ ID NO: 822482 - DNA, 622 bp, Homo sapiens
ctcagaactaaaaagcacagtttaaaaaatataaatatagagctgaaataacattatttatgagaatttttctcctgtatacaatgatatgttaccaaggatgcatttttttttttttttttggaactcaaaaggcagacaaaagagtgaatgctgacaacattttgtctagatcccctttagccacccgttgccctcatgtctaacttctttgggttagtctctaacagctcacagctgctctctcttctgaagaattttccttgactgtatggtaggttcctcacccaggaggtgaaattcaccattcaggggaaacctacaaccaatgactgactgatggaggtataaacagaacagccctcttgtccaaaggggtattttttcccccagagtttgccatgaaattttaatggagctgaacgcactcccactgaaataataattttgtttagtttttattctacttcccttactcttttattccttggattattctctayaaattatgcacacctgaatttctgtctcagccctcgctgctgtagaacctgacctaaaataattaacctatctctctttcactatgagagagaagctgacttaaccgaatttgataaat

SEQ ID NO: 822483 - DNA, 642 bp, Homo sapiens
ggccattgttactatgataccaaaaccaaacacacaaccaaaaaaggaaacctacaagccaatatctttatgaacattaatgcaaaaatcctcagcaaactactagcaaactgaattcaacaacacattaaaaaagatcgttcatcatgaccaaatgggaattattccagggatccaaggatggttcaacatatacaaatcaatcaatgcgatgctcaaatcaacagaatgaaggacaaaaatcacatgatcatttcaattgatgctgaaaaagcatttgataaaattcagcatctcttcatgataaaaaccctcaaaaagctggttatagaagaacatacttcaacacaataaaagctatatatgacagacccacaactaatattatactaattggggaaaaaattaaaagcttttcctctaaaacctggaacaagaaaagggtgcctactgtcaccattgttattcaacactggaagccctaactagaacaatcagacaagaaaaagatataaagsgcatccaaattggaaagcaagaagtcaaattatccttgtttgtagatgatatgatcttaatatttggaaaaacctaaagactccaccaaaaactattagaattcataaacaaatttaggaaagt

SEQ ID NO: 822484 - DNA, 613 bp, Homo sapiens
cctcccacttcagccgccacagtagctgggtctacagatgcatgccaccatgcctggctaatttttgtattttctgtagaaacagggtttcatcatgttgtccaggctagtcttgacctcctgagctcaagggatcaacctgcctcagcttcccaaagtgctgagattacaggtgtaagccaccatgcctggctgatatacttatttttatgcggaagagttctcttatccttcgtccctagtctctgaaacaagtcatgcttatttccacctgcaggcatttgtgtccaaggtcctcttgcccggaaactttattccctccactctggattcaaatcctaactgaaaattcaggtgtgtttgtctgttcatgatgctaacccatgatgaaatggtagtctgcctcttatgggaacatttctctaacacaagagataatcataggaacaagcaattatggtggaaaatagtataggcacccgtaaagagttataggaaagtaagggtacagtacaagtgaggaaatgttttctgggccaaaagaaaamcttgtgcaaagaggcagaagagtgggtaatcttgaattttttaagagaattgtgagttgttcact

SEQ ID NO: 822485 - DNA, 580 bp, Homo sapiens
tttatttgcatagaggtgtttatagcattctctgatggtagtttgtacttctgtgggattggtgttgayatcccctttgtcattttttattgcatctatttgattcttctctcttttcttctttattagtcttgctagcggtctatcaattttgttgatcttttcaaaataacagctcctgtattcattgattttttgaaaggttttttgtgtctctatttccttcagttcttatctgatcttagttatttcttgccttctgctagcttttgaatgtgtttgctcttgcttctctagttcttttaattgtgatgttagggtgtcaattttggatctttcctgctttctcttgttggcatttagtgctataaatttccctctacacactgctttgaatgtgtcccagagattctggtattttgtgtctttgttctcattggtatcaaagaaaatctttatttatgccttcatttcattatgtacccagtagtcattcaggagcaggttgttcagtttccatgtagttgagcgattttgagtgagtttcttaatcctgagctctagtttgattacactgtgt

SEQ ID NO: 822486 - DNA, 636 bp, Homo sapiens
tggccttgaaaaacacagcagcttccactgtattgagcatagttttgagcaaattaaatatctggagaatgcaaaacattatatttatktctaatatatcttcttgttaagagctaggaggaggatctttggagtttcccagtagccatctgagaaacccagagatattgtattcataaataacatctcagtagttttactattttgaatttgagggttaaatttggggaatatggtatcaaaaagagtgtcacaggtgggggctgcagatgtgaagggcctgctatcaatcaggtgaccctggagggactacctgctccctgtgtcagtccaggatcccagctgtagtgggttcctctctgcaacagcacatgtttctaaagggcaagaatctgggctcccggtaactgacatctgtctcctccatcctagattgtcatggtagacctgaaccaccctcccactgaatttgggcccttgtggctcatagccacaagggaaattggaagctcacatgtgaaaggcagaattatgttattgcaccttcttccaaagtcttgagtttgtttgtagcccaggtgcccctgttttcaacaggggtattagcagtaccaggcagccactccctagggtttg

SEQ ID NO: 822487 - DNA, 636 bp, Homo sapiens
tggccttgaaaaacacagcagcttccactgtattgagcatagttttgagcaaattaaatatctggagaatgcaaaacattatatttatgtctaatatatcttcttgttaagagctaggaggaggatctttggagtttcccagtagccatctgagaaacccagagatattgtattcataaataacatctcagtagttttactattttgaatttgagggttaaatttggggaatatggtatcaaaaagagtgtcacaggtgggggctgcagatgtgaagggcctgctatcaatcaggtgaccctggagggactacctgctccctgtgtcagtccaggatcccagctgtagtgggttcctctctgcaacagcacatgtttctaaagggcaagaatctgggctcccggtaactgacatctgtctcctccatcctagattgtcatggtagacctgaaccaccctcccactgaatttgggcccttgtggctcatagccacaagggaaattggaagctcacatgtgaaaggcagaattawgttattgcaccttcttccaaagtcttgagtttgtttgtagcccaggtgcccctgttttcaacaggggtattagcagtaccaggcagccactccctagggtttg

SEQ ID NO: 822488 - DNA, 627 bp, Homo sapiens
gaacgcatttcagaatttccttcttagcaacctccaaacgtttggttatgtgtttcacctaacagctgggccraagtaggaaccactattacttaacagtaacagttgaaatatttaaaaatagaaaccattggagaagaagagagggcaccaaggacgaggcctgaaggaggtagcccctctctctggggcgagccggcctcttccaggcagcaacgtacattccgccggggctttctggagaccggcgtgggctgcagcatctttcaagggcgctgcgggtcactgggggtggaataatccagcaggcaggtggaaatgcagaaggcagggggctggttcagacttctgtccagaaaaatcacctgggcagcttgataaaaagtgacttacgcctcccagcctcagttcctgaaccagtaactactgtgtgatgtccccaggggcattaaatgccaatgaacacacggtacgtagctgagtgacagatgggtggccttggtaaggggacctgtggccatcagtgtcctcatcattgctgtaattaggagcaaccacgagtcccactttgagcaggaccttgctgctggctgtggaggctgtgcgctcacactctctgcccagcaa

SEQ ID NO: 822489 - DNA, 548 bp, Homo sapiens
gagtggccggcaccctgcctgctgtcccggtccagctctgttccccctgggaagccgaggggcgtggccaacacccgcctgctgttccaacccaacccagctctgttcccctgggaagcccaggagagtggcccggcacccgcctgctactgctatcccggcccagctttgtttccccggaagctgaggggagtggctggcacccgcctgctactgctatcctggcccagctttgtctcccaggaagccaaggagagttcgctggcacgcgcctgctactgctatcccagcccagctctgtttcccaggaagctgaggggagtggctggcacccgcctgctgtcccaacccagctctgtctccctgggaagccgaggaaagtggccagcacccacctgctatcccggcccagctttgtttcccgggaaaccaaggggagtggctggcacctgtctgctgtcccagcccagctytattccctgggaagctgaggggagatgtcgtcttcaggctgcaggtgcaggttggctgatgaccgagtgaagggt

SEQ ID NO: 822490 - DNA, 472 bp, Homo sapiens
ccggcgctagtgatcctttttttwaaaaaagtcagcagtaacactgctctgctcaaaatcctgcaatggctttccatttcactgtgagtaaaagccaaagtccttataatggtcaaaggccctataggatcccctccccgcgcccccacacccagccacactgacctttttactgttcctcgaagtcaacaagcattcttgactcagggcctttatgttgattgcttctgctggtcaacctgttcgtactccaggtattcccacagtttacttgctcaaggactttatctctttgctcaaatatcaccttctcagtgaggtccacactgtccaaattaaggtttcagcccctctctcctcatatacacataatcttcctactttccctggtctcttttttcataacatttatcaccttcctacatgcaatgtaatttatttatttattatgtttattgtttactgtcttttc

SEQ ID NO: 822491 - DNA, 472 bp, Homo sapiens
ccggcgctagtgatccttttttttaaaaaagtcagcagtaacactgctctgctcaaaatcctgcaatggctttccatttcactgtgagtaaaagccaaagtccttataatggtcaaaggccctataggatcccctccccgcgcccccacacccagccacactgacctttttactgttcctcgaagtcaacaagcattcttgactcagggcctttatgttgattgcttctgctggtcaacctgttcgtactccaggtattcccacagtttacttgctcaaggactttatctctttgctcaaatatcaccttctcagtgaggtccacactgtccaaattaaggtttcagcccctctctccycatatacacataatcttcctactttccctggtctcttttttcataacatttatcaccttcctacatgcaatgtaatttatttatttattatgtttattgtttactgtcttttc

SEQ ID NO: 822492 - DNA, 588 bp, Homo sapiens
ctcacagagactacaggccaaattccttcctgaaacctataaagccctttcatctgctccctgctgtctgtctaagctcacctccttcttcttccccaccccatattgttagccacactggcctttggaacttcttgaacattcctggaatgatcttgccttagcatcttggcacttgctagttctgctgcctggactgttcatccccacatatctgcgtggatagtttatctgcttcatccaggctctgtgcagatattttgagtgaagttgtccctgactctaatgtctaaattttaattctcctccttgacctatcctattaccttttcctgccttgtttcttctttttttccttaacactttttactatcctacatactaaatttttacttagttatcatgtttattgttgttctttttcattaaaatgtaggttccatgtgagtagggattattgtgtttttggggtcactgatttttttttacgcacctaaaacagyacctgttcagtggaaatcatattgattgatatattacaattctatattttatggactgagaaaatgatgcacaaaaaactggaat

SEQ ID NO: 822493 - DNA, 571 bp, Homo sapiens
atatcatgagaaccttcacagaggccttagtgatgcccagttctccctaattccttccttaaatttcaccaacagtggatcagtaataaaatttccaagttgttgaaaagaagcataaaaccatgccaggtgacatgaacccattttgaaccagcccagtgctcttttataatcttttgattaatcttggactttcgttctgccttaccaatgttcatttcttcctttctatctaaagaaaattttctttaaagaagctgaatggaagtttccttaaccccaagcaccagaaatactccatccttgatttgctatatagaaaaatattcatggtattttaacgagcccattcctaaagcctaattttgttgtctgaatgatttctgtaatcctcagttcattcttgtctttgggtttctgagtgaatgtacctttcctcgccatcctctttcttacattcaccctgtaagggtgaatcgaagtatttccttcaatttgccttcctaaggtytagtgtgaccttttaagatcagagcaagctcactggtttccatagcaacactcacttttc

SEQ ID NO: 822494 - DNA, 606 bp, Homo sapiens
gagtcttgggaaatgccaagaaataaaggtactatcaccaggcaagctggagtggtgagcgacttgatagtctcagaatgatatcgccagctgttggaaatcttgtagaactggctaacacccactgaacagttgctacgtaccaagcactgcattaatgcacttaatcctgacaatagccctgtgggctgatgggccagggttttgtttttgttcttgttgttgttttgagatggagtctcgctctctcacccaggctggagtgcaacggtgtgatctcagctcactgcagcctccacctcccaggttcaagcaattctccttcttcagtctctggagtagctgggattacaggcatgcactaccacccccggctaatttttgtatttttagtagaaatggggtttcaccatgttgaccaggctggtctcgaactcctgacctcaggtgatccacccgccttggcctcccaaagtgctgggatgacaggcgtgagccaccgtgcccggcctaatgggctgttttawcaccgcctcactgtagcagtccctctggtgccgcaagtcccctctctgcatctgcaggagacagttccctgtgagacct

SEQ ID NO: 822495 - DNA, 661 bp, Homo sapiens
tgcatggaccaaaattattcatattttatgggcataaaggcagttcattaattaatggaattctatggtgaattaactttatttaacaaagaaagaaccaggtttttctgattcgtctgctctggagatctaaacgttcatatcttggggggattccgttgggatgactttgtagcagtgggaggcagtatagcagctaaagcaccagtggaacccaggttcggagaagctaagtcacttaccccacatcacgtagctggtggaggagaaaaagaccctgtgaaggctgttggatggggaaggtaagtagggggatagagagggaggaagagggaggcagcaacaaatttactcgctgtgttgaccttgactgttacgagtttgccccttggccagggggactgtgtggagtggtgctctggcagcagccttcccccttacagggtgtgggccccaccctgatacaggtgattgtccctcgccaccccgggaagctgctgatcctcaggcccaccctctgagctttggctcttaygttcacgagcgctggggctcagagatggcagaatggcggctccagagtgtccctccaggtgcttgtcattagccactgccccctgctccatctctggctgtagcccctttggcctccctttaggtc

SEQ ID NO: 822496 - DNA, 661 bp, Homo sapiens
tgcatggaccaaaattattcatattttatgggcataaaggcagttcattaattaatggaattctatggtgaattaactttatttaacaaagaaagaaccaggtttttctgattcgtctgctctggagatctaaacgttcatatcttggggggattccgttgggatgactttgtagcagtgggaggcagtatagcagctaaagcaccagtggaacccaggttcggagaagctaagtcacttaccccacatcacgtagctggtggaggagaaaaagaccctgtgaaggctgttggatggggaaggtaagtagggggatagagagggaggaagagggaggcagcaacaaatttactcgctgtgttgaccttgactgttacgagtttgccccttggccagggggactgtgtggagtggtgctctggcagcagccttcccccttacagggtgtgggccccaccctgatacaggtgattgtccctcgccaccccgggaagctgctgatcctcaggcccaccctctgagctttggctcttacgttcacgagcgctggggctcagagatggcagaatggckgctccagagtgtccctccaggtgcttgtcattagccactgccccctgctccatctctggctgtagcccctttggcctccctttaggtc

SEQ ID NO: 822497 - DNA, 579 bp, Homo sapiens
atttacataattccatcgtgaccatcaatgtaccatatccagtgggactgaactctctctgctttggggaccaaggaaggcttcccatttgaatttgtcttgaagaataactgtaactgccaggtagagaagggtaaagggctctgatgtgccgcctccccgctccccttcctgcttctttgtcctttgtcctttgctagttaagaccatcttaacactgtaattccaggatttggggaggctgaggtgggaggattgctggagttcaggagttcgaggccagcctgggcaacatagcgataccctgtctctacaaaaaaataaaaataaaaaaagaaatcatcttaagagccagtcattaaataccggcctatgaaggtgaccctggtgtagaaagttgggccagaggactacccagataactgttaggaagactttcttatatataccatccttcccggctgtttccctctggaagaagctaaggaagagcacaagagtgatggatggctgcamtataaagataattagcccgaaccccttggagttatccccagggactgggagacccagtcactc

SEQ ID NO: 822498 - DNA, 604 bp, Homo sapiens
ctggtctggtgttctgccatgcaaaacccttcttaccctggtctccctcctctccaactccatctccatctcyttaactcaggaatccaccaagctctgcctggttacccctccctgtgccgtggcctggaaacactctctggaaaggaagctggggcaggctaaggctcacctctttggttttcgttccttcattgcctgatgttcattgtcctgaaaagccattgtttccatggttttgctggttatttgatggttttgggagggaggttacatctggtccctgttattccatcttggccgaagcagagagctcaccttgcacttttctcactagcagggcctttctgattttaagtggtgtgagtggtccactgtaaggatagtcctcaccctgatgtgtttaagacctgacgggagaggctggtgtggccagcgggtgtgaggagggatggctggggagaggcctgaagctgacaggggcagggacatctcaccacttatccgggccgcctggccttgagggactaggcctcacagaacatctgtgtgggctggaggtttgcattttactcctagcaccacacacaatctcagcagcttt

SEQ ID NO: 822499 - DNA, 573 bp, Homo sapiens
ccccttcgtgggctggcaggagccctgcacaccctccacacagagcaggctcccctcgaggtcatcgcggaatgaccctgatttcctcatctaatttgagaggaggtttatttgggcargaataataaaaagcacagcaaatgagcagaggaaaacagaacccaccagacatgcaaactcacagaaataaacaatttgccgatgatcagggaagaggctacaggaaggagtttgtgcagacagctcctatgagaaaatggtccctgggaggtcacagagggctttccggctgcacgctgaccctggaggcagctgtcagctgtggcaccatggttgttctcgtgcttggagctgtcttcaaagccagtgagcgagccactcaagaaacttggttggtcaggtggcttcacagatgtactctgctttttacccaaacagtctgcacagtgcattgtccatcagcatgtgtacccagggagcactgtgaattcagggccctgtgtctccagtactcagcatggttacagaatgggtgaaggtgcagtgaagtgacaccctcttcccatcactaag

SEQ ID NO: 822500 - DNA, 570 bp, Homo sapiens
agttaaatcatgggtggaacaaaaatgccagagagaacccttccttgttcattctacagctgtcaggcaggagtcactgggtttaatgatatctttctggagagaggggacagccagctsgcagaggctgtctctccccttctataaatttgctttctcttcttaaatagcgagtagctgatcctcagcaagaaggaggggtttgtttattgttctaaagatctcatgattcctgtttaaagagggtgtaggcttgcagtagattgttgcaggcttaaattcactgaagagatggaagtagcaggctttgtgggtgcagtcagagctgctgggagtgggtagcctcaggctagggccctggtgggaacacagaggaaagcagtcctgagctggttaaggagatggaagttgaggagacttccctgggggtcagctcatccagaagacagtaccactggtgctacaggacccaatagagggcagtcaactggtcaggatgcaggagatgtgacggattctaaatctataggatctgcactggagaggacaggcagtgagcatctgagtgtc

SEQ ID NO: 822501 - DNA, 570 bp, Homo sapiens
agttaaatcatgggtggaacaaaaatgccagagagaacccttccttgttcattctacagctgtcaggcaggagtcactgggtttaatgatatctttctggagagaggggacagccagctcscagaggctgtctctccccttctataaatttgctttctcttcttaaatagcgagtagctgatcctcagcaagaaggaggggtttgtttattgttctaaagatctcatgattcctgtttaaagagggtgtaggcttgcagtagattgttgcaggcttaaattcactgaagagatggaagtagcaggctttgtgggtgcagtcagagctgctgggagtgggtagcctcaggctagggccctggtgggaacacagaggaaagcagtcctgagctggttaaggagatggaagttgaggagacttccctgggggtcagctcatccagaagacagtaccactggtgctacaggacccaatagagggcagtcaactggtcaggatgcaggagatgtgacggattctaaatctataggatctgcactggagaggacaggcagtgagcatctgagtgtc

SEQ ID NO: 822502 - DNA, 520 bp, Homo sapiens
atgaagataagcccccactgcatccatactccatgccaaagatataaaagccgcttcctggcsgggcgcggtggctcacacctgtaatcccagcactttgggaggccaaggagggtggatcacgaggtcaggagatcgagaccacggtgaaaccccgtctctactaaaaatacaaaaaagattagccaggcgcagtggcgggcgcctgtagtcccagctactcaggaggctgaggcaggagaatggtgtgaacctgggaggcggacttgcagtgagccaagattgcaccactgcactccagcctgggcgacagagcaagactccgtctcaaaaaaaaaaaaaaaaaaaaaagccgcttcccataagcagctttcctattattcacagtccaaagaaaacaaagctcagataagtaaaatgattttcccaaatcacccaaagtcacacaggtaagtgagcaggatggctatgacaaaaaacttaactctccactcctctcagtcccacagggttatttacc

SEQ ID NO: 822503 - DNA, 448 bp, Homo sapiens
catgtaagacttgccttgcttccccttcacctcctgccatgattttaagtttcctgaagcctycccagccatgtggaactgtgactcaattaaacctcttttctttataaatcacccagtctcaggtagttctttatagcagtgtgaaaatggactgatacacaagatcttccctcagagaaagtatttgatagttaattatttgaaaaaacctgctggggttttatcaaagcctaacggacctggaagaagggaaatacccaacttcagcccactccagttctcctgtcccacctaaggggagaaaacactgagaagcacttgtgaagttcataatccagaggcagaggctcactgaaagactgagacttactcacaagactatagataaaacatttccccacctccctcaccttaccaccatgttactaaaggacaatgaatgtca

SEQ ID NO: 822504 - DNA, 626 bp, Homo sapiens
taattaattggaatatctatattccaatatatgagatatatgatatatcacatacatcatacatatcacacatatatatgtgatatatcacatataccgtgtatcacatatatatgttctgttcataagttctgtgtcccagtctggacactgaccattgaaaagcagatgcttttctgtaccaggagctgttgatgcatgccgtgctccttgacttttccatcctaaaataccactattaagtctgtgctctgaatggtggacaggtggtgaggtgatgagtgatcacgctgcaggcgcgacgttctctagctttaaccaggacttcttgtacgacttttccgctttcagtatccagagctgatatgtagctttatccaactgtaggatttgaggttatctgatgagggatcaggcaatagcaatcctctgttttttgacctcctgagagctgagtccccttatcttccagtcttgtttcatatttgtagggtaatgtctctaagaaaaaatgtgtcttggcagctttgtctgcactcacaatttcatcctgtgatamaacctggctgttgtctccgtaggcaatattctcagtaatattttatatatatagataatatcaatta

SEQ ID NO: 822505 - DNA, 577 bp, Homo sapiens
ttctgtgaacacactggagatcattttggaaggcattgtatacactgcacagttatgattatctgtctgcaccaaaggcttcccaataagaggtttgcaattaacacaggtatggattaatactgtgcaactgacatttgggaatggtctccaggaaaaggattaccctctctcccaactctgtatatgggtccagcagagctccccagataaacaataaacaacataaacaatgtttcattctacttagttttctctacagctgtctctgtcatccagcctctaagatctttaagaacagggatcttaagtacaaatatttgctgggtatggtggtgtgtgcctgtagtcttagccacttgggaggctgaggcaggaggatcacttgatcccaagaggttgaggctgcaatgagccaagatcgtgccacttgcactccagcctgggcaacagascaagaccctgtcttaaaaacacaacaaaaagcagaaatcttatcccattgatcattataagcccagtaaagatcaaccaactatgccagcaagggaacagtaaagaatcaaccaagaaaccg

SEQ ID NO: 822506 - DNA, 445 bp, Homo sapiens
tgccccgccaagagttattgttttaatgtgtttgcccttttaaatctcacagctcttcagaatgggctttttatcccatgtcacagatgagaaaattggggcttatgagagtttaattgaaataaaattttagagcatttggcatctagttggcatttaataaatggtaatttctactgtttccagaaatagcctaatttcaaatatgctgtgttctttcttcatagagagatatgttgacagtggtgaaagatatgttatagcttccaccttgggtggtatttctttccatatacttaaatatctgccatttatttaatatcactatttaatgtctattatatatttaaatacctatcatggtatttcgcttcatataaatttaaatctycttttccttccgccaataaaattttgttcattcttcacataagtcttatgcact

SEQ ID NO: 822507 - DNA, 445 bp, Homo sapiens
tgccccgccaagagttattgttttaatgtgtttgcccttttaaatctcacagctcttcagaatgggctttttatcccatgtcacagatgagaaaattggggcttatgagagtttaattgaaataaaattttagagcatttggcatctagttggcatttaataaatggtaatttctactgtttccagaaatagcctaatttcaaatatgctgtgttctttcttcatagagagatatgttgacagtggtgaaagatatgttatagcttccaccttgggtggtatttctttccatatacttaaatatctgccatttatttaatatcactatttaatgtctattatatatttaaatacctatcatggtatttcgcttcatataaatttaaatcttcttttccttccgccaataaaattttgttcawtcttcacataagtcttatgcact

SEQ ID NO: 822508 - DNA, 543 bp, Homo sapiens
ctatcgaagtctattgtttcatgaagcccaggcctaacaatgtcccattgtggcagatgcaagggcgagttggttaaatcccagttttccacattttcccttcattttcagtctccaggtctgtccccctgaagatggttcctctcaccacctgggctgccaccacgctggccatgtaagtaaggatggtttacaggctcctccatctgatttggggacactggaaatctcttgtcttttctctgatttttattaagtatatataaaacctatggctcctatttcaagagagaaggcccaggaaaaactatctttggaactgccaagccagagctactgcctccctgcaaagccacctttggaactacaaggacactctatacacatggaagatgctcttaaggcttttaagtatatcagtggatggtttgatacyttcattctaaagggaatataaaggccaacttcaactgcaagagattgttttgctgtacataagcctggaatgggcattaatcactaagtggatttttaaatccctgg

SEQ ID NO: 822509 - DNA, 405 bp, Homo sapiens
taaaagtcttagatctctatttcatgggcacctctcccttggtctcccagtccagaaagaaactccagaaagtcaggagcctcctttcgttttcaactgtgaaacatacaagggcagagacaccacatgcgaaggcaaaagcaacattgacaagggaaaatgtgatgtttttgtttgttttaaaggggaattctaaattaactcttaaagtgtgtttggggcttcaggtgcactggaaggtcttccctggagcaaggagcaaggagcagggacagagcccctgggcaggggtgagtgctctgcctggagrcagccctcagcactcacgtgggaaactgctcaaggcagcccagagtccctgcaacaaacttcatgcccaaggagtgagcagtttctctaaataca

SEQ ID NO: 822510 - DNA, 602 bp, Homo sapiens
ttcttaacacctacaatgggaaggacattttgttagacatttatacttatctcatttaattcttatatttacataaacaaaattattatatttacataaagaaaattgaactccagggaacttaattaagtggactaacatcatacaattaagagaacgggggagccagaattccaatgggagacagactttaaatacaatttggaagtgaaaattttaatagctgccccaggggatggtgctgcttgatctccacccccttatagcacacacccgacctggttatggcctgcagcacccagaggctatagttgaaggggtagctctcaacattcctcgtactatcagaatttgttctattaggggaaataactgaggtctgaacatggcaaattcaggtgtggacgcattcatgtctcccctgcaaggtgcatgccactgcttctttcagccttgtcagtgtcagttaacaaatgtgasaaaccatggtagcagcacaacagcatatggctaaaagtggagctagtctctaccagactggtgcacacccaacttcgaacctcagcaaatatggagtgatgactttcagaggggctaaagaa

SEQ ID NO: 822511 - DNA, 542 bp, Homo sapiens
attggccattatgtgaggctacgtggccaatcgaattttctgataatctttcctcatctcaaattttatgaggtacaattgtcgrtgcctttgttcagtaattctttatctgtgctactgtgtttgtttttgttgttgtttcaatagggcacctatttactcaaacacaaactgaatagtaagtttcttgatttcacagcggtacagagttggatctatcacctccatatacccaacagcacaacaaataaaacaacaaagaaaccaaatgaaaaacactaggatgacatcgaagccagctgatgctgtctctaggcattataaatcaatgaatcttccttggttcttcccaaacctactattttgtaattgcctatatataaataaacacttagaccaatgaatacgtaactaacattttgcttggaatcattctgctgccatatatgaatttccttcctgtgttatggctacttttttagtagaatgtatttaaataggcttacagagtttcagagatttcagattagagtcttatctct

SEQ ID NO: 822512 - DNA, 555 bp, Homo sapiens
tcccaaagtgctgggactacaggtgtgagccaccgcgcccggccctcttcytcttcttataagggcattaatcctatcatagtggctcagcccttatgtcttaatttaaacctaattacctcccaaagatcctacctcctaataccaccccattgggagttagggcttcaaaatatgaatttgggaatgtttggagaggacataaacattccattcacaacagatatcagatcattagatagaagaagtatgctgccttgaaacaagatcaatataaaaatgaaatgctttaggaaatcacttttttcagaagagttgttttatcagattgctacatttctccacaattacagaaattacacacatatgcgcacacacacacacacacaacatcagaaaggacactgccaaaaatcacattgttgatttagacatttcaattgtctgtgccacagagagctagaacatagatattgtctagttcagcaacctcctttttaaaggggagcaaacaaaccatgagagttgaagggcctacccaagacagcttcaact

SEQ ID NO: 822513 - DNA, 420 bp, Homo sapiens
attctttctcttaaaatattattgtttactgaagtcacatgatccatcctcatctcctcttcctgtacatactctcacatttatcttgtggatcaacaaagttttatttatcacctataggtaggttgcatctgaatttactcctaaaaccctggcttctctctctcaagcttttttttttttttttttttgagatggagcccttcactctgtgtctagcaggctggagtgcagtggcgcaatctcagctcaccacaacctccacctcccagattcaagcaattctcctgtttaagccacccgagtaactgrgattacaagctcccaccaccacatccagctaatttttgtatttttagcagagacggggttttgccgtgttggtcaggctggtctcaaactcctgacctcaggtgatcc

SEQ ID NO: 822514 - DNA, 482 bp, Homo sapiens
catcacttttattcaacatagtactggatactctatccagagcagttaggcaagaaaaggaaataaaagacatctaaatttgaaaagaagaggcaaaattatctttgttcacagataatacgatcctgtttttagaaaaccatgagtccagaaaaactgttagaattaattaatttagcactttttcctaaacaatacagtataataactatttacataacatttacattgtgtcaagcataggtaatgtagagattatttaaactacataggaggatatgcataggttatatgcaaatactatgctattttatatcagagatttgaacttctgtggattttgatatccataggaggtcctggaaataatcccacattgataccaaaggatgacyttgtaaaaattaacttaaaatatatccagtacctaaacataacagcaaaaactgtaaaactcttagaaaaaaaaacataggacaaaa

SEQ ID NO: 822515 - DNA, 464 bp, Homo sapiens
gtactatgttttgagaatataattttagtaaaataactgctctataagctagagtttggcttgtttttaaaacatatttaagactttttttcttctatttttacttgagatcctttcttcatgatccttyttgtcaccaattttctgtagtaggaaaggggaaaggagttagcgtttattgaagacccagtttgtacaaggcattgtgctactgctttacccacagcatttgatttcattatcataaaagtctatgaaataagcaatagtatttctatgtttaaaagaaaatgaaactctataaagttaagaaatgtccttgagcccagcagtcaatcccagctctggcttgacttcaaactccatgccatttccaccacattgctctgccttcttaagaggagagattctgcccatgggtctagaagattctctttccagtaaacagaacaaggtggacagtg

SEQ ID NO: 822516 - DNA, 577 bp, Homo sapiens
cagggggagacaattaaaaaccaattatctccatgaatgcaacttgttgaaaggctctatttgggtgcctgctgcagaatgcaggagggcatgtccaaggagtgactggcatctgggcgaatrggcactgggtctgcggactcctctctccccccatgacagtgatgtgttctggtcagatgcctttaggacctggccccgaggaatgcagccaagcaggagtcttaccttcctctcaatacgctccagctgctccttgtagaaggtgtcacggcgtcttagctctgcctctctgctctccagctccctggcctgcttggaagagaacaaagcccacgttagccagcagcgatggtgctggaatggtgctgcagggagaaggcgacggacatttctgctcacattcacaatgagaacagtagcaataatgagttgaaaaccttatgatatgccagatcattcacatatattgtgcttaattttcacaacaatccttcaaggtgggtaattactatagccacttcacagataaataacatttattgattatgggagtcctgttcacagttctcccaca

SEQ ID NO: 822517 - DNA, 516 bp, Homo sapiens
caagtttctcaaaaacaagtatgttttgagcagttgctccaaggacttttttattttgtaawattttaacatttgtatgccttagaacttttttccttaaaattttatttccttgtgtttgctacaagtcgttatttggggaaagcacaaatttcttcatttgcaacacgcacaatacagtagggaacaaatcagctttgagcccggcttgagcaccagcttcacagtgggccaggaagaggaactcctaggacccctcctagaagcccagagggaaccattccaagggccaggacaggagctctcggcctgaggctcaggtgagggctgctgcggtaggcgcctaaatcactgacggaattctcctatacttggccctgttcacgtgaatccacatcattctttgacttgggagttaggctagagtggctgaagctgagtcatggctatgccgcctctgaggagccttaaaggcaacttctttcctgagctgtcaactcaggtccttctgcctca

SEQ ID NO: 822518 - DNA, 515 bp, Homo sapiens
ttagtgagcattgactgtatttcatacaccatgttaagggatttacatgtgctatcttatttaattctcactataattctactggtaggaactaatattatttccattttacaaatgaaagaactttggcttagagtgattaagagtattttctaggcggggtgcggtggctaatgcctgtaatcccagcactttgggaggccgaggcaggcggatcaccaggtcaggagattgagaccatcctggtcaacatggtgaaaccttgtctctactaaaaatacaaaaaattagcccagcgtggtggcgggcgcctgtagtcccagcttcttgggaggctgaggcaggagaatggtgtgaacccgggaggcagagcttgtagtgagccgagatcgtgccgctgtgctccagcctgggcgagagagtgagagtccatctcaaaaaaaaaaaaaaaaaaaaaagacttttctaagcttgtcagtgacagtaccgggatccsaactcagagctctctcagt

SEQ ID NO: 822519 - DNA, 595 bp, Homo sapiens
aactgcttgttgtcagttgataayttgtaaaaactaataatgaagcctcagtttccagcccacatggatctaaaataggcatcagatcagcatggaaaagccggagacactggggaccttgaggacatggccctggagaaatcacaaaaaaggatggaaaggggctgtggctttcaagcctgtaaccctgggttgctccagcccagagatgcccatctctctggggacagtctcttgaagcagtaagtaatgtgggctctgggctgggcacggtggctcacgcctgtaatcccagcactttgggaagccaaggtgggtggattacaaggtcaggagatcgagaccatcctgggcaacaaggtgaaaccccttctctactaaaaatacaaaaattagccgggtgtggtggcatgcgcctgtagtcccagctactcgagaggctgaggcaggagaatctcttgaacccgggaggcggagtttgcagtgagccgaaattgcaccagtgcactccagcctggcaacagagcaagactccatttcaaaaaaacaataataataaaatgtgggctctggcaacatacagcctggatccaaa

SEQ ID NO: 822520 - DNA, 519 bp, Homo sapiens
gtctcattttttaccagatcctggatcccaaagaaagagaagtgctatggaataagacaatgcagtgattttgccatgcatttgattgcaaagcaatacaaagccaatcagcccattctgtaattagcccatctttcatgagagtcttacctctcagtagcgggtagggacattttcatttcttttaggtagccaaaggcatgcttctctaatccaaacatgcaaagagctatctccccataacttccattagccagccccagaagtacatttcctatctagttattacaaccaaagctctctcatagtgtgaagtaatttctgctaaccccaaaagtcaaaaccattagataaggcaatgcaaaatacaacagagctttagattttgagaaggatttatctgctttcaattccaggggtttcatgaggaaaacagaggtttttcccaaaacagggtctgtggtgcctcctctgtttttcccagggagtcccataaarcttgaatatccacttttaaaa

SEQ ID NO: 822521 - DNA, 636 bp, Homo sapiens
gcaccataagatttgcctcttgctctcactgtctacaatatatactcacttatttgttcaattcctagcatacacctaaagtagttacagaattgctaactcatatatttgtgagaaatagatttactaactcaactacagtatttgtgtagacttctttttgtctttagtcttacagtagcctgtcaaaatatggttttctgaaatttcttaaattaattcttttcttctccatagccttcagtatgtttatgttatttatttgtaatgcacttattggggctgggattgctgtgatttggatacttgtccctccaaatctcatgttgaaatctgatctctagtgttgaaggtggggcctcatggaaggtgtttgggtcatggggggtggatcctctaagaatggcttggtgccatcctcatggtaatgaatgagttctcactctattacttcgtgagagacctggttgttaaaagagcctggcacctcccccttctctcttgttttctccctcacttcyactcctgccatgtgatctctgcacaccagctttccactatgaggggaagcagccggaggtactcgtcagatgcagatgctggtgccatgcttgttctacagcctgcagaactgtg

SEQ ID NO: 822522 - DNA, 636 bp, Homo sapiens
gcaccataagatttgcctcttgctctcactgtctacaatatatactcacttatttgttcaattcctagcatacacctaaagtagttacagaattgctaactcatatatttgtgagaaatagatttactaactcaactacagtatttgtgtagacttctttttgtctttagtcttacagtagcctgtcaaaatatggttttctgaaatttcttaaattaattcttttcttctccatagccttcagtatgtttatgttatttatttgtaatgcacttattggggctgggattgctgtgatttggatacttgtccctccaaatctcatgttgaaatctgatctctagtgttgaaggtggggcctcatggaaggtgtttgggtcatggggggtggatcctctaagaatggcttggtgccatcctcatggtaatgaatgagttctcactctattacttcgtgagagacctggttgttaaaagagcctggcacctcccccttctctcttgttttctccctcacttccrctcctgccatgtgatctctgcacaccagctttccactatgaggggaagcagccggaggtactcgtcagatgcagatgctggtgccatgcttgttctacagcctgcagaactgtg

SEQ ID NO: 822523 - DNA, 636 bp, Homo sapiens
gcaccataagatttgcctcttgctctcactgtctacaatatatactcacttatttgttcaattcctagcatacacctaaagtagttacagaattgctaactcatatatttgtgagaaatagatttactaactcaactacagtatttgtgtagacttctttttgtctttagtcttacagtagcctgtcaaaatatggttttctgaaatttcttaaattaattcttttcttctccatagccttcagtatgtttatgttatttatttgtaatgcacttattggggctgggattgctgtgatttggatacttgtccctccaaatctcatgttgaaatctgatctctagtgttgaaggtggggcctcatggaaggtgtttgggtcatggggggtggatcctctaagaatggcttggtgccatcctcatggtaatgaatgagttctcactctattacttcgtgagagacctggttgttaaaagagcctggcacctcccccttctctcttgttttctccctcacttccactcctgccatgtgatctctgcacaccagctttccactatgaggggaagcagccggaggtmctcgtcagatgcagatgctggtgccatgcttgttctacagcctgcagaactgtg

SEQ ID NO: 822524 - DNA, 521 bp, Homo sapiens
cctaattgcctaggttagtacagataaaagagaaaaatattaagaagcaattagggagagtgaaataagctataaagaagatatacagaaaaaatttaaasaaatccaacatgatgtataaataaaatagccaagacaataaacatcatatagttctcctcaaagaatcatgattactctcatacccacaattatatgaggaggtgctaggtattgggtagtaaagacacacaagaatagtcctgatcgatcccataagctcctggaatatatgctgaggacttcagcaacttgggagtgctctaggtggtgcaattatcctctggccataatccttcatatttacccaaacgatttgaagacttaggtccacacaaaaagttgcacatagacgttcgtagcagctttatttaaaattgccaaaacttggaagcaggcaagatgtccttaagtcatggtgggtggataaataaagtgtggtacatccagacaatggaatggtattcagagctaaaaagaaa

SEQ ID NO: 822525 - DNA, 601 bp, Homo sapiens
aaagaccatatataacaagcccacagctaacattatactccatagtgaaaagctgaaagcttttcttccaaggtcaggaacaagacaaggatgctcactctcaccacttctattcaacatagtaccagaagtacatagtagagcaattagacaacaacaacaacaaaattaaaaatgtccaaattggaaaggatgaagttaaactctatttgtttacagatgtgatcttatatatagaaaaccctaaagactctaccaaaactctactaacactaataaacaaattcagtaaattcgtaggatacaaaatcagaacacatacaaaataacagttttacttcaatatgctaacaatgtactatccgaaaaagaaagaaaataatcccatctataatagcatcaaaaagaataaaataggaataaatttaaccaaagaggtttaaagatctgtacactcaggacagtaagacatgaatgaagaaatcaaagaagatacaaataaatggaaagatatccmatgttcatggtttggaagaattaatattgctaaaatgtccataactactcaaagcaatctacagattcaatgcaatccctatca

SEQ ID NO: 822526 - DNA, 595 bp, Homo sapiens
agaccaaggttttatcatacagatgaagcctccaggtagcaggcctcagagatagaatagattatatatatttcttatacttaagatctgtgttgrtgttaatgctggaggggtataatgaggcatgtctaccccctcttccatcatggcttgaaccagtttttcaggttcactctggaatgaccttggctaagaggagggatccattcagatggttagaggggtctttaaattttatttttgcatatatatataagcatttactatatatagtaaatatatttttatatattttactgtaaatatatttattatatatagcaaatatttttatacagtaaatatatttattatataatacatatatttttatatagtaatatatgtattatatatagtaaatatatttattatatataataatatatttaacatctataatagctatagatatatagatgttatatatagatatctatatgtaacacctatagatatatatagatgttatacatttatatataagatctataaatatatacacttcaatataaaatttatgtataaaaatgtgcatatacatttttatttatat

SEQ ID NO: 822527 - DNA, 615 bp, Homo sapiens
catagtaagtgaatacattacataggcaattgaacactcttgagaggtgtcaggggggaaacgtggaaaatggaaactgcagatacctgaggatgcattcctattaatttctrtgatgtagagatataaaataaaacataataaagcaagaataacacattgtattaaaataattgcaacactaaaagcaaggtaaattgttttccaggaaaaaaaccaacaaacgctgatgaggctgtgaagaaaagggaacatatatacacagttggtgggaatgtaaattagcacaacttctacagaaaatagtatgaagatttctcaaagaactaaaaatagaactgttcttggatcttctcctcttcatgcttaatttctttggaataatggagtttgtttcatcttgtctccccatgagtaacagagcttggtcggtcactgcctcttcatgttctttaggcttccaaagagaaagaataccaaaaaaccctgagactgggaatagcccctgccttgggatctaaaataatctaagctagtgatattaattacggtgttactctaatggtctaaagccaagatagaactgcctatactcagaatatgccccatacagtg

SEQ ID NO: 822528 - DNA, 625 bp, Homo sapiens
ttaaaataaaatcaaattgtcttttataattagaaggaaaccacagaattcttatttgtttttcatgtgttctgggagtcaacagaatagttgaatcacggaaccaagtcagggaaagctttctagcccaaagaattggattcaattgaatgccaacattttcctttactacatttaggattcttgttcaatgtaacagcgacaatatcaagttgttaacagacattatagaactaaaaccaaacttcttcgtgttttctgtttgagcatatcatacacagtataattagactagtcaaattttatgtaattacaaacattagaaattgttttgaaattgaacattaaattactttaatttccaatattttatgtagacactaattaatttttgaaatttaagtagaaaatgtaatctggaaaataaaccctaccattgtgtttaaaaatataaacaaaagtataaatattatttttattatttaaaatacaatctattataattattacctagtagttttgacaattayatgttttcatcaatatcacacttttaaaagttaaggtaatacaatcttaaaatagatgttaatgagacttttctgacaattttgtaagaacagtt

SEQ ID NO: 822529 - DNA, 517 bp, Homo sapiens
taatgacaggattcccttcagcaaatgcaaaatatgaaaatatttcaattttacaaggcaagggaaaaatacattttcctgaatggttctggaaaggccacctctattttcacaagtgtggctgtaaaataaacaagcttcatctttaatttacctttgctaccgcaccaagatgcctaggtgttaagaaaagactgtacagtgatgcatttgccagacaaaaagctttccctgttattaatgactggtggcgccccagtgtaatcaaagggcacagctgcagtgatatacggcagtgacaagccttgggatctttcctcctcaatgctacgagcctaacagctagcagtagagaactcccagcgctgtatatctacaagataaatagcacaagatatgaatatacgtatggctyacagtcctgaaaagtattgttatatcctcccacacacaatcattctaaatatgacgcaagtgcatttttcaccatttcagtacaatccttgttgtttgtaaa

SEQ ID NO: 822530 - DNA, 517 bp, Homo sapiens
taatgacaggattcccttcagcaaatgcaaaatatgaaaatatttcaattttacaaggcaagggaaaaatacattttcctgaatggttctggaaaggccacctctattttcacaagtgtggctgtaaaataaacaagcttcatctttaatttacctttgctaccgcaccaagatgcctaggtgttaagaaaagactgtacagtgatgcatttgccagacaaaaagctttccctgttattaatgactggtggcgccccagtgtaatcaaagggcacagctgcagtgatatacggcagtgacaagccttgggatctttcctcctcaatgctacgagcctaacagctagcagtagagaactcccagcgctgtatatctacaagataaatagcacaagatatgaatatacgtatggcttacagtcctgaaaagwattgttatatcctcccacacacaatcattctaaatatgacgcaagtgcatttttcaccatttcagtacaatccttgttgtttgtaaa

SEQ ID NO: 822531 - DNA, 605 bp, Homo sapiens
ttcaaatctaaaacacatgaacaaaatcaggaggactgaggaattcaggttatattaatagcagttggactaatgatatcagccatacagaacttcctaggagaccacgggctgcttmcctgtgttgcctcggacctcatcacctgggatcctgtttctgacctcaggttttaaaattttatccttttaaatggaccaaatactaaatctttccccttgtcaagtgtttgtgtttttttcttagattctaaagaaaattacatgctctttgaattccttaaacatatagtttgttcccaagcagattaggttcttgtctgaaggaatttgatgacttttactctgtttggcttcctaattgtcagaaaactgggtgcacctatgagtcacataattaagaaatcccaatatttgcagctccatgacactgcagtgtttaaccatttttagctgcagaaacttttctacaaatagtagatgtattaaaagacacctgccctggtggggctgggacggtgtcccctcctctcctagtgatcgtccttctgttgcgcacagcttagggctactcagcagataacagatttgctcgaggtaccttgttt

SEQ ID NO: 822532 - DNA, 652 bp, Homo sapiens
taaagcagaaacaacttttaatgaatgaaatatagcttgcacttgttcaagagatggtgcaagagcttcagcttccaggctgaattttccttttgacatacttcatgacgcagccctctgatgaacagtacctcctggttctctgtgtttcctttcttaactccgtgtctccacataaggcaagataggtcctaaaaaatgactggacacttaatgtgatcaatcagcctgtctgtcacctatccatgagtcatagatgcatatttacaggaatcttcacaatcttatctcaagggaataattaataaactgggaatatcagatactttaaatatatataatttttttcttagttctaacaagtatatattgagctctacctctgttcccagaactatgataggtgctgaagaagtaactcctcacagagtagttattacctagcttactgtctagatcagagattcttttttttttttcttcttttttttctttttttttttttttaatgttttttttttattatactttaagttttagggtacatgtgcacattgtgcaggttagttacatatgtatacatgtgccatgstggtgcactgcacccactaacgtgtcatctagcattaggtatatctcccaatgctatccc

SEQ ID NO: 822533 - DNA, 617 bp, Homo sapiens
tctgccaccaatgtgatttcaatccatcaaaacctctttctcttggaggaaaatcctatttatttctactctatctcctaagcacaaygagcagcttttctgtgtggaagatccctgccctccaagatgcagccctacccaggaaaggctgcagaaaccagcatgccaggctcactctctaaccgaaaagctctggaaagaagaaagaattgtttccatttctatgtttgttttttgagagaggcctaagcctcctgaacatggcagtctcagttgcaaaactcagcaaatgctttttcaagtgtccagcaatctctttagtaatattgatatttgttcttcctatctttttttcaaattaggctaactttggctgcagggtaagtaacctctaccacttactgtctgtaactttgatcaaggtatttaacctctctcctctcttcctgttagtttcctagtttgtaaaatgggagtaatagtaatagtgatgataataataataataaccacctttcttctgagtttaatggaagatgaggtgagattagatgcagaagtgcctatcctattgcctggtacactgtaatagccaacacatcttaatgtctctcctg

SEQ ID NO: 822534 - DNA, 614 bp, Homo sapiens
taggtagacccagagcacattcataaactccccttaccagagatgtaatttgtaggaactgctaattcagatgttttgggaatcagagggtggaccacatgatccccagagctcttttagacrggacagaccctttagtccgtgagcctctcatgtcctgccattatctgcagttatgagagatgcaccttgtcaagtaaaagtaaactttgcctgttgcccatttgcacatttcctttattttcgctgggcaggaaagccctttcaagggctcactgaagcacggtgtgtcaaacttggtaatattgacgttgatagtttaagattcacagcaggaaacaaatggcattggcatgaagcaatcagaaacgaggtggctcaatctgagtaaaaaacatctttccaactgtgcagttaaagggcaacgctatacgccataacctcctggccgaagttgtgatccaaaagagagattatatgtacatagttgatggaaaagaatgctgtcctatgaactggaatacctttttatacgttaaaatgtttttgaactttgtatctaccagttagcctattagccttgatcagggagctattaaaacccaggttataag

SEQ ID NO: 822535 - DNA, 524 bp, Homo sapiens
gatagaaactcattcaagttaataaacctaattttctctagaaattccccagagtctcattgtgaatctgacttgatagctccccatacctcttcctaaaaaatagagatcgccgtgccactccgtccagtggtttgctctgcctgtctttgtcacacatagagttctgctatagcaactcatgaaaggatctgtcttctgtaccagcatcctacctcaaagtgatcaaacctctatgcatttaattcatatttcatatttcatatcaaaatatgccctcagtagtcactgaccccagcagttccacacctcccacctcgtttcagggcctacagtatttctacaatagtcttgacaaccctttcaacccttgtatttagttttcagaaactttgttgacttcttagtttcttttttttttctcctttgacttactataccatgcagggatttaaastcctttttcaggtcatagtgctttaatttattggtttttttttcctgaaattgtttactgaaattct

SEQ ID NO: 822536 - DNA, 524 bp, Homo sapiens
gatagaaactcattcaagttaataaacctaattttctctagaaattccccagagtctcattgtgaatctgacttgatagctccccatacctcttcctaaaaaatagagatcgccgtgccactccgtccagtggtttgctctgcctgtctttgtcacacatagagttctgctatagcaactcatgaaaggatctgtcttctgtaccagcatcctacctcaaagtgatcaaacctctatgcatttaattcatatttcatatttcatatcaaaatatgccctcagtagtcactgaccccagcagttccacacctcccacctcgtttcagggcctacagtatttctacaatagtcttgacaaccctttcaacccttgtatttagttttcagaaactttgttgacttcttagtttcttttttttttctcctttgacttactataccatgcagggatttaaagtcctttttcaggtcatrgtgctttaatttattggtttttttttcctgaaattgtttactgaaattct

SEQ ID NO: 822537 - DNA, 524 bp, Homo sapiens
gatagaaactcattcaagttaataaacctaattttctctagaaattccccagagtctcattgtgaatctgacttgatagctccccatacctcttcctaaaaaatagagatcgccgtgccactccgtccagtggtttgctctgcctgtctttgtcacacatagagttctgctatagcaactcatgaaaggatctgtcttctgtaccagcatcctacctcaaagtgatcaaacctctatgcatttaattcatatttcatatttcatatcaaaatatgccctcagtagtcactgaccccagcagttccacacctcccacctcgtttcagggcctacagtatttctacaatagtcttgacaaccctttcaacccttgtatttagttttcagaaactttgttgacttcttagtttcttttttttttctcctttgacttactataccatgcagggatttaaagtcctttttcaggtcatagwgctttaatttattggtttttttttcctgaaattgtttactgaaattct

SEQ ID NO: 822538 - DNA, 478 bp, Homo sapiens
gaagcaaaaaccatcttcacatagcagcaggagagagaagggaaagtgaaagggaaagagcccctcataaaactatcagatctcgtgagaactcactcactattatgagatcaccatggggaaaacttcacccatgacccaatcgcttcccatctcccacccttgatacgtggagtttacaatttgaaatgagatttgggtgcagacacagagccaaaccctatcacctgcagtttcagaaaatatattatttcagatcaaacaatgggtatatgaagtcctgcaaacttgatccatacaaaacatatcagtgtattctttcataaaagtcaaaatgctgttgagaaaactgattttcaggattggcaaatcaatatatatctttctaagagttrgacttatagttaaaccacataataataaaaaatgtccatgtgtcaaaagccagaataagtgttgatatatgattcatgttttt

SEQ ID NO: 822539 - DNA, 628 bp, Homo sapiens
aagcacacaacgtagctgcctattcaagagaagatttgctggccggctgtgaagaaatgaggtcggcagacagccttcagctctcagctcccttagtgtatgcctcagctgcagagagcyacctgcctagaggacatgctcttctcaggagcagcctacttctgatgactgaggaagacaagggtataaatgtccagtgctttcagttcaatataagacaatgcaggtgagcaactcctgacagattgactgtggtttgcttggactgcattatgttttaacttgtccctctgctctaacctatttcctccgccttcttttgcagatatttattccaaatcaatcctgcaccagaagctccatttctgcattcgcttccagaaaacacagcagccgtatgtgaatttgggagtggtcccacgaaccggttatgagacgaggttttggagctggatcacacctgacacaactggcattgaaaaccttattaccaagagcctctggcacaaggtagaagtccagttgtaaaaacattcattgctgatgaattgggacagtagaagttgatggaaaaacagaattaagaagtgtggtatatctggcacttcaaactttttgggaaaaaaag

SEQ ID NO: 822540 - DNA, 593 bp, Homo sapiens
ctggtcctgctctccccgtgggccctgcggggcggcggcatgcatgtacatgagggtgaatcccacagctaaggaagaccttctttccttgatttccagggcatctttttgtgccgtttgcctttccatgttctaggctggaaatttctttttttttttttaagaaggagtctcgctctgtcgcccaggctggagtgcagtggtgcgatctcggctcactgcaagcttaggctggaaatttcaaataagcttgtgatgaaacccacagtaggaaagcttgctttttttttttttttttttttttttaaagcactggccatcttattcccatggcaggtccttgctgctcagagaggcaggccgtggtgactggtccttggtgctcagagaggcaggcggtgtgacggtttttgccatttctccatgcctgggacctcctaaggtcaggcattgtgtctcattcactgctgcatctccagtgcccggcacagtaaatgaacagagccagtgctcaggcagagggtgccaagtsaaaacaggattaaaagtcccccagtcttggccatagctggcccccaccttccacctccaac

SEQ ID NO: 822541 - DNA, 611 bp, Homo sapiens
ttcagttgtatcattgaaaaaaaaatgatttatctactcaatgataagtattttgrggaaatatagtacacacatatacacacagtcatatccacacatctatgtatatgtgtatgtatataaatgtatattttatatgtataaaatatatgataaatataaatatattatttattatcacatgtaagtatattttaaatacagaaatatatacacattgatatggtttggctatgtgtccccacccaaatctcatcttgacttgttgtcatccccatgtgtcaaaggcaggaccaggtggaggtaattgatcatgggggcagttcccccatgctgtactcatgctagtgagtgagtctcatgagatctgatggttttataaacttctggcatttcccctgcttgcactcactcagtcctgccaccctgagaagaagatgcctgcttctcctttgccttctgccatgactgtaacttccctgaggcctccccctccagctctgctgaactatgagtcaattaagcctctttcttttgcagaggaaccctagttattgctgttcttcagtttgggattttgtgtctgtggcagcagagttgaatgtccacaa

SEQ ID NO: 822542 - DNA, 556 bp, Homo sapiens
ctggatcccagccttctttcctatcgtagccccaggcacaatctgttaagaagaggatgattaacaaatataacctccccacccacgcccgccacccaggagaaagaacagggcatccatctcctctgaagcagagacacagtgtggcctggcatatcaccatcagatgccaaagtatggtcagattctttgacacaaacaacagggcattttgagacttgtggggaagatgtgatacactccaatatactcacatgagttgaatgtattcagggtgaaaaataaggcttttaacagacattttgctaccttagcattagacagtaatgtgaatgaatgtcctagtgccaagagttgtcagaggtttattatgagattcctctatccaaaatctctctacatatgattattattttgtcaaaagaagtattattaaaaataatttggtgttataaccctttaaaaatgttaatacaaaaggagctttctaaaaagcagctgaaaygccttgtctctgtcattaactcctaggaagcgtgattctggttttcagttc

SEQ ID NO: 822543 - DNA, 608 bp, Homo sapiens
tatttcctcaggatccctatgcagcycttgatgggactagttgtaaggttgcttcttcagttttagttgatcgccacttcttctgcacaacagcagagttctatgggactgaataatgcaactaaacacaatttgattggacacacatttttcccagagccatagttcagcctgtcactgctatgtcatgaaacttctctgtctccatcctaacccttcccatgccccactcacaggcacgctgggcttcagtcacaccgactgtctgccattcccacatcacaacaggcttgctcagatcacttgcccattcatttatgttagtctctctgcctggaacttccttccttctcttttccacctagaaaatgtgtatgtctcccttaagctaagcataaaagacatctagttctggccaagattcccaagtacagttagtgactctcctttttatgctcctgtagtactgatcagtgatggcatttatccagcctgtatgaattcttctagaatgtaaggtggacttaggtctttttttttccccacaatgttgtagacatagtacctaatagtggttgaagtaatacatctatggctgcatctgacat

SEQ ID NO: 822544 - DNA, 573 bp, Homo sapiens
tattgctaataaatgctaatgatcacctgaatcttcastgagttgtacatttgtttgctggtacagggtagtgcctcagtgatgatgactcctgactaatggggtggtttctgaaggttggagtagttgtgataatttcttaaaataagaaaacaatgaagtttgcaacaatgattgactcttcctttcacaaaggattcctctgcagcatgtgatgctgtttgatagaaatttcacctatggtagaactttaaaaattggagtcagtcctctaaaccctgctgtgcctttactgactaggtttatatggcattcttaattatttgttgtcatttcaacaatgttcacagcatcttcaccaggagtagatttcatcccaagaaaccatttactttgctgttgcgtaagaaacaacttctcgaggccgggcacggtggctcacacctgtaatcccagcactttggaaggctgaagtgggtggatcacctgaggtcagaagttcgagactagcctaattaacatggtgaaaccctgtctctactaaaaataaaaaacttagccgggtgtggtggc

SEQ ID NO: 822545 - DNA, 662 bp, Homo sapiens
ggctactagaggatccttttccggctttggaaactgaggctgactgcaccatttacagaaatttcatcatgaagatccttayacttaacaccttaaggtgatgagttttcacatgactgttttcaaggccacagccaacacctttaatcatcatcactaaaggcctgagactgctctccgtgctcaacaccgacgggagcggccatgtcttccagccacacggcaggctggagtgaagtggtacaatcttggctcactgcaacctccacctcccgggctcaagcaattctcctggctcagcctcctgagtgctgggactacaggcgcgtaccttctttagtagagactgggtttcaccatgttggccaggatggtctctatctcctgaccttgtgatctgcctgcctcagcttcccaaagtgctgagattacaggcgtgagccatcagacccagcattttttttttaatttaaatttaaatttttttcatttttttgaaaggtttttttgtttttttttgttgttgttgttgttgttgtttttgagacagtcttgctctgtcacccaggctggtagtgcagtggcatgatctctgcaacctctacctcccaggttcaagcaattcttgtgccgcagcctcccaagtaactgggactacaggt

SEQ ID NO: 822546 - DNA, 602 bp, Homo sapiens
acagcagatttcccatcaaaaacaatacaagtcagaagacagtgaagcaaaatctttaaattttagaaagaaaatttgcraaaatctgtccactgaaaattatatacccaagaaaatatcttgcaaaactgaagatataattttaaaaacctttgcaagcatacaatagaaaagctgaaagttgtcatcagcagtgtaactataatagaaaaaaatgttaaaagaagtccttcaagcagaaggaaaatgatctgatacaaatatagttggaataaaagcaccataaatgataagtatatgtagttatattttttattattcaaatctcattaaaagattattgttgaaataaaaatgtgattatttgtagcatacataaatgtataaaaataatagtacacaggttagtaagtaagtaatcatatgtttcatataactggaaacatatgattataagatatatataataaattggtatactattactagaaattagactaaaaatttaaagatacataaatatactgtaaaacaacaactaaaataataaaacaatggtcatagcagaaaatccaaaagtaacttaaaattgacaaatacaa

SEQ ID NO: 822547 - DNA, 656 bp, Homo sapiens
taataatacatgtgcagagctttatgtgtgtccatatacttcaagccaaactgatttttggtgaatttgtctctttataaaatacacagaaatagraagaaaagcactgaaaattgtggactcctagtaataatcaattaagcaattagcattacattacattttcctgtcagtttggcgagcgtatttttcaccaccgaagataataaaaaaaaatcttaatttataatgagaaattataaaatctgtcagatgatctagaatatatttacgtaagatatgaagattttctttcaacaataatgacataggagaaaaaatcagttatacatttccatatttattaaatatcttcctattacaaaaatttcaatttctgctttaaaaatattaaatttctcataatagcataacccagaggcaaacattgtcattattttaattaatatttctaagaacgtggactttggaatctaagagagttaaatcctggctttggccctttaaagctatgataaatgtttcaggtgatggatatcccaattactctgatttgatcattacacgtgatacacacatatcaaaatatcacatgtatgccttaaatatgtgcaactactatgtattctcaaagaataaacattaagaaaagttat

SEQ ID NO: 822548 - DNA, 614 bp, Homo sapiens
ctccagataaacccgtcagatttcatgagtcttattcactatcacaagaatagcatgggaaaaactggccccatgattcaattacctccccctgggtccctctcacagcacatgggaattctgagagagaaaagtccagttgagatttgggtggggacacagccaaaccatatcagatagacaatgtaaaaaatgtaaagtgtgatattaaaggcctcatattaactacaaagcaaaaacctataaatgatacactaaaaagaaaaagaaaaaaaaacatactactagagaaaatcacataactacaaaggaagactgaaagagaaaatgaaaggagaaaagcatttctaaaactagacaacaaataagaaaatggcagtagttaagcccttgcctgtaaataattaccttgaatataaattgattaagtcatacaattaaaagacatagcgtggcttaaagaattaaaaaaacacaacagcacgactccactaaatcctagctacaatagattcattttaatgtaaggatacacrtagactgatagagaagagatgggaaaagatattccatgcaaatggaaaccaaaaaagagcaggagtagctatacttat

SEQ ID NO: 822549 - DNA, 575 bp, Homo sapiens
cataactcaccatatctctctctttttctgccttttttctttttaaatataatatgtatattttaaatataatatatatattttaaatataatrtgtatatctttttaaatataatatgtatacatacatatatgtatatatacatatacataactcaccatatgtctctttctttttctgccttttttctttttaaatataatagacacgttaagggaatccaagttttaaaaactcttagtcattttcaggagatttcttaaaacaacccacaacatagtaagagatatagtaaaagagcatttcttatcatctttatttgttctattttaaaatgtagcaactagaaatatatatatgtgtgtgtgtgtgtgtgtgtatgtgtgtgtgttgtgaatatgttctttattttttactgcatggagctgtcattcactcaataattcaatcatttctttacccaaaatttccagggactcctggaaatacatcagtttaagaaaaaaacttacatactgtcgtatgttacaatgtagtatccattatgaagaataaagtggaagaatgagttagg

SEQ ID NO: 822550 - DNA, 517 bp, Homo sapiens
ccaacattctattctctacttctatgaggttgacttttttagattccatatgcaagtgagattatgtggtatttgtctatctgtgcctagcttatttcacttagtatataatgtttccyatattcactcatttgtcatgaatgacagaacatttctttaaaatatcccattatatatatatatatacaaagtatttatatatacacatatataaagtgtttatatatacacatatataaaggatttatatatacatatataaagtatttatgtatacacatatataaaatatttatgtatacacatatataaagtatatatacacatatataaagtatatatacacatatataaagtatatatacacatatataaagtatatatacactaaagtatttatatatacacatatataaagtatttacatatacacatatataaagtatttacatatacacatatataaagtatttacatatacacatatataaagtatttacatatacacatatataaa

SEQ ID NO: 822551 - DNA, 603 bp, Homo sapiens
tgatttttgtatatggtgaaaggaaggagtctagtttcaatcttctgcatatggctggccagttatcccagcaccatttattttataggaagttctttccccattgcttgttactgtcaactttgtcaaagatcagatggttgtaggtgtgtggctttatattatataaatacatttaaaatgtttatagaaaatatatacatttttaaatttttatatggtgagaggtacaagtatagatttcttaacgcatatactgtgtcatggtgaagtccgagcttttggtgaacccatcacccaagtagggaacattgtgcccaacaggtaattattcaacccttgcaccctctcacccctccacttttgtagcatccagtgtctattatttcactctatatgtccatgtgtacccatgttttatagcttttgcttataaatgagaacaagcagaatttatctgtttctgagctattaatactgggttggtgcaaaagtaattgtggttttygccattacaagtaatattggcctccagttccatccatgttactgtacataacatgatgtcattctttttttatgactgagtagtacttcatggta

SEQ ID NO: 822552 - DNA, 631 bp, Homo sapiens
tatcttttttttgtagagataggatcttgctatgctgcccaggctagtctggaactcctggcctcaagcaatctccctaccttggctgcccagagtgctgggaattataggcataagccaccgtaaaaaccttccatacagattttaaaaacttgccctggttttaaaatttgtatggaaaggcaaaagatccagaatagccaatacaatattaaagaagtataaaggtagaagactgacactacctgactttaaacttactatgaagcgaagcaattcagagcatgcggtgttgcaaatgaatggacaaatatatcaatggaacagaacagacagcccagaaagagacccacacacatatagagtcaacaaagcagaaaaggcaattcaatggtgaaattacagttttgtcaacaaatggtgctggaaaaatggacatcttcatgcaagaaaacaaacaaaaacaaataaatgaatctagacagagaacttgtagccctcacaacaattaagtcatgagggatcacagacctacatgtaaaatgcaaaactaaaataatttmtagaaaataaaatagaagaaaatttaggtgaaattaggtttgatgatgagttttagatataataccta

SEQ ID NO: 822553 - DNA, 620 bp, Homo sapiens
ttccataatggttgaactaatttacactcccaccaacagtgtaaaagcgttcctatttctccacaccctttcaagcatctgttgtttcctgactttttaatgatcgcctttctaactgctgtgagatggtatctcattgtggttttgatttgcatttctctgatgaccagtgatgatgagcattttttcatgtctgttggctgcataaatgtcttcttttgagaagtgtccatatcctttgcctactttttgatggggttgtttgatttttcttgtaaatttgtttgagttctttgtagattctggatattagccctttgtcagatgggtagattgcaaaaattttctcccattctgtaggttgcctgttcaccctgatggtagtttcttttgctgtgcagaagctctttagtttaattagatccaatttgtcaattttggctttttttgccattgcttttggtgtttcagtcatgaagtcatgaagtccttgcccatgcctatgtcccgaatggtattgcctaggttttcttctaggggttttatggttttaggtctaacatttaagtcwttaatccatcttgaattaatttttatataaggtttgaggaagggatcca

SEQ ID NO: 822554 - DNA, 586 bp, Homo sapiens
attacattggtgagaacttagtgmtacggccatgagtaaatccatgagagtctgagaaagtatttattccgggaaatcatgtggccagctaaaattgggattttattatctttaaagatgtgaagaacagatacgaaggacaactggcagttacttctacaagcatctactctacggacatttggatttttatcccttaacatgttcattgtaatgaactacactgaagaggtttcccaatattgaaaattcttgcattcttagaacaaaacttcatcatattgtatgataacacattatttcaacagatctccaaaatataaattaccaactttgacccaagaagtagaaaacatgaatagaccaattaccaaagattttattacacttgttaaaattcctcgtgtaaaaaaacagacgaggaccacttggttttctgacttagttccatctatatatcaaaaaataaaatagacaattcaaatgtcatttaaataatcccagatcataaaaaaggaaatattcccaattcattttattattttaatattcaaaacatgttagagttctaaaaactctatttata

SEQ ID NO: 822555 - DNA, 608 bp, Homo sapiens
ctgaatgagaaggcaaactgaagcatatctgaaactctgcatgtagttgtgcttcctgtcctcaggggagatggcataaggatagagatagagagcttcttgacagggacaacacasagcctgaaagagacgcctgagaaggtgctgggagtagtctcctctatggaataaggcaggcagcaaggtcaacaggtgccaccttactagggaagaaaatgtaggaagagtgaaaggaacttatgaattcagacaatgggtatcagcttacaggaatcattagcctgacaggtagtagtaggtgattcacaaaaatttaaataaattaaaaagttgacagaggtacaaaggaagcaacatttcaaacatatttctcgtctctgaggagggtatttggaataaattcaattctcttcataaactatgcttttcttgccaaaacaaaatagatcacagctcttatccacgcaggaattcctttggtttgtatgtagaaaggtagctcatcctttcaacattatccagaattaaatgtagcctttataacccttggaaataacaatgtaacacttcttcataggtgagtaataaatgactttttccaaaatcaa

SEQ ID NO: 822556 - DNA, 627 bp, Homo sapiens
attattgtgttttatggacaggaaattgaggctcaggtaatwtcaagtgaaatccccaagatcatataattaataaatactgtaaaaacggtagaagtgactcacatttccaatctccatgctatctcatatactctaattgcctcttggggaaacataggctggaagaagaccaggcctcattgtaaactctcgagtgcccagaaattatttacttcaactatttctatcacagtttgtccactttaaatggggtagagattttctgaaacctcctttctcatttgaacaatctgagaatacatgtgtttaggcttaaatcataccagaaactgtcaggcagaacagtccctttgtaagcccaaggattatacaactttagttgtataatttagttgtatgattatacaactaaaattttaaccagatacagtcccaaatgaattatgttaattcactctattatttctctttttaagattacagaaattttatgccaattttatctacattatgctgcaatattctaaatatccctaattaaataccaactattttgatgaaatattttctttaaagtcatcatttattatcatctgatatgaaaaccattcctactagacactg

SEQ ID NO: 822557 - DNA, 639 bp, Homo sapiens
tcggagcatgtttcttactcttacaagtaagtatttagtatggtgtgttatctcctcatgctaacctttggacatgacaaattatacattcaaawgtatgtgtgcatgtatgtatacatctatgtttacaaacaaatacatatttatgtatttagctttgtgtatttaaatacacagatacacatacgcatatatgaataaatacacatatatatgtataaatgtgtacacatacacacattcatgtatgtgtgtataaaatttatgttcaaatatctgtgtgcattcctttgtatacttgacacataccagtatagaactgtcattgtattattttgccaaagaaagacatatataaaataaaacaaaatgaaaacaactgtaatctaatttcaatgttaatccatagatacaaagattatttttaatctcagaagagaaacatatactttcaaaatcaaacatacatgcaaacactctagtactatatttagatttctgagatgatccgcactatgcttatctttgtgttgcccatttgcctaaagtctgatacaaatgtcaccacaaattggccatgttcaaggagcctcagctctgtggaaggaaacttgagcagcctctacctccgcaagttta

SEQ ID NO: 822558 - DNA, 608 bp, Homo sapiens
caactctactgacaacttgattttaaacttctagcctctagaattgtgagacaataaatttccactgtttaagcccctcagtttgcagtactttgctatggcacctttagcaaactaacacagttggtgaattgaccatttagttattaataatatctttcttgatccatagtaggttccttgttctgaagtctactttatctgatatcgacatgtctactccagttttttttttttactttaaaattgacatttagatggtatactttttcccatccttttacttgtaatttatctgcactattatatttaaaggggacattgtgtagacagaaaatagttgtcttttttctcactaatttaatttggcaatctctgccctttaattgatgttttggctacttgatacacatttaatgcaattattgatatggctgaatttaagcatatcacttaatttttaaattttatatctgtccactttggtttttgtycttcagtttttttttcctttatttccctcttttggcttagctgaatgtgttttagcatttaatcttaatatccattgcctcttgcaccatatttctcacactcactcccctttt

SEQ ID NO: 822559 - DNA, 599 bp, Homo sapiens
gctttcattcccttgggaggacagtcacagagtatcatctggtttcttgggggcttgaatatgaagaggagcacatggatatttatgtgtaaacaggttctgctatccctactctgtgccaggagctaagaataaagaatttagtaaacaaattttattttctcagtagaaagatccacatggttttatctcttaatgtgaaactgaaatgtgttttgtaatcaatgcttctattttatacagtagggttcatcacatcaataaaaagttgttattgaaatgaggatgtgtgttaccaccagtgagagtaaaatcaaggaatttctccctcaagaaactctatgcagagttgcatagaattttcaatagaggaaggcaaggtgctatcaaggttcagtgcaaaggcagctaatccagtccgaggggacttcctagagaaagtggtatctgaaattttaaaaataaatagaagttatctatggaaaagaaggcagcacttataamcatggaggcaggaaagagcatggctcatttagagaaatgcaaacaatttccattactggagaacacacatagaagtgagaggattcaaaatgaag

SEQ ID NO: 822560 - DNA, 648 bp, Homo sapiens
ttatggtgataagcatgtcaatgaccttgttgtataatatggcttgcatggcaagacaggaatcagccccaccacaaggagagagcctgccatcattcttcaccttgacaatgaccttgttctcccactcttttttacctgtaccctcttgagctgccttcatcaaacactccctccactgccttactttttttgggaaactctatgaagcagaaggaatcatactaagacagagaagtgagctagtgttcagagtagagtgacaagggctagcaacgcaaggtgaactgagccgtgaactgcatcacaccggctcatgcatatgttgcacacttgtaggcagatgtcatatgtgctccttccagtgtgagccaagctgggatgccagactcataaagccatgccatgtcgcaccttcacaaccttccaaatgcattcagatgtcactattcatgccatgtgcttgggtggccaaaccttcaatgctgcagaagggctgtgacattagaagtttggtctctgtggagtctcctgcatggacctcctctcccaacacactatgcttagtyagcatatgctcagggaacctataaacagggactcaaaaaatgagaagattttggcttcaatatagtttttatagaatag

SEQ ID NO: 822561 - DNA, 483 bp, Homo sapiens
ctcatcagtgttttcagaaattgaaaatcacatttaagtcatgacttttcaaagaggcttgtactgttgggattggaagccctctggtacccacctttatcagagggaggtgtcaacgtgtctctccacattacatccgaggtaaaatctgcgtccaaaagccacttcttcttttggcagacagcacagctcaaacacagctaataactctgaaaattgctcccttgttcctattgaccagtggggtgctggagacaaagcaaacctacgaacacagcaccagcatctgtcaatcaaagtgacattttatttagttaacctgggaacttcccactagcactggttgttagtttggggcagggggaggagggtgacgctaatggtacactgtaataaatacacctttagcataggctaaaactgtttattttttctgaagactcaagctgtagctttgggctytcaaatgtaatctttcaaaag

SEQ ID NO: 822562 - DNA, 556 bp, Homo sapiens
ttttttttgacggattctcgctcttttcccagactggaatgcaatggcacaatcttgrctcactgcaaccttcccattccgggttccagcaattctccacctcagcctcccgagtagctgggactacaggcgcatgccaccacacccggctaacttttgtgtttttagtagagacagggtttcaccaggttggccagaatggtcttgatctcttgacctttgatcctcccacttcagcctcccaaagtgctgggattacaggcttgagccaccaccagctttttaaaattggtgatgcccaagggctattccagactactggaatgggaatctctagtggtgggatctaaaaattatcatttcttaaaagctcccaggtgagtgtgtggctggtgttgacaagcaccaccagagcaggaagcacaggatgccatgtggggccttggaggagtccccagcaccaccttagagaagaggggaggctgctggcaggaaggggtagatgagctgagacctgaagggggaaaaagccaggctcaggggaggtggacaaaag

SEQ ID NO: 822563 - DNA, 482 bp, Homo sapiens
aaaataatttgttcaaaatagtaagtgtaataatttattcaaatatgtacatatatacaaacatatatagacatgtatatatgcttagatataagttaaatgaatgacagcaatggtccatggacgggaggaaataattaggattactttgttattataaggtactcacactttccataaagaggtatagggctattagaaagtgaacttggattagtcataaatgtatatcacagactctaaggcaaccactaaaacaagtgaagaaaagtataactgatatgctaagaaatgagagaaaattggaatcatataaaatgctcaactgaaaccacaaaaggcaggaaactgcaatgaataactttcacaaataatgtttgtctttttcttgttcacggccttagagattgtacttttctgggttgaccctttgtaccctgtcttacscttcacttggatccatagaccactgctagtccaga

SEQ ID NO: 822564 - DNA, 579 bp, Homo sapiens
cataagtggaagcagcccgagatcctcaccagatgcagttgccccatccaggattttccagccaccagaatcacgtgccarataagcctttcgttgtttatagattacccagtctcaggtattctgctacagcaaagcgaaatagaccaagacactatccaaagtcaaaaggcacaaaaacttatactcagagaaggcccaccccaaccctgtcctttcccattcatactcctctccaacactttaaacaacatcattgttttctaatttatctgttccttttggtagcaataagcagatatatgcatgtttttctctttgtcacacaaaagttaggatattttttatggcttccttttacgttttgatttttttcatctggtaatatctcctgcaaagaagtcactgtcaattcacagagcccttcctcatcctttcttacagatgcacagtgttccgttgtatgcatgtgctgaagtagatataataaatctcccatggttaggttttccgatagtttccaatatatttacaattacaaatcatactgcaatgactaacattgagcatgtgcatttg

SEQ ID NO: 822565 - DNA, 608 bp, Homo sapiens
aatgttagcgccgaaaaatgacatctgagattcaatattcagtggatggcattaagatcaaaatggagatgaccaaggaaggtattaataccagcaaacatgaagatagttcaatggagaggatctggtctgaagagaagagagaaatatatttgaaaaagtgttgaaaagaggctgaaaccaatgaggcaataccaaaagtgccaacttgtgcatagttggattcccagatggagggagtggaaagcgagaataagacagacaaaacataaataaataacataaacataaatgtaaaaacagcatagccaggtattcctccaaattattaaaagttgtatatttatatttcaagaatcccagcaaaactcacacagtgtaaatgtgaagaaatctatgcacaggcatatcatggtcatgattatcaaaagcagaattaaacaaaatcttatatgtgtatagagagttacacatagaggaacaaatgggccaatattttcaaagtgytgacagaaaaatactaaagacttggaattccatactcagtgaaaattaatgtcctttaacaataaaagttaaataaaaacttcttcagacaaatgcaggtg

SEQ ID NO: 822566 - DNA, 533 bp, Homo sapiens
atattacaaggctacggtaaccaaaacagcatggtactggtaccaaaacagctatatagaccaatggaatagaacagaggcctcagaattaccaccacacatctacaaccatctgatcttyggcaaacctgacaaaaagaagcaatggggaaaggattccctatttaataaatggtgttgggaaaactgactagcaatatgcagaaaactgaaactggaccccttccttaaactttatacaaaaataactcaagatggattaaagacttaaaagtaagacctaaaaccataaaagccctagaagaaaacctaggcagtaccattcaggatataggcatgggcaaagacttcttgactaaaacataaaatgcaatggcaacaaaagccaaaattgacaaatgagatctaattaaactaaagagcttctgcacagcaaaagaaactatcatcagagtgaacaggcaacctacagaatgggagaaaatttttgcaacctatccatctgacaaagagctaatatccagaatctataa

SEQ ID NO: 822567 - DNA, 517 bp, Homo sapiens
agtgcttctatcatgcatttcattgcaaggcaacccaaagccagtcagcccattaggtaatcagctcatcccccatgggggtctcatctatcagcayaggctggggatgtttccatatcttccaggtgaccgagagcatgcttctctgatccaagtgtgcaaagagtccagtatccccccataactactattagcaatccctaaaagtatatttcctacctaataattatacaccaaaattccttcataatgcgaagtaatttcttgtacccacaaaagtcaaaactgtcagctaacacaatacaaaacagaacagagccttagattttgagaaagatctattttctttcaattcatgggcttctgtgaggaaaacagaggtttttcccagaaaggggtctgtggtgcatctctgcttttccccaggagtctgttagaatttatgttaggttctctcatgtgtgcatcaagaatggcaaggagacaaaaaggttgtatgattatgagttaatttatt

SEQ ID NO: 822568 - DNA, 517 bp, Homo sapiens
agtgcttctatcatgcatttcattgcaaggcaacccaaagccagtcagcccattaggtaatcagctcatcccccatgggggtctcatctatcagcataggctggggatgtttccatatcttccaggtraccgagagcatgcttctctgatccaagtgtgcaaagagtccagtatccccccataactactattagcaatccctaaaagtatatttcctacctaataattatacaccaaaattccttcataatgcgaagtaatttcttgtacccacaaaagtcaaaactgtcagctaacacaatacaaaacagaacagagccttagattttgagaaagatctattttctttcaattcatgggcttctgtgaggaaaacagaggtttttcccagaaaggggtctgtggtgcatctctgcttttccccaggagtctgttagaatttatgttaggttctctcatgtgtgcatcaagaatggcaaggagacaaaaaggttgtatgattatgagttaatttatt

SEQ ID NO: 822569 - DNA, 615 bp, Homo sapiens
tattgttgaagctttatctgcatatctgttgtaacagtcgcttcttcctatatttgaattcgctttcatatgggaaaattttttcctttagatatacctgtgatgttgtytggatagggtactgtggctttgattatgggtgtgtgcagtaatgtagtctctctatgatttctttggctacaaacagtgtcagtgacatttgtgatttccttggtaggttagggtgtggttattaacagaagctgtgatgaagctgtgctgaggactgcagtgtcaggtgggccaggcttcaggccctagtggtggcagaggtgggctgactacatgcctatctttgttccccagggtagtgtacagtggtacctctgttggcagttaccagtgggctgatggtggcttgcctggatgctggtagctgcagcagtgggccaggtgtgaggagtttctctggcttctgggcagctgtcgtgatgtggctgacagaagaggcagtagtgaagtaacctactggaacccagacagtccatgctggtgttggcagtgactgccttttgcatttccatttgaattatagaaatagcttgtcagcttcgacagaacatcttctggtgttct

SEQ ID NO: 822570 - DNA, 631 bp, Homo sapiens
ttcatttatttcagcaatggtctgtaattcctggtataggagatttcattttataaattcctaaatactttattgttcaatattttgatgttattgtaaatggcatatttaaattttcaaatttcaaataktttttgttagtagataaataaaatggaattttgaatcttggctttgtatgctatgatcttgctaaattcactaataagttctagttgttttattgatttttttggcttttctttatacatgttcatgtcaactataaaaaaaggcaattatactttttctttgctaatctgtatgctctctacatttaaatatattaatgcaacaataagatgaaagccttttattcatagctaacagatattttttcctctatgataatattatactaatatttaagtctaggaaaaataacttcagaaaaagcattataaaggaaacagaagaaacaatagaaacctggattagattattaagtaaatatttgttagaaattttgaatatcataaaatataaaattaggatttatatcatatgccaaattcaattccaatgacttcagaatgagtaaaagaagagaactatttcatcaaatatatattttggttctcaggacaagaat

SEQ ID NO: 822571 - DNA, 598 bp, Homo sapiens
taaattctaattaaaatcaggtttttatccttaaatttaagatcaataatgcytgtactacggattaaaatctgttaaaacatttgcctgtggctttaaaggaaaaaagtgggaatgagacctcatgccaacagtgtcaaaaaattaagcttagctttgagttagctgacttatttcagtgtcagaacgttcagcttttcacaagaaatctcttataaaacctgttttcaaaaagataaaatgtagaacgttcaggcaatgttgctttttcagaatatcatgtttaatatgaaacagaaaaatgatcactttctaatattaattatcttttaaaaaccaatagctattagcaggttagttgttactcaatgtggcacaatatatgtaaaaggaagaataactagttaagaaatacatatgctatataacttgggagaatcctatctatgaaaaaaattagttcaaccaaattcatactgttatttctttaaaactttgagtataagcaaacacctataaaatattccatagtctttgattaaaaagatagccaaattctacattgattgacataatctgttcaaacttgcactagtta

SEQ ID NO: 822572 - DNA, 598 bp, Homo sapiens
taaattctaattaaaatcaggtttttatccttaaatttaagatcaataatgcctgtactacggattaaaatctgttaaaacatttgcctgtggctttaaaggaaaaaaktgggaatgagacctcatgccaacagtgtcaaaaaattaagcttagctttgagttagctgacttatttcagtgtcagaacgttcagcttttcacaagaaatctcttataaaacctgttttcaaaaagataaaatgtagaacgttcaggcaatgttgctttttcagaatatcatgtttaatatgaaacagaaaaatgatcactttctaatattaattatcttttaaaaaccaatagctattagcaggttagttgttactcaatgtggcacaatatatgtaaaaggaagaataactagttaagaaatacatatgctatataacttgggagaatcctatctatgaaaaaaattagttcaaccaaattcatactgttatttctttaaaactttgagtataagcaaacacctataaaatattccatagtctttgattaaaaagatagccaaattctacattgattgacataatctgttcaaacttgcactagtta

SEQ ID NO: 822573 - DNA, 624 bp, Homo sapiens
ctcaagccacacccatctcttttctctgagcttcccatataatttttccctttatttaaayatccttcctcactgttaaaagccatggtaaaatgtctccacacttgtgaaacctgttttcctgtcagaaaaaaaatgaaaatgtgctttgagactatttaatgtagtttgtttagttgttgatgaatatattttttcgcttgatttatgatctccataaatattgggatgactttgttgaaatattctggtctgtgttaaacagatgtttctccccttgaaagaataacataaaactttaactttattgcatacgtattttttttttttgcaggagggtgtctgatcacctagtgagtggggtaccatataaaaaacatcaaaaactttattatttattataaccaggaagtcttattttggctaaatcagtggaatcacctcctttggatgagaacaaagtcaggttttcctttctctctttcccaatagtattatagagataaacataaagaattttaaaataaaaacttaactgatacatagacatttttcaatagtttatttctagttttcatttttcttcttcataattatggttagttgttcacatttattttttaa

SEQ ID NO: 822574 - DNA, 654 bp, Homo sapiens
aaagacatgaaatcaacccaaatgccaatgataaactggataaagaaaatgtggtacatatacaccatggaatactatgcagctataaaaaggaatgaggtcatgtcctttggagggacatggatggagctggaagccattatcctcagcaaactaacacaggaagagaaaaccaaacaccacttcttctcacttataagtgggagtagaacgatgagaacacgtgggcacatggtggggaacaacacacactagggcctgtcagtgggagttaggggagggagagaatcaggaagaatagctaatggatggtgggcttaatatctaggcgatgagttgatctgtgcagcaaatcactatggcatatgttgacccatgtaacaaacctgcatatcctgcccatgtacgccagaacttaaaagttgaagaaaaaaaatattgtcttaaatttatctcaccttggtttagtttatcagattaacattgctactttagaagttatgagaggctaaatttctcactcaatagggtaaatggaaaaggaggcaaataagggaaaatttttctactaatgataatctttatcaccttaatgaagagaaaatggaaagtaaaactgattaaacttayagggtatcacatcttgtctgagag

SEQ ID NO: 822575 - DNA, 596 bp, Homo sapiens
atttacattttattactgagtaggcaaaaaatgttaactttttatgagtcctgctagttggtaatctaagtctgtatcaggcactgaaaatttgtaagtttgttactaaaatgatttcattttcctctataamaatttgttgtaatatattttaaaaatgaagtgacttacgtttgctgaaagctgagatgtgagggtagcaactttttcttgtgatgcaaccagctctctccgcagtttatggatttgctgaatgcaattaaaaaaaatcaatggactaggcaagtagatttttacttaaaacccagaattcaaaccaagaaagcaaatgctgtatttagctcattctaaccccattgtatcagcagcaactcctgaaaataaaggatatgaacactgactccacagtaacaagcaaatgtcattcaaaagcaaagtgttatgtgtcaaactctaatctacaaatcaaagtacgctcacttgctccatttgccatccctcaaatggcaaatgactcaagagcagtttaccctctgtattgattcttctccttctagaaaaactgtggtaataaaactgtagaaaaatattttctt

SEQ ID NO: 822576 - DNA, 574 bp, Homo sapiens
ctatccaaggactcctttctgaggctcctcctgcccaggacatctgagtgtccctgaacactctcctctcagatcactgcagctctcagggtcctggctcctctttttcttcttgtgggtttaaaaaaaacaattctaaagaagaacagaggttttctgttttatcttcacacataaccagagaaagacttgctatggtttgagtatttgatgcctccaaacctcatagtgaaatctgatccccaatgttggaggtaaggcctgatgggggtgtttgggtcatggaagcagattcctcatgaatagcttggtgatgtcctatggtcataagtgagttctcgctcaattagttccggtgagagctggttgttaaaaagagcctggcccctccccaccatctctctcttgcttactctctctatgtgatctctgcatatgccagctccctcaaccttccaccatgagtggaagcagsctgaagccttaaccagatacagatgtcagcaccatgcttcctatagcctgcagaactgtgaaccaaataaacctcttttctttataaattacccagcct

SEQ ID NO: 822577 - DNA, 572 bp, Homo sapiens
ctccccctgagattctttccttctctttgatcttcagaatggggatgtcagtcatttccttccaactaattttgtttttttcttttttccyagatgaatctgaataagactttgacttatgaaaacaggaggaaatggaaaagcaatcctattagggtcaaatatcttcaagacgacacactcgtacattgccaagaaagactcagcataattcccttgtgtttttacactacaaaaggtccttatctcctttctgtagctggagttgcttaaatttgatatgcacataacttcagaagggggtagacagagcccatgcctcctgcaaggagtgagaaatagacctaaacgatcacagttcattcattgattttgcaaatattattgatcatttactttatgtcaagcactggggataaagtaaagcagtgggatctagttccctaccctcctggagcttctgatccagattcctagagctgaaacaggctttgaagacctctcaatttgtggtttccaaattatctaccaaaggtcattaatattctatgcaatattaattggtatttctt

SEQ ID NO: 822578 - DNA, 482 bp, Homo sapiens
gtacccaataggtagtttttcaactcttgtccscctcccaccctgaacacttttaaatggtttgaatttttagctattatcatgctactaaagaatttttaaaatggaaagttacaataaagcagttctcttttattttgatctattcagaaatgaaagtcccttgtacacatttcagttcctgaataactgggcatttactcttattgataactacttaaatatcaattttataaacagagaagtactgggaaaataatagaatttatagccggaaggtctgcgtttgagtcccaattctatcctgaatgaattctttgaccttgctagattaagaggctcagagagattatgtgacctgcttagtacagcagagcattgtaacgacctagaatctgtgctccagaaaaccaagcccatattccgagttcctcagacttctttgctttatcaactataattcccttgagttgttggctaac

SEQ ID NO: 822579 - DNA, 708 bp, Homo sapiens
ttcctttctcactcctaactattctatatcagtaagatatttttcttatactaaaacatatcacacttgttttaatgtaaggataatrtcttgaagtattcagtaataaaattacttaatttcccaaatttgagccatgttttcctaaatttgggcaatatttatgcttcaggaagatataccctgtttggttcattatttggattgtaacttcctctttgtagttttcatctgtgaaatctccagttgcagggactgtgcatacttctggtaatccccaatgtctggtgctaccgtgaagcctatgagcttccagtatcagatgagtcagaggtagattaagactgaaaggtagagggtcttaaaaccaatagactaagagcatggatttgatcatttatccccaagtttaagcaactatcttcagtagttggcttacgctagagtcaatggatataatgtataacatatttggagttatttattagtatttatacaaccctataagaagtaggaaagaatgaaaaggaaaagaagaccatatctatgaataatttattgatgatctgaacagaagttgacaaaaactccactgtcaggtgggaagaggtttgttaggaaattcagagaaatgcaggggcctagttaagatgcttgtgaaggtatacttttttttggcaaatacatgatttataaatgtcagtttca

SEQ ID NO: 822580 - DNA, 576 bp, Homo sapiens
tcactttatatgggatcaaaagaagttaactcacagaaacaggagtaaartggtggtctccaagggctagagattgagggaaatgaaggaattttgttccaagggtacaaattttagttataaaatgaatgagttctagagatttgatagacagcataatgattacagttaataacaatgcactgtaaacttgaaatttactaagagaatagatcttaactgttctcaccacacacacaaaaggtaactatatgaggtaatggatacattaatgagcttgagtgtggtagtcacttcacaatgtatacacgtatcaaaacatcgcatgatacatcttaaatataaacaatttttatttgtcaatatatatttatttgatagggaaaaataaaaaagattcagtgaacggtggaagcaatgaggactataggaataaaaattacagataggaaataagtttttagctgtgagctgggaatttgcatccccttggggtcattctaaaccggaatgcagttttggaatctgaaataggacaaacctactgacagacaggatccttatgaaagacagaaa

SEQ ID NO: 822581 - DNA, 503 bp, Homo sapiens
gctttagtcttacttcattcctccaatcttytcaataagaattattaaaatacccagtcatggaactgacaactgggtaaaagtaaggttaaaaaaattatgagcaatcatttgatatatgacccgagagattaaaataaagcaataatactatactattaccattattattattattacaaacaaaataataaaatcagagctagtattcattcattgagtgcttggtctggatgttggcagaccatgtgacagacaatttacctacattactctttaatgtacacgatttataaaataagtatagttatctcattttacagattagaaaaagtgaggtttgtgaaatgaagtagctagctcaagatctctctgctaaaattaaattttgaaaccaagacctaaaatctacaagccaaaattttattgcctcagttcaaggcagtaagtaggactgatgtacttgcaggagttgcatctaaccaaggagaaatgccttttga

SEQ ID NO: 822582 - DNA, 517 bp, Homo sapiens
tgtcataaacggcaaaattaacacacaaaataatgaatacagctattataaataaacartatattcaaaaaatagagcaaaatgttaacatgaggaggaaaagaatggaaggttgaagggtctatagtagacattctagagctggtaatataactgataagaaactaccctagttatgatttatgggagatcagagacataataagaaaaacaatactaaatttgaagacctaggcaaagaaataatccaaaattaaatacagaggggataaataaaaataatgcaagaaaaatgagctgagtatcaattacgtgtggggaaatgttaaacatgctaatagaaaaacaattggaggcacagagaagggtaaatagaaaggacagaagaaagtattcaaagaaataattgacaaaacttgccaaatttaataaaaattagaaggtcacagatccaagaaactcaatgaatcacaggcagaataaacacaaaaataatcatatttttaggttatattcc

SEQ ID NO: 822583 - DNA, 557 bp, Homo sapiens
agttaaattgatagagggatagratttagtgactaattaattggatataggataagtgtgattcagaagtttctggaaaagtggttatgccactggccagaatcagaaatacaggaagattagattagtgggggttgtggacaacaagtttcattttggactaaaacttgacaaagtttggggtgcttgggggttgtccagtgaaaggttttcatttagcttttggaagtacaggtctctttagggctacctcctcagagaggccttcctgacaaccctatctaaaatagcattcatccctctatcccctgaattttgccttttattttcggtataatatagctcatcgcgatctgacattatatatttattagatttttacctctcccccattatgtccatgtgaacattgtctattttacctactgtgtggaataatgtgtaactcatataaacactcaataaatatgtatcaggttaataaatgaatatatatgtctaggtaaggtataggcaagatattggccttcaaatacaagttttagaggcatccctat

SEQ ID NO: 822584 - DNA, 631 bp, Homo sapiens
ttactctcttaacttagtttctctttccaattgttttctaaatccactcactaatgtaggacaaccagtacctaaaatagggtttattatataacagaaaatttataaatattagttatttgaatgaatgagtactttattcagttgtaatgactagtttcatatgtcaacttgactgggccacagagtgcccatattaaacattatatctgggtgtatctgtaaggaagtttcccgatgagatcagcatttgagtcaggggactcatgaaagtagattgtactcaccaatataggtgggcaccatccaacatccaatcttttgggggccaaaatagaacagaagatggaggaaggaggaatttgcccatccctgcccctctttttttctgtctaactgcttgacttcggagagctcatctcatcttttcctgcctttgtaaatgggatttacaccatcggcttctctggttctgaggccttcagacttaggctgaatttcaccactggctttctgggatctccagcttgcagatggcagactgtgggacttctcagtctccatgatcacatgaaccaattcctcgtaataaarttcttttttaagtcttatatatcttctttcatatgta

SEQ ID NO: 822585 - DNA, 511 bp, Homo sapiens
ttacaaatagtgaacgagtattgatatatgagtattaacttcatactttattcagattttcttcgtttttacctgatatggtctgactgctggtgttccactaaaattcgtgtgttaaaatctaactcccagtgtattagtattaagatgtgggacatttgggaggcgactaggtcatgagagcagagctccttgtcaatgacattagtgcctttataaaggaggcctaagagaccttgttcacttcttctatcatatgaggacatatataaggtaccatttacaagataggccctcacgtgacactgaatctgctggcatcttgatcttagacttcccagcctccagaactgtgagagataaatttttgttgtttataaattaaccagtctatattgttatagcggcccaaatggactaagacattactaattgttttgtttccaggatcccattgaggataccccaytgggtctagttgtcttgtctcctttgactttccttggctatg

SEQ ID NO: 822586 - DNA, 639 bp, Homo sapiens
ctttggagccctccaggagcaataactctgtcagattgtcctgacacggtacattaagaggtgcagataaaagctacatcctgtaaaatatatacttcaatcgcacctgccttctgcacctccaccactgggaagggatgggtgtccgttcgtgttctgcattaccagcctcttagccagctgcctcgtttgattgttcgttgtgtcacttgaagatgaactgaaagaacaagaagaaaaacttaatgcacgccaatctgtatctctgaacttctcacgttaaatagacatagcaaaaaaaaaaaaaaaagtttgtcagcactgaacatcaattactaaacatttttttaaagtcaggctgggcatggtggctcacacctgtaatcccagcactttggaatcctgaggtagggggaatcacttgagtccagagttcaacaccagcctcagcaacatagcaagacccttgtctctacaaaaaattaaaaaattagccaggtatggkggcacatgcccatagtttaagctgctcaggaggctgaggaaggaggattgcttgagcccgagagttcgaggctgcagtgagcaacaagtgtgccactgtactacctgggcaaccaagtgagaccttgtctctaa

SEQ ID NO: 822587 - DNA, 643 bp, Homo sapiens
gctgcagtgagccatgatcatgccactatgttccaccttgggcgacagagcgagactctgtttcaaaaaataaaataaataaataaaaataggcctaaataagaagcccaataaggcccagaaagtttaagtccctttcgggagtcatacagttgggtaatagtcctagaccttaggcttaatcactagttaacactcagatcttgcccattagtcctgtaatgtttcctagtagatctgccactctccaaatcagataaccatacctgcagatcctcctcaaggcttagtagcattcacacatcaaaactagaccatgaccaatgttactgaaatcaaattacgcaaaggtgatgaatgcacatcaaattactcaccaagagccagggtgccggagatgctgtgtcattaacaaggtcatgcagaaagccttctgctggtgcacctgttcagcatggagggttgatgtacctagacgacaaagcatcatgtgcaagggcaatgctggtgaggccaaggaggtgatgggatcagggaataaaaagtaagtcattcagtaggctggagcttactgtctgaatctgagagtagtgatataggtttaygtgttatgctgaaggattttgactttttcctgagggga

SEQ ID NO: 822588 - DNA, 599 bp, Homo sapiens
agctttctaatttgggagttgttgcagacaccattaagaattgagacacactatgctaaatttagtttaaaacaaacaaaaaaatgaaatgcmattcaaccttgaaaaaaaatgtagcttgctgtatgtgtggaaaggactcaaacagattgagagaagcctagagagcaacattgtggatgagcgccccggcggatatagtaagccagaaaatagattggaccatttacaatgttgtgcagtatttaaaagggcagttctatttttggctgtcataaagagacaatggactcctttctttcttttggagctggaacaatgcttgtggtgcacccttctgggcactgcaggtcagctataagccaagatggctcacatactacacacacaaactcacaccccctggaattccccctatgaaggagaaatgggtctaattggaggaggaagacctgtggtgggcttggccaccacctgcagcttggcaggtcaacaggatgccccttagctcttttcatgcttttatcaaagggattttggccacttcacttcttcacatgacttttggttctgcttgaatctattttgagtctaagcat

SEQ ID NO: 822589 - DNA, 532 bp, Homo sapiens
ccccacctcccgggttcaagcgattctcctgcctcagcctcctgggtacctgggattacaggcacccrccaccatgctcgaccagaaaatgtggtcttttacatatcaaggaaatagtaactggctggaaagcaggaaagagcatcaactccctattagactcatcggagccgaactccctgttagacttatcggacccgaactctgatcttgatctgcacttcaaccagtggcctcagcccactcccctggtcttgcatttgtctcactgtctcccctaaagacatcccttcctccccttcaccaagcatgtcccccttggggtcagccctcgcctggactattgcagtagcctccaggctagtctcagctaccctgtacaccctccaaataggccacagagtctttgtctcaaacacaggccagacctcctgcccttactcaaaaccctaccatgggcctctggtggccccaggattaggtcttgacaccctagtctggccttcaggatccttcctgttccagcttggcc

SEQ ID NO: 822590 - DNA, 531 bp, Homo sapiens
ttttggatttacagcaaggccaccatcaatcatacggctgtacatttttgctaaaggcttttgtagagtgaggtattccaatttaaccaatttactactttatggttagtcaggtaacttcctgtgcaaaattttcacaaagagaaggatttgaagatctttggatagtcttctaggatgtatcatatatcaagcagtacatgatagaatatgacctgaaacaatacagatgactcagaggcagggggtttaaaccctgggacaaagtatacactccttccttccattctttctctaccttctaaccacagcgtttttattaacttaaaatgaggctaaagtaagcctcaaatggccttgaagtagatgaaaaccagaaaaaagcctgccttttggagggatgtgccctgggggagggtcagtatcactaacctggcyttgggcatgagtcatgaggagatggcataattgcctgtgcctccgtttttagccccggctgatagagcttcctccttctgctctcctctgaca

SEQ ID NO: 822591 - DNA, 654 bp, Homo sapiens
ttaataatatgctttagaaaaatattttttctctgatgataaaagaaaaatgtaatattctggygtacaatatactggttggaaaatactagtctttatgtgtctgttttacataactggcacagtgtttatcctcattctctgacattgctttgtcatttaacaatgcttctggaatttttttccattttttccattttaagaaatagtgtcttttatatgtcttcgatgatagagtacatgacatttaatattttgctgaatgaaagcttgaattaaatgtaacgtacagattttgcaggtacaaaagtgattatttagaatgaaagatcacaaaaaactactagaatttttctagtttttctaagacatctttaggcaatttatattgaagtgtttcttgattgctactgagttttccctccctatctagaacattgtacaactcctgtcagttgttaacacttatattaggcttgaaggttaagtttcattatcctcctggtaaacttgcttctaacctacagctaatggtcctggttttctgtttttctttagtgtgctgtttttaaatctagtttatacctgcacatggtttgagctctagttctccaagactttttgtacaaggcagttacccctgcccttccctgc

SEQ ID NO: 822592 - DNA, 496 bp, Homo sapiens
gctttgaataaatatcctttgcttgtactcatttgagtgttctccatttatttctgctcttggaattacagaattattataggtkgtttcaattattaatttatacccccaaagactcaagatatagtcatttataattttattagggctgggatttgaattatactatttgagactgatatatggcagttagtgactgccctgtacacacatatgattttgcttttgtattcacactgtgacacatgcaccttactggggaaattatattctctagagtgtattttgggggattattttggaaggcattgaacttaacaccttatgtatcttcagggcctgctattgagaaatttcaagagtgatcgactttgaagagtaaagaggaaattaataaaattaaaagattaagcctgtgggacttagaaaaatagtgctactctgttgacctaaaaggaagaagctgaagcaaaattaatataagtagagttaattt

SEQ ID NO: 822593 - DNA, 572 bp, Homo sapiens
ctttctgctcaattaccctgtatattttagtgtccaattatggatgctgtcctctgcagttgaggtgctcccaatggctgacccttcaccctcacctgcagatgtaggtgaaggtagaaagtagaaagcacccacaacctccacttggtgccagtctgtggctgtttctctagtgaatttgtctccatctggccctgtgctcagaaggtgggtgcccttcctctggcccctgggttcttccttgttgattgtgtatgttcttctctgtactcctgcaaaatcttaatttagggaaatctgttacattgaaatgactaagagcagctttctttctttttttgtatttcttacgaagctttaatgctatgcagtagtgcttgagaaagtgttttatgggctccttgggcccttctgtgtacctttcttggactgtgatggtattcattagcataccaaaaaccaccagaagtttaaaatgctgaaaaataagygaactaatctgtttaactatatttaatttagcgtttctcagatttttcgtgtcaaagtgtttcgtttaaaaataaactttt

SEQ ID NO: 822594 - DNA, 581 bp, Homo sapiens
cgcaggattgcctgctctaccacccaggccatcagggtgcaacagaggtccatagactcccttgctcgtgtggtcctagacaaacacattgctttagactatctcctccctgcacagagtgatgtttgtgctgttgctgccactttccacagggtaaatacttccaggcaggttgaatttgaaacatctaagatcttaaggctagccaaatctctgaaaaacagcttcaaaaagcctcctggctggaccttctaggttaagtttctgatctccagatatttccagccggcttcccctgcagtagggttccttctgcatgccaccctacaagtcttgatcctccttatgtttgggctaagcatttggagcctctttaagattttcctagcctattttaacagatgcctgcaagagacccccactaggatcgtgctgacctaacctttgagacttcaaaggttgctccagccagaaaggggaaccaagttaacccaaaagaatttgattcaaatttaacaggtgcctgtatgcctctcatratcacatgtttatgaagaagtgagatctatccaaaagtggtt

SEQ ID NO: 822595 - DNA, 567 bp, Homo sapiens
acaagcgttcgctcttctccacatcctcgctaaaacttatcattctttttttttatcatagccatcttaacaggtatgaagtgccatctcattgtagcttcaatttgtatttccctgatgattagtgaygtagaacatcttattaaatacctgtatacctgttggccatttgtatgtctttagagaaaagtctactcggttcttttgcctgtttttaaattggattatttggttttgccattgaattgtgggagtttcttatgtattttggatattaaccctttctcaaatatacagtttgcaaatgatttttttccattcttcaggttgcctttttattctgtcgattgtttcctttgctgtgcagaagctttttagtttgatgtagtccaacttgtttatttttgcttttgttgcctttttggtgtcatatctaagaaatcattgccaagaccaatgtcaagaaagttttcccctatgttttcttctaggagctttatggtttcagtgtttacatttaagtattcaatccacgtttagttgatttttgtgtatggtaaaaggtaa

SEQ ID NO: 822596 - DNA, 567 bp, Homo sapiens
acaagcgttcgctcttctccacatcctcgctaaaacttatcattctttttttttatcatagccatcttaacaggtatgaagtgccatctcattgtagcttcaatttgtatttccctgatgattagtgatrtagaacatcttattaaatacctgtatacctgttggccatttgtatgtctttagagaaaagtctactcggttcttttgcctgtttttaaattggattatttggttttgccattgaattgtgggagtttcttatgtattttggatattaaccctttctcaaatatacagtttgcaaatgatttttttccattcttcaggttgcctttttattctgtcgattgtttcctttgctgtgcagaagctttttagtttgatgtagtccaacttgtttatttttgcttttgttgcctttttggtgtcatatctaagaaatcattgccaagaccaatgtcaagaaagttttcccctatgttttcttctaggagctttatggtttcagtgtttacatttaagtattcaatccacgtttagttgatttttgtgtatggtaaaaggtaa

SEQ ID NO: 822597 - DNA, 598 bp, Homo sapiens
ttgctgtttctctttttgtagaccccatggtggggcagagggagaaacagcttattataagcctcatgttctagaatccctttattctggcacaaacattagtaactgcaaatgccatgattaggattctgagaaaattaattctacaacagaaaactcttttaaacatttttaaatttggctgggcacggtggctcatgtctgtaatcccagcactttgggaggatgaggcgggtggatcacaaggttgggagttcaagaccagcctggccaagatggcgaaaccccatctctactaaaaatacaaaaaattagcagggcatggtggcgggtgccttataatcccagctacttgggaggctgaggcagagaattgcttgaacccaggaggcagaggttgcagcgagccaagatggcaccactgcactctagccagggcgacagagcaagactgcatttcaaaataaataaataaataaattttttgctcttttcaaattcagaaagattttaagaaatgacaataktctctgctgtaagggggtgaggcggcactgccatttactgcttatgggaggccaaacttgaaccatcctgg

SEQ ID NO: 822598 - DNA, 607 bp, Homo sapiens
tggagctgggctaagctgctctgctgtggcggttgggatgcacttcccccatctgcccagggacccagcaactctctatcaggggcagtgcccatccctgctggggtgcctcatgttaagtgggcttggtgtcaggagactcaggtgtcaccctggccctcctgcgatgtcttcactctggctctgcactgccatctccgtgttctctggggactgagaccctcttttccttctatctctgcctgcctccctgcccaaggctggctcctggaacctctccaccaagcccctcccattccctgctgcggtttgggagggtctcagtgggcctgtggtgcgcgtaagagaggtggggctcttcccggctgccagcctccccattgcacagtatcagcctgggctgctctgagctgggcatccatggagatggacaggtttttgatgtcttcctggaatatggtttggaacttctagtggctgttagtgcttggctgccttggtagaaaggaacaagagtgagcagagcattggcgggtccctstttagtcctgtgttcaccatgggggctgcctcatctgccgacatcagccagggtgcttgtaagact

SEQ ID NO: 822599 - DNA, 637 bp, Homo sapiens
cttgtttgtgatattggtcatttgtgtcttctcactttttttcccccctaatctggctagaggtttatcaattttatgaattttcttaaagaattagcttttggttttgttgatctttctctgtkgattttctgttttatattttattgatttctactatgatcttatttcctttctttcttagagtttattttgttcttccaggtttttagggtaaatgctgaaacctttttctattttaatacaggtgtttagtgctgcaaatttttttcctgtgtgctgctttattacatcttacatcctgttgtattttcatttagttcaaaatagtttctaatttatttctcttttgatttcttctttgagccataggttatttagaagtgtgttatttgattttcatctcttgtggtgtttcaaccatttacatttaatatgatttttagtaaggttaggtttgactctgtcatcttactagtagtttcttctggttttgttcccctctccctctttttctgccaccttttggattgaatatttttaatgagtctcttttaatatccattgaatattatactgttgggtgctggatatttttgtattcctataaatgtccttgagctttgttctgggatgc

SEQ ID NO: 822600 - DNA, 573 bp, Homo sapiens
gaggcggaggttgcggtgagccgagattgcaccattgcactccagcctgggcaacaagagtgaaastccatctcaaaattttaaaaagaagaaaaagaaaaagaaatttttaaataaaaagaaaaggaggccgggtgcagtggctcacgcctgtaaccccagcacttaggaaggccgaggtgggctgattgcttgagctcaagagtttgagaccagcctgggcaacatggcaaaaccctatttctacaaaaaaattacaaaaattagctagatgtgatagtgcatgcctatagtcccagctacttgggaggctaaggtgggaggattacttgagcccaggaggcagaggttgcagttagctgatacctcgccactgcactccagcctaggtgacaaagtgagaccctgtcttccaaaaaagaaaaaagaaaaggatttatatttacccacattatttatcatttctggtgttctttatcccattgtgtagattcagatttccctgtgatatcatattccttctacctgaaaacttcctttaatattttagctcaggtcttttgctgattaagc

SEQ ID NO: 822601 - DNA, 647 bp, Homo sapiens
tgtggcatagtagttagtatacctcccttccaaatcatgaaaaatattaactaatgcatcaagaagttcaacaaaccccgaatagyataaacacaaaggagactgcacctggacacatgacggtctaatttctaatagccaaaaataaagagaaaatcttaaaagcaaccaaagaaaaatgacaaatcatatacaaaggaaaactatatgattagtggcagaattctcttcagaaacaatggaagccaaaggagacactgaaattgctaacagttaaaaaaaaattgttgctaggagaattgcactataaagcatactaaaagaagtcctttggtggaagaaaaataacacaaatgctaacttatctacattggaagacatgaagagcatcagaaatggtaagtatggtgtaaatatataaaatacacacacatatgtatttcctttcttctttaagatttagaattgtgtgaagcaaagttatactatatttgggggtttataatgcatattataatgcacagatataatatacatgacaatgcaaaaataatgggggaaaatggacccgtacttgtgcaaaattcccacattttatcagaagtcagggtaaattaccattagattataatcaattcaagatgcat

SEQ ID NO: 822602 - DNA, 628 bp, Homo sapiens
tttaggaaacaaaatatgctatgccacattcatcctgcgccacccattggagacccacagggcacataagtatattagaagttttattaagtcctacagtaaataaacaaatttaattttatttaatcctgtgtttccagaaattatttgaacatgagaatttatgcaattagatttattcttagaatacaaattagtttcttggtgaacatgcaaaatacatttgaaaagttggcctctactaatgattagtcaacagttttcatgcatttgaaattaatctatggctaaacccttttttttttttttttggtggggagggccggagtcttgctctgccacccaggctggaatgcagtggcaatatctcggctcactgcaagctccacttcccaggttcacgtgccattctcctgcctcagcctcccaagtagctgggactacaggcatctgccaccacgcccagctaatttttttgtatttttagtagagacggggtttcaccgtattagccgggatggtctcaatctcctgacytcgtgatccgcctgccttggcctcctaaagtgctgggattacaggtgtgagccactgcggccagccggctaaactcttgtagaatgttatt

SEQ ID NO: 822603 - DNA, 587 bp, Homo sapiens
ttgaactcttgggctcaagggatcctcccatcctagccttcctagttgggactacaggcacacactaccacacctggctaatttttaaattttttgtagagatgaggttttgccatcttgcccatgctaggctcaaactcctgggctcaagtgatcttcctgccttggtttcccaaagtgctgggattacaggtatgagccaccacacccagccataacctagatattaataacacaacggattggttaaaattggtgagctatcaaaaaaatatgagaaattattgttagggctagataagggctagatagggagataaaaagtatgacagagaagttaagcaatacaaaagatagaatgaacaaatagaggagagacaacatttgacatatcatggattataattttccaaatatgatgacagccatgaatccacagctataggaagaccaacatatactaagcagactaaaattccacacctagacacattcttgtgtaatagaacaaaatactaaaggccaaaagaagatcttaaawaaaagccagagaaaaggatcacctacaaaataaaaacaagttggct

SEQ ID NO: 822604 - DNA, 588 bp, Homo sapiens
gatgttgggctggttgagggtctcgtggttagaggatacagcttctcttaaagctagggtcttcatgtgatattaaacagtttcccctccttcactttcttccccagtaggcaaatgacagaaaacaataactatagaaatctcctgtgttgggcagaattctgttgtggggaggtggcccattaaaaagaaatatatagcctggaatccatggctggcagaagacaactgcacacatgtggactcagacaccaactgctgcacacacctcacctaggtgaacaggagtccgtctctttgcagttcttttttaacaagtcttgaaatcgtggtccgctgatttcttctctaggtcacactgaataaccccaagcagacggagttcttgacagagttttgaaggcccacaaaaggctgcacaggtgattacaggccaagtaggaaggtctgtggcacacccaggcatctctggcagtgctgtcctgaagaagcctttctttattgatctgccacagtccacctggccaaactcctcctctgggctcttcaraccactggcaggaaggaaaaacaggttaagcactgtgg

SEQ ID NO: 822605 - DNA, 626 bp, Homo sapiens
aaatggccatgatcatgtatctcaccagctgcaaaatcttaaatcgataccactggaaaaaaaaaaagcatgaccatcctggcccagaatatcttgatcatatcttgttataactgggaacttctcatccatccattctttagttttactggcaatgtgttacacatcaaacaactttttataacagcccccacaagggattttataatttgttatttaaaagttatgcatcttcattgtataatttttggaaatacaaatatcctaagcaaatgacttgctgtcttatcactgagaagaaataacctgtgtttagaaaacattttacaaatgcttattatttttagtaggttgccttttttgtcttttgtataaaagatcatgtttctttgacttctttccccttttgtggtgatttagaatataaatactctttttaatttgtttacattttaaaaaaatttagtttattttctcaattatcaatgttaaaaatgaaatttgatgtgtcatttgataaaaaattagcatrcttacttcctccttctttttcttcccagttaccagtttttatttgtcatctgatttcatatcctcattattttatatataaaacttatatttca

SEQ ID NO: 822606 - DNA, 620 bp, Homo sapiens
ttatatgcttcctggcttttctatcttgggattttccttgttctttcttcttgctacattaatgttacacacaacatctcttgctcactctctttgttcttttagaaatgtggataaattctatttttattctattactagttacctttaaatttttaaataaattttaaatttctctgtcagaggaaagatttcacggtagctattaattctcttcaacaaaagatgagcctggtaccgtggctcacacctgtaatcccagcagtttgggaggccgaggcaggcagatcacctgtggtcaggagtttgagaccaccctggccaacatagtgaaacgccatctctactaaaaatacaaaaataagccaggtctcgtggtatatgcctgtaatcccagctacttaggaggctgaggtgggagaattgcttgaatccaggaggtggaggtgaaccaagattgcaccattgcactccagcctgggtgagagggcaagacttggaagraaggaaggaaggaaggaaggaaggaaggaaggaaggaaggaaggaaggaaggaaaaacaagcaaatacaagcacatttttactttcccttctcctacgccaccccgtcctcccaat

SEQ ID NO: 822607 - DNA, 581 bp, Homo sapiens
aggcaggagaattgcttgaacctgggagacagatgttgcactgagctgagattgcaccactgccctccagcctgggcgatagagcgagactctggctaaaaaaaaaaaagaaagaaaaaaagaaattaaaaagaacagaaatccattaatccattattctatgccctctcattaacatgcattgtcgttaaaaggtacactggaagtaatttctgtatctctaaatagtatttaatactttaaaacaaatctagtaaacataatgcataatgaggacttgacaaacatgactttcttccagtcttttctatttccttttcattaaaaaaattattgtttctgtaaacaggaaacatgtttgttatgagtaatttaaggagattataaaccaaaaatatttttaaaatagtccaaacctgataatacattcatgcatactcatttccatattytaaaagagatggataatgagaaagtaaaaaagacatatagataggctcttagaaaaatattttagtaccatgccacttaaaatttaaaagtttaacaagtgaaaaactaaaaataattggtgtcaataa

SEQ ID NO: 822608 - DNA, 576 bp, Homo sapiens
ccatgaggccactggtgcaggctgggaaagaaaaggcagggtggaaggagtagagaccatggacatttgaaccacttcctcatgtaacttacttgtgccttcaggatctgcttgagcccaatcgcatatataccacttccatctgatgatggaatgctgctgtgcacaactcactttatgactaaatgggaaagaaagcacccagttcatgacagacagttcaggttgcatggttacttgatcacccaaaggataacattcaatttctaccaaagcccagtaacaggccaaaagctgtctcttaaaaggagagtagttatctgcagaagatggcagaaccttgctccaaaatcctagaggcctctgctgtgattcacctatacggacctaccaaaggctccaaacagcatccctatctgccactgacacctcaggcacaattggatctkctgggtcttatggcccaactgtcagagcagcttgcacagcagccttgacctgtagcagagccttctcctgttctggaccccactcaaaactggcagccttttgagtcacttgataaatgggccagag

SEQ ID NO: 822609 - DNA, 576 bp, Homo sapiens
ccatgaggccactggtgcaggctgggaaagaaaaggcagggtggaaggagtagagaccatggacatttgaaccacttcctcatgtaacttacttgtgccttcaggatctgcttgagcccaatcgcatatataccacttccatctgatgatggaatgctgctgtgcacaactcactttatgactaaatgggaaagaaagcacccagttcatgacagacagttcaggttgcatggttacttgatcacccaaaggataacattcaatttctaccaaagcccagtaacaggccaaaagctgtctcttaaaaggagagtagttatctgcagaagatggcagaaccttgctccaaaatcctagaggcctctgctgtgattcacctatacggacctaccaaaggctccaaacagcatccctatctgccactgacacctcaggcacaattggatctgctgggtcttatggcccaactgtcagagcagcttgcacarcagccttgacctgtagcagagccttctcctgttctggaccccactcaaaactggcagccttttgagtcacttgataaatgggccagag

SEQ ID NO: 822610 - DNA, 605 bp, Homo sapiens
tgatcaaaacacacaaatctgcgtcatttggaagcgaatgatcaaaacacacaaatctgcgttattctagtacatcacaaaatcagatgcaaatgtccccagttatgggaaatttagactyagtggtgattctcagttgtttctattgaaccgctggttctggttccctcctggctttgaaaatatctcaaccccgtgtcccctctacgaggctaggtaagtagaatgaaagagtaacagttttgttctcgacacagtaaattagaattctgcataaatggcatggtttggggctgtgtggccataagcaactacaaagcaagatcaacaaagaccactcaggagaaagctgatgaaaataaatggactgaccgtgtaaccgtaggtattcagtgggtgcctgctggcagctataacattttctaattctacgagtctggaatatgaaactactatcaaggctgtcagcctgtaccaaatgtataaatagaaatatatgagagaggaaatacatatgcccatagtgcaactgggttgaaggagagaggaagaaaggagacgagaaattctatatctatggcaagtaaaatggtgattctgaattg

SEQ ID NO: 822611 - DNA, 605 bp, Homo sapiens
tgatcaaaacacacaaatctgcgtcatttggaagcgaatgatcaaaacacacaaatctgcgttattctagtacatcacaaaatcagatgcaaatgtccccagttatgggaaatttagacttagtggtgaytctcagttgtttctattgaaccgctggttctggttccctcctggctttgaaaatatctcaaccccgtgtcccctctacgaggctaggtaagtagaatgaaagagtaacagttttgttctcgacacagtaaattagaattctgcataaatggcatggtttggggctgtgtggccataagcaactacaaagcaagatcaacaaagaccactcaggagaaagctgatgaaaataaatggactgaccgtgtaaccgtaggtattcagtgggtgcctgctggcagctataacattttctaattctacgagtctggaatatgaaactactatcaaggctgtcagcctgtaccaaatgtataaatagaaatatatgagagaggaaatacatatgcccatagtgcaactgggttgaaggagagaggaagaaaggagacgagaaattctatatctatggcaagtaaaatggtgattctgaattg

SEQ ID NO: 822612 - DNA, 518 bp, Homo sapiens
tccaaatttgaaccaactacagtactgtaaaaaagttatttttgagataatcaggagaaatataaaacagcttggctatctgatgacattaaggaagtcctattaattttgttgggtccaataatggttcaatggtaatgttaaaaaaaaagtcctgataagttggaaacattgtagtatttacagataaaattaaaagctatcttagatttgttgtaagacattctatcataaataaaaattttaaaagttgaggggaatggatgaaatgagaatggcagaatgttgatggctgttaggtccatgctggttgattacacatttctctctctctctctttttttttttttttttttttgggtgcatatggaacatttctttaatcgaacaaaaaagaaaacaattccctgttttttarattggtttgcttcaaattctaccattagtgtgatatggtgggcctccagggacctctttaatctcttgaaatagtgtacaaagtgtatgtttgtgcatcg

SEQ ID NO: 822613 - DNA, 544 bp, Homo sapiens
tatggagactccagagaagtctggcttcatttgagttttggacaaagacctgggaagatcttttttttttcacatttttctgtcattctcacatgcttataaccaaaaccactcttaaacgaatatgtgtttttccttgctagtaagggagaaagtgaagaggcattcctgctttgcatgtactttctgtgtcctcctcagtattttccatcctcttgttgaacagaatagattgcctccagataacatttgtttcattctgtgattttaatagcaatgaagcaacttgttttgcaggccctgaatccaaaattgagacatagcaatctggacaaataccaaagcttaattaagtctgctatcctggtgataaatatggactaaaaaattattctagtagatagagtacatataacattacattcttctctgtcagrtgcctcatcagcacagaccacagtgagatacaacctcatacacatacagttttagtaccttaatcatattcataaaattatagatatggatggtttctcccaaggtt

SEQ ID NO: 822614 - DNA, 582 bp, Homo sapiens
tatttttgtaaatcaaataatgtgtatttataaacatataaaagattgcatgtctaatcactaaaatttcaagagtagtagttgtcactgtgtggtgggattatgagtaattatctgcactttctggatatatgcaatgaaaaacaagacactataaccctcacatgaactcacttgactccatattttgcctcttttttcagaaatataagccgtacaacaatggagctgccaatcaaaagtggcattacatgaaaaatataaaagcacttgtggcctttcatagcactgccttggataaggaaattacatcagcaaattatgctggtgtctgtacatcatctgtgattaaagaagaaaacattgatcaaccagtaagtggttccttcctctcaaagataaaagaaaaatagggtaaaagagagtaatttaataaaatgagaaaatttttttccctagaaaactttatgttcmtacaagttgaatgctgatgtttgagtgaaatcacttagactctgattctggtaggaaagaatgaaggaaaattgtgagagaaaaagaattaggtagtttatattaatc

SEQ ID NO: 822615 - DNA, 599 bp, Homo sapiens
taatgacccttaccttttaattacttgtytctaattgaatctatttctttgagcagaaagttctttataaattattggtgcgcgtgataaattactgttgataaaatatcttgtatttttattattctagctttgcagaaagcagaaaaattagagaaacagaactggctaaaaaaggacagaattttggctgatctagataccatgagacacaaaatgagacagttaaaaggtcagtatgaactatatcaagcataaccatatttaattcaaaatgtagccccaaattgctaatggttattttctaccattagataccaagtgtttaaagagtactatataaatattgttttacagaaatcatttgagcaaagtctaaaacctaataatatattttttggtctgattttgtatctgtaaattttatattaaaatgaatatcaaatgacttatgcatacgtcttaaaaattaaaacttaggaggatacctgggcaagagaaactacctcattgtttttgaaataatccctcaacagacgttttgtgggcttcagaattaatctttaaacaaaccttgctgtcattccttgggtattgct

SEQ ID NO: 822616 - DNA, 571 bp, Homo sapiens
tgtgtaactcaaaacttaaattccgggagcacaaaagctgcttcagagttgtagagaatatagattgctcacctcctcctcataaaagtcatccctctcctccctgtccctttgcatccagaaatagtactctgattcctttgagtaattccctctcttccactttcagccaacatggcttggatggggttgacacaagtcctgctctaaggatacatctggattgccttaaaccagccagcctgttttctctcttggattggtttggggattagagtcagtgtgaagaggggttagctggtgtttctagggaaaggaaggtttctttctctactattgtaattggcagagtatgagtgtgaagcctgcatctgtagccaccttaaagctctgagggacatgatagaaattcacagtgcttgaaatgggaccaacccmcaggaagcaaagccaagagccagatgctactgtcactgtttgaagcctgaatcaagccacacctgaaggcagctgtacctgtgtacttttgagttttatgggccaattaatttctctttttaccttaatccat

SEQ ID NO: 822617 - DNA, 571 bp, Homo sapiens
tgtgtaactcaaaacttaaattccgggagcacaaaagctgcttcagagttgtagagaatatagattgctcacctcctcctcataaaagtcatccctctcctccctgtccctttgcatccagaaatagtactctgattcctttgagtaattccctctcttccactttcagccaacatggcttggatggggttgacacaagtcctgctctaaggatacatctggattgccttaaaccagccagcctgttttctctcttggattggtttggggattagagtcagtgtgaagaggggttagctggtgtttctagggaaaggaaggtttctttctctactattgtaattggcagagtatgagtgtgaagcctgcatctgtagccaccttaaagctctgagggacatgatagaaattcacagtgcttgaaatgggaccaacccccaggaagcaaagccaagagccagatgctactgtcactgtttgaagcctgaatcaagccacacctgaaggcagctgtacctgtgtacttttgagttttatgrgccaattaatttctctttttaccttaatccat

SEQ ID NO: 822618 - DNA, 582 bp, Homo sapiens
tgagtgatccttttaatgtgctgcttaatttgatttagtagtattttgttgagaattgttgcatctatttttattagagatattggcctgtaatttccttttttctagtatctttgtctagttttgatattaggataatgatagactaagaataaaagagagaaggcacaaacaaataaaattacaaatgaaagcaaagatattacaactgaaattacagaagtacaaaagattacaagagtctaatatgaacaattatacactaaagtttggataacttggaagaaaaagataaattcctgggaacatacaaactaccaagactgaatcatgaagacatagaagatctgaagagatcagtaatgagtaaggaaatagaatcagtaataaaaagcctctcataaaacaaaagcccaaaatcttcatactgaattctaccaaacatttagataagaactaatactattccttctcaaagtcttccgaaaaattgtagaggagagagtaataaaaactcattttatctttattttttttgtaatcagcttgcttatataawattaggaattttgtgttcaattt

SEQ ID NO: 822619 - DNA, 601 bp, Homo sapiens
tctttttctggaacttatagtgtcttattttagtgtgggattaaacctaactacattttagttcctgaactaaaataaggtgtaggaacaattcaagaccattgagataaaagacatctgaatgtggtgaaaaaacaccggatatgaagtaaagaaaatgaagttttagtcttagttaatcttttaataattagtttttgacttcatatgaattacttgtcctctgcttaactatagaaaaataactgtaataaatgtcctctaacatcctatactcttgtatcattctaaaagagtgaggtgtaagataaggctgtaagtgtggctcagttaactgaaatgaaggtgaaggtgctggagtccttgttaatataacagatataacagagaataagcaaggaagccttattcctaatctggactgcctccctacagatttaagcatttctatcaataatcctcttcgttaattatrgctactaacacaggcattctgacattgtttgactgacttatgtaaaatctcacatgaatactaaatagttatctactagatctattcttccaatattatgttttatatctttggtcttattgtggt

SEQ ID NO: 822620 - DNA, 601 bp, Homo sapiens
tctttttctggaacttatagtgtcttattttagtgtgggattaaacctaactacattttagttcctgaactaaaataaggtgtaggaacaattcaagaccattgagataaaagacatctgaatgtggtgaaaaaacaccggatatgaagtaaagaaaatgaagttttagtcttagttaatcttttaataattagtttttgacttcatatgaattacttgtcctctgcttaactatagaaaaataactgtaataaatgtcctctaacatcctatactcttgtatcattctaaaagagtgaggtgtaagataaggctgtaagtgtggctcagttaactgaaatgaaggtgaaggtgctggagtccttgttaatataacagatataacagagaataagcaaggaagccttattcctaatctggactgcctccctacagatttaagcatttctatcaataatcctcttcgttaattatagctactaacacaggcattctgacattgyttgactgacttatgtaaaatctcacatgaatactaaatagttatctactagatctattcttccaatattatgttttatatctttggtcttattgtggt

SEQ ID NO: 822621 - DNA, 628 bp, Homo sapiens
ttttacttagaaattatatccacaattgattcaagaaaattttacattgctagaaaagagaaaaattttacaaattatgytgttagtaaataagtttggtatagtagtaaacatccttatcttcaagaaaaaagggttattgagagttttgtaggttatgaaattataggttgaaataaggtaaaaaaatgaatagctgatgtgaaatttacatatagggaaaatgtggtttaatgtacaataaggagtcatttttcttttttgagctgtcaggtgtattggaaatcaactagctcagctaacatcactttagagatgaagcaactggagattataaaaatcagtggcaagattgggatgcagtccttttgacttttatttttgctgcacaagctgccgtgaaatttgacaaccattttgtattgcttctatttggtggaatcccttaattcctaatacaacaatttaattacagttatttctttatcagtatttttccagctaattcaatttaaactttattaatgaaagtttatccacttaggtagataaatattaaaataaaataaatatgtgacctaattactgcattatctctctctttacaagtaaataaaatgtttatcca

SEQ ID NO: 822622 - DNA, 628 bp, Homo sapiens
ttttacttagaaattatatccacaattgattcaagaaaattttacattgctagaaaagagaaaaattttacaaattatgttgttagtaaataagtttggtatagtagtaaacatccttatcttcaagaaaaaagggttattgagagttttgtaggttatgaaattataggttgaaataaggtaaaaaaatgaatagctgatgtgaaatttacatatagggaaaatgtggtttaatgtacaataaggagtcatttttcttttttgagctgtcaggtgtattggaaatcaactagctcagctaacatcactttagagatgaagcaactggagattataaaaatcagtggcaagattgggatgcagtccttttgacttttatttttgctgcacaagctgccgtgaaatttgacaaccattttgtattgcttctatttggtggaatcccttaattcctaatacaacaatttaattacagttatttctttatcagtatttttccagctaattcaatttaaactttattaatgaaagtttatccacttaggtagataaatattaaaataaaataaatatgtgacctaattactgcattatctctctytttacaagtaaataaaatgtttatcca

SEQ ID NO: 822623 - DNA, 609 bp, Homo sapiens
ttaaactctacagagatgtaaatgaagtaaaaaaaaatggaaggtaccaacatgctgttacctatacaaagacataatcttcaaatatatttattttatttcaattaaattgcatatttaaagctatcccaatataaatcctgacaatattatttttagaactagaaataaaccaccaaagtttcaccacacagagacattaaacaggtaagaaattacagcaaaagcaaaatagctatgtctaactaagttatcttaatacgttctaaagataaagtgatgtaaatcatcaccattttgtttaggaaggatgggtcagtaaagtacagaaagaagtctttaaatagactaaaatacatggatgaatttattgcataatgttgttcagatttcatgttatgaaagaaaatgaaattatttaataaataaaggacagccaaatcttattgcgatttgcaaagatataacaaatcacaacmttaattaaaacatcaaagtattttctaagtgactcaaaggtatgaattttaatgttatactacaatgatactctaaaaaaccatgatactaaaaataatacaagattctacaaacattccttaaagtgtt

SEQ ID NO: 822624 - DNA, 506 bp, Homo sapiens
taagactgcatggcattcaatcaaggaaaatgaagcactttcatatagaattttaaatttctaattaagaaagtacatccacattttatcagagtagttgaattcctgtattaccactgaaggcagcagaaggcacctctggagtggttactgtcactgtgccagctacagcatggaggtgtgagaagtggcagcaagagtggctgcgggagcagcagtggcagtggtcggggggccaccaagccccacgtccgcgaggcagccgactgcgtgagcccacccttgtgcagccggtcagaacctgccccaggcccagagcctctgcctctctggaccctggcccttcgtcaccacttttgcccactgccattgcagtgctgttgggaagagaggggtcccaaggcagagccaggcccaaggtggagctgggcctggtggtgttatccttgcacacagagagcagggtccagagcraggggctgggctgcggcatgcagctggggcac

SEQ ID NO: 822625 - DNA, 648 bp, Homo sapiens
gatgacactaaaggacagtgcttttcaaattaaaaaaataatgctgaaaaggagttggaagtgcattttactcaaggtaataagaatccattaaaaatcttattttttttttcytttgagacagagtcccacttcatagcccaggctagattgcagtggcacgatcttggctcactgcaacctccacctcctgggtccaagaaattcttctgtcccagactccttagtagctgggactacaggcctgtgtcaccatgcccagataatttttttttgtatttttagtagagatggggtttcaccatattggtcaggctggtctcaaactcctgacctcaggtgaccacccgcctaaaaatgtttttaagaattttctcagcatgcctattatgctagtgttcattcattcagtttctgatgaagctctggaagttgtcactttacaaatccacacattggaatctttagccttctgttcttcaggtgatattcaaaccagcagtgggagtttctccaggaggtagatgtgttatttgtgaatataaatgttcttaagttccccaatcttcagaggccacctttctgaatttgcagctatgcattctaagattttcctctgtgtgataggaaggggccccatcttggact

SEQ ID NO: 822626 - DNA, 582 bp, Homo sapiens
ttccagaatcaggtataaacaatttgggagttacatgttrttctgattgcctgcactttttttttgtgctttggtgcaagaaacccagagttggtgtatggattcacgtatccacatttgctattctgtctgctttctgagaggtgtttatttgttggcttctgtgcttatttgtacttgtgttctcatcttgaagcatggtctctaggataattttctcagaaggcagaaatacatgaaatgtaaaaatatctacactcttgtgcctatacctatattttgatctcagttgaatttttatagttgtcctgctgttaagctgaattaacattgagcaaagagaccacttaaaaaattttactagtagtgtttcaatttcttgtatcctagatttaatggaagtggttagacattttgtaatgagccagttcttcattctataatgatagtttttgaatgtcatgatctaaaactagcaaaagttttgagaccatgtactacttatggaaaggagaggggaatatttaagcctgaagggtatttttcaaaatagcactgggctggcttatcctgtctaacaat

SEQ ID NO: 822627 - DNA, 606 bp, Homo sapiens
taaactattttaaaaggctgaatcctaacaactagtccgcatgaactgttaactcccagaagaggttagactgtgttcagtgaccccccctatgaaaatcgagatgttaatctcaaagatcacaagccagtctgatatgatttggctctgtgtccctacccaaatctcaccttgaattgtaatgatccccacatgtcaagggtgtgaccagatgtagacaattgaatcatggggcaatttcccccatgccgttctgttgatagtgagttctcaggaggtctggtgcttttacatggggcttccccctttactcagaagaggtgccttctgccatgattgtaagtttcctgagacctccccagccatgcagaactgtgagtcaattaaacctcttttcttaataaattacccagtctcgggtatttcttcatagcagcatgaaaacggactaatacacagtccatgggggaatcacttagcttatattaagaagaggtttccgttmtcctgagcagaagataatttattttttctgatactaatcacagaaaataacttccttaggcgaaacctgaaatagctgcctaatgacattacattaattct

SEQ ID NO: 822628 - DNA, 664 bp, Homo sapiens
ttcataagaaaaattctttatagcagcatgatttatagtcatttgggtatatacccagtaatgggatggctgggtcaaatggtatttctagttctagatccctgaggtatcaccacactgwcttccacaatggttgaactagtttacagtcccaccaatacctaatgctagatgacgagttagtgggtgcagtgcaccagcatggcacatgtatacatatgtaactaacctgcacaatgtgcacatgtaccctaaaacttaaagtataataaaaaaaaaaagaaaaaagaaaaattcttcttagggttaagttgttatcgttcaatcctatgctacaccttgaatatactattttaggcaaggaaaatatcaaacatagtctagtataacatgtgcccattttggccatgcctatctgtcttctttctgtaatgagaccatatatttcctcagaatgataggttgtgctcgggctttgatggggatttttgttttattttggaggatggtagtgtgttatttagcaagtccctatttctacctctttagtgagggtggtagacagagaaacctgaaaaaactttgattttgttgttagcgtctaaattacccattttagtatggaagaaaatagtcatgagaacatcctgagcttaactactcc

SEQ ID NO: 822629 - DNA, 625 bp, Homo sapiens
gtttgttgacttgatttccagctttaagtatttagacatagggtagatggggctctatttgtactttgctctggactcagcagtgttagtggagctgagaaaaggagcaaacagggataagcaggaagggtagaggaggtgagcagggtgatggcaaagtactgatttaacagaaaacacttacttaaaaaaagaaattgagcaaattagagtcaaagaggcatgcacatctctgtgccctgtgggaatctgtgggtactaataagtagattagttataggaaaagcttttgtttttcttcggtcactccacatatcacgaagaagcaggcagaagcacagtaaggttattagtcatactgttacttaatgatgagacatgacaaaatcaattcatgcaccaaaaattattaagaatttagaagttacagaaatatgtaatttcacagttatctatcataatgacctcccaaggaactttcaaccttatgactctattacttaataratgtattaatagatatattacttaatattgcttgtgcctgagactcatttgtacaatcaactaagtatctatttggttccagatacttcactagatctgtggactaaagtaatagaaa

SEQ ID NO: 822630 - DNA, 621 bp, Homo sapiens
tctgtcctaggaatagaaatgtacattaaattttaattatcagctagtttatttacataaaactgaacaaatcttgcatagtgagtacacgtgagattgtattatctaatgcaattcaatttyatatccatgacgatttacaaatatgcatattcaacatatgtctgagaaaaaagtggatttttaatgtatttatgtgatttgtgttaatagaaatgtttagggtcgtcttaaacttcacattgtacattgaattatgagagttactgtgtagtaagtatgctacacttgtaaaaatatttccctttaaaggagcttaaacatactgggagattcccagagagacaaaaacacctataaaatttagagagtgatatgatgaagcactcattttttaaaaactgaattcactatatttcagatttttttaattcaaaatggaatcattcatcattgaatatcttttttctctacactacctttaaaacaaactaaatatttcatttgtttctgtagttagggataggttagaataaatatgacaatagcgccaatgattgaataagtactatgaattagtactatgttattattttactgttataaatgtgccagttttga

SEQ ID NO: 822631 - DNA, 627 bp, Homo sapiens
cttctagttggaggaactgaagcattggaaggtcatttaccatgtacagggtcatacatttactaaatgacagaatcaggtttggaataaatgggaattgattccagagcctgtgttcttaaccacgttctccagaaaacttgtactactattctgtataatcaatcaggttttaaaaataaagtaaacaaatccagtggtatctttggattaaaagttattttttataacttaatcactggatcacttaataaagaggagaagcactttcctgtatttaaccggcctacaagcaattcctggctttaaaatgaatttatgtcataaaccctcctatattgctgaggataaagatgcagaaaataacttagaactgctttgacaaacaagttcatataatgatgtaatttccatgtaaaataaaaatgagtgtattttagtctccatggaacacagaaaacactaaaaacaaaaaagagggaaatgtcaataactatatacaccaaagtattaaattagccatatagggcacagttgggtaggagcaaggaataaatactttctctytttatttttcacttctcaaatttatttaaaattattacactgggcatctatttaatctaa

SEQ ID NO: 822632 - DNA, 598 bp, Homo sapiens
taagaaccccactaggttctcatgataaagagccaagaaatacaccctcatccctctatatgagcaaggaaaaaattaagcatgataaaatatatctagagtgttctccgtaagaaagaattactttttagggaaaaaaagtatttatcagagccttctatcagctgagagaagagaaatgcccccactgcagaccgcttgtcttcatgcttcacctaaggaggaaaataaggtaagcaatatctgtaaatgtcatagcccaagggcaggaatccactaaaagcctgagatttaattatacaccccatctccactttactgccataccaataagagctccagcataataatagtgaattccagctgaaatagctttaaaaggcagactctgagtaacaattcttgagaaaccccaaagacaatagaagagacaaaaacaaggacaccagagaaatgttcagcctctagcagctgcagcaacaacaaacattgaacacytcttcactcctagatggattaacataaaagctgacactgaaggcctattgacttcactttctgttccctgacacaccatgtctggctttccagaaaaaaa

SEQ ID NO: 822633 - DNA, 598 bp, Homo sapiens
taagaaccccactaggttctcatgataaagagccaagaaatacaccctcatccctctatatgagcaaggaaaaaattaagcatgataaaatatatctagagtgttctccgtaagaaagaattactttttagggaaaaaaagtatttatcagagccttctatcagctgagagaagagaaatgcccccactgcagaccgcttgtcttcatgcttcacctaaggaggaaaataaggtaagcaatatctgtaaatgtcatagcccaagggcaggaatccactaaaagcctgagatttaattatacaccccatctccactttactgccataccaataagagctccagcataataatagtgaattccagctgaaatagctttaaaaggcagactctgagtaacaattcttgagaaaccccaaagacaatagaagagacaaaaacaaggacaccagagaaatgttcagcctctagcagctgcagcaacaacaaacattgaacacttyttcactcctagatggattaacataaaagctgacactgaaggcctattgacttcactttctgttccctgacacaccatgtctggctttccagaaaaaaa

SEQ ID NO: 822634 - DNA, 598 bp, Homo sapiens
taagaaccccactaggttctcatgataaagagccaagaaatacaccctcatccctctatatgagcaaggaaaaaattaagcatgataaaatatatctagagtgttctccgtaagaaagaattactttttagggaaaaaaagtatttatcagagccttctatcagctgagagaagagaaatgcccccactgcagaccgcttgtcttcatgcttcacctaaggaggaaaataaggtaagcaatatctgtaaatgtcatagcccaagggcaggaatccactaaaagcctgagatttaattatacaccccatctccactttactgccataccaataagagctccagcataataatagtgaattccagctgaaatagctttaaaaggcagactctgagtaacaattcttgagaaaccccaaagacaatagaagagacaaaaacaaggacaccagagaaatgttcagcctctagcagctgcagcaacaacaaacattgaacacttcttcactcctagatggattaacataaaasctgacactgaaggcctattgacttcactttctgttccctgacacaccatgtctggctttccagaaaaaaa

SEQ ID NO: 822635 - DNA, 493 bp, Homo sapiens
ttttatatatatatatatatatacactcacacaatatatatatatagtrtatatatatatacacacatataaagtattccatcagtaatataatatatcatatatatataataactgctcagtcataaaaaggaatgaattaatggcatttgcagtgacctggatgagattggagactattattctaacagaaataactcaagaatggaaaaccaaacatcgtatgttcttactcatagatgagagataaactatgaggatacaaagtcataataataacacaatggatttggggactcaagggaaaagggtgggaaggcagtgagagagaaaaaactacaaataggtgcagtgtatgcttcccaggtgagggatgcaccaaaatctcacaaatcaccatgaatgatggtcatttaaaatgagcttaagagttactttttgtcaggctaagagagtggagaaaaatatttatgggtggtgggttcaggtgtat

SEQ ID NO: 822636 - DNA, 471 bp, Homo sapiens
gttttgttgtgtgaacatcacagaacgtacttacacaagcctacgtggtgtagcctactacactcccaagccatatggtggagcctattgttcttaggcgacaaacctatacagcatgttactataccgactattgtatacaattttaaagcagtgatatttgagtatccacacatatctaaacataaaaagatacagtaaaaatgtagtataaactatttaaaaaatggtgcacctgtatagaacacttaccatgaatggatcttgcaggactaaaagttgctctgggtaagtcagtgagtgagtggtgactgaaggtgaagtccttgaacactagcatacagtactgtagacttaycaacaatgtacccttgggcagggtttggtgactcacatctgtaatcccagcactttgggaggctgagggggcagatcacaaggtcaggagattgacatcatcctggctaacac

SEQ ID NO: 822637 - DNA, 619 bp, Homo sapiens
aaataaataaacaaatatgttaaaaggtgttaagtactatagagaaaaataaagcaagacaagctggatggaaaagagagggagggaagatgggtgtaattttaaacaggcagtcaaggatgatcttactgaaaagatgatatttgcgcaaagatttaaaggaaatgaaggagcaaacaaagccaggctgatatctggggcaagagttaggacagtgcaaaggccctgagatggaaactgtcccagcactttggaagatgagtaaggtgctgcagcagagtgaatggaatgaagactagcaggagacatggtcaaagaggagatctaagaaggacagatcacatagggtcttgtgggtcctgtaaggattttagcttttgctctgagaaatttggggaacctctggaggattttgaacaggagtgtaccatgttctaatttagttttgaaatgatcacccaagcttctgtgttgaattcagaacayagatccaagggtggaagcagacagaagctatattgaattaatccagtcaagagttatcagtgacttggaccactgtgacagcagttggaggtggtatgaagtgattttggctatacagtatttgaaagtagaa

SEQ ID NO: 822638 - DNA, 588 bp, Homo sapiens
catctgacaaagggctaatacccagaatctagaagcaactcaaacaaatcaacaagaataaaacaaacaatcccatcaaaaagtgggctaaggtcatgaatagacaattctcaaaagaagatattcaaatggccaacgaatacatgaaaaaaatgctcaacatcactaatgatcagggaaatgtaaatcaaaaccacaacgtgataccaccttagtcctgcaaaaatgaccataataaaaaaatcaaaaagtaatagatgttggcgtagatgtggttaaaagggaacacttctacactgctggtaggaatgtaaaactagtaaaaccactatggaaaacagtgtggagattccttaaagaaataaaagcagaattaccatttgatccagcaatcctactactgggtatctacccagaggaaaagaagtcattatatgaaaaagatacttgcacacgcatgtttatggmaacacaattcacaactgcaaaaatatgaaaccagcccaaatgcctatcagtcaatgaggggataaagacattgtggtatatatacacaacagaatatttctcagccataaaaggcaatga

SEQ ID NO: 822639 - DNA, 535 bp, Homo sapiens
catttctcttagtaccaatgagatgatttatgcctttggcaaaagagaagaggaagagaagagagaaaatgagcacaagsctcatttccagaaccagcctttcctgctgccctggccagaccccatccacaggctgccctttctctggccctctcaaccacagtcacaaatcgttcaaaagttgaccctgacaacactttttcccactcaatatttttataattttgatatttaaaagtattaaacgaatagtcaggtctgtaaaattaggctttgttagagctcatttttgttatgccaccattactcgtaactggattatgacaagaatgcactagtacctatttctactctccacaattttgttactcgtcaagagaagtatataaactgatatctaggtccaagaatcctcagtattttcacaggtatatatatttaattaaaaccatgacttttgttgttacaggtttgggtttcttttagtgatttaagctctctaggcttcattttttgtacttaaaaaaaaaaaagc

SEQ ID NO: 822640 - DNA, 656 bp, Homo sapiens
cagtaactatgagtatgcctttcacgtacaaaagaccctcaaagattaaaatcccaaatgactatgaagatgacattaatttctctaatcaaaagatgagtatttttcaaaaaacgttgaggtatyaataggtagtccatgaggaaaaggggtctgtggtttggggggcaaaaaaagcacaagaaggagctactaactacaccccctctcggaaatccctggcctatattataaaggttttgagaaggcctgcaattaagaaatgtttcatatttcagtttttgacacaggagttcacggatgcttattaacatcttgcagaactgccagagatgctctagaaagcacagtttgggaagccctacattagatagctgagaaaaaactccttcaagtattcttctttgtcagcatactagaaaccgtaaggaatgaaaaagcaggagatggagggaggttgaagtttccattatttggcattaccacataatacctggcaggtgggctaacttaatgatatggtatagttctacctcaggattttttcatgtattcccagggtccaaagccactgtttgtgctttcctaagtataacacttgagcctgttctcttcttaaaactccatgcatgtgtaagattttcactataacctat

SEQ ID NO: 822641 - DNA, 297 bp, Homo sapiens
attctaataaaacattccattggggcwtaaaaaacagggtgggatttacttcttaccaactaatcaccactgtgtattcccttatattctcagagcagcaagagaccactttttcatcaaaacacaaatttttgctacagaggaaatttcaaacactgattgatcagtaagaaaaaaataattattatagtatttgttataattatgaatgctaattattatatggctacagtaattatggtttcattataacttatagctttctcttataatttctaaaaattatctcaataaatg

SEQ ID NO: 822642 - DNA, 624 bp, Homo sapiens
caactagaattgtcacaattcttggaggatgtgtaattttattggagtgttgcaaagcttttgaaaataaaccttaaatcagatgggtgatacatactgggtaaaaaaaactttaaatcagcagcaagagggaactacagggcaaggaatggtatttgtgtagtctataaactggtattttttatagtctcaaatatgtgtgaaataatctctgcatccttaaaatatgcactgtctccctaatgtgactactttgaaagaaaaagacagaggcttctttcaatggaagctccatggaaatgagtggtttcaccatcagccattgttttcagcatcatgcctggttaaatctcacaggagttgacaaacacaaagatggcatgtgcaaattgaaataatacaaacaagcacctgtgcactcatgctttgtaactctctctaattttatctcctccacatgctgcttgtctgtctctgagccttcgtggaaagggaaaaggggaatttttagaatgttcatactctgtgttattyatgtttgtattattacacatttaaaactaagactctaaattatttactgtaacatagaacatggatgggtttttttttccccactcttta

SEQ ID NO: 822643 - DNA, 541 bp, Homo sapiens
catgccatccaggggcctgaggatagacttgcctggttcattgccaccaccactgcaaccccagcatacgatctgaggagctggggattgattcattccgccactgaagctggcacccacacacaccatcagggagcatgatgacaagcatgcctcacccactaccactactgccagtgcccatgaatgttattcagggcccttaggatctatccatcccacttaccaccacacgtacccacatgcaccatcagaaggctggagaataggcctattccacctgcaaccactggtgccagcacataccttctgggggcctgagaatggacctatcctatctgatgccaccaactagatgcacattcctggggcccaaggactagcttgcacagcctgccaccaccactgccaccagcacccccttacctggagactggcctgcccaccataccagtgccactgctggcacccacacrtgtcactcagggcatgaagtctagcccactgccactcctgccatagccaacaccatgaacaccac

SEQ ID NO: 822644 - DNA, 607 bp, Homo sapiens
tttcatcgtctatgtccacttcacagtgtatctgtaatgaatttggatccatttcaaagaatacatagaaaatcttcagctcccaaagcaggctkctctgtaggagggaaagagtaaggaaaacaccctagggcagttctttatttccaaaagattaaaaataattaaacattaagatattcaacatggattattgcagacagtgatgaatggctcttctccccgtaatgatgccctcctctaagctaatcttacccaacctcatttcaaagaaaatgttggttaatgctttatttgtttcattccatgtactcttaagtaaatcagggttataattgccctgaattcataacaactaactgcctccctctttgccttcttggaataactgagtgtgaaagaaagaagatattttcagaggcattagtacttatctgagaattatctatctacccaagtcagtaaagcaaaggccagccactatgccactgttggaagccagaggtcaaagcatgagtatctcccaggcagtgtgtctagcactgtctccaccacaaaataggtactcaagaaatattggctgcctgtagaagcaatttgtttcctc

SEQ ID NO: 822645 - DNA, 621 bp, Homo sapiens
atttgaatttcccagcatgaagaaacaggttttattccatatcccygccagtggagctgcaaaaataggggttcatccttaatcaaatccacttggttacatcttcctttattcactcaagctagaagttttccatttgggtaactgtgattcccctttctaacttgtaggaatggaaaaagcccttgcaatgatgggctgaatggccacagtgtatgtaagttaaaacacacacacacacacacacacacacacacacacacacacacacaaacaaaattctatcctgttcagttgctgtcaaaaagcaactaaatgcaggctgtatgtaagttggagctgggcccctgagcatcctgtccggaaatataactccctgaccctctgactaaagttcctgtccctacataagcaagaagctgatcctacaacccaaggaacactctgaggagcaaaagaaagatctactccaacagctatagcaaagactctcatggaactgtcttcttaataactaagaagcactaggccaagtgtctgttgagaatattatcagtactttcattgatcacacaaaccagatttcataaaggatcaagcttctataaaaagtaatctttg

SEQ ID NO: 822646 - DNA, 346 bp, Homo sapiens
caaattggaaaggaagaagtcaaactatccttgcttgaagatgatgcgatcttacatttagaaaaacctaatgactccaccaaaagactagtagaacttgtattagtctgttctcatgttgttgacaaagaratacctgagactgggtaatttataaagaaaaagaggtttagtggactcacagttccacgtggctggggaggcttcacaatcatggcagaaggtgaaagacatgtcttacatggtgacaggcaaaaagagaatgaaaaccaagtgaaaggggatgccccttataaaaccatcagatctcatgagacgtattcactgccatgagaacagtatgagg

SEQ ID NO: 822647 - DNA, 346 bp, Homo sapiens
caaattggaaaggaagaagtcaaactatccttgcttgaagatgatgcgatcttacatttagaaaaacctaatgactccaccaaaagactagtagaacttgtattagtctgttctcatgttgttgacaaagaaatacctgagactgggtaatttataaagaaaaagaggtttagtggactcacagttccacgtggctggggaggcttcacaatcatggcagaaggygaaagacatgtcttacatggtgacaggcaaaaagagaatgaaaaccaagtgaaaggggatgccccttataaaaccatcagatctcatgagacgtattcactgccatgagaacagtatgagg

SEQ ID NO: 822648 - DNA, 549 bp, Homo sapiens
ctacccctaattacctcccaaaggcctcacctcctaacmgcatcatatagggggttaaggcatcgacatattaatcttggaaggacacaaacgtttagttcataacacatctttcattagttgaagtaattgtatttaaaaattctctgtaggaggagcaacattcgcctcactctgaaacacatgtttagggtatgaagtctcaccgtacaacctagagtgagaacttgtgctgatttagatagcaattatttaagtctgttatggaattttttcttaacctggaaaattaagttcacactacaattaaggggctagatggtagatggaggagagaatataacacaaataagtaagagatttccctaaagccatttaacaatgaactaaatcccattttcgtttctaagtggtctaaacctcatgtctgctttaagtaaaactttcaaatagttgcagaataaaccacattgtattggaccctcatcaattgactttatctaaaaagatactgcaaaagtgtggctaaagatgtaggttattttcatg

SEQ ID NO: 822649 - DNA, 528 bp, Homo sapiens
aatatccagaatctacaaggaacttaaacaaatttacaggaaacaaacaaacraccccatcaaaaagtgggcaaaggatatgaacagacacttctcaaatgaagacatttatgcaggcaacaaacatatgaaaaaaactcatcatcactgatcattagagaaatgcaaatcaaagccacaatgagatactatctcatgccagtcagaatggcaattattaaaaagtcaagaaacattagatgctggtgaggctatggcgaaataagaatgcttttacattgttggtgggactataaattagttcaaccatcatggaagacagtgcggtgattcctcaaggatctagaaccagaaataccactttacctagcaattccattactgggtacatacccaagggaaaataagccattctactataaagacacatgcacacacaggtttattgcagcattatttactggaataaatactggatactggaatagtatctggaatattccagatactggaatagtatctgaaaaa

SEQ ID NO: 822650 - DNA, 430 bp, Homo sapiens
tgctaaatatatgttttataaggcaagccaaaatattgagctacccaggagaaattaagtacactgaaaattgaattaagatccatttcttttcaacagactctaaaattcttaggacccgttagatcctggtttgggcaaatgctttcgcatattaatattcacccttgtgcaatataagatgaataaccccttctcattataagacatcgatgtgtggctcagaaggtttcttttctgtaagtgttgcctccaggtttttcttttaaaataggattgttaaagtactttgacatatcctcttcggctgaaaatcaaaagaatcatgcagcttcaaggtcatttgttagatcccatttacttgctgttataagagaaagtaagagagtgtcctcttttaawaggctggagtgtaattccagattcagaa

SEQ ID NO: 822651 - DNA, 567 bp, Homo sapiens
ggggggcgtttttttagtgttttttgatatgttgctgaggctggtcctgaacttctgtcctccagcaatcctcccrccttggcctcccaaagcactgggatcataggtatgaggcaccgcacccggccaaggggtgtctttttttttttttttttctttttttttttttttgagatggagtcttgctctgtcgcccaggctggagtgcagtggcatgatctcggctcactgcaagctccgcctcccgggttcaagcaattatcctgcctcaacctcccgagtagctgggattacaggtgcacaccaccatgcccagctaatttttgtattttttgagtagagatagggtttcaccatgttggccaggctcatctcgagggcctggggtgtctcttttaaacagtctccccagggtattctcacactaccagatggtagccctgctcctgctccatagatcactctttgaggagcaggatcctttccaggtgtttattttccacgtttagcttaatttatcgaggttttgactcatagagaaacagattctagcctcaaggcaaagca

SEQ ID NO: 822652 - DNA, 610 bp, Homo sapiens
gagggcaggacggaatttgggggaatagtctgtatcttgattgatgtggtggtagtctctgggctgtatgcatttgtcaaatctcagaatttttcactaaaatgatataaaaattttattgcatgtaaattataccccaaatttttaattaagggggaaaggaactggaagatacagacacaatggacactaaaaatgctaatgaaaataggaaaagtgattaagggctgtctacactcctgtccctatgtccttgactcccagcctctcagccagacctggtctgcgccccccccccaggctgttctccagcactgatagcacccctggcagtctgtaggcaccagacaagcactctgtgacctcctcaatcctgggccccctgaatggccgacacctatgactcctccctcctgcttgagccccacagacctctctggtccttcacaaactccctggcttgcctctgccctctgaccatcctgctcactctccttcccccacccccgtccccttacttgggtcatcctgtcagtagctgyacatgctgccacacccacctctcccagagcccagatctctcgcccgactgaggtcggttggtgctggc

SEQ ID NO: 822653 - DNA, 650 bp, Homo sapiens
ttgctaaggtatataagtatgaactaaaagggtaagttttgacataaaattgtacaattgtaagggagagagaatgaaaatgtagacttttggatgcaattaaagagaagttgctatcagaagttgttagagtagtttgttataagaatatgatattttaggtaagtttcatgataaccacaaaacaaaacctatcataactgcacaaaataaaaaagtttattttgcaatttatccaaaattttaaagcataccaccacagaaagccatcaagctataaaatagttcagcaagagagaaaaagggaacaaagaactcataaaacaatcagaaaaaaaattacaaagtggcagtagcaagtccttccctataaataattaccttgatagtaagtgcattacattgtcaaataaaaggacatagagcatctcaatggatagaataaaaaacaagattcaatcatgtgctgcctacaagagactcactttaccagtcaagacatatataggctgaaactgaaaagatgaaaaaagatattccatgcaaatgcaaactaaaatagagcaggggagctatacttaytattaaaagaaataaactaagtcaaaacctataaaagagatagggttcactgcataacgataaaggag

SEQ ID NO: 822654 - DNA, 297 bp, Homo sapiens
gctatgtggccaaggctggttttgaactcctgggctcaagtgatcctcccaactcggcctcccaaagtgctggcactgcccctggactagcttgccaatttaaaagaaatccctgagtaagagcacccaaggtccgctgaatgcccttcacctcactcggaattytagagcatccgaggatctttccattccatatgatacacaccctaccacacactcaaccaacagctgactggatgagagaggtactgaacctaaaagtggccatctgcaggttgtctagaagcccaagagata

SEQ ID NO: 822655 - DNA, 466 bp, Homo sapiens
catgtaaacttcttaaaaactcggcaatgaattaccatatggagctccaagtacaaatgctgtgtctatcgcctttgaggtctccaggcagaggtgagcagtgaaggaaggactctaggggatgggcataatgcatggtgggcagcttacccatctcaggaactggcttcagccccatggcaccacagggatggaggtaagagattgcaaatgcagtgggctgactgcaactgtgctattaggaaaactgctaaccccaatcagcagcaatcacacttgatcttcaggatgactttggagcagttctcagaactaagcagtggagagaaggccaaatgaggttatacatgactcagataaagctatggataaattaattttgttttcttgtgtgaacatttatcccaactgaagaattatagtgttggcatgaatatgcattaaaaraacagaagctgaattgtgt

SEQ ID NO: 822656 - DNA, 609 bp, Homo sapiens
ctagcatgaaggatgggttatagggggcaatggccaatagaagattagaactgtcgaggttggtagttcatcagggcagagttgaatggatgggaatagtaggtttgaagaaacaggaagagctttaacatgaggtttggattctagcttagacattcaggtagctattaatagggagtatagaaagtcacgtctttggggggctattttgcttttagagaaattgagttgggatccctgtgtgatatccaggaagaattagtaggtaggcagatgaaagtaagggcgtgctgcccaggagagagatttgattgtcttcatcatgtaggtgaatggtatttatttatcctccaacacatctgagtaataaaactcactccttcaactggaagtgactcactgtgtgacttcctctgaaacatggaatcacgggttaaattggaatacagaggaagaccaagtatagtttgaaagtatccgatgggatttgctaccctccttctcactccctagctttgttacaagagtcattgggtccattccacactcaagagatgagagatgagttagagattgtttccacagtcarattgccattcctaagtagca

SEQ ID NO: 822657 - DNA, 584 bp, Homo sapiens
attttctattcatttattatcatatttaatgtcataaggctcataagattttctcagtctgttcttttaatgactaaatcattctggggggaaaatagtttmtaagctttaatgggttaataatgaattaagatataggattcaggtaaatttgataaaggatttcagtatttctgtgtctgaaatgtttctgtgtctgaaacaggaattctggactagcaacgtcctctcttaagctaaaatccacaagtttatggtcacaggaatgatttaagttactgtaaaaaataagaagtttaggtatatcagagctattcaaaagagagaaagaaactgaccttttcagtcagcaaagtattaataataccaatttgccatgaccaataaggaacaactagaaatggaagcacctggcaacattaagcaaattattaacataattcaacatattaggtcaaagaaaaaaatacagtatcttttcttttttagaataattgtataatattctaaatatctattatcctattatttgttaatgaacattgcttttcaatttgagtcaacaataaattgaactaccgtaa

SEQ ID NO: 822658 - DNA, 609 bp, Homo sapiens
tttttgaaaggttccagatgattctagtgcacagccaagattgagaaccactgacctaaaatgataaataggtaatatcctgaagggatagggatatgacctaaagccatcttcttcggttcatatttaattgttctgtttctcttactaaaacagtaagaattgaaattgcttatcttcaatatcattgatattttatggcttactcccaaatcctgatgcatacccctagaggcacaagcaccccagagaatcagagaggtaagatactgacaaaaatgaaagctgacctttgatggctaccagatctgctgatagttactattattattttaaacaaattactgttatcttcaattttctgctcatttatttctgtgtccttcccgtattagaaatgtctggttaactcagggtttgggtacatttaatacgtttaattagagagtttttgttttgttttgttttcttttcttttttttttttttttgkacatgatctacacagaaaatttggaaaatacaaaaaactatagagaaaaataaaaatatttcctaatcccatttttcagagttaacttgatttccatccagcacttttaaaagcaca

SEQ ID NO: 822659 - DNA, 625 bp, Homo sapiens
aaatacgtggcttaattattttgaagaccacatttcttacaactgaayacatgcacactaaacaaaatgtctagctgagcttctgtaaggttttgtacattcctaaattttctagtttctccttttgccataaatacataaacacacaggcttaatttccactgtacaaacctaatgaaacatgttatggaagttcagcagtaaggatatgtattttttacagaaagatttaacatcattatgaaacattcatactttcctgcctggccttacaaatgggtcaccttttaggaaaatgagacagtaaaaggaagtgatctgagaattcaagaggactcacagtgttctcacggaaacctgccaaggcatggccagtactttccagacaaatgagtgcttaccactgcttggtacagtggcaaaggattggtacgggacatggtcacacagatccatttcatgtattccagcagaaactatgattgttaatggggtttgaagatgccagtgaggggcagagatgcatcaaaacaaacactgaagagggactgtgaagaagctaatttcattaaggccccaatagcattaaacagagcctctctgtatacttgtaattcttatttac

SEQ ID NO: 822660 - DNA, 613 bp, Homo sapiens
agtgaacaactcacaattctcttaaaaaattcaagattacccactcttctgcctctttgcacaagkttttcttttggcccagaaaacatttcctcacttgtactgtacccttactttcctataactctttacgggtgcctatactattttccaccataattgcttgttcctatgattatctcttgtgttagagaaatgttcccataagaggcagactaccatttcatcatgggttagcatcatgaacagacaaacacacctgaattttcagttaggatttgaatccagagtggagggaataaagtttccgggcaagaggaccttggacacaaatgcctgcaggtggaaataagcatgacttgtttcagagactagggacgaaggataagagaactcttccgcataaaaataagtatatcagccaggcatggtggcttacacctgtaatctcagcactttgggaagctgaggcaggttgatcccttgagctcaggaggtcaagactagcctggacaacatgatgaaaccctgtttctacagaaaatacaaaaattagccaggcatggtggcatgcatctgtagacccagctactgtggcggctgaagtgggagg

SEQ ID NO: 822661 - DNA, 586 bp, Homo sapiens
cacactgtctgctctgtcttggctgcttgctcaggctgctccttaatgcacagttttggggccggctctcccttcagggtcagcagcttaactctttctctctctgggcacgagtgagcagagctgcatcctggctcccccttgtccatctgcaagatggatagctttggctctcttgctctctctctctctggccacaagcgcctgcacaagagcacctgtacagtgtcagcagggcagttataccttccccaaacaatagtggctttgagccaagtataagcttacacaaacaggttatgtaactcgtggaggtgtgcacctatgcacccatcccgctaagtcatgcaggcctggatgtctgcctcagcccaattcttgacctaagcacatccatgtaccttacagttggaattggcaatcataccaaagaaaatgaaataggctataatctagtattatggttrcttaactttgtagaagaataacaggcaggagatgcagtaagtatagaagcttcatctaatcaaaagacaccaaagctatgcaagtcccaaggtatctgggagctacataggagctgcag

SEQ ID NO: 822662 - DNA, 565 bp, Homo sapiens
agaattttttaaaaatgcagccaggaaatatgaaattatataaagcaacgaaatctatgagcaatagccattactcagggataataataaaaagtaaaaaccttggaaaatgtatttgataaaatcattcaggaaaatatttttggtctagatagaaattagacatccagatacaacaggttcaaagaacatctggaagattctttgcaagataaatcttatcaaagtatattgtcatcagactgtccaaagtcaacatgaaggaaaaaattctaaagatagctagagaggccgggcgcgatggctcataactgtaatcccagcattttgggaggccgaggcggcggatcacgaggtcaggagatcgagaccatcctggctaacacggtgaaaccccatctctactaaaaatacaaaaaaaaattagccaggygtgatggcgggcgcctgtagtcccagctactggggaggctgaggcaggagaatggcgtgaatccgggaggcggagcttgcagtgagccgaaatcgcgccactgcactccagcctggatgacagagcgagact

SEQ ID NO: 822663 - DNA, 588 bp, Homo sapiens
aaaagaagggaaataaatttactttaaagtgtaaagtttaagatcctatacacgggttgggctatcaatcctttaactgtctggtgaaagtatctcaraataacgttttaaatacatcaaataaaatgtataggattactaaggaaaccagttatatcaaaatacagttatcgaaataattttagaaaacagatttgtaaacagcaatatatgtgcttctttattaatacactaaaattttgaaatgtagtggtgggtctaataaccatcttcatttcaaaataatgatgagtttaaatatttggagatctctccaacaactgcaatacaatataaaaattcttataattactactgctgacaaagtcataaatacttctaatattggtgtgggttggttacttgcattcaaattggaaggaaacatcaactttcagttaggggaaaataaaaataaagaagtaacattttactccaagttgcagaactcacttgggttacaggaatccccaggagatttcttaaaaaaaaaaaaaagacataattacaccctacataatctagtaacagagtctcagcatctggatt

SEQ ID NO: 822664 - DNA, 595 bp, Homo sapiens
tcctgggatttctcctgcaacatcttttctccagacaggaatgtagctgtcctgggccaaagttaccactaacaaccaatctgggaaaagtttgacctaatttcttttctcttctccacttttattttaaccaccagaggaagaagcctgaaaacaatttcaccttactgttttactttacaatgtacagattaattacttaaaaggttcttttttaactcaaaatacagattattctttatgttattctcctcttttacacatctaggaaaatctgtcaaaacaaaaacagtctcatatcaaatcatataaatgtaatggttacacaatattaccattatatcaggtaaatggaggtgtggatgttgattcaatggtaaaataaaaaccagtgcccacaaactctaaaatctttgaaaggataaaagcctcttaccctatccttaaaaggaactctatattcctcctcaggttttgaagataagttacttaattttaacattttgtttgsttaattgtattttaaatatacatcaaatatatatttttcagaacaaaagaaaaaaattaataaattggacatcatcaaaattaa

SEQ ID NO: 822665 - DNA, 594 bp, Homo sapiens
cggaaatgaacccatgcaggtagagtcaattgattcttgacaaaggtagcaagaatacacaatgggaaaaggataatctcctcagtaaatgatgttgggataaataatctgcatgcagaagagtgaaattggatatttatctcacaccatatacaaaaatcaactcaaaatgaatgagacttaaatgtaataccagaaattggagaagaaaacatagggggaaagctatacaacattggtctggacaatggtattttagatttgacctcaaaaatagcacaggcaacaaaagtaaaaatagataagtgggataacatcaaactaaaaagctcccacagagcaaagaaaacaattaacagtgtgaaaagacaacatatgattaggagaaaatgtttgtaagttacacatctgattggggctaatatctaaaataagaaggatctcaaattttaaaatgagtgaagtgcctgaacagacagttctcataagcaggcaaasgaatggctggtatacatatgaaaaatgtacaacattgctaatagtgagagagatgtacattaaaaccataatgaaatatcatctcacacccataag

SEQ ID NO: 822666 - DNA, 628 bp, Homo sapiens
gaattttttgtctttattttccccttccctccctagtatgtagtggtttcatgcagacagctttgtgaagaagccccattggcatctattttggtggaatgagtgggaacataattctcagtgtgtcagtaatccattgctgcatacagaccatttcaaactttagtgctttaaaatagcaatcattttgttttactcaggagtgtgtttgaaatttggtcagatgggatggcagttatcattaacaccaatatttaagatatgaccatgggaatgagtagctgtaatcattggagaagcgaggattaaggaatctcagaatgcaaactatttgaatatttcattctatgggaaaattaaaataaccaacaactataacacaggagcagtatcttcaggagagtggcagtgagtcaggggctagaatctgcaaggaatgggtgggggagtagcctaagcatctaaaataaaataaaatgaataaaacccccagaatcccactttcctaaccatamctcatttcctccttctccctcatggtaaaacatctccaaatgtctgtttacattttcttatttttcctctattcactgaaatagatctcatctagatcataaccagcagccaa

SEQ ID NO: 822667 - DNA, 645 bp, Homo sapiens
tagaaaaaatacccctcgggtggggcgcagtggctcatgcctataatcccagcaccttgggaggccgaggtgggcrgatcacgaggtcaggagatgaagaccatcctggctaacacagtgaaaccccgtctctactaaaaatacaaaaaattagccgagtgtggtagcacgtgcctgtaatcccagctactcgggaggctgaggcaggagaatggcttgaacacgggaggtggaggttgcagtgagccaagatcgcaccactgcactccagcctgggcgacagaacgagactctgttttaaaaaaaaaagaaaaaagaaaaaatacccctcaaagagttgcaaagtggaaacaatacatcttcattagtttaacaaatatttgaacacatactctggggtagggcctgtgctacatgctcgctgtgaaaacacgaacttggcctctgctctcaggaatgtgttcttgttggagaagactggtaaatgagggtcatgtagttataaacttcgataagtgccaggatggacaagtaaaaggggcaatgaggaagtctagtagagaagtttaccctagtgtgggggtaaggaaagagttttctgatctgaggaagtgatatttaagctaaaactggatggatgggttt

SEQ ID NO: 822668 - DNA, 573 bp, Homo sapiens
gcattcataattttagtttggaagcggtgaaattttgagatttggcataattctgtcatctttasaggcttgtatttagatttgttcaattttttctaaaagcttttttttttctatttaattatattacatttttgttccttcggatcatttccatacaatgattgacactgaaacatgttgctgaatgttatctccgtggcccaggtgaccagaactgtgattgaatttggcataaagctaatgatactgagggaaatgagatatgctcctagtcctgttattgttccagttaagtgtgattttgatttgggaaacaactttcttctgaagttataattgattttctgaaatgtacccttaagtctttaaaaaagtaagaaatttggagttacaagaggaactcagagatttttttttttagtgaagtgtatcttagtaagacttcttgagccaactcggaactaaaactacatccttcccaattttgtcaatatttttccataatttatcagtgtttatcttttacgaatttctttcacatgaaacactggattagtagtctgcaacctt

SEQ ID NO: 822669 - DNA, 488 bp, Homo sapiens
attactagtaagactgagtgtgtggtttttagtgtttggaaatttgtgttcacttcacgtgaattgctacttcataatcttttttccactcgtgtgtgtgtacacatgaacataaactctaaattatgttttatttatttattcacctaagttggtatagatactatatgttgctttgcttaagaaagatttggactaagttctgtgcttggaattaacatggctgcatcaggttgcatctggatatttgcctgataatatcttatttctataactttatattgtctttctgtgtctctttttggcagcaatcactacttttatacattattttaatctatttacactcttgtaattgcaaatatattggcatcatttattctattgtatagagtgactttcatttacgatgcttttygttgtcattttttaagatttcttattttctgccttgttagatttattgagtttcctttgctcacttttta

SEQ ID NO: 822670 - DNA, 613 bp, Homo sapiens
tgcaaaggatcataagtgaccactaagaacaactatgtaccaacaaattagacaacctrgaaacacaggaaaattcctagatgcatacaacctaacaagtctgaataaggaagaaacataaaatctgaacagatcaataacaagtaaggagattaaatcactaataaaaattatccaatcaaaggaaagcccaagaactgatggctttactgctgaattctaccagatatttagagagaaactaatattaatccttctcaaacttttccaaaaaattgaagacgtaataccaaagccagtggacactacagtggacagaagaaaagaatagaaaagaaaattatggccaaaatctctgatgaacatagatgtaaaaagtcctccatgaaatactagcaaaatgaatccagcagcccattagaaggtttattcatcaagatcaagtgtgatttatcacagaactgcaaggatagttcaatatatacaaatttataaatttgatatgccacattgacagacaaaaagacaaaaaccagttgatcatctaaatagatcagaaaaggcattcaacaaaattcaacatcccttcgtaataaaaactctcatcaattta

SEQ ID NO: 822671 - DNA, 546 bp, Homo sapiens
gaaaatgcttaagggaattctggagtctgaaagaaaaggatgctaatgaacatcaaaaatttttctgaaggtataaactcattatcaaaagtaactacacagtccaagatagactactttaacgctgtaattttggtgtgtcaaccacttctatctttagtatgaagacttaaggataaacctatttgagataataactttaacaatttgttaaaaggtaagcaattattgggggaaccagcccccagtatttcaccataggtcctttctattttccctaattgttggccggtctgagaaataaaaagaaagagtacaaagagagaaattttacaactgggcctccggaggtgccatcacatattggtaggaccatgatgacaaccccgagccacaaaaccagcaagtttttattagggatttcaaaaggggagggggtgtacraatagggagtgggtcacagagatcacatgcttcaaagggcaataaaagatcacaaggcaaagggtagagcaagatcacaaggcaagggcaaaattagaatta

SEQ ID NO: 822672 - DNA, 571 bp, Homo sapiens
cttgagctgtggtgggctccacccaattcgagcttcccggctgctttgtttacctaagcaagcctgggcaatggtgggcacccctcccccagcctcgctgctgccttgcagtttgatctcagactgctgtgctagcaatcagcgagactccgtgggcgtaggaccctccgagccaggtgcgggatataatctcctggtgcaccgttttttaagcccgtcagaaaagcacagtattagggtgggagtgacccgattttccaggtgccgtctgtcacccctttctttgactcggaaagggaactccctgaccccttgtgcttcctgagtgaggcaatgccacgccctgcttcagctcgtgcacggtgtgctgcatccactgtcttgcgcccactgtctggcactccctagtgagatgaacccagtacctcagatggaaatgcagaaatcacccgtcttctgygtcactcacgctgggagctgtagactggagctgttcctattcagccatctaaagtgtggaaagtaatagcctcaatgtccaacaatagcagtgtagttaagtagattgtta

SEQ ID NO: 822673 - DNA, 617 bp, Homo sapiens
tgtcccttctaacatctatgccccttactcrgtgagatctcttctaagtgctcaccacacttgacactattctgttagccacctcacctcttatgagatactcctgctttctgcccccagcatcacttcaaagcactgtaacaccgttaacactgctacccttctcccccttccaggtaaacaacaaaaggaagagaaacgtgattacaatttacctactaatatcttactctcccctaaagaagatttacaggaaactcccattgagaatgctgaattaatttggttcatggttggttcttatttaagggacaaccaggggcattaccaggcaggatatatcatcatttttataacagaaataatcaaaagtgcccaactccaaggagtcaaatcagcccagaaggctcgcaaatttgctaaaggaaaagtggcaaatatatataccaatagttgatatactttcggagtagcccatgattttggcatggaaataaatattttcttacctcatctggacagcccatacaaaatgggcaacaagtctcagagttactagaagcaattcagatgccaaggcaacttgcaatcataaaaattcctgggcactcaaagga

SEQ ID NO: 822674 - DNA, 575 bp, Homo sapiens
tttattactataaacttttctctaacacagcttttgctgcatccccaaaatttagataactcacatcactgttaacattcattttgaaaacttttaaaatttttatcttaatttcattgttagcccaaaggtcattaaggagtatactgtttactttccatgtatttgtatagttttaaagattccttatttagttgatttccaggtttactccattgtggcctgagaagacagttggcataattttgatttttaaaaaaatgtatactaagacttgttgtcttgcctatcatataatctatcttggaaaatgttccatgtgcagatgaaaataatgtatattctgcagtttttgggtagaatgtttttcaaatgtctatttggtccatttgttctagtgtccagtttaaatccagtgtttctttattgactttctgcctcaatgatctgtytagtgctgtcagtgcagtgttcaagtcttcctctattattgtgttgctgtctatttactttcttaggtctagtagcatttgtataattctgggagctctggagttagatgcatatatatttag

SEQ ID NO: 822675 - DNA, 611 bp, Homo sapiens
tagggtctttaatatgtgaatatgcactgaggaagtctaaggaagggattggagcacacagcatttctcaatctcrtttcagcagggaacctgtgtcttaaggcatcatgttaagactctgatctacagcgcataatttgggacaagttgcctttgagtacaaaccatccaaaacacagatatgagcagagagcctgtgcagtatcaatcacatgcaggtcacataattttcgtttgtcatatttgacactaatagttagaactgcacatcataatcttgaggaacaaatccaaatacaatttaaaaacttcttccctaccagcaatacaaattctggttcatgtcatttccatttcctaatccaaatggcaaaataaatatgttagtttgtagaatgccaagaaaaatataagttcaggtaaacacaactgactactggtatattcgttccacagacagaccacatttactgttggaacacacgctttgctttttttgcaacttaactatataatgccccagcccttttttttaattagtcaaatgcgggatcagatctcagaagagacaaaggttaggattttggccagttccaaaaaacacagctaaa

SEQ ID NO: 822676 - DNA, 546 bp, Homo sapiens
atccacatcacataacacggtatttttaaatcttagctaaaatttgttaaatcatactgagtttttaatgacacagatgcatgccagctttttgctgttrtgcaacttttccatcattacagattgttgcacttgacaatgctgatcttggaaattatttgaaagaaatctgaaaacaattcctttttctcaaaagtatgccactgtgtcttccccatttatatgtgacatcagtaagcaaaatggcaaattgcattacacccttgttcagcactctcaagcttggattatatagtgacactgctacttctttcattgctctgctatttctgtaacagttatcactgacaaagaatgttatttacttcagaagttacttcctatctttgataaatatcaattgtttttctcaaggatatcagttatggagataaccatagccaataaaaaccactgctctgtatgaaatgctcactgtatgctagaaaatacgtggctggtatcaagtgcacatgcggtgtcacaaaaataacagtttcaactttt

SEQ ID NO: 822677 - DNA, 616 bp, Homo sapiens
ggaggcttgttaaaatatcaccctcggctttcatattcttaagggaatatcacatggcttcccatagcctcctttgaagggttctttcaaattaaaaccatggtgctggtggaggaagggaataaaatgataaagtgtttttgctttgaaattcactggaaaaactgcccagtcagtaagcatttattaagtgcttccgtgtagggcagcttttgacctatcgagtctcagcctagttgtaaagtcagagacacaagtaaataatgtcagtggattataggtttgaatataatgtgtactaaaaaatgatggggccacaaagtcaggagttaatgctgcctgttgagactgaagagatttctcaagggaagtgagatagaggctgggttgacaagtctgagcattggttcaccaggtggaaaaggggagtgaagggacttcagccataatgaaatagtctgtgcaaaggccctgaggcaaaaagaagtatgcaggtctccagaaagcygagtcatcttaaaggtacatggtgatgagcagcatcagatgggactggacagctgatagtgggtaagcctattatgggaatccaggacattctaagcaatttggacac

SEQ ID NO: 822678 - DNA, 482 bp, Homo sapiens
gcttctgagatctaagacataaagtcaccctttggggaaacacacatgcaacatacaactgattttccaaatgttggatatattgacaaaacagagcagaaaggaaattctacacgagrgtggtgggagggggtaaactcctaggatcgcattcaatgattgatgataaaatggaaagaacaccgctttaaagatcagatgactatatgtatgaatctctactgtgtaatctcggacacatttccagacttcctaaggctgaatttcctcacctgtaaaatgggttgacagagtttcctgcatataaccaccaaacagccacttctagttatggttcccgggcgtaacccccggacctgcccatcatgaggtggagactttgaagcactcccagcattcgagaaaccgccactgtgcaatgtgcaagagcttgggcctctgtgattcacgtcatggtgtcctgtattactcagctcatcctc

SEQ ID NO: 822679 - DNA, 594 bp, Homo sapiens
atgcgagggtctccagggtcaaacagacagaacctcagaactggtgtgaagcttagaaggggctgcaggaggctgtgctaaagcctcagtgtattgctatgggactggcaactaaacaagtaaactaaaggggtgaggtacttttccttaagtgaaaaaagtttccttaacttctttaaartgtaagctctgttttcagcttaactcttgaaatgagaagcgtgaatccgtggtggtttcatgacctgcataatcacactacctgtttttctgtcacagattgccttctctcagcacagcaattttatggacctggtacagttcttcgtgactttcttcaggtaattttgcttatacagactctctctgttcttttgatttaggcactagatccattaatagagtatcagctcctaaaagataaaaagaataatcctgtgtttccaccacagattaaatttacttcatatgtgttcctgaaaagttagatgtcagttacagtaatataaactcaatctagcatgacaaagtgaaaacgtttggtttgtatgttctggcttccagcggggggctttgcatgtatcctgtattaat

SEQ ID NO: 822680 - DNA, 635 bp, Homo sapiens
ctagatattaattgagtcatgaaaaatagtctattgctaatggggttttcatctttctaactttaaacacgcacaaaacactttggaaaaagtacaaatctcatttggtctgaaaataacatgctgtgggtcaaaattttctactttctttatctgagaaactatttgggggctagaaaactgatttctctttaaattctttatctatatatctttgaatgccaaattgaatttcctgcatagtctacctatctcattagctcaaaattaccaaaagctggtcttttacactagcttctaattactttttccccttgtcatggtccttgttcagggtggaaataactttttttccaaataggacttccatgattatagattgagaaagttagatgttgcaatagccatagagattactttccattgcataaatgaaatagaaatttttgtcaaatattacagcagattataattttctttaattattaaaagcttgtttttattggcttattaattttttccactgaattttcaaatttatcagtgtagttgctacattatatgcttgttatctttttcttcatatataaaatggagtttaaatatcagaakccatatgttttccatcttaaaat

SEQ ID NO: 822681 - DNA, 697 bp, Homo sapiens
taatccccctgcatttctggtctgtgcaggtggtcaagcaggctccagaagcaagagaaaaccttcaggcaaaaaagagcaggtgctggcatttggaagttgggttgctgcacctcagggtgttaggggcaaggagatatagcagggcactggcagcatttagcatgtcatgataaaactactgtcaacgaattcccacccaatagctatttatttaactaggctgtgtgacatgaggctttatatgtcctcttctcaccttcaaggaatgggcagaatccacagggcatccagatgacaggcaggatgctcctgccccttagaagtgctccactgcagcctccacacatgaatgagaaccagcccttcaccccaactcatctgggtatgtctggttattacctgaactgcctccaacctcctaaagacagtaatctttatttttccaaatggtcctcactccacagttggcattgctcactctgagagcggggcgtgagacagcagaggagacagaaaagctactctcatgattcatctaacatcctagtgaggcgaaggaagagttctgacctcccccgctttctgttattattcccctagaggcaaattttagatccaaggtgaaattcaatgartttccttttaccttacttggaatataaaagtaagtttctccctctttactgaaatatgc

SEQ ID NO: 822682 - DNA, 576 bp, Homo sapiens
agaaatcctgttataaacaactgccaattttttttaaaggaagatattagttgaacatggatactagtattaaatgaattaagcagtaatggtrttttggatgactacttagtgaggtggaaaatgatgagggagctaacgtgtgcctcctctgagggagatagaattggattcttagaagtaaaatgcctccagggccagcacaggataaagaattagatgagtttaggccttggagttccaaagatcagagcaacattcctctaaggaagacacagaaatttgtatgacctttatcaaagcatggacagccttcacccactcgtgcctctctctccctgctgcccacatcttcaccacacagaacaaagtctcccattccacaagggtcaaggatcacacaagctaattgcatttagctggtgggtataatttcagagctaggtacctctcccttcagccagacataagatacaaatttttaaaagcaattcaagagggcagggatcttttattcaatgaccagaccaaatctcattgaaattaaatattcaactagaatatgcatgcagcaac

SEQ ID NO: 822683 - DNA, 602 bp, Homo sapiens
agagttctgaaaatgtgagcgccagcagctgctgcttttgcattgtggtgggcttggcagaggagcagagactggaggcagtgggccaaagtggattcttgaatgggagggtcacaggaggaatgcaggatttaraaacattatcctggcagcaagagatgagggaaggaaaaaccattttgcattgggggtgaattttcaggaaaacttctctcttcatggttcctaataattttggtgggtactcaattataaataacaacaatatttgtagcctgagggcttttgtatctataaggtgaatttcaagctcttcagaatgcccagcaacaatgcctactgtgtgctaagtgctagggaacaaggaaaaataggatttggcctccactttcaaggtgctctgaacaagagagaagacagacggtaaagacatagcacacgtggagtgtgcctgggacagtggaagatgcctgggcatgtaccagcacataggtttcaggatgtgtggagcgtgaggggaagtgaggtggagaaggaaggaaacttgtgtgagtttgcagggatcagctcaggaagcttcttccatgcttaggtggtttgca

SEQ ID NO: 822684 - DNA, 523 bp, Homo sapiens
cataattctagcaacttggaatcagaagagatatttttctctgtagagaaatccctggaagggtggttgtctgacygccctctccttaatcacttctaagaacgaaagctcattcttggtgagcagcctttccgtagtgactaattctaattgctaggtcttgttatacgttaagcagaggtctacccttcagcagcttctacctgttgtcgttctgtgtgctagagagagcagttctcttttctgcataattcttgtgagtcttaaaatatgagattttcttaaagcattcccttctcctgggttaaattctcattcccatttcttgtatgacatggggtatagacaagtgctgtccaatggcactttctgcagtgatggaaatgttctgtatctgtgctgtacccggtggtagccactagacacatgaatattgaacacttaaaatgtggctagtgtgacccaggaattgaattttcagtgtaaatttaaatagccactcataactaatggctgttatact

SEQ ID NO: 822685 - DNA, 668 bp, Homo sapiens
aagggggaaagggaggagataagggaggagggggaagaggagcaggggaggaaggagggatgatatcaaacaggcatgtcttcagttacctgcccagccccatgccctgggtgaaagatagtgcattagtccrtgttcacactactataaagatactacctgagactggataatttataaagaaaagaggtttaattgactcacagttctgcatggctggggaggcctcaggaaacttacaatcatggtggaaagcaaaggggaagcaggcactttctttacaaggtggcaggagagagagcacgtggaggacatgccacgcttgtaaaccatgggatctcataagagctccctcaccatcgcaagaacagcatgggggaaaccgtgtccatgatcctgtcacttcccaccagatccctccctcaacatatggggattacaattcaagatgagatttggatggggccacagagccaggccataccatatcagatggtttatccattaggacttgcattcagtcaagagatggaatttaaacctgtaagtatttattatttttttaaccccacacaacaagagtgataagtagtggtagtgttttagtggttcaaagatttggatccgcagtctctgtttctcttggccatttcctcatggtcacaaga

SEQ ID NO: 822686 - DNA, 608 bp, Homo sapiens
agctgcaggtccacagccaaaatcttgccagtgaggacatggccgtcacattttgtgcagcatctgctgctcccggaaaccagttattgctgtagccactctgacttcatttctcatactgctttggatcagcagccaccaattcaaaactctggggctagcgtgtctgactggttaagcccagatcacatccttgtactctagcttcaagggaggtgggaagaggaaggcttgggtggaaagactggactctttggctttcttaaaaggaggtggagagtcaaaaaggcccacgaatgtccaccattttcctgctcagtaccatgtgatttcccaaaggaaacccacactgcttagccaatttgagacgttgttttgggagcactggagtactggtaaatttaaacacacacacacacacacacacacacacacacacacacacacacacacacacacagcctgctctgaaaacattaacataaagctgaaagataaattggctgttggaataaacttcctggaacacgttgtttcaagatgaatcagccagccatctatttacttacctttatgcacaaaaggaraagagagaaggagggtgttct

SEQ ID NO: 822687 - DNA, 634 bp, Homo sapiens
agatcaggtctcacctaacattgtaatcactttttaattttgtgagccaataaatgtcctttattatttatttatttttgacacaaggtcttgctctgttgcccgcctggcagtggcaggaatacrgctcactgcagcctcagcttcctgggctcaaacaatcctcccacctcagcctaccaagtagctgggactacaggcacatgccaccatgcctgactaatttaaaaccatttttaggcctggtgcagtggctcatgcctgtaatcccagcactttgggaggccaaggcaggtggatcttctgaggtgaggagttcgagaccagcctgaccaatatggtgaaaccctgtctctactgaaaatacaaaattagccggccatggtggcaggtgcctgtaatcccaactactggggaggctgagccaggagaatcgcttgaacctgggaggcagaggttgcagtgagcctgagccaagatcatgccattgcactccagcctgggcaacaagagtgaaactccgtctcaaaaaacaaaaacaaagcacaaacaaaaaaaacatttttttgtggatgcagaggtctcactatgttgcccaggctggtcttgaactgctggactcaagtgatcttct

SEQ ID NO: 822688 - DNA, 608 bp, Homo sapiens
gacaactcaaagtggaggcttcccggtcataggtagatttaaagattttctgattagcaattggttgaaagagttaagttatcatctaaagacctggaatcaaaagaaaggaatatttggattacaataaggggttgtagaggccaatgttttatcatgcagatgaagcctccagatggcaggcttcagagagaatacattgtaaatgtttcttatcagacttaaggtctgtgttaatgttaatgctcattggcttttcctgaattccagtagggaggagggtataaagaggcatgtctgactcccccttcccatgatggcctgagctaggttttcaggttaattttggaatgcccttggccaaaaggagggggtctgttcagattgttaggaagcttagaattttttcggtttacatatatataagcatatattgtgtcccagcttgtcttttgactttggttgtttttgcagaacagcaattttcattgtatatggtcaaatctatggttccttcctccagggtcatttttagaaagaccttccccatgccaaacttttaaaaatatttacctataccyttttgtatagtttttatgtcttgtttt

SEQ ID NO: 822689 - DNA, 599 bp, Homo sapiens
ccccttccaccactataatgaagtgggggatcctctctctttatatccctccatccaacacacacctacataaagagagaagggaagagactacggtaagactggggtgaagatctggatggagacccaaaaaatggagcagagaggaaatgagcctctttgggatgaaggttccaggagttgccgactgtcaggatttcctgctaatgaatctccaagctgcctctcagtcacccagcccacccacttcctttaccattgccactcttagtagctatttttcttttattttctttccttttcttttgttttcctttctcttcttttttcttttctcttctttttgaaagaggatctcactctgtcacccaggctggagtgtagtgacatgatcatggctcactgcagcctcaacctccttgggctcaggtgatcctcccgcctcagcctcctgagttgctgggattacatgtacatgctaccatgctcggctaatttttgtattttttgrtagaggtggggtgtcgccatattgcccaggctggcctccaactcctaggctcaaggatctgcccatctcagcctatcaaagtgttagt

SEQ ID NO: 822690 - DNA, 545 bp, Homo sapiens
aactgtgtatgcaagggatctaggttgtgtgctccttatgagaatctaatgcatagtggtctatcactgtctcccatcacccatagatgagaccatctagttgcaagaaaacaagttcagggcttccactgattctacattctggtgagttgtataattattgtattatatactacaatgtaataataatagatgtgcacaataaatgtaatgtacttgaatcatccccaaaccatcccctgtctcccagtctgtggaaaaattgacttccacgacatcagtccctggtaccacaaaggctggggactgctgccataagcccttactctgaccagtggaccatcatgatgttttgggtcacctaaagttagtttcagtttagagccagtgtctgaaaattctgattatttcctttgctttagtgcacagttaccctggtaaacagctgtaggtaaacagctrtaggtccctttggtgaatattggggaaaagattaacatataaatttttcataatatactggggtctttcctcaaggggatccc

SEQ ID NO: 822691 - DNA, 496 bp, Homo sapiens
gtttagcataatttgtgacggttttcagttcagtctttataatatacatgaggagactacttatgatagaaatataaagctatgattctgttttagtcagtacagtaaatacacaatcccatttactcatttgtttgaatcaataatttgttttgaatccttcaatttgttaaaggatgaagtctgaaaattatccatgatacttaaaagtcacagattatagttacaacttaacatgggtttaattcagtcatgtgtttagaactgtgctcaaaacagaccgcattctgcaagaaaataatgagaatataaattttgaatcatgtaaaactatagagactgaaaattattattttctaccacccgattyacactttataacaaaaaaataatattctataggcactatccaaagattagagagtaattaggaaaaacagacgctatagcccaggtttgaccttggtgctactttagattctttttttttttcttt

SEQ ID NO: 822692 - DNA, 634 bp, Homo sapiens
ggcaggactcactcccacggctgcccacccggcctgcccccgtaacagtctgtttccaggtggagggcgagacaggcttgaaaacttgcccgaggctttctgcctcccagctgcaaaggaaaagggctttagatmttcccctgcctgtgaagtccgctagccagattcatgccctcccctgagttctggccgggggtttctctccccattcaaattgttacaaatttcagatagagaattccttctcccagtggagttttagctcctgcccctctggccaccctcctgctggatccctgtggtgccaggcaggaatgggctgcttgaggacccggtgagctcccagggcctttctgctgcttcctctatccctgtatttcactcagctcggctctcttaacttgactcagctccaggtaaagtcggaaacttctcccacaaacagaccttcagcttctccagtgggggtgtgtgctcaggagaggagggtgtcccgttcccacttcctcagttggggcactcacagtatttagggtgcttcctgggtcctgcaggagcagtccgcttccttcagagggtctgtggatcctctcaggattgctggtttgttcttgcagtcgatctagagctaaaa

SEQ ID NO: 822693 - DNA, 602 bp, Homo sapiens
taaggtgtagactatcaacatctcttgctggtcaaacactcttttcatctactctcttttaaaaattaatataagattacaaatatctaatggcatttcatatcttttccacaaggaaatctttcttctgagtggagagttatttctaagggctctaatcatcatatgcatgtacttgatctctgtggtgtccatcctcgtccaggcatctcatactagtcattcacagtaatgggacaacctgttttatggggctgaggccacgtgcccagggaacattacattaatcccagcacactaaagtcaactgaggataggatgcgcccaaaacctctcaaaagaacaatgtggactaattcttaacattcatctgccacactaactgctcaccggagagtaacaaaatatctattatttcccacaccagcattagaataatttcgatgattttaatgattctaaaaatgtctgagacaagtctagtgcagactggagaatcccatgtttcagacatttgtctgaagttctcatttcccataactcctctctagcattgcagacctctgaccaccctaatscatctgccctcacatgtgtatgca

SEQ ID NO: 822694 - DNA, 540 bp, Homo sapiens
gaaataacagaataggcaaggaaatcagtgcctttggttttgttactgttcaagtactacccttgtcagagaactgcagttgttctcaaatgattcagggaaaaaaacacccttctgagtcagtaagttcggctgaaagacaagagaaaatcaagcagagtcattctaaaccaatgattcattgaccttggaamtctggctagtagatgtctaataaaaacaaaccctttcagtttaagagatgagatatttactccatacctaatgaaaagtacagagaacttagagaaattaaatattttttcctaacacaaaacctggacagatttcttctttttcaaggacaagtaaaacaatattaagtaacataaagaaaggaagtactgccttagggatacagggtatgcacaaaaaacgattaaccataagaaactgaagatatttttagaaattatctactttgcatttttcataaattaaaacagcgttttctgaaacataagaaatgagtttaagataaactagaataaagggtaagat

SEQ ID NO: 822695 - DNA, 399 bp, Homo sapiens
gagcaagtccgtagtagcaaagggttttctgcaaagcagaagatacatgaaggaattccttacggctccatcctactttataatcagggtgtgattttacagcatttagaaagaaataaacaaaggatacatcattctttaaaactttattttgtctccttatttccaagagtcaaataactacagaaccatgaaaattgactcaacaaatcctacagcaactcctctttgtcaggtcccatgttagaaccagagtttacaacacagtatgagagaagcgagaacctgccatcatggactgtaaagccayaaagtaaataacagaaatataaatgacttcatgtgtaaagagaagtcattaagcaaccttattgctccaaattccattgctttttaccc

SEQ ID NO: 822696 - DNA, 614 bp, Homo sapiens
ccattgaatagattaattggatatttgataagcactaaatatacatacacaatagttaaaaggttcctcaaagaattattaatgaattatgttctgtcaacgaaatgtataattctttattctctaagggcattcagtttatggatctaacaatttttgaagatcaacctaaggatatttgagttgtcatggaaattcataatagcatcatcacgtaagccaacctcttcaatgttggtatcttaattctactccagtttttatagaagtatatgacttaaaactataaaaatgaatgaaatcatgtcttttgcagccacatggatgaaactagaagccattaagtgaaataactcagaaacagaaagtcaaataccacatgttctcacttataagtggaagctcaaaaatatgtatgcatggacatagagagttggacgggtgggagggtgggagccgagtgagggatgagaaattacttaatggatacaatgtacactactcagatgatggctatattaaaagcccagactacacaatatatctatgtaacaaaattgtacttgtactstctaaatctataaaaattttaaaaagaaaaagaaaaaaccccc

SEQ ID NO: 822697 - DNA, 577 bp, Homo sapiens
agggcttgtcatagagtgtagcccatagtaagagccagatttatatatcacctattgttgtgttttggttgttgttgttagtactttactattatatattctccaaatccctgtgcttctctctgtgcttaaaagtgttacatgtaagtagcagagaggcaagtggtgtaagacttgcagaggaaaatgttattcagaaggaggtggtcagggaggacttcctgggtgtcatggtcccctgcaaattcatatattgaaacctccaaggtgactatattaggaggcgaggtctttgacaggtgattaggtcatgagggctgacctctaataagtggtgttagtgcccttttaaaagaggcctgagagacacccatcacccttcttccatcttatgaggacagagtgggaaggtgccatctatgaaccagaaagacctcaccagacatcaaatctgccaacgccttgaccttggacttgccagccaccagaactgtgagaaatatatttctatggtgtataggccacccagtgtatggcattttgttatagyagcctgaatagactaagacactgaggg

SEQ ID NO: 822698 - DNA, 550 bp, Homo sapiens
gagcagaatcttgttatctgctcattcaaccccttcatgtcacaaatgggacagggggagaaatggcatatctgaaatttacaaagaaaaaaatggcacatctgaamtttacataagaaatggcatatctgaaatttacaaacttacatttacatgagtggtgccacaaccaagatacattgactcacagcatcttttatgaatgaaggagaaaagagtgtctgctgtattctgtcacttccacccccagagtatcccagttttgtgtcaacctcataccttgaaactcagaagttcaggtggacattttggctgtgaacttagctttggccacaaggtccagaagccacttcgaggagccgttaaacacacaacatttgcaagcacaaagatctagatgtgacctgcagctcttcaatttgccaggtctgcaaacttcgccaagttactgatcctctctggacctctggttcctcatttgagaaagatagctcaccgtagttctacatttaaacgatagtttaatgaggtaaagtgcataaagtgcctg

SEQ ID NO: 822699 - DNA, 597 bp, Homo sapiens
ttaaatgacctttttaatacttgatcatttgcaaaggaatttttacatatgttattgtgctccattctcacaaccaacatatagagcataaataaccccaagctggagatragacttaggcacagggaagtaaaagagagcatgcacacgtgtgtacacatgcatatgcacacattcgcagatcctcttttgcttgacaaactgctgttcacccttcaagcactgtgcccacattgcactttgaagctttgcctgaccatcccatttccagccaggtggagttgccttgatctcctttccacccccctgcccttgctgccaaccttaatgaatagatctctcgcaatcttgtctctcccactggactctggactctttttaggtaggtataatgacttgccaactatagtgctgtacatgttggcacgagctccatgcctttttcctctggcatgacatagtcattcagaatccatatttctctgacgttaacaccagttgcaccagctgccaatgaaggatgccctcttctaacaaaaactttactgaaaattagcccccagagagtgtctcatgtgtgctgacttattcctcctc

SEQ ID NO: 822700 - DNA, 597 bp, Homo sapiens
ttaaatgacctttttaatacttgatcatttgcaaaggaatttttacatatgttattgtgctccattctcacaaccaacatatagagcataaataaccccaagctggagataagacttaggcacagggaagtaaaagagagcatgcacacgtgtgtacacatgcatatgcacacattcgcagatcctcttttgcttgacaaactgctgttcacccttcaagcactgtgcccacattgcactttgaagctttgcctgaccatcccatttccagccaggtggagttgccttgatctcctttccacccccctgcccttgctgccaaccttaatgaatagatctctcgcaatcttgtctctcccactggactctggactctttttaggtaggtataatgacttgccaactatagtgctgtacatgttggcacgagctccatgcctttttcctctggcatgacatagtcattcagaatccatatttctctgacgttaacaccagttgcaccagctgccaatgaaggatgccctcttctracaaaaactttactgaaaattagcccccagagagtgtctcatgtgtgctgacttattcctcctc

SEQ ID NO: 822701 - DNA, 612 bp, Homo sapiens
ccaaaggaaaatagatcattatataaaaaagacacctgcatttgtatcgtcattgcagcactattcacaatagccaattcacagaaccaacctaagtgtccatcaacagttgacttgataaagaaaatctgtgtgtatacacatgtatcacatatgtgtgtatgtatagatgtatacatgtgtatacatctatacatatatttatacatctatacatatcatggaatactatataaccataaaatagaatgaaatcatgtcctttgcagcaacaaggatagaactagaggccattaccctaagtgaactaactcaaaaacagaaaattaaatattgcatgctctcatttacaagtggaagccaaataatggctatatatggacataaagatagaaataatagatactgcgcactccaaaagtagagaagggggttgaaaaattatctatcggatacaaagttcactcattaagtaatgggttcactagaagtccaatccctaccagcacacaatataccyaagtaacaaacatgtacatgtacccccgaattcaaaataaaattttaaaaataaaaatgcatgtcatctattttgtcattctttattatgtt

SEQ ID NO: 822702 - DNA, 624 bp, Homo sapiens
acataggtcaatgattcctccagaaagccatagagaatggagatacaagtctcccttccataacatctacatattaagcaagacttgtttgcgtctattgaatagcctcccagacataaatactttcattagggagttctttgctacgttctctgaaacatgactctcagaggaaggttgagattaacagtgcatcaggttatgcttaatcttctttcactattccattttgttttaatcccataatatttgcatttctgaaattagggtattgtatccattggggtgggacccagaggcctcatttgggttagatttattatctactaaatgactttcttagcacaaatttttatctctttgtgtgccagctaatctcaatgctctatcttgagcagattctattacagcaaaatttatcattcttttttaaaattttctacatagcttttagaaactttcttattaatagtaaatgctaacagacacattacaacacaacagasagagataagagtcacaccttaaatatgataagatgtctttgaccctgaagttatccccaagtccttggtttagaaaaatatttcatttgtcacgaaaatcttttgcaggcccaatgag

SEQ ID NO: 822703 - DNA, 624 bp, Homo sapiens
acataggtcaatgattcctccagaaagccatagagaatggagatacaagtctcccttccataacatctacatattaagcaagacttgtttgcgtctattgaatagcctcccagacataaatactttcattagggagttctttgctacgttctctgaaacatgactctcagaggaaggttgagattaacagtgcatcaggttatgcttaatcttctttcactattccattttgttttaatcccataatatttgcatttctgaaattagggtattgtatccattggggtgggacccagaggcctcatttgggttagatttattatctactaaatgactttcttagcacaaatttttatctctttgtgtgccagctaatctcaatgctctatcttgagcagattctattacagcaaaatttatcattcttttttaaaattttctacatagcttttagaaactttcttattaatagtaaatgctaacagacacattacaacacaacagacagagataagagtcacaccttaaatatgataagatgtcyttgaccctgaagttatccccaagtccttggtttagaaaaatatttcatttgtcacgaaaatcttttgcaggcccaatgag

SEQ ID NO: 822704 - DNA, 629 bp, Homo sapiens
atagtcaggctagcttcttaggtgtccatttgataagacagtagtctgtattttggggtgacatgaataatagtcttattaagctcctaaattaagatatagtaacaaacataagctacagcttattgccttgactaagtttggtgaaaaattatatagtaaatatatttttacctgaatttaatgctccactttaaaaaagaaacacatatacaactttttaaaaatctattttattgcttaagccatgatttaaaagaaacacacacacacacacacacacacacacacacatatatatatatcactttttaaaaatatctttttattgcttaagccatgattcttcaataacaagtcaaacttcatttctcttgagtctgaaaacaagccaagatttattggaaggtgaagagaaggaaattgcatcagtgatgactggttttggaatgatgttaatttaaatataaaatttaaggaaagaagccattatcagattagagtttcatatctcagagaaatgttgcyctaaacaccttttaataactctccctaaagaaaataacataaataagttcatattaacagctaaagtgtttcaaaatgggaagaagctctttgagtcataa

SEQ ID NO: 822705 - DNA, 629 bp, Homo sapiens
atagtcaggctagcttcttaggtgtccatttgataagacagtagtctgtattttggggtgacatgaataatagtcttattaagctcctaaattaagatatagtaacaaacataagctacagcttattgccttgactaagtttggtgaaaaattatatagtaaatatatttttacctgaatttaatgctccactttaaaaaagaaacacatatacaactttttaaaaatctattttattgcttaagccatgatttaaaagaaacacacacacacacacacacacacacacacacatatatatatatcactttttaaaaatatctttttattgcttaagccatgattcttcaataacaagtcaaacttcatttctcttgagtctgaaaacaagccaagatttattggaaggtgaagagaaggaaattgcatcagtgatgactggttttggaatgatgttaatttaaatataaaatttaaggaaagaagccattatcagattagagtttcatatctcagagaaatgttgctctaaacaccttttaataactctycctaaagaaaataacataaataagttcatattaacagctaaagtgtttcaaaatgggaagaagctctttgagtcataa

SEQ ID NO: 822706 - DNA, 601 bp, Homo sapiens
accttttttttaggcaagtgaggtcttgaatgctaaaaatttaaaggcaaatatcagacttttcgttgatctaatttaaractttattcaaatttactaaatgctttgcctctgcttatttatgccagctttacaatttagagaagtggcacttttcgataattaaaaacagaaaataagcaagaaagaataaaactatttggtaaggagatgaaaataggaaaaatctaaagttaattttagaaaagtgcctcagagaataggtaaaaaatagaggtccagcaaagttaaagaactttccataaaagttgtgtcaaccatagtacttggagctaggtaacgttcactaagcacaggatgggtttttggtttaaatattatataccattttagagggagcatggaatcaaaaagttttgtgaatctcctcgtaacaacattaattgtaaaattaagataagagtacttcactcatgtaatctcagcactttcgggggctgagacaggcggatcacctgaggtcgggagttcgagaccagcctgacaacattgagagacctgatctctactaaaaatacaaaattagctgggcatggtggtg

SEQ ID NO: 822707 - DNA, 527 bp, Homo sapiens
tgattgtagattatgctatttaacatgtcatgactatttaacatgtctattttaacatgtcatrttataaccagttaaattgaacaatattcagatttgtgtaaaataactacaaactcactttaataatagtatcccttctgaggacaatgggattctgtgggaaaaaaaaatgttacctatgactccatgtaaaataatgctagttactgtgaaattagaactaattatatatcaaaatttaacagcatcatcttcaaatttatcataaccttgactcataagtagcatttgtgctccaaaatcagaatatgttttgactcggggcttgatggtcatgccagaaatcacagacagctaatggcagtgtcaagatttgagctcagggacaaatatcttgcagatgtttatagcaaaagttttgttcatatcataatgtattgttttatctaaaaattatattgttcttccccttatcaataaaaccaagatatataagatttgctttaatattgccatttttgtct

SEQ ID NO: 822708 - DNA, 527 bp, Homo sapiens
tgattgtagattatgctatttaacatgtcatgactatttaacatgtctattttaacatgtcatgttataaccagttaaattgaacaatattcwgatttgtgtaaaataactacaaactcactttaataatagtatcccttctgaggacaatgggattctgtgggaaaaaaaaatgttacctatgactccatgtaaaataatgctagttactgtgaaattagaactaattatatatcaaaatttaacagcatcatcttcaaatttatcataaccttgactcataagtagcatttgtgctccaaaatcagaatatgttttgactcggggcttgatggtcatgccagaaatcacagacagctaatggcagtgtcaagatttgagctcagggacaaatatcttgcagatgtttatagcaaaagttttgttcatatcataatgtattgttttatctaaaaattatattgttcttccccttatcaataaaaccaagatatataagatttgctttaatattgccatttttgtct

SEQ ID NO: 822709 - DNA, 461 bp, Homo sapiens
cttagtatactaaactgtgataatcaggatagcttgagtatggccagtttccagtgagaatttatgctattccataaaacaaaatgtggtacaacataacttacctacaaaaatgagtattgccatgaagttacatgatacaccatctgatttcctatgtaaactcataaaattattcagtgatctacttttcttaattcgtcttcagcaaagtaaaaatgaacgcaattgtttagagaaagcctatgtaaatccacttttcctcaaaaatgaaactctaggaataaagcagctattttagaacagatttctgtgattgtttgcattctcacctcagctttggatgtgccrcagtaatatatttttattattttccttgattttaggcaaatccattatataactgaataaatggcctctttttccccagaagaattacatatccatgtatgaaagcttca

SEQ ID NO: 822710 - DNA, 645 bp, Homo sapiens
aaaataagtcaaaatctgtattaaaagagttaatttatcaccaatgacctaggaaagtgctctcatattgacagacaagtaattatttttattcctattgcttaagccgctyccatgaatgctacagagtgaatagattcttatttaaatgaataactttcttagttggatacaatctactaacagcatggctattacagtggtgaacagaaaagctggaatgatttcattaacaagtcagaaagggcattttgatttatttccaacatggtaaagcttttgtgattcccagccataaacaccgggtgaggggttgggggtgaggaggtatggcactataataatgaagagaattaccactgagattttagtgaagaaaagcatttaatatcccctagcacaatgtcagattctttttgcatatttaaattcttgtgctaggatttctgtcagcacaagataccaatcaaagtgaaactttcttttttcagatattcaaaagaacttcattcttggttttttttttttcctttcttactcttaaaatataaataccctgatgaacactctattgatgttattcgtgttctttatgagtcgggaagaaagttgtacttcaaaagatgccagaaagaaatgaaaata

SEQ ID NO: 822711 - DNA, 568 bp, Homo sapiens
tagctcaatgttgtttctactttttttcaaaatataattatgttgcctttttctacttawctctagttttctagaaatctataatgaacgggtgcgggatctgttgaagcaatctggtcaaaaaaagtcctataccctgcgggtcagggagcatccagagatggggccctatgtacaaggtgagctactgtggtcctggagatctgaaaccaaactgaagcctgggaagctctcctaatgttccctaattcattgaacataggtgtaatgaacacttatcgtgtgccagctactgtactagacactgaatatgtattgataaatagagaagacgtggtcctgccctcaggcaagcttacaatctagtgggtgtgagtcaggaaacaaacaattacaagtagtgataaaggttaataaataaatggatgtcaatggcaaagaacgttggaaagtgttggtggcccacctgtatgaggtgatcaggaagagcttctctgaggaggaaacgtttaagctgagacctgaaaggagtatagtcgtgtgaagaatgacgtaacgtggtgagaag

SEQ ID NO: 822712 - DNA, 643 bp, Homo sapiens
tacatgaaaaataaatggtgttttctccatattggcaccacgtggcattcttaaaggaactgtgacttttcaaggaacccttgtgacagggtaacaacctataatttaatagactaaaacrtatattaatctctttatacttaactatttgtcttttttttttttaagacagactctctctctgtcgcccagactggagtgcagtgatagcattttagagatgaggagggtaagctcactgcaacctccacctcctgagtttgagcaattcccctgcctcagcatcctgagtagctgggattacaggcatgcaccaccacactcggctaatttttatatttttagtagacagggggtttcgccatgttggccaggctggtctcaaatccctgacctcaagtgacccacccactttggcaccccaaagtgctgggattacaggaatgagccactgtaccagcctactatttgtctttttaaggaaaaagaaaaagaagtaactgctaatttaactttcaccatggtaaattcatgaaatatgaatttttcaaataactaaggctaatcctgttaaagaagaaattaaccaattaaaagtagaaattaatgagttagcatcttatatgcaagaccagacacaatg

SEQ ID NO: 822713 - DNA, 634 bp, Homo sapiens
caatatcctcaccccaccatacatccacctattttcctatttgtaagcactgacaaggccttctcctagccaagcaggacactaaagcactaattggcactagaggtatcacagcttgagttcaaccagagctggcaggttccatgactccagtgacagctctgtgaaaaagtgtcaggagcagagctctggcgtgccatcggctgactgcagcaccctggaactaatgagcagcctgtcagcaccagcatccggggccccgtgtggcgctgagatcattagaatggcagaggagaaagacttcctcagcaaagaggagctggggaggggagaagaggacaaaatggaactaaagatatcaccttacccacagagggcaaccacccaacaccaaaggactgagaagaaaaagggagaaagagagaaagcaaaagtttttctaaatccatctatgccaattctagaccactcttggaatctccttttggttgggttgccctgtcagtaatcaatatgggctgtaaatccttgcaataatccaagaaggggcctcagtgattaaattaactctttagtcttggctgtgctmtgaaacctggaagtcgcccaagtctctaggaaagagggacctagg

SEQ ID NO: 822714 - DNA, 427 bp, Homo sapiens
catgtaccagaggagaccaaaccattgacatttgacttttcttgatgagctggacaataccaagctggtcccacagggcttcatctctctggggcagcctgcggctctgacccacacccgtgctgctacagttgcacttgctgggacctccctgtagaaatgctgggaggctggcccctctctgctgcctaggctgtgaaaggtctccatttcaccagcttcaactctcagaacaacctatggagtctctccaccttttctgtggatagcagatgccttgtttggcctgaatttggaatgatctctaatcttttacttccctctttgtcgttcaccctggatacagagaggacggaaaatggcactaaagctttttgcatcaaagygatgccttgggagtctgtgttctctgtgcaaaggtcctcgc

SEQ ID NO: 822715 - DNA, 612 bp, Homo sapiens; identical to SEQ ID NO: 818626

SEQ ID NO: 822716 - DNA, 548 bp, Homo sapiens
  misc_feature 204: n = A,T,C or G
agtcaaaggtaaaattatttctgaatgcaagagccatctgaagaaggtactaagatgttagttgttgggttctggttacaaggtaagtagtggggtgtgtgtgtgtgtgtgtgtgtgtgtgtctgtgtgtctgtgtgtttaacaccatagtatgtttccttggtgttcttattgttctgagtgtgttatctttgtgtgtggttnttttacaaaattgccttagctaataaaatcttgggataaccgagacagaaaggcatacatcaaagaagccaaagatgtagcttcccattagggaatgcttttgttgtataggtgccaactacttggccccgcctgaagaatgcaaactcccatatgaaaccctggccaacccttccagagttggctgcaagattctactccttgggccatgaagcattctctggtccccacagcaccagttggcaaggactttgctctctcaggtctcatggccaggagctttttgggtactcccagcraaacttctccttgaaggcttcctcatttccagaatgcacgcgtat

SEQ ID NO: 822717 - DNA, 454 bp, Homo sapiens
tcattttctccgtggctctgccctttctggaattcttctataattttatatacattgacatcagcattcctattaaattttcccatcttctgtgctctgcctctcygttgttttgggtatgcagaaatccattttacatgcactcatatacagacaaatgtgttggaaacaataccgtgatccaacagcaacaccgttgcctaagtgtcttcttatcttactgtgcatataattatttcctagccagtcagtaacttctctggcttcttcagccaaatgtggctttaatttattaaaagttcctgcaatgtcatcaggcggaagaaatgccaatactcaaagatgacaaatttttaaactaaagtttttgtccttgccatatcatataaccaatctattcacttgaattttccaccaaatgcattgagctgagtgggaaagacaaactttattt

SEQ ID NO: 822718 - DNA, 407 bp, Homo sapiens
tcccatgaaatctgctcctgtcatgttgaccctttcagattccaaacatgttgttctgccggtggacgatgactccgatttgaacgttgtggcatcttttgataggcgaggggaatatatttatacgggaaacgcaaaaggcaaggtaagcctaaaagctggcaaatcaggcatcttgtacactggctcatttaatgtttacttgttttgtttcttttgaaaattgtttttattcttggactaagcacagctcctttctgcagcaaatgtagtstaattttcttccatctcttaataataatttttgttctttggatttagagtgatagagattatttgacctagaaaagcatgggaggacctttactggatgctagtaatgaagggccattatgaaattataaaat

SEQ ID NO: 822719 - DNA, 126 bp, Homo sapiens
aagagactgttctttcctcaatgtataaaagggataaaaactactcaggttataggtgtactaaaatctcagacttmatcactctacaattcatccatgtaaccataaactacttgtaccccaaaa

SEQ ID NO: 822720 - DNA, 586 bp, Homo sapiens
tcacagtctaagagaaaaaatgtcagcactggacaacaatcacagcacttgttggcaaacactgtgagggaaggaggctcataggctgatgtgcatcatwggctgaggtgcaaaggcgggaaaggctactgaacaaacctgaatggaggtgaaaccaaaaaggagagcaaattataggtcatcactatccccagatgtcctgccaaggaacgtttcattttattctaaaagcaactgaaaaccattaaagagttttagacagatctctttgggtttctaaaaaggtcattctaatttcagggtgccaaatggattggacatcctagttcttttcaattaacaaaattgtatacatatctacctctggctttaacaacaatgatgtgtcatttctcattgacacatcccattaaatagggctagatatggctaatatcatacttttcactgttaacttttacatggctgtatagttcacaaaatgtagaatttggaaaaatcacagattgaaatgactattttctatggattttctgcttatggttgatgaattagttatcagtcttaagctgataaacatatggtt

SEQ ID NO: 822721 - DNA, 457 bp, Homo sapiens
attcaatggtcatttaaaacctaggagcaaattatttaattttaaagctcaaatttggtctacacttttatcaacctcactgatgctcatagaaaccaatcttcttttataaactggtcattttcaaagaatatctggaagaagaaccactttatataagagatttgatgtgggacagacaattttatcccatttcattttgacaccggctttatttcagttttggagcaaatatatattttctgcttaatatttaatctgtttatttcatattttggcttcttggtatgaatcagtgtccttagtataaattttagtcttaaaaactcttaacaagcatttaarttcatgtgttgttgtccacttaagtactggtgcatacctaagcacctatactttcaccaaatttttgagagaggttttataccatttagatctttattaatcatggtcttaa

SEQ ID NO: 822722 - DNA, 546 bp, Homo sapiens
gaggcagaggttgcttgcagtgacctgagacggggccactgcactccagcctgggtaacagagcragacaccgtctcaaaaaaaaaaatatataatatagatatacataagtataatatataatttatatataatattatatatataatttataattaaataatatatatttatgcaattatttaataattatttaaattatattgtttaatatttaatataaatataaaataatttataatttctaatgtaataatttatataatacataatatatattatttgtaatatataattatgatatatatttatattatattttatatttttactgtagatatcttttatatctttaccgtacttttctctgtttagatatgtttagatacacaaataccattttattacaattgcctgcagcattcagtacactaacatgctatacaggtttgtagcctagaagcaacaggctatatcatatagcttaggtgtgtagtaggctatcccatctaggtttgtgtcagtacaatgtgatgttcacacaat

SEQ ID NO: 822723 - DNA, 546 bp, Homo sapiens
gaggcagaggttgcttgcagtgacctgagacggggccactgcactccagcctgggtaacagagcaagacaccgtctcaaaaaaawaaatatataatatagatatacataagtataatatataatttatatataatattatatatataatttataattaaataatatatatttatgcaattatttaataattatttaaattatattgtttaatatttaatataaatataaaataatttataatttctaatgtaataatttatataatacataatatatattatttgtaatatataattatgatatatatttatattatattttatatttttactgtagatatcttttatatctttaccgtacttttctctgtttagatatgtttagatacacaaataccattttattacaattgcctgcagcattcagtacactaacatgctatacaggtttgtagcctagaagcaacaggctatatcatatagcttaggtgtgtagtaggctatcccatctaggtttgtgtcagtacaatgtgatgttcacacaat

SEQ ID NO: 822724 - DNA, 546 bp, Homo sapiens
gaggcagaggttgcttgcagtgacctgagacggggccactgcactccagcctgggtaacagagcaagacaccgtctcaaaaaaaaawatatataatatagatatacataagtataatatataatttatatataatattatatatataatttataattaaataatatatatttatgcaattatttaataattatttaaattatattgtttaatatttaatataaatataaaataatttataatttctaatgtaataatttatataatacataatatatattatttgtaatatataattatgatatatatttatattatattttatatttttactgtagatatcttttatatctttaccgtacttttctctgtttagatatgtttagatacacaaataccattttattacaattgcctgcagcattcagtacactaacatgctatacaggtttgtagcctagaagcaacaggctatatcatatagcttaggtgtgtagtaggctatcccatctaggtttgtgtcagtacaatgtgatgttcacacaat

SEQ ID NO: 822725 - DNA, 643 bp, Homo sapiens
cagaaaggtctgtagggcctctaggtaatcaatccctctcacacctgagccgttggcaatcacagatctgttttctattcctgtatttttgccttttyaaaatgccatttaaatggaatcacatataatgtagcttttatagtctggcttctttaacttaacatacaaatattgattatatctatagattttcctttttgttgctaagttgcattccattatatggatagaccagtttgtttatccattcaccaagtgaaagacactggaatgttcccagtttggggtgattacaaataaaacccacaataaaaatttgtatacatttttgtatgaacatgtattttcctttcaggaaagcaccacaggactgctgggtcatatggtaggtagaaactgccaaactattttccaaagtgactgtgccattttcattaccaccatcgatgtatgagtatttgttttcattgcttccattctagccaatacttggtattgtcatttttatgacagttctaataggagagtggtggtatctcacatggttttattttgcatttccttaatgactaatgatattgagcatcttttttgtgtgccactttgctatctgtatatattcatacaagtaaatttttagaaa

SEQ ID NO: 822726 - DNA, 692 bp, Homo sapiens
aatgatattgagcatcttttttgtgtgccactttgctatctgtatatattcatacaagtaaatttttagaaaaccaaacaacccatttgaaaaatggacaattgtatgaacagggaattcccagaaaagaaatttaggaatcagtaaacatcgaacaatatgttcagtagtactagcagtcagagaactgcagggaaatgagatatcattttgggttcccttggactggccaaactgtgtaattttggcaggggtgagtagaaatgggaatttgtacacactgtagataggagtttaaatcagtacaactacctggagacctattttgtaatacctagtaagttgaagatgcgtctagtttgtgacccaacagtcctgctactagtatatatatatgggcacaaaggtacttgaaacaatgcttattgtaagattgtgttaatgaatatgagaggcactgaataataggagaatgaataaagtcatttattaattcaactgagtgaatgaaatcaatatgaccaatcagtatgaataaattccaagaacaatgttgagtgaaaaaataagcaggctgcaaaacyatatactacattataccgtttttgtaaaaattgtaaacattcaaacaatgtatgtcttgtttatggattcatatatgtgtagtaaaagtataaaaacattcgtggtaa

SEQ ID NO: 822727 - DNA, 604 bp, Homo sapiens
taaacatcaataaagccattgtccctctaaatcaaaagccataatttaaattatarttgtctatctctactaaatggagattttaaaattagctgcttccagaaccaaaacatctacaaaattaaaggtgagaattttggtgtttttctctctagtgattaaactttcaaaacatctctataaaaatttcttgtactttgtctgctgatcttgattctttttgagtatttttctcattgccatattttcctctcagtgttcagtcctaaacgagaagctcgaacaactgctgcaggctttgcacacagattcccaggctgcgcctgttctccctggcctcagccctctcattgtggaagaagatgctgtggaatcgtccagtgaagagtccctgggtgaaagcaaagagcagcttggggatgacgttacaaaaccttcctcccagaaagccgtcaaaccaagggaaatcatgttgcgggcaaatagtttaaagaaagcagtgaggcaagtcattgaggaagccggaaaaggtacacattaacaaatttagctttggaagaagttggcagcatttctactgcaagcataacggagtttccatagt

SEQ ID NO: 822728 - DNA, 644 bp, Homo sapiens
gaatctaaaataaaagttgaaattataaaaaaagaaattgtcttcatacaatgaaaaaaaamcaaatttttggagagctgaccatatcagattaacattttctgcttgagctgtggcatgatgaagacctttcattccccatgtttatggccgatttttccacaggactagtagtagtgagtacattttaaattttacatgtttgaaacatctcttgttaactatgaaaaaaattagatagtaggtttattaatatgttgttgctaaatttattccagctttcatatgaagctaaataagtaaaacgtaaacttaataagtaaaagaaagggtagttgataaagttactttaaatttaaaaacctgtttttatcttattctcaaaaaattttaaaaaatgtttgcaatcattaaatttttgcttttactttcactacatgtaaacttgggcaaatttcttaacctctttttggttttctcatctctaatatgaggataataatctacctacttcattgggttgctgcgaaggttgaaaagttactataagtaaagtgcctagaatagtgtctggtagatagtgctgcctgagtgttcactgtcatctttattgttgttatttttattgctactactgctgctgc

SEQ ID NO: 822729 - DNA, 630 bp, Homo sapiens
  misc_feature 184: n = A,T,C or G
ctttatggacaagggcagtcctaatcataagccagactgcatttgcacaaaacagtagagttagcctatgccttcctgccttaaattgtggtgcttgcttgcttctcttccttactgaaaaaaaaatgtccwttgtgactttttgggcacttttgtctgcattaaaaaccagttcaggcagaanacctttctcctcaatgattttcttaatggtgtctgggagctcatttgctacttcttggtcagcagaagctgcttcttcttccgttattttattttaattttttatttttgagacgaagtctgtcgcctgggctggggtgcagtggcatgatcttggctcactgcaacctctgcctcccaggttcaagcgattctcctgcctcagcctcctgagtagctgggactacaggcatataccaccacgcctggctctatttttagtagagatggggtttcaccatgttggccaggctggtcttgacctcctgacctcaggtgatctgcccgcctcggcgtcccaaagtgctgggattacaggcatgagccacggcacccagccttcttctgttatcttgacaatttcaagcaacacctcattctgaaattatcaagccatcctttgctggc

SEQ ID NO: 822730 - DNA, 622 bp, Homo sapiens
tagctacacgggaggctgaggccggagactcacttgaacccattaagcagaatttgcaaggagccaagatcataccactgcactccagcctgggcaacagagcaagactccatctcaaaaaaaaagggtatgaaacattttaatattacttaagagtagagtccaactgaaagttgagtagaattcaaatttaatatttggggaagaagattattaaaatacatcaggaaacagatatgtgtgaaatattttaagatgttgccgcctgtagtggaaagttacattacagtttatgtacttgtaaacaaaatgactctggtgcccttgaaatacacatagaaatacacattcccaatgggttccatatgctgctcagcactaattacatgtattattttatttacacaaactaaataagaagtctcattagcattagattaaatttgtgaaccaatctttgtctttattccttttctcaactatgtccactgctgtccttcaatgacattcaattcactcayaaaaaaaactctttagaagaaggtactactatattactttccatctcagaactaagagtgctctcaaaatcatgattaactcttaagccaagtggtagttt

SEQ ID NO: 822731 - DNA, 602 bp, Homo sapiens
caactctttcattttatatgaatccagattcgagaacgtactgatatccccaagatcacagatgattaatctagggttaacagctgtaacatatatgttcagagtataatattcttaaacagaatcccccaaaacttgtcagcattcaaattaaaacacacataccacacacatacacacaaactctcatgtcccattgaaaacttctcactaaaacatacatcaagtttccaaaccacttcactggtgattttgagtcatatcaagaaccagatgccctctcagtaaaaaaacccaatgaacatcttattcataatggagatataggggtactagcaatgatccaggcatgtctgtcaaaataaagtgtctttcccctttaaatatctttgtaaggaataataaatagttctcctaataacaaatattggccatggaaagttgttagggaccacccacactatgtaaataaatattgtaaaactarcatcaatgtttgtttttgtaattttaaaaattttattggaacatctgtggaatataaagtaacaaaaggctcaaaagattttccattttaattaagggagaaaagatgcacaaaa

SEQ ID NO: 822732 - DNA, 647 bp, Homo sapiens
ttcatagaagacccatagacccaataatcttaggaagaaatgtgacataatctcaagttagtaattcaataaaatcccatttttacaccaagttagtatagatttaaatcttatagcatcaagtgtttgaagcgttatggatcaccagggtttcatgaattggcgtagcgtaaatttttgtgacttctcttaaaaaacatcttataaagttgaatactcacgtactgtatgttccagtaatactacttttacgtttttacccaagaaaatctgttgcatgtgtctaacagtggtatgtacaagaatattcttagaatcaacattgataataacaaaaatcagaaaagaactcaaatgtacatcaacacactttgaatagcaaggccttatattatattgtctacttttgtatatgtttgacattttctgtaaaagagaaatcaagaatgaatgattgaaattaaaaggttcatgtgtgggaataggagaggttaaaaaggacgaggtgattgtkcaattaaagcaaaatggctattcttaatagtttatttacataagaatagaatttccattagacccttgaaacaggtccttactttaaacaagatgcaagtaatgtgctatagagagtaggatccctataagtt

SEQ ID NO: 822733 - DNA, 605 bp, Homo sapiens
caatatagaaataactttaacaattcccaataataattagctgacaaggctattaatcacagagcaaaaaccattctattaaccactcacaggagtattttacagattacataataggatcatttatttaactacatcaacaagtattgctaaataaaccaaaacagagaataaatttgtaaatatgtcttttttttttttttttgagatggagtctcactctgccgcccaggctggagtgcaatggaacaatctaggctcactacaacctttgcctcctgggttgaagcgattctcctgcctcagcaaccgaagtagctgggattacaggctcccgctaccacgcctggctaatttttgtattttcagtagagatggtggtttcgtcatgttggtcaggctggtctcgaactcccaacctcagatgaactatccacctcggcctctcaaagtgctgggattacaagtgtgagccaccgcacccaggtaatggcattttttaaacctttgcagttgagtagttgatagcttccaattaggtgggaatattcrtaagtatctagtaaaactaccaagatgaactttttaatctgtgagaatcctct

SEQ ID NO: 822734 - DNA, 599 bp, Homo sapiens
ataaactacaaaacaaacataaattttatctttaccacacccctgggtggtttcttgagcatgyttcttgagtgctatgttcttgagcattccatttttctttcccaggtttacagcaataaaacaacagaagttactaatgaaaagaggcccacaatgaaaaaaatgtagactcttaaaaaattaatagaatttcctttcttttagatctattttccacccaagacttggattgaattagtctttctctaggggaagaagtgtaaaacccattaccacagtcactccatgtctgaaagcctataaaaaattggatgcttcttggaatatattggaaggataatttgtgactcataaagaaataaaatatttaagcaatctgctatctgcacatcatgtatttgcctgcaattgcccataacaaactgtgtatatatatgcacatatgtgagtgcatatatataggtgtgtgtgtgtgtgtgtgtgtgtatacatatatatatcttacaacatgatccaaatgtttccattttaccttcctacatgactgaaaacaaaccatgctgttacaaatatttaaatatagaataaatattgca

SEQ ID NO: 822735 - DNA, 603 bp, Homo sapiens
cggcacaaaatttcatgcgcgtccgtgtaaagagaccaccaaacaggctttgtgtgagcaataaagcttttaatcacctgggtgcaggcaggctgagtctgaaaaaagtcagcgaagggagataaggatggggccgttttataggatttgggtaaataaaggaaaattacagtcaaagggggttgttctctggtgggcagagtgggggtcacaaagtgctcagtgggggagcttttgagccaggatgagccaggaaaaggacttttacaaggtaatgtcatcacttaaggcaaggaccagccattttcacttcttttgtggtggaatatcatcagttaaggcaaggaccagccatttatgcttcctttgtggtggaatgtcatcagttaaggtggggcagggcatattcacttcttttgtgattcttcagttacttcaggccatctgggcgtatatgtgcaagtcacaggggatgcgatggcttggcttgggctcagaggcctgacaatgtctaatgttggagagakgatggagtaacagaaatgctcacacactactgggggagtgtgaatttgtacaaccatgttggaagactatttagct

SEQ ID NO: 822736 - DNA, 603 bp, Homo sapiens
cggcacaaaatttcatgcgcgtccgtgtaaagagaccaccaaacaggctttgtgtgagcaataaagcttttaatcacctgggtgcaggcaggctgagtctgaaaaaagtcagcgaagggagataaggatggggccgttttataggatttgggtaaataaaggaaaattacagtcaaagggggttgttctctggtgggcagagtgggggtcacaaagtgctcagtgggggagcttttgagccaggatgagccaggaaaaggacttttacaaggtaatgtcatcacttaaggcaaggaccagccattttcacttcttttgtggtggaatatcatcagttaaggcaaggaccagccatttatgcttcctttgtggtggaatgtcatcagttaaggtggggcagggcatattcacttcttttgtgattcttcagttacttcaggccatctgggcgtatatgtgcaagtcacaggggatgcgatggcttggcttgggctcagaggcctgacaatgtctaatgttggagagaggatggagtaacagaaatgctcacayactactgggggagtgtgaatttgtacaaccatgttggaagactatttagct

SEQ ID NO: 822737 - DNA, 633 bp, Homo sapiens
gtccttctctggtgcccacaaaactgcaggcatctcatggagcagagcacaggctcagggccaggctatctaggtttgaatcctggacccagactttctcattgtgtgattttaagcaagtcacttaactactctgtatcatctgtaacttgggaataataagaatacccattcagcggaattgctatgaagatttagtaagttaatgcaatcaaaggcttaggacagcgccaggcgcacagtaagtgctctaaatgccactgttatgatttgtatctcctctacttgaatacatgtcaattggccccattgctctgtgaagttacttccccacttccttctttgatcttagtgaccaggtcactctccaactcaaaatccttcaatggctccccattgtttacccaataagatgagatcacattagcttgggcttcaaggcctgcctcttcctatatgtggattgcttcctccctcctttcctgcctgacccatccatacccacccttcaaggcccagtttccatgatatctcatacaaaaaaacyttctatgatcaccccctcagaaatccctgcttcctttttggagcccatacttctgtcctgcatggttccacctcactgtcctgcac

SEQ ID NO: 822738 - DNA, 530 bp, Homo sapiens
aaaaaagagataatctactaaagatgtgcaaagctgaatggggagaatgatacatctgtgaaatatattcaaaaagacaaaaataaaggagtacttaatatgctatgttgatttgtcagaaaattcaattttatagagatgtcaattcttccctaatctgtagagtcaaattaattttaacaaaaattgtaataggcttttattttattacttttaaaaattttgtaggtacatagtaagtatgtatatttatggggtacatgaaatgctttgatgcaggcttgcaatgtcaaataagcacatcatggaaaatggagtatccaccccctcaagaatttatcctttgagttacaaacaattcaatttcatccttaggttactttaggttacaccatacattaaaatcaatttcagttcaagcacatctttaaatatgaaaagcagagatataaagcacttagaagataatttgagagtatagctttatgaacttgaagwaagaaaaaatttatttaagaaaaaaaacacaa

SEQ ID NO: 822739 - DNA, 640 bp, Homo sapiens
aggcattaagaagtaaaagctaacacattcccaccaggtaataaaaagcaacaaatcaggcttgacataaaaatctcggaaatgaaccccaaattggtttatgatgtctgaagggattctaagaaatgctaargtacccctagttccaattgtttatctaacaccagcttattctttgctacaaacatgatccttgccccttttgtcggcaagacgttttcactgagtagtagtaaatgctaactttatacctacacatttggattgtgcgatgcagttgatctttgatggaaaaatatgaattttaaacaaaattagggagcttcgcaattatcaccagggccaaagagaattccagataaaatagaaatagaaagaagagaaaaagagatccttgggttgcattaaggaccgtctcttaattatttggatgcgtcggagggaaaatctggacacttaagcaaactcattcaataccaatagttaggtaccgattattggttataatttaataacttgaagaaaactgtagtattttttatccactacaaacattttaacattaggagcaaatgaaaaattttattttggctttctcccttaagtgttcaagggaatgttataaatatttaacagctgt

SEQ ID NO: 822740 - DNA, 513 bp, Homo sapiens
cagatgagctcagcctgcagaccacactttgagcagcactgcccaagcccacggaaattccacctttccttgttggatgcactatcagaaaagggaccagaaaaggtgaatttgatgagttaggaagaaaggcaataccggatgacaaccttgataccagagagactctccattcagtctgcctccagccggggaaggaggagagtgagttacagaagcagatacaaggagggaacacaaccccggccttccggacccagctccagtgccagagagtccgtgggctgtcaacctcccctcaccacctggactggtttatctgacgcttgatcgaagtgagcctgccttttacccccaggttaagaaggtcactgcaactcatttcttagacaccagagtgtgtcaaaaggctggtwggcttatcacgagaaaaccatcagacacagtgcaatagatggagaccctaccaaatccctgacctgtactccttaaaactgtcagtcatcaaaaaca

SEQ ID NO: 822741 - DNA, 449 bp, Homo sapiens
tcctgttctcataacagcgtctcccttcttcatcctttccctgctcygttcatgtcgtttgggtggggcatgtgagccaggactgggcagtgagaatccctgtgattggttcagggctgggcacctggccagaactggccatatggatttgctctggatcttctgcttgagaaaagaggctcactctgagctctgagtatgctgcactgatccagtggtgctgcgggggccaaccctgagtcagctgaaggaaaacatgcttgtatataaagccagaacagagaaaccagagctgagagaagataggctgattcctgatgtctgagcaacttgttccaggcagaaacaagctcctggatgagtcaaacctttttcccttttgcttaagctagtttgagttgggtttctggcatttacaaccactggtgctgacaaacacaaagaaagaa

SEQ ID NO: 822742 - DNA, 449 bp, Homo sapiens
tcctgttctcataacagcgtctcccttcttcatcctttccctgctccgttcatgtcgtttgggtggggcatgtgagccaggactgggcagtgagaatccctgtgattggttcagggctgggcacctggccagaaytggccatatggatttgctctggatcttctgcttgagaaaagaggctcactctgagctctgagtatgctgcactgatccagtggtgctgcgggggccaaccctgagtcagctgaaggaaaacatgcttgtatataaagccagaacagagaaaccagagctgagagaagataggctgattcctgatgtctgagcaacttgttccaggcagaaacaagctcctggatgagtcaaacctttttcccttttgcttaagctagtttgagttgggtttctggcatttacaaccactggtgctgacaaacacaaagaaagaa

SEQ ID NO: 822743 - DNA, 528 bp, Homo sapiens
atttgagtattagagtaaacgggaaaaacaaaaggatttacgttacaggaccaacatatcaaggatcagaaaagyactgccaaaagggtcacctacattgagtgacaaaaacattctttaaataaaatgcttaattttgtttagaaatcatattttataaaataagaaatatgaagatgttcaatttcaccaagttacatgaacatattcagatgaactaaaatgtagcttgatttctaggggctttataataagtttcttctattattttctataacctttcaaaatcaaaataatataaagaaaacatttacttttctttaaaactgacatcagaaaatgacttccaaacattgcttctaaactgctttataaaagagttaatttactgtttttgtatacaaagatgtggccaaatcgatgaacatatcagcattcaaatgtgacaaattaggagccacatgggcagctggtggctcccagtaagccagattcttgtaagaaggttagcagttaggaagcatttaa

SEQ ID NO: 822744 - DNA, 573 bp, Homo sapiens
cttaaaaaccctggtccctgagtactaaggaaggctgatttgagtaataataaagctccattcttctgcacacacacacacacacacacacacacacamaaaaaaaaaaaaaaaaaaaaaagaaaagaaaagagacttaatgggtgacttacctaaggtcataaagcagcacacaatttgaaactagcaagttcaaatacaatatgattgacttttagacctgggttcccactacactattctaccaccctaatttgcatacagtgtattattttattttcatggagtctgtgtggcatcttgagcactattttatagataaagaaatgaaagtccaaaaggttaagtaacttgataaaatccaaaacgaattgatggtttggtttgttttcctattttttgatttctactcacactatctgcttgggttagtaatgggaccctcacaaagtggctaaacatttttagtcacaggtaagtgaattctgtcaactcagtatcacacttctgctcatctcagttcaggatgataggatgatgcaaatttgccctcgtctgggtaagagggcacag

SEQ ID NO: 822745 - DNA, 522 bp, Homo sapiens
tttaattcctcttttgggaccagcaaaaaataactggtaacaatagagaatttacagtaaaaaggcatatgaccaaaaaaaaacaattgaacaaattatccttataggtacaattctttgattgattcttgattcttcaattgaaaaattgtccctgcagctcagatttctcaattgtaataaaacctgtgggacaaatgcaaatttaatcgttttagtggtttaattttgaggcaatttttatttcattttgatcaatagacatttatttcaagatacactgcagcctattattgtgaatacttcaaacctactctgatttcatccatctggtataataacattcagtctcctcttggtttcaaagatgttcaagtcagccataataaccgacttccattttgtgtcatctcttggcrtgcacacccaaaatattgaatgctattgagagtgatggcatacccaaaacactgaatgctaacaagatgaaatgaaaaatgcagtgcaaagccatgagaggag

SEQ ID NO: 822746 - DNA, 616 bp, Homo sapiens
gctgaaaggatggaagaaacaggccatttgtatcagggatggggcagtgtttgaccagtccattctgctgtgtggctgtagctgtgttcttactgcctggtcctccagtgccattagttccagctgrttttagttgcttaatgcctgttactccagcctcctgttgattttctgagcccttatgtttctccaacaaattcctttggcttaagacagctagagttggtgactaatatacagatgataaattcccataaaggaggctgttaaagtggtaagaaaataaaaactttgtccttcaatgactcagaaataatccctttggatttgttcatgcctcagccctgcattctgacctcagatctctgcccaataagcaatctctggctgcctgagataatgatcctatagtggccaccattaaggtggtaacttcaactcacctaagatatgaaatataagataggaagaactgaagatagagatgataaaatataaccaacacatagtattgatacttgtgtgtcaagtgtaatgatatttaataaatgcttgctagtaaaagctcgtgtcatgtcacagagaatttgttacattggagaaactgacatgtaag

SEQ ID NO: 822747 - DNA, 630 bp, Homo sapiens
tgaaaacagaaatggcaaaaagccctttatttcgacattaaagatttggaggtacagtttgctgtacagaagttttcacccctccataatttcaccagatatagagtgtgcatccctgacattgaaactgaaggctttatggtttcatcttctaagatagattcccaaagagagttggttcacctgagtcccagggggctgacagtggacagtttaaaacattgatgaatctttattactataaaagggttcgatttaggctagccaacatgtaggtctttttatgtcctagaacccagtgacttcccgtctgtctgtaatggcatgaaggcaggtgactgtagaagatcctctcgcactagcgcacacagaatgttttcttgcacccgggccctgcctggacacccctgcctgatggcctgcaccactgagcgaaaaaacctctccgtccccaccagggtgccttgagtcaactagtgctggcccctcacccccttctacttacccccaaccccggaggctgtcgacgcaggggggcagtgttctagaacataacacacctgcttccgaggactagcacactcccarcaacacggggattttaggccatgccacactgtttgctaccag

SEQ ID NO: 822748 - DNA, 608 bp, Homo sapiens
ctcttaggtgctttaaatttttatttcaaaaacagcgtatttacatttatgttgacagcttagttataagttaatgctcaaatacgtatttcaaatttatatggtagaaacttccagaatctctgaaattatcaacagaaacgtgccattttagtttatatgcagaccgtactatttttttctgcctgattgttaaatatgaaggtatttttagtaattaaatataacttattaggggatatgcctatgtttaacttttatgataatatttacaattttataatttgtttccaaaagacctaattgtgccttgtgataaggaaacttcttacttttaatgatgaggaaaattatacatttcattctatgacaaagaaactttactatcttctcactattctaaaacagaggtctgttttctttcctagtaagatatatttttatagaactagactacaatttaatttctggttgagaaaagccttctatttaagaaatttacaaagctatatgtctcaagattcacccttaaatttacttaaggaaaaaaataattgacactagtaagtttttttrtgtcaatcagcaaactgaaaaaaaaaaaaggg

SEQ ID NO: 822749 - DNA, 588 bp, Homo sapiens
accaaaccagcccaatctagttcaactttgtgtatcaaaatggtgaactgtttaattgccacggcccctgaagttgcaagttacgtcacttgagcatgcccaggtgaaccaagcatgtaaccacgggcagaacctaagcacttagaccaaggaacgggggccaaattaaggagtaaacacctgatggcataatccatgatccaatcagattgagccctggcatcaccttgtgacacaacccagtcagatgacacctcccagcatcaccccattgcaagatccaatcagatcacactttgttttctctgcctatgaaactgcctgagcccccacctcagggaggcggatttgagagtttcctcctgtctccttgccaggcaacttgcaataaagcctttcttttctcaaaacaagtggcatgatcttggactctatgtgggttggcagcacgcccactgcctgcttggtagcactattctcacgtcatcctccctgcaagaccacracacagtaataaaacaatttctattttataattaccaaagaaaagaaccatgattatgcttgccctaccgtcattaaatcaca

SEQ ID NO: 822750 - DNA, 534 bp, Homo sapiens
aaatttcttcccaacctagataaaaaccttctgtcactcccatgtttagagcatattctcactcatctgctgtttaagtgtttttataaggcctctactcacctctccaactatccctcacaggcctatcaccgttcaacatctaacacacgaacagttatttgaaaaaataaagtacactgcaataaaaaacacatatccatattgatatagaaatttctacaaaatatattaggaataaaggaagtttcagaaatatgtgcctctgtacggcacagtatggtctatgcaatgtggtaagtgacactagggtagtgaatgtcatcctggcatccctgacccccttctgagggtgtgtaaagtcaatactatctttataacaacactaacgtgtgattttcctttctcatctcgcattatcccctcagtatacaatgcagtggaattttccgaagcaaaacgacatgtgccaccccaatacactraatgcagaggcagatatgagaaggcaactgtcttctattaagccaggca

SEQ ID NO: 822751 - DNA, 551 bp, Homo sapiens
acgcggtgtggtgaccgtgtgtggttggcaaggctgtcagcagtacacacagtgcagcaaccaccgtktgtggtcagcaaggccatccacagtccacacagtgcaataaccgtgtgtggcgagcaaggctattgacactgtacgccgtgcagcgaccgtgtgtggtcagcaaggccatggagagtgcacacagtacagtgaccacctgtggtcggcatggccattaacagggcacacagcacggtgaccatgtgtgatcagcaaggccgtggatagtgcccgtggtgtggtatccatgtgtgatcggcaaggccatggatagtgcatgtggtgcggtgaccctgtgtgattggcaaggccatggatagtgaacgtggtgcggtgaccgtgtgtgatcggcaaggccatggatagtgcacgtgttgcggtgaccatgtgtgattggcatgaccatcgacagtgcttatggtgtggtgaccgtgtgtgatccgcaaggccatggatagtgagtgcacacggtgcggtgaccatgtgtgatcagcaaggccatg

SEQ ID NO: 822752 - DNA, 633 bp, Homo sapiens
gggccaggacgctgccaccaaggccgtgcccctgccagaaactaaatgtggctgccccatccctggccctttctgtcagtagggtcaggttcaaactcctgggtagtcagcccagctctcattgactcagtctgaacagctgcctgttccctagaatccacatgcgctgggacaatgggaagtatcggtagacgctatggtgggaagatgactctgtgtccaccaaggttcttgggctggggaatggtctgagcatatgacggcctcagaccccagccaaccaaagggaaaggtctcccctgtactcacgaagcctccacgatgtccatcagcactttcttcctccgttgcagtgtaggtcagcccttcgcagatgctcacaattccctgatacagccggttgccctttgttgtgttaaactgaaagaatttcagagttggggccaggcatggtggttcatgcctgtaatcccagcactttgggaggccgaggcgggcagatcacgaggmcaggagttcaagaccagcctggccaacatagtgaaaccccgtctctactaaaaatacaaaaattagctgggcatggtggcgtgttcctgtaattccagctactcgggaggctgaggcagaatt

SEQ ID NO: 822753 - DNA, 633 bp, Homo sapiens
gggccaggacgctgccaccaaggccgtgcccctgccagaaactaaatgtggctgccccatccctggccctttctgtcagtagggtcaggttcaaactcctgggtagtcagcccagctctcattgactcagtctgaacagctgcctgttccctagaatccacatgcgctgggacaatgggaagtatcggtagacgctatggtgggaagatgactctgtgtccaccaaggttcttgggctggggaatggtctgagcatatgacggcctcagaccccagccaaccaaagggaaaggtctcccctgtactcacgaagcctccacgatgtccatcagcactttcttcctccgttgcagtgtaggtcagcccttcgcagatgctcacaattccctgatacagccggttgccctttgttgtgttaaactgaaagaatttcagagttggggccaggcatggtggttcatgcctgtaatcccagcactttgggaggccgaggcgggcagatcacgaggccaggagttcaagaccagcctggccaacatagtgaaaccccgtctctactaaaaatacaaaaattagctgggcatrgtggcgtgttcctgtaattccagctactcgggaggctgaggcagaatt

SEQ ID NO: 822754 - DNA, 566 bp, Homo sapiens
ttaatggtttcatcaatatcctaaaggaagaagttgaataattaattgacactagaaaaacattaacaatgcaagactgagaaggactgatacaatcatctataggtctcgaaatactcagctatgtaaattttattttgtattgtgctatgttgtatatactgaactgtatagggaattttaagggtagttttgccatatgcaattttaaccttttatattggcttcttatgacctcaaattacacttctcaaccactgatgacaggcaaatttaatttattctccttataggacactgcttcttatatttcctatataagtgaaggtaggctgttacagtccatgaatgtgaaaatatcagtagcttaccacagtaagcaattattctcattcaaaaatgcctaaaatgggtttgcctagtaggtggttgactcttgttcaagttgtgactcagggatctgcgcctctttatattgtgaatgtggtctaccatcttcatctaagatctatgaatcttctgcaataaggargaaaagcaggaaaaaatcctacataagaaatttt

SEQ ID NO: 822755 - DNA, 482 bp, Homo sapiens
ttgcctgaaaagagtcaatatctaattaccattcggggtgaggagagatgggcaactttgaattgtggcaatacatgggaaataagttgaaaaacaarccctttgaaatgtgtctaactaccatcacaaccaatgcagataatgattttatccaagatttacaatttgtgctgtcaaaaagtgaatgccccaagaactttcagaaaagagctaagtatgtttatagaatctacattacaagaattatcacatatatcttggtctgtctataggagaacatacacaggcagggtttctatttataaaaacactctctgaattgcaacagaatgcaatgaaggctctttatgtgttgtacccagcaccctatccccaggatgtagctcagtgtctgaaactttatgagaactcaataaatatatgataacttaatggttaaatgaatttagctaaaaaaaaagtgactgcttttcatcatggtt

SEQ ID NO: 822756 - DNA, 707 bp, Homo sapiens
ttgaaattttcaactatcctgaaactaaagacccaaagtaagtgtttcatagtttctaactgctgtcgatttagaccaaggttcaacagccttggcactactgacaatttggattggataattctttgctgtgggaggctgtcctttgtgttataaaaatgtttagcagcatccctgtcctctgttctctagatgagagcagccacttccctcatgcccagttgtgagtaccaataatatctccagatatcacccctgagaggcaaaaatcactcccagttgagaacaactgatttagaggacagatttcaatattcattaacttaaatggattttttaaatcttaattacctttatatttgaacaaataaagtttcctgattaaagactgcattttccctaaatgggaatttgacaagatagtaataagaaataatttgaagaaaaaaaaaactcaaaaaaaaaagaatcccactttttgcatatttaactaaattctccagttagtgatgacttttaaacactttaatagtagattttcacttaagaaactagagaaaatttttactcataaattacagcaatcattaagatagcttgtttatatgcagatttccctttagtaatgaaatatttcataatctctttctaaatgaacacattctcaataaaaagttaataggatcckagctgaagatggtaatttg

SEQ ID NO: 822757 - DNA, 553 bp, Homo sapiens
aaagtctgtgagaaacaatttgcccctcactggtggcttcactccaggaagggtgaggtaatggcaggtgggaaagaggagcaggaggtggcagggaattcagaggacaggagtagcctctggaaacayggagagggacagggggcagtttggtgacagcttaggaaggccagagaaataactgcaggaaacagggcagggctcagacctcacgcctcacccagggccactgacttgttctgcgttgagtcctgtgtttactgagtctcctttcattgcactgaacatggtctttataaattctggtttgtgactccctctcagaagtcctgtgggtcacctggaactggttttattcctgcttatttcctcattcctcttctcattaaaacataatcgctatgcctctgatatgaagccactttcttttgctatctctcttccttcccattcttctcccctcccatcctacctcccaaatccctcagaacttctctaaaaccctatgccccacagtttaaacacttgtaaaaaccaaattccctagggggtt

SEQ ID NO: 822758 - DNA, 623 bp, Homo sapiens
gtttatgaaaattaagtcaaatgcattggagagagtaagagtaagttgctaatactacttttttttttaagtgtggacaaaactaaaaargtttggggggatgagcagaaaaatttagaatgatcctttacttgggtttgacttctgtcattaaatccttgctccttttttaaataaataaaactagaaatcatgcctaatacatcaatttatttgaagccctaaatcaattggcaatttgataaccccctcagtccccgcacctaagtgaagatttattggattgaatcgaataccacaggggtggactgctaggtttgttagtccccagtcagcactcaacttataccctgagtctaagaatattcatactcatctattttttttttttgagacagagtctcgctctgtcgcccaggctggagtgcagtggtgcaatctcggctcactgcaagctctgcctcctgggttcatgccattctcctgcctcagcctcccgagtagctgggactacaggcacctgccaccatgcctggccaattttttgtatttttagtaggggtggggttaacaccacatggaagccaccaaggcttatggcttgcaccctctgaagcagcagc

SEQ ID NO: 822759 - DNA, 543 bp, Homo sapiens
agaaataccagagactgggtaatctataaggaaaagagttttaattggctcatggttctgcaggctctacaggaagcaaagtggcttctgcttcyggggaggcctaaggaagctgccaatcatggcagaaggcaaagaagaagcaaggcacatcttacatggccagagcaggagtaagagagagcaggggggcggtgccacacgttctttaaacaaccatatctcttgagaactcactcaccatcatgagcacagcaccaaggggatggtgctaaaccattcatgagagtctgcccccgattcaaccacctcccatcaggccccacctccaacacttgggactacaatttgacatgagatttggtggggacacagattcaaaccatgtcattaactttctaccattttttttgtgtcatctataatcccaggttcatacccatacccatcttccctgcatactgttgttgaatattatatttattaatttaccattaatacatgtactatttacataatagcttattctcaaaatctgctatt

SEQ ID NO: 822760 - DNA, 538 bp, Homo sapiens
tcaagcctggaggggacgctggttctccagacatggtcccgcccactgcaagtgccaccttggtaagggatttctccgagcagaggcaaacgcgaatttgtggccttcttaatcaagatgaggtcttcgagccctgtctgccgcgccaggtcgcgttaccttcttatgctcctccgccacagccagaccacgaccctcctgcacgcaatcccaccgagactgcgccttttccccgcaccccagcaggtccctaagtaagatggcggcgaacgcacttccggcgtgtgtccttacgggtgcgtccgggcggctgcttgcaggtgccacccagcgggttccagcttgtttgctgcatagattacaacggtgatggcgggcaagcggtccggctggagccgggcggctctcctccagctccttctcggcgtgaacctggtggtgatgccgcccacccrggcccggagtctgcgcttcgttaccttggtaatgagagatgggctcaccaaagacttccctgaagctaaaagggcaaaggcca

SEQ ID NO: 822761 - DNA, 619 bp, Homo sapiens
atgtctaaaaccagatgcttttccttccacagctgctcttcttccaggcttccttgtttcagtcaatgccacgagtcacctagtggcacagtataacccttggggtcattctgcataccgtttctcatacccctcatccagcccactgccagatcagctcaacctttcaaatattaatatgtgctcttgcctccgcagtccaatctaccgtcagctcttgcctgaccgaatgaaaagcttcctagttctttctggttctattcttgtccctaccagtctttcaacacagcagagttaactttttttatttttttgagatggagttttgctcttgttgcccaggctggagtgcagtggcgcaatctcggctcactgcaacctccgcctcccgggtgtaagtgattctcctgcctcagcctcccgagtagctgggattacaggcatgcatcaccatgcccagctgattttgtattttcagtagagatgaggtttctccatgttggtcaggctggtctcaaactcccaacctcaggtgatccgccygccttagtctcccaaattgctgggattacaggcatgagccaccgcggccgactgagttaacttttaaaaaatgtaa

SEQ ID NO: 822762 - DNA, 561 bp, Homo sapiens
tgcgacccagctcatctcaggggrttcaggccaagacggacctctggggcagcacctcacatcaggccagtcagtcattgcttcctcctcggtgatgtttccccagctcgctacactgatgaggactccatcacaagccactgggaaagacaggctatgaagtttgaacatatgtgaaaatgtaccttcatctcatagaatccactgcaagcctcaagaatgatgttggagaaatctacgttttttagtgcaggaaggtgattgaaattatgtgatatgaaaaaataaatatatataaaacggtctatgtcagcatggagagtggaaagtacgcatcttcctcctctgcaacccaggatccaatctctggggccaacctgctccagctccatcctgcagggggaaatgtgagatccttcattactgaggttctaggttcctgggatatctcagaaaggcacatctccaaacacagaaaagttccctgccagtcacgttgaccacctcatgcagggtaactttgataagttttttcacacacacacacacaagtctgctttg

SEQ ID NO: 822763 - DNA, 574 bp, Homo sapiens
acaaaatctattatatatatttttttataacggagtcatgccctgtcgcccatgctggaacrcaatgacacaatcttggctcactgcaacctatgcctgccggattcaaatgattctcctgcctcagcctcctgagtagctgggattacaggcacccaccaccacacccagctaatttttgtatttttagtagtgacagggtttcaccatgttggccaggctggtctcgaactcctgacctcgtgatccacccacctcagtctcccaaagtgctgggattacaggcatgagccactgcacccgacccacaaatctattataaaaaattaaaattgataaaaaccaagtacctgctttaaacacctgtgacgctaatcatctccacgagagcagttactatcaccagtaaattgcatactatagtaaaaagtgatctcttgtggttttcacgtgtctttcattgtgtttagcacaacgctgtaaatcttgaataacaccatggcacccacacgtagtgcctatagtaatggtggaagtgctcccgagaagcaaagtcaagtcatgacattacaag

SEQ ID NO: 822764 - DNA, 574 bp, Homo sapiens
acaaaatctattatatatatttttttataacggagtcatgccctgtcgcccatgctggaacacaatgacacaatcttggctcactgcaacctatgcctsccggattcaaatgattctcctgcctcagcctcctgagtagctgggattacaggcacccaccaccacacccagctaatttttgtatttttagtagtgacagggtttcaccatgttggccaggctggtctcgaactcctgacctcgtgatccacccacctcagtctcccaaagtgctgggattacaggcatgagccactgcacccgacccacaaatctattataaaaaattaaaattgataaaaaccaagtacctgctttaaacacctgtgacgctaatcatctccacgagagcagttactatcaccagtaaattgcatactatagtaaaaagtgatctcttgtggttttcacgtgtctttcattgtgtttagcacaacgctgtaaatcttgaataacaccatggcacccacacgtagtgcctatagtaatggtggaagtgctcccgagaagcaaagtcaagtcatgacattacaag

SEQ ID NO: 822765 - DNA, 668 bp, Homo sapiens
ggccatttttgtgtttttcatgttctatgttctcttactaaataaatacattttatgtagttatagctgtaatgtaggcacagttccatactctgttttccatttaacattttatttcataatcattttttctatgtcattactgcagcttcaggctttgcagcccagagcgtgtgctccacctagtttttccatttctcttgaggaagcatcagatagagctgggtgaggtctgtcctttggggtcagtgggggcttcccactgcccctctggccgagtgcgtggtgggagcttaaagtatcataggggctgagagttgtggcaaaaagacccttgaagttgcatggaaagatcaactttaaaattatttttcccagcatagatcctgttggagtttgctgggattataacaccaatgaggctgatggacaaatggagaagagggaactcagaacttggagctactttgttaatcagcagacctgggccttgggaggatagtcctcaccatagggccgagaataaagcttgagttgccaggtgttctgtgcagcccaggacgggagcccatattgaggttcaagctaactcaggccaatagaagagtccagaacacctggcacatgtctagrgctgacaggatccctggaggcctgggaaccactct

SEQ ID NO: 822766 - DNA, 685 bp, Homo sapiens
tccttgaaaaaagaattccccaagtctctaatcatctctctagtcgtaatctccakaattgtgtcccttccagattccttcttggcacagcccagagactgatttgctccatgtggttaaaaaccttttattttatgccagttaggacttgttttcacggcttgccttcttgggccttaatgctacattggatgccattgatcttcacaggctccttttctatccccagtgagtgattgtagcccttgtttcatcttcttaatggaggggtcgactaaacctgtctgacgggattctaactacagggttccactagggtaccgcctctgcttcattttcttttctccatttagttgatcagttcaatataaaaccattatgaagagaattatttctgccataacattgcctcaaataaaaaatggggttcattggtcttaattcatccttagactattggttctgaaccttggacaattttacccccactcttgcccccaggggacacttagcaatgtctggagacattttcagttgtcacaacttgggggagaggctgctaccatcatgcagtaagtagaagcccagggatactgcttaacaccctgaaatgtatgggacggccccccaacaaagaatcatctggtcccagtgtcagtagcaaagaggctgagaaacctgctgt

SEQ ID NO: 822767 - DNA, 450 bp, Homo sapiens
aaaaatttgagttgcccttcatcctcaccagtacttgtttttatcagattctttcatttgttttttaaaaattttcgccattcttatagttgtgtggtggtatctcattgtggtttaatttatatwaccttaatgactaattgtattagtctatttttacattgctaaaaaacacatacccgagacttcataacttataaagaaaaagaggtttaatggactcacagtcccacatggctggggaggcctcacaatcatggtggaaggcaaaggaggagcaaaggcacttcttacatggcagcaggaaaagcgaatgagttaccagcagggaaaatgccagacgcttataaaaccatcaggtcttgtgagaactcactcattatcatgagaacagtatgggaggaaactgccccatgattcaattatctccacctggccgcacccttgaca

SEQ ID NO: 822768 - DNA, 611 bp, Homo sapiens
cagcttgggttgacagagcgagaccctgtctcaaaaaagaaaaaaaatmaaaaattaaaactgtgatgtaccttttaaaatagttttcccaaaatgctgtataatttagcctccctctgactgtcgataaggtctttggttcacctcatccttaatagcactggatgatatctttttcctcccgactttatgggagaaaaaaactcattttcattttgacatctattatttttctttctctttttttgaagatacaattcatgtatcatgaaattcaccattttaaagtgttcaattcaatggttttcagtatattcacaaagttgtgtaataaccatcaccactatctaattccggaactcttttataggtcccaaaggaaatcccatactcattagcagtcactgcccatttccctctccttcagccctggcaaccactaagctgctttctgtttctatggatttgcctaccctaggcatctcatataaatggaatcatataacacctggccttttctgtctttttccactgagcataatgtttccaagcttcatccatgttgtagcacgtatcagtaattcatttctgtttattgccaaataacattt

SEQ ID NO: 822769 - DNA, 613 bp, Homo sapiens
tctctagttctttcatggaaaagtaatggtcatgttttgttagaagaaaagttgattttgaagaaactaaggcagtagaaaccatgtgcatgttccatttctttgaaaattccataaacgtgcattaacttattcagttcagagctcagagattaaacttttctctaacattgggatataaatttattctgatataaactctcaacattacctttctgagataattctgaggttgttcagtaacatcaattttactaacttttttcctcagttaaaactttataactgtattcattttgtctctctctctctctctcttttttttttttttttttttttcaaaaaaaaagagatggggccttgctatgttgtccaagctgtcctcgaactcatgggctcaagcaatcctcatgtggcttatctcacagttttaaaaaccaaagtattcaatatagacatgtagtctccctgtttatcactaraattttctttttcaattctgaaagcaatttccctccacagtctatgtctcacatcctaaaagagatcatgtaaattatcatttaactagtttccccacaaattttatagtcagcaaaatacatcattgaaa
